United States Patent Application Publication US 2005/0228172 A9 - sequence listing, part 46

SEQ ID NO: 180260 - DNA, 551 bp, Homo sapiens
gttcactacctttcctatccatgaaaagtaattaggttttattgccttaaacattctttccttcagtgtatcattactacagctaaaatatattcaaccaaacccacacaatgattaaaagcaaacactttttcctgatgtaagcagacaaattagtccaaaacactttgatctagattgaggtgggaagcacaaagcatatttttataatctcagtcaacactagaaaaccccacagtaagtatttcattgtattttgaataacttctggtggcaaagtttccttagttgtcatgacaatattaacaatctttataatatggaagcaattagagtaccttggagattaaaaggaaaaaaataaagaaatgaaaacttctagaaaacagtgttgatttaggataattagggagaaacatggactratacctttttatcagttttaggtataacattttttgaaaattcttccatctacactatcattgattaggaaagcaatgtggttcaaaatgacagtgtgtgattgaagaaaaatatgaaaaagggca

SEQ ID NO: 180261 - DNA, 540 bp, Homo sapiens
ttcagcaagcccaagttttatcacatgagattcttacctgggagacaaaacacggtgatccatgaatggaccacgytggtctgcatttggccgaaaatacacccttaaaattgtcaataagtagattggacagagagcaggggctgggttcagaaagtgagaaacttccggggagagaatgcaggcgaggacccagaaggcagagtgggaagaacaccaaagcctcatgaatcctacttcataattttgcctgaggctggtgaaatatgcacatgttgagctatcaacagatataaagggataatgtaataaaacctggtcaaaaaataaagtaaggtaacatggaaggacttctggtctcctatcttttctaataaccttgcaaaagacatgtgacagcaaataagagtttacagctgtatggcttcccatagagattaaaggctaggcttggcaatactctgcagtacttagcagcatgtgtgaaattactcgtggaaatgcttctcattctgtgcattttatttatttttttaacca

SEQ ID NO: 180262 - DNA, 551 bp, Homo sapiens
ctggtaggccattgtggaaaacagtatgaagttcttaaaaacttaaaaatagaactaccacattatccagcaatcccactcctgtgtatatatccaaagcaacttctctttttcagaaaattaatttggatgatcttgatcacttatttactttactgaaataagatttttactatcacttatgaaaaagctgtatgttttcctattgttactaacatatgagtctttaggtctccaaaagctgacaatagccattccaagagatgtgaggtgwtatctcattagatagctgcactcccattttcattgcagaattattcacaatagccaagatatggaataaacctaagtgtccatcaacagataaatgaataaagaaaatgtggtatatataaacaatggaatactattcagcttttaaaaaggaaggaaatcctatcatgtacaacaacttagatgaacctgaggaacattatgttaagtgacataagccagactcaggaagacaaatacctcatgatctcacttatactggtatgtggaatctaaag

SEQ ID NO: 180263 - DNA, 604 bp, Homo sapiens
atccttttctccactcaacctattgtgagaatcagtctgtcaaagccctgagcatccttacacattctttctgggtatgctaagaatgcaaggccctgaccattatttacttgtgtcctctcagggttgtgtttgcagggagcagccttgagcaacagagtaatgtcttctcccaaacaatgagcagactgacttaccacacactgtaaagcagtaaattcctcaagctcaatattcctttgctgtgacaaatccactgtgtatgttgcatccacctggaccctttccctcagaccctgtgggatctgggggacatgagaaactagcacygacatcaggctcaacatcttcctgtctctttaacatcttcctttgtctctaatcagggtgtcttgtgttttccactgacatccacgaaacagtagtgacccctcgaccttttacagatcttgaaattacccacctacctcagagactcttcatattgttggcatagcctttacctctctgtgcctttcttcccatgaaaggaagctgcaagagaggatgagtcaagtagcataatacactgctgagagagacataagaaggtaagggaaggaga

SEQ ID NO: 180264 - DNA, 577 bp, Homo sapiens
tatcactttaaaggttataatgttaacttaggttttcggtagaaaatacagatgaataaagggaaacattcagaatatccataatactaccaactagagatacctgctgttgaaatattggagtgtttccctctagctcttccttattttgatctaaaatctgattcctgtgtcttttcctggcaaagtgtcacagaacaaagctcagcgkgggccttttctctgacagcttaggacaatggcaacaattctccactggctgatgcaggacaaccggcctttcccactaaccctgtggctcccgctcctcacaggagcaaagtttgggcagagatgacagggaagaaaacccaggcccactgggtgacgatgacaatgctgacattgagctgggggctgtttttctagtcatcaggatagctttacaatgagccattctgtttcttttgcttgatactgcttgtcaccaataagtaaacattttaagaagtctgtgaccaccaaacagaatgtttttcagtgggcaaagtagattggctcatggccaattatttcctcaccctcactcagtttcatt

SEQ ID NO: 180265 - DNA, 577 bp, Homo sapiens
tatcactttaaaggttataatgttaacttaggttttcggtagaaaatacagatgaataaagggaaacattcagaatatccataatactaccaactagagatacctgctgttgaaatattggagtgtttccctctagctcttccttattttgatctaaaatctgattcctgtgtcttttcctggcaaagtgtcacagaacaaagctcagcgggggccttttctctgacagcttaggacaatggcaacaattctccactggctgatgcaggacaaccggcctttcccactaaccctgtggctcccgctcctcacaggagcaaagtttgggcagagatgacagggaagaaaacccaggcccactgggtgaygatgacaatgctgacattgagctgggggctgtttttctagtcatcaggatagctttacaatgagccattctgtttcttttgcttgatactgcttgtcaccaataagtaaacattttaagaagtctgtgaccaccaaacagaatgtttttcagtgggcaaagtagattggctcatggccaattatttcctcaccctcactcagtttcatt

SEQ ID NO: 180266 - DNA, 565 bp, Homo sapiens
atatcctctatgtacagtataattagggctaataatatgtctaaatgtgcacttatcagagatgagaaaattatttgtgatgtaggatcatcactttcatttttctacaagcctttgtttgctgtcactacaattggcctaatttgggggaagaggaggtctatttccagccrgactaggcctttctatggattctctttgactctgattttcatatgccacacaatactcaaataggaaaggcttaacaactctgtactctaaagcttcaaagacacttagaacatccaaacattttacatggagaaaggtaaaaagatttgcccgaggtctcaaggagacctagactagaagccccagttctctggttccacgtctaaagctttttcatcacaaaaccaagccttagattgcatgctatctaaatacagaatgatgtgtgtgtgtgtgcatgtgtgtgtgtgtgactccacttatatcaagttcaataacagggaataagctgtatctttagagaagcatacttacatgtaaagcataaaggaaagcaacaaagcactaagca

SEQ ID NO: 180267 - DNA, 579 bp, Homo sapiens
tggtgttattttttaataatagaatctcaatacttgaaatgggttggacccagatgaaaccgacaatcttaaacackccaactctctctcttatcagtggaagtaggttgccctccagtgtctaaagagactagccttgcttgaaaaccttgactatgaggatgccactatctagatgggctccctgatttcaatggggatgacacgatctcagaatagcagaaaccaggcagcacataaccaacaaagacaaggtgggcgcacatgtaccttaaagggcagcaggaaatcagactgccttggcttacggagctgctctgagaacaaaatagataggcagttgaaatagattattgcttgatatttataacaggtaaaaagatctaagtcaggtagccaaaacctgacttgagtcaccacagtggatagtcacagtctctcagttctcagacctaagtcaattcacagacccatagtcccttggttgaaagagaatctgtgttccctttaagaaggatcttgcaccttggctacagtacacatggcaaattctttcaagctttccccaaaacgacatgt

SEQ ID NO: 180268 - DNA, 579 bp, Homo sapiens
tggtgttattttttaataatagaatctcaatacttgaaatgggttggacccagatgaaaccgacaatcttaaacactccaactctytctcttatcagtggaagtaggttgccctccagtgtctaaagagactagccttgcttgaaaaccttgactatgaggatgccactatctagatgggctccctgatttcaatggggatgacacgatctcagaatagcagaaaccaggcagcacataaccaacaaagacaaggtgggcgcacatgtaccttaaagggcagcaggaaatcagactgccttggcttacggagctgctctgagaacaaaatagataggcagttgaaatagattattgcttgatatttataacaggtaaaaagatctaagtcaggtagccaaaacctgacttgagtcaccacagtggatagtcacagtctctcagttctcagacctaagtcaattcacagacccatagtcccttggttgaaagagaatctgtgttccctttaagaaggatcttgcaccttggctacagtacacatggcaaattctttcaagctttccccaaaacgacatgt

SEQ ID NO: 180269 - DNA, 356 bp, Homo sapiens
ataatagaaaaccatgatactccaggcacaagttagtactaaaaaarttatgttgaatattctctaatacaacatgctttttcccttcatgaacaatttgtgttttactgagaagagtcattgtttatggtagactacagatgaatatgtactttaaacactcttagttgctttcttaattttatatctgctgctttatgcttctgtttattttcattctttccaatgtccacattctagtaaatttgaatattttaatccaagtttatatactatttaatattgcttgtatagtttagtatttttaagactcaaaaaggtttacagaaagaagaaaaagatcaacatgttattaa

SEQ ID NO: 180270 - DNA, 575 bp, Homo sapiens
ccacggctaggcctttggggccctgtgaggctcaaagatgtcaaggcagcataggaaattttagatcttaaaattcagcgaagaccctctccagctctggtamattattttgcttgaagtctacttcatgagatattaatatattcactcctgcttccttaaaaaattaatgatttcacaggatatctttctccattcttttactttcaacctacttaggtccttaagtgagtttgaagtttcttatgaacagtatttagttgggccatgtgtttattataggctctccatcaatctgtcttttggtttatttagaccatttacatttaaggtgcttattgttacataattgcttatgtctgatgtttttattatttgcttttttgtttcctttttctttccctccatcttgatctatttctgtataatgttgttgcgtgtatctctttgtatagtcttaaagtgtttgctctggatgttacaatatgtgtattgtaatatagtagtctactggtaccagtatttaccacttcaaagtgtggaaacctgccttgcatttatgtctctttaccttt

SEQ ID NO: 180271 - DNA, 577 bp, Homo sapiens
atataggtttgcaataattaggtcagagtggagttttaaggtcacggaggggtctgatgacttacaaataatgggctctgattgggcaacyactcatctgagttccttccatttgacctaattaagcttgtgaaatttacactaagccatgagctcatctttaaaaagttttattaaaagattttcagctgttccaaatgggacttattagtggaatgtgttttaaaggatcatatcagatgaatgaaaggtatttgatccttcgtttccttaataataaaatgatggtttggaaaaataggctacagtctaaccacagtgctattattaggctttcttgttaaacataggtctaagcctaagtatgtcaatacaacaaatacttactgtttcatttctagtaatgaaaaaaaaaacaagtctttctggcataaggatgattttcatctggttattttgaaacatttttgtaaaataaatttacatctataaagaacatttttatttgtaaggaggggtatgtctctgtgcactggaagagagggaggactaaatcactgggaagtcttatgataaa

SEQ ID NO: 180272 - DNA, 622 bp, Homo sapiens
agggccctctgtgactttatgggaaagcctgagtgtgcactagaagccaggatgcctgcctcagggctcatcctcccgtctacactgcttctgccctgacatacaggtgagatgaaaaaggaaagacctctgcttttgtttcagaatggttcaggctgttgggtaagtaacctcttaggaaatgacgctgtcacaacgctcagcaaaactgagttagggtaaatctgcgaatagttaccaacccttgattagatgcaacaggaactggccacaggtaatgcttcctsagtcccgctgcagagttctggcatcctgtataagctatttgtaaaattattttctgtagtaggtccctactacctaatactcagtatttgtggtcttgtagagtatttacggattcctctttctcagtaattactatttaaaaatttgtttaaaaatttctctctctctctttctctctctgctgtggtttgtttggccccgccaagtcccacactgcaatatgatatccagtgtcagaagtggggcctaccgggaggtgttccagtcatgggggcagatccctcatcagtggcctgataccacctcaagggagggagtgagtctaactcttagc

SEQ ID NO: 180273 - DNA, 622 bp, Homo sapiens
agggccctctgtgactttatgggaaagcctgagtgtgcactagaagccaggatgcctgcctcagggctcatcctcccgtctacactgcttctgccctgacatacaggtgagatgaaaaaggaaagacctctgcttttgtttcagaatggttcaggctgttgggtaagtaacctcttaggaaatgacgctgtcacaacgctcagcaaaactgagttagggtaaatctgcgaatagttaccaacccttgattagatgcaacaggaactggccacaggtaatgcttcctgagtcccgctgcagagttctggcatcctgtataagctatttgtaaaattattttctgtagtaggtccctactacctaatactcagtatttgtggtcttgtagagtatttacggattcctctttctcagtaattactatttaaaaatttgtttaaaaatttctctctctctctttctctctctgctgtggtttgtttggccccgccaagtcccacactgcaatatgatatccagtgtcagaagtggggcctaccgggaggtgttccagtcatgggggcagatccctcatcartggcctgataccacctcaagggagggagtgagtctaactcttagc

SEQ ID NO: 180274 - DNA, 400 bp, Homo sapiens
agatctgagaaatatttgatctgttgtccaggaagaaaaggagaggaggaacattcttctatcatttcactcttacctgtatatgaagaatatacttacctcccccgaaggaggacaatctgaagtcccttctagttagtgcattcagctcaaagccmaagacattcaagaaatgtgtcatcttctccaatacgtgaatgtttgaattctcctgaaataaaatcccatgaactgaagaaatatcctgtctttaccaccactcccatatacacctacatgtgagggtgcatgcatgcacatgaacacacacacatctaatatacaaaatgaatcaaggacagaagtagctataataggaatctgattagtaagggtaggaatggaaggcaagcaacagtaa

SEQ ID NO: 180275 - DNA, 619 bp, Homo sapiens
tgcggcacgttcactttgctcaagaaagcactgtgcttaggaaagcaggctgctttcagtatcctttagaatagaatggttcccactggaagatggttaaattaacaacatagttgtaaagtgatgcaggaatgagcctgctatgcagtcagagggaacagtctatgcaggaccactctcattgctgatactaattgcaagctggggggtttccaggactacccagagattggacaattttctagaagaacccacggaacttgtgacagccgytatcgctgtgattagggattgctacatggggagaatacagatgcactttggcaaagagaagagcccaggaaaaccgccagacatggagcccctgttgtcctctctctgtggagtcatggctggtgctgctctcctacaaccacatgtcacaatggccaaagagaattatctattgccgaagctcaactgagcctttgatgttcagagttctccactggggctcaatcacgtcctgcctgcacagctgacctttagtctccagccttccgaaggtgaggctgacacttttattctccagtccctctggaggtagcactgacatcacagggctctaagttcccatcat

SEQ ID NO: 180276 - DNA, 700 bp, Homo sapiens
atttttttttctctttccttcattccaaatgaagtaaattagtctggtgacccctagattttaccacttatgaaacaatggggccaacccattggtaagagtaaaagaaaacaccaaactattcaaacctgagggcagtttcctcccacaacaaagttattcttaaatagcattccttcatttactttttgcagaaccacttttggacacattgttctgtcctttaatcatgccaaatcaatcaaccaattctttagcttttctatttctgggcattccttcagtctgctatcaccagaaacatatccttcaaatctaataaaataaacctaacactctttttaaacaacaaaaaaaatagcttccaacttgtctgtacaatgtcccagtgaggtcagcacaaatggcatcatccttgtcattttagcagtgggcagaccaagcacagagaccaagcggctttgcccaaggccataagacaagtcagtaccagagctggaattagataggaggaaccctggccctttgccctggattcagacactggttcwtgttaaccttagaattctttttccttagttttatgccctccaaaagattagcggatagggaaacaatgcagctattaaagacaggatctcttcccttactcttaaatccagcacaattaagttgacttaagctgcaatgaaaggagatg

SEQ ID NO: 180277 - DNA, 441 bp, Homo sapiens
gtaacttgatgttttcaaggatttcagccactgaaacttggtttgttcatcttgtcaagggaagcggggagaggtagtagtaagaaacaaaaggatggaggacgcccttctacccctatgttcagcaactgcagagcaatatctcaaaatgtcatgagagctaaagcaaagtgttatgaatacagcagtgtttactaagaaaatgagtctttttttttttctcactgtgtatgcrgcctgactgagtcaagtatttcacagtgctgcatggtgatataaactatttcctcactaagaacaccagcttcccctagggtaaaagcctacaaagccaaatttcttataaagagttgtaaaaaaatagtcaaagaacaaatttatgaggtcacctccccttccctctatcaacaaagaaagaaatctgcccagaatgttccctgg

SEQ ID NO: 180278 - DNA, 460 bp, Homo sapiens
aagtcttatagaagaatgcccatattagctttgttaatactatttataataacacaaacacccctggaaattgtctagatgttcatttaaagagtttggatgaacatattatagagtgtcctttcaatggaagactgctcaaacaaacaaaaaagaagtactgatgaacacaacatgatgaatgatgcttaaagacataatgccaagtaaaataagtcagacagaaaaaagtatatagtatgttatttcttttatacgaagttctaaaccatgacaaacatctattataatagaaatcagatcagtgcttgtttctggtggtgggataatttactgggaagaggtayaaggaaactctttagagtaatggaaatgtttttctggttttttttcttgctagagatgacagatatctgagtgcatgtatttgtcaaaactgatctaactatacacttaatga

SEQ ID NO: 180279 - DNA, 557 bp, Homo sapiens
aacttacgaatgccctctactctgtatggtttttatatttttctgaaaatcttgatttgaacagtgcttaactaagagcatgtctatactatgtggcaattgtcatttttttatttgaatggggcattatgattattcaaaggaaagacagatttgaatggcatcacggargaggaaatgtgataagtagctagaacaatatgttagccatatagatatacaacagtccccactttctctaaggaatggcagtgttgacaaatactaagccatgccctttccatgatgtacatgtcaataatttctgcttgactgagactaattaaagcagaaataataacttggataaatacagaaacatggaatttaaaacaactggtaccacacaaaagactccatctctccttttttgttctccccagaatcacaataccaaatattgacaagtctagttctggtcaatgaaatattcttatagtgtgatttctgagagaaatattgggcctgcaatatatcatctaaattatgtcaagttgcttttagaactgcctttatcc

SEQ ID NO: 180280 - DNA, 537 bp, Homo sapiens
ttattaatcaaaactggctatagactttgtaaaatcatatccaggtctgacaaagagaattgtaaaaaataatcatgaaatacaaatttggaaagagcaataagaaagcaaacaagttgttgaactgttagagcaatctggagatgaactctgggaagaacttggtgtccccattayctggaagacttgggcttggtaatgaggtaagcaggctgctgcaagctgaaatctgaaaagtccatgtgctcctctccaccctttggctactagggccagctaaaatgacaagtcctccaccctcccttccactgagatgctaactcttacctcagaattataaacctggggccctggcttcatattggctatgtttcctggaagaaaatgacagtcagttgcttctatttggagcttaagagcacactgaaaacattcagattgtgttgttattgaggaagatggttgtgcagtggacagggagagaaatgaaaagagaaagaagaaaaacagctttgcaccatcctaatgcatatctaa

SEQ ID NO: 180281 - DNA, 633 bp, Homo sapiens
taaaatagattttttaaaatgtcgatatgattaggcggtgagaattggcaaaattgaaccagtagaaaatctgaatgaatgaatgaatctgaataaactgatttttatttcctaggaataacaagttttaagtatctattatgtgccagactttattctaagtgttttatatataacacatttactttagtgatggttaagktaggacaggtggctaaaaaaggactccctaatatattctattaatgcaatgaagcctctaggagtccttaatctttgccaaggatcacaagctcacatgcctccagaatctgggccactcacataaataaatgaacagagctgagtatgaaacaataggaaagaaaggagactgtgtagaacaggagagttcaggctccaactggtcattgccttgctggaatgctatgttgtacctaaattgtgacattttattcaacaaaatccagaaatcttcatgtaaatgtggtattcccctcttgtttctaaaacactggacaggctaaacaaaatgcatctgagagatacatgtgcctcccttgcccctactcatggcctttgcatttgtatacatcacacactcctgtcctgttaaaggcaacctcctattat

SEQ ID NO: 180282 - DNA, 534 bp, Homo sapiens
tttaattggacttacagttctacatggctgaggaggcctcacaatcatagcggaaggcaaggaggagcaagtcacatcttacatggatggcagcaggcaaagagagagcttgtgcaggggaactctcctttttaaaactatcagatctcatgagacttattcactatcacgagaacagcacgggaaaaacttgccccatgattcaattacttcccactgggtccctcccacaacatgtgaaaattcaagatgagatctgggtggggatacagccaamccatatcacgtgttatcctagttgttgccatagtcagtaagcaactgttctcactcagggctgttaatatataaaaggtgatattagatagatagtatttttctacacttgttctctctatacttctggcagaattacctttgtggggtccagtgtaaaatgaatatagggtcatcttgttcaaaaattattatgaatttgaagagcactaaaccaagtatgaggtccttctaagcaaggaaccttttgtaactgca

SEQ ID NO: 180283 - DNA, 566 bp, Homo sapiens
ggccactagacaaaacataacaaagatagctcagagctaaaaataaggagatttaggtttttctacagtgtcttcatagccagaactaaagtacaggatgtgtcattactcccagaggagcttacagtctaatcttctcattgtgtagggaccgaataaagcaaactcctttggctgcctcaaatactggccaggtcagtgataggctctccagaaataaattgtagtcaaagtgagccacaccaatctgagtatgttttctcatctgtgaattcatctggtcctaaattgaactgratcaatgaatttataaatcatgtcttacatttctttactgtttccatgtgatggataatttttttatgttacattgattggactagagggttcccaggtatttgattaaagatttttcttggtgtgtctatgatggtgtttctgagctgggaaataggttttctcctgccttcggacttggactcagactgaaaccattggctcttctgttttgcaggccttcagactcagactggaactgcaccgttggctctcctgggtgggtctcc

SEQ ID NO: 180284 - DNA, 566 bp, Homo sapiens
ggccactagacaaaacataacaaagatagctcagagctaaaaataaggagatttaggtttttctacagtgtcttcatagccagaactaaagtacaggatgtgtcattactcccagaggagcttacagtctaatcttctcattgtgtagggaccgaataaagcaaactcctttggctgcctcaaatactggccaggtcagtgataggctctccagaaataaattgtagtcaaagtgagccacaccaatctgagtatgttttctcatctgtgaattcatctggtcctaaattgaactgaatcaatgaatttataaatcatgtcttacatttctttactgtttccatgtgatggataatttttttatgttacattgattggactagagggttcccaggtatttgattaaagatttttcttggtgtgtctatgatggtgtttctgagctgggaaataggttttctcctgccttcggacttggactcagactgaaaccattggctcttctgttttgcaggccttcagactcagaytggaactgcaccgttggctctcctgggtgggtctcc

SEQ ID NO: 180285 - DNA, 524 bp, Homo sapiens
ttctgtagtctcagctcagccccttgcatgtttctttcatagcaaccatcccagtttgtagttattttatttgtatagctactttgctctgtctctccaattaaactgtaaacactgtatggggagggatcttgtctgatattcccactcttatatatctcgcacctagcccagtgcctggcagtagtaaatgctcaacagtkttaaatatatgaatgaattggcttgttctggaattcagtttttgagaaaggaagtcaagaattatggctattttaatgtacagcacaaactagaaggctttgaaaactggaatcattatgaactaaaatctaaatttaaaattattggaggcatgcatctagattataattatagaggacatacatcaaaatgatattatacatatatctctggataacaattttttttaaaaaagaaggctcaaaataaaagcttggagtagagatgcctaagggaagagaggggaagaccatgatacagactttgagagtttactataa

SEQ ID NO: 180286 - DNA, 631 bp, Homo sapiens
tctcagctgctgagcctggaaatccatactggaattggtgctgaagccatacttgccataggctgctgccaaccaatgactgagcccagcagggatcccgaggatggctcattccagcgggggaggactcctctggtggacagcttgagctgagtaattccctagctgtgttgctgaacttccttgaccctgcactgccatttaagattctcccacccaacttgccttcttccttctgtccttcacaagggtcagacctacataaagatatgataactctcatagcctctcctggctcccttcccatgttccctcacaggggtttgccttaataaaatacttgcatatttaaccctctcatgatacctgcttytcagaggacccagactaacatactgtgaccaggcagagagcagggctgaagcaagtaaccttcctttttcaataggcagtgcacctttgatagctaatggtgatgatcaaagaatctcagaaccataaagacacccacagagatatggtttactcatcctggtgatcttcagatggtaaacacttaaagagtgcacaacacatgtctactgccttgttaacacatctcagatttgtctcatgttcttaagtggatgaa

SEQ ID NO: 180287 - DNA, 631 bp, Homo sapiens
tctcagctgctgagcctggaaatccatactggaattggtgctgaagccatacttgccataggctgctgccaaccaatgactgagcccagcagggatcccgaggatggctcattccagcgggggaggactcctctggtggacagcttgagctgagtaattccctagctgtgttgctgaacttccttgaccctgcactgccatttaagattctcccacccaacttgccttcttccttctgtccttcacaagggtcagacctacataaagatatgataactctcatagcctctcctggctcccttcccatgttccctcacaggggtttgccttaataaaatacttgcatatttaaccctctcatgatacctgcttctcagaggacccagactaacatactgtgaccaggcagagagcagggctgaagcaagtaaccttcctttttcaataggcagtgcacctttgatagctaatggtgatgatcaaagaatctcagaaccataaagacacccacagagatatggtttactcatcctggtgrtcttcagatggtaaacacttaaagagtgcacaacacatgtctactgccttgttaacacatctcagatttgtctcatgttcttaagtggatgaa

SEQ ID NO: 180288 - DNA, 401 bp, Homo sapiens
gaattcatcttgtcaactcagaatcctttagtatctgtgtccagaggaggatttgcctccactctaagggctttgggtttgtctgggaagggcttatttttcacttgctttcttaggtaggaaatcagggtgggagatctcagtcagcatcaatgccttccttcctgtggatctggatgtcttttaatgcactcatgagcctagtgtgaagcctggccacagagatcctgagaattgtactcaagagagtttgagcttcagatgtcatgggtgctccctgttctagagataatggtgtaaagtgacacasacacagcatgtgctggctggaggacagataaaaataacaaatagtcttaattgagtacagtgattcaattttgcaagacaggcagcagcta

SEQ ID NO: 180289 - DNA, 401 bp, Homo sapiens
gaattcatcttgtcaactcagaatcctttagtatctgtgtccagaggaggatttgcctccactctaagggctttgggtttgtctgggaagggcttatttttcacttgctttcttaggtaggaaatcagggtgggagatctcagtcagcatcaatgccttccttcctgtggatctggatgtcttttaatgcactcatgagcctagtgtgaagcctggccacagagatcctgagaattgtactcaagagagtttgagcttcagatgtcatgggtgctccctgttctagagataatggtgtaaagtgacacagacacagcatgtgctggctggaggacasataaaaataacaaatagtcttaattgagtacagtgattcaattttgcaagacaggcagcagcta

SEQ ID NO: 180290 - DNA, 525 bp, Homo sapiens
cagataaaaataacaaatagtcttaattgagtacagtgattcaattttgcaagacaggcagcagctaaagagatctattggcactttataggtaatgttgagcgataaaataatagtgatgattatgcagaggasgaagagtagcaaaaattgcagtctctgtgtcttgcacagtacttagcccataattaatataaattatgtatcttagccgacagtacttagatgcataattaatattacggaatcggataaactgaactgatgactatgacccataatccataatcatgacccatgaccatgacagggatggtgcaagattagtgtgaattctgtttcagtaggtgaggactagcacagactggagataaaactgtggtttggcattcttccatttttaccttgctcattttttaaggcaggcagtttgtacctcattgattttcactgctcatcaagtcctattagcctattcattagtgatggcttcattcccttcccacagtctgtctcctgaatgac

SEQ ID NO: 180291 - DNA, 373 bp, Homo sapiens
aagagatctaaatgcaaacttaagaaggggcaatttttttttttttttttttttttgagacgcagcctcactctgtygcccgggctggagtgcagtggcgtgatcttggctcactgaaacctctgcctcctggattcaagcgattctcctgcctcagcctcccaagtggctgggattacaggcatgagccaccatgcccggcctagagtcatcatggaaattaaacaacctgcttccaaatgacttttgggtaaagactgaatttaaggcagaaataaaaaaattatttgaaactaatgaaaacaaacatacaacatcccagaatctctgggacacagctagaacagtgctcaaaggaagtttctagtgctat

SEQ ID NO: 180292 - DNA, 373 bp, Homo sapiens
aagagatctaaatgcaaacttaagaaggggcaatttttttttttttttttttttttgagacgcagcctcactctgtcgcccgggctggagtgcagtggcgtgatcttggctcactgaaacctctgcctcctggaktcaagcgattctcctgcctcagcctcccaagtggctgggattacaggcatgagccaccatgcccggcctagagtcatcatggaaattaaacaacctgcttccaaatgacttttgggtaaagactgaatttaaggcagaaataaaaaaattatttgaaactaatgaaaacaaacatacaacatcccagaatctctgggacacagctagaacagtgctcaaaggaagtttctagtgctat

SEQ ID NO: 180293 - DNA, 346 bp, Homo sapiens
gcaaacttaagaaggggcaatttttttttttttttttttttttgagacgcagcctcactctgtcgcccgggctggagtgcagtggcgtgatcttggctcactgaaacctctgcctcctggattcaagcgattctcctgcctcagcctcccaagtggctgggattacaggcatgagccaccatgcccrgcctagagtcatcatggaaattaaacaacctgcttccaaatgacttttgggtaaagactgaatttaaggcagaaataaaaaaattatttgaaactaatgaaaacaaacatacaacatcccagaatctctgggacacagctagaacagtgctcaaaggaa

SEQ ID NO: 180294 - DNA, 373 bp, Homo sapiens
aagagatctaaatgcaaacttaagaaggggcaatttttttttttttttttttttttgagacgcagcctcactctgtcgcccgggctggagtgcagtggcgtgatcttggctcactgaaacctctgcctcctggattcaagcgattctcctgcctcagcctcccaagtggctgggattacaggcatgagccaccatgcccggcctagagtcawcatggaaattaaacaacctgcttccaaatgacttttgggtaaagactgaatttaaggcagaaataaaaaaattatttgaaactaatgaaaacaaacatacaacatcccagaatctctgggacacagctagaacagtgctcaaaggaagtttctagtgctat

SEQ ID NO: 180295 - DNA, 346 bp, Homo sapiens
gcaaacttaagaaggggcaatttttttttttttttttttttttgagacgcagcctcactctgtcgcccgggctggagtgcagtggcgtgatcttggctcactgaaacctctgcctcctggattcaagcgattctcctgcctcagcctcccaagtggctgggattacaggcatgagccaccatgcccggcctagagtcatcatggaaattaaacaacctgcttccaaatgacttttgggtaaagactgaawttaaggcagaaataaaaaaattatttgaaactaatgaaaacaaacatacaacatcccagaatctctgggacacagctagaacagtgctcaaaggaa

SEQ ID NO: 180296 - DNA, 365 bp, Homo sapiens
taaatgcaaacttaagaaggggcaattttttttttttttttttttgagacgcagcctcactctgtcgcccgggctggagtgcagtggcgtgatcttggctcactgaaacctctgcctcctggattcaagcgattctcctgcctcagcctcccaagtggctgggattacaggcatgagccaccatgcccggcctagagtcatcatggaaattaaacaacctgcttccaaatgacttttgggtaaagactgaatttaaggcagaaataaaaaaattatttgaaactaatgaaaacaaacatacaacatcccagaatctctgggacacagctasaacagtgctcagaggaagtttctagtgctatatg

SEQ ID NO: 180297 - DNA, 360 bp, Homo sapiens
gccatatagcactagaaacttcctctgagcactgttstagctgtgtcccagagattctgggatgttgtatgtttgttttcattagtttcaaataatttttttatttctgccttaatttcagtctttacccaaaagtcatttggaagcaggttgtttaatttccatgatgactctaggccgggcatggtggctcatgcctgtaatcccagccacttgggaggctgaggcaggagaatcgcttgaatccaggaggcagaggtttcagtgagccaagatcacgccactgcactccagcccgggcgacagagtgaggctgcgtctcaaaaaaaaaaaaaaaaaaattgccccttcttaagtttg

SEQ ID NO: 180298 - DNA, 340 bp, Homo sapiens
aacttaagaaggggcaattttttttttttttttttttttgagacgcagcctcactctgtcgcccgggctggagtgcagtggcgtgatcttggctcactgaaacctctgcctcctggattcaagcgattctcctgcctcagcctcccaagtggctgggattacaggcatgagccaccatgcccggcctagagtcatcatggaaattaaacaacctgcttccaaatgacttttgggtaaagactgaawttaaggcagaaataaaaaaattatttgaaactaatgaaaacaaacatacaacatcccagaatctctgggacacagctagaacagtgctcaaagg

SEQ ID NO: 180299 - DNA, 340 bp, Homo sapiens
aacttaagaaggggcaattttttttttttttttttttttgagacgcagcctcactctgtcgcccgggctggagtgcagtggcgtgatcttggctcactgaaacctctgcctcctggattcaagcgattctcctgcctcagcctcccaagtggctgggattacaggcatgagccaccatgcccggcctagagtcatcatggaaattaaacaacctgcttccaaatgacttttgggtaaagactgaatttaaggcagaaataaaaaaattatytgaaactaatgaaaacaaacatacaacatcccagaatctctgggacacagctagaacagtgctcaaagg

SEQ ID NO: 180300 - DNA, 340 bp, Homo sapiens
aaacttcctttgagcactgttctagctgtgtcccagagattctgggatgttgtatgtttgttttcattagtttcaaataatttttttatttctgccttaaattcagtctttacccaaaagtcatttggaagcaggttgtttaatttccatgatgactctaggccgggcatggtggctcatgcctgtaatcccagccacttgggaggctgaggcaggagaatcgcttgaatccaggaggcagaggttwcagtgagccaagatcacaccactgcactccagcccgggcgacagagtgaggctgcgtctcaaaaaaaaaaaaaaaaaaaattgccccttctta

SEQ ID NO: 180301 - DNA, 351 bp, Homo sapiens
aaacttcctttgagcactgttctagctgtgtcccagagattctgggatgttgtatgtttgttttcattagtttcaaataatttttttatttctgccttaaattcagtctttacccaaaagtcatttggaagcaggttgtttaatttccatgatgactctaggccgggcatggtggctcatgcctgtaatcccagccacttgggaggctgaggcaggagaatcgcttgaatccaggaggcagaggttacagtgagccaagatcacrccactgcactccagcccgggcgacagagtgaggctgcgtctcaaaaaaaaaaaaaaaaaaaattgccccttcttaagtttgcattt

SEQ ID NO: 180302 - DNA, 343 bp, Homo sapiens
tccaagtgtccgctggcagattccacagaaacagtgtttcaaaactgctctaacaaaagaaagattcaactccgtgatttgaatgcacacatcacaaagcattttctgtgaatccttctgtctagtttttatatgaggatatttccttttctaccatgggcatcaaagcgttccaattatcccattgtagattggacaaatagagtgtttcaaaactgcttcatgaaaaggaagattcaaatttgggagtagaatgcacacatcacgaagaagtttctgagaatgcttctgtctagttyatatgtgaagatattcccatttccagcaaaggtctcaaagcggt

SEQ ID NO: 180303 - DNA, 561 bp, Homo sapiens
cttgtgaaaatttaaaggaatgtgtatatgtggcaggactttaaaaactgatataaaacttgtaaaaagaataaagtcaatcatacttcaataaattgggggggaaatagagatttcaaggggagttacctcactttgaacctcactttatataatattcttgtgaatctcactttatatatattctggtaagttgcatagaaaatacattcttacaaataaaacttattttaaaagcatcacagaagagttgaatttttaaaaggtagaccmaattgtatcattttgtaatatatgttgttcctgagagatgatttgtacagtttacattgggttttatttaaaggaatttacattttaggttttatcttgtgatttctaaaagagtaataatgtgtaaagactgactcttgagaggcaagtcttccaggaccttcttcccgggaaagggattttgaatctcctttgtaaaattggccaggtttatttttaatgtcctcccttctcctctcagtttgtctctgctatattgtttcttctttgacttctaaaaccctgata

SEQ ID NO: 180304 - DNA, 242 bp, Homo sapiens
gttgtggaatactctttggaatttctcaagacattcactttccttcttttaaatacggtatatgtttccatttttattggattgtctaatgcactaatatatttaattccctgtgatcttttttatataagggagttatcttattctactgatgtttctgttggacaggctgggctgccctccaggtgccaattgcctggttagaggtcawttggaaattgtacgggacatctcactggcca

SEQ ID NO: 180305 - DNA, 242 bp, Homo sapiens
gttgtggaatactctttggaatttctcaagacattcactttccttcttttaaatacggtatatgtttccatttttattggattgtctaatgcactaatatatttaattccctgtgatcttttttatataagggagttatcttattctactgatgtttctgttggacaggctgggctgccctccaggtgccaattgcctggttagaggtcaaytggaaattgtacgggacatctcactggcca

SEQ ID NO: 180306 - DNA, 572 bp, Homo sapiens
agtggagtcttttagtctcccagaaactccccctgaaaacaaagcagactaattaggattgtagggggaaaattatggatgatgtattcaaaaaactgggaaaaagaatccctacatwttccagaatagaagggagcatgcacaaagcaccaagataaataattgtgtggtagggctggtagggaaataaaaaagatgtctaccaacgtatcgtacaagccagggaaataaaaaaaaatcatcaacacatacctcccaaaagaggggacactatgctacctgggggaagggtctgacaacaaccagcaaaagtgaggaaagtcctcacaggattcagattgtaagtaaatgcaaaaactgcacaccctgggaagattccccatgctgtgtcggttacatcttccgaatttcagggatacctgacaatcttccttcatgagttttcaggataccctaggaggaatcaaatcaattgactagaacataaatattagggacaataaagagaaaagtttccgataataagggaggagtgttgcctggaagcgcatcccaaatataccacaccagca

SEQ ID NO: 180307 - DNA, 555 bp, Homo sapiens
tatttattacaaatatatccatcctatttgtgtctttagtttttattgttaataatatcttgtgatgamccaagttccttaattttaatgaagtccaacatatcaatttacttttttttttggttagtgcttttcgtgccctttaggaaattttttctactataggatcatggatatgttctcctataaattcttctaaacacttcatttttttataattaggtgtatgatccatctttaactaattttgtgtatcttatgagatagaggtaaaggtttacttttttcacatacatattcaaatgatgttttcctcagtctccattggtcttctgcacacactacctagcattcaatcaaagataataagacacaaaaaagcaagggaaaagcaacctactatcaagagataaagcggtccacagaaatagacatcaagagtgatgccgtaaaatctaattggaagttctctgtacatggataggatgtgtagacagttaggcactttgtgggcttcaggtattcagctggcttttatataggaacccatgatgt

SEQ ID NO: 180308 - DNA, 555 bp, Homo sapiens
tatttattacaaatatatccatcctatttgtgtctttagtttttattgttaataatatcttgtgatgaaccaagttccttaattttaatgaagtccaacatatcaatttacttttttttttggttagtgcttttcgtgccctttaggaaattttttctactataggatcatggatatgttctcctataaattcttctaaacacttcatttttttataattaggtgtatgatcsatctttaactaattttgtgtatcttatgagatagaggtaaaggtttacttttttcacatacatattcaaatgatgttttcctcagtctccattggtcttctgcacacactacctagcattcaatcaaagataataagacacaaaaaagcaagggaaaagcaacctactatcaagagataaagcggtccacagaaatagacatcaagagtgatgccgtaaaatctaattggaagttctctgtacatggataggatgtgtagacagttaggcactttgtgggcttcaggtattcagctggcttttatataggaacccatgatgt

SEQ ID NO: 180309 - DNA, 499 bp, Homo sapiens
cgaattctctttttgccttttgcactgctctaccaaascttcggatagcattccctacattataacactggatcaactgtacttcatataaattcctcaaatgaaattccctttcttagtcttacctcaaaacattgacttgttccttcctactgccttggaaatacaagcttccatcttgtaagccagcctccttactttccactgagttacgtctcaacttcttggaaatgtgcacctttttcaggatgtaactactgatgctactgctactactactcttaacaactgcatatgaccctcacttactatactttacctggctcttgagagacatgacctcaacttttctcattccacagatgtgggatttgagacccaaagaagtgaagtaacctgcccaagtttacacagcttggagtagaacccgagtttctatggactccagagctcatgagttcaccacttttctgtgcctcctaactctgtaagtatttgg

SEQ ID NO: 180310 - DNA, 474 bp, Homo sapiens
tacattataacactggatcaactgtacttcatataaattcctcaaatgaaattccctttcttagtcttacctcaaaacattgacttgttccttcctactgccttggaaatacaagcttccatcttgtaagccagcctccttactttccaytgagttacgtctcaacttcttggaaatgtgcacctttttcaggatgtaactactgatgctactgctactactactcttaacaactgcatatgaccctcacttactatactttacctggctcttgagagacatgacctcaacttttctcattccacagatgtgggatttgagacccaaagaagtgaagtaacctgcccaagtttacacagcttggagtagaacccgagtttctatggactccagagctcatgagttcaccacttttctgtgcctcctaactctgtaagtatttggcactcttcaactccagattgctcttgaatt

SEQ ID NO: 180311 - DNA, 475 bp, Homo sapiens
tacattataacactggatcaactgtacttcatataaattcctcaaatgaaattccctttcttagtcttacctcaaaacattgacttgttccttcctactgccttggaaatacaagcttccatcttgtaagccagcctccttactttccactgagttacgtctcaacttcttggaaatgtgcacctttttcaggatgtaactactgatgctactgctactactactcttaacaactgcatatgaccctcacttactatactttacctggctcttgagagacatgacctcaacttttctcattccacagatgtgggatttgagacccaaagaagtgaagtaacctgcccaagtttacacagcttggagtagaacccgagtttctatggactccagagctcawgagttcaccacttttctgtgcctcctaactctgtaagtatttggcactcttcaactccagattgctcttgaattc

SEQ ID NO: 180312 - DNA, 597 bp, Homo sapiens
tcgtcagccatagcacatttcctgtacacatcatgcttgatagaccatttctctagtcttccagggtctggggaagagtccagggtagtctggccacacagagcttcaggacacttccttctctccttgcccccaaacaaggcaaacaagataaaaaatcttcaagctgtagtctcaacatggactccagaaacatggagatgagaagaaaaatttctaggggattgggatgaggagtgaggtgaggaaatgagctgtttggaggatatttaagccttatctgacgmaagagaaaggagaaagactggaaagaaagacaattgaggaagaaaaagagtgaaagaattttgaaattgttgctggaagacatcctaggtaaacattatcctaggcttggctttccttaaatgttatgtatagagtgaccatataatttaccatccaaacctggactcttctaagagtaaaagtgggagctattaataatttttccaagataacagcatgacttgggattggccatggcaaaccagggcatcagatctccctagttagggtcaaagtaacagtagcaaagcttcctttagattcacagcc

SEQ ID NO: 180313 - DNA, 607 bp, Homo sapiens
catagtggttgtactaatttacattcctaccaacagttgacagggrtttcctttcctgtatatcctctccagcatttgctcttgcctgtcttttggataaaagtcattttatatggggtgagatgatatctaattgtgattttaatttgcatttctctgatgatcaattatcttgaacatctttttatttgcctgtttgccatttgtttgtctctttttttttgagaaatgatattttgcccatttttaaattagactgttagattttttctgttgaattatttgagctctttatatattttggttattaatcctgtgtcaaatgggtagtttccaaatattttctcccattctgtgggttgcctcttctccttttctattgtttctgttgctgtgcagaatcttggtcacttgatatgatctcatttgtccatttttgctttggttgcctgtacttatgatatattactcaagaaatctttgcccagaccaaagccctagagagtttccccaatgtttttgtttagtagttttatagtttgaggtcttagatttaggtctttaatcgacttttattttatttttggatattagctacaggtagggt

SEQ ID NO: 180314 - DNA, 607 bp, Homo sapiens
catagtggttgtactaatttacattcctaccaacagttgacagggatttcctttcctgtatatcctctccagcatttgctcttgcctgtcttttggataaaagtcattttatatggggtgagatgatatctaattgtgattttaatttgcatttctctgatgatcaattatcttgaacatctttttatttgcctgtttgccatttgtttgtctctttttttttgagaaatgatattttgcccatttttaaattagactgttagattttttctgttgaattatttgagctctttatatattttggttattaatcctgtgtcaaatgggtagtttccaaatattttctcccattctgtgggttgcctcttctccttttctattgtttctgttgctgtgcagaatcttggtcacttgatatgatctcatttgtccatttttgctttggttgcctgtacttatgatatattactcaagaaatctttgcccagaccaaagccctagagagtttccccaatgtttttgtttagtagttttatagtttgaggtcttagatttargtctttaatcgacttttattttatttttggatattagctacaggtagggt

SEQ ID NO: 180315 - DNA, 566 bp, Homo sapiens
  misc_feature (1)...(566): n = A,T,C or G
ttttatttatactgatggagaggaaaacattggccagccattcagcctagatacagccttctccttatctgttttatttcatctcctgtttgtggcatctgcattccatgcatgtattttctttgacaaaaatgactgtcctgttctttaagttcagaattacttgttgcttttgcattataattcattggaatttatgacccatttattaatgtcattaaaattttgtttttttttcccttttatttgttgctctgggggttaaaatgattttcaaggacattacgttttctttaaataatgtatttcttctcaaatgatcttaaattatgtgatactctaaccttctgtgtcttgggaactctaaagcactgtattttctrtgagaaaaaaagatcaattttaaaactgtggggaacccaaccaaatctgtcttaagcaatgggatgttgttttcactttaattgatgtatttcatttttgtggaagtaaactttttaaagatatatttttgaatgatttagcacctggcattagcagtgggttttaggagnnnnnnnnnnnnn

SEQ ID NO: 180316 - DNA, 522 bp, Homo sapiens
cactctgttgcccaggctggagtgcagcagcatgatcttggctcactgcaacctctgcctcccaggttcaagcgattcttctgcctcagcctcccaagtatctgggatyacaggcacccccaccatgcctggctaattttttgtatttttagtaaaggcaggatttccccatgttggccaggctggtctcccaactcctgacctcaggtgatccacctgcctcggcctcccagagtgctgggattactggcatgagccactgcgcccggccaacagaatatatattgtatatatatacaataataattgtattataaggagaggattgtatgaagagctttcctaggagaatgatttgtgatggagttttacccagagcaggaataggtacggctgtgagtcacaaggtggtaggactctttatttgcttttttgcccaaatgtcatggaggacacagagcagagaacctggaaaaatgtgccattgggagaacgtgatgcaccattttaggccagaatgac

SEQ ID NO: 180317 - DNA, 522 bp, Homo sapiens
cactctgttgcccaggctggagtgcagcagcatgatcttggctcactgcaacctctgcctcccaggttcaagcgattcttctgcctcagcctcccaagtatctgggattacaggcacccccaccatgcctggctaattttttgtatttttagtaaaggcaggatttccccatgttggccaggctggtctcccaactcctgacctcaggtgatccacctgcctcggcctcccagagtgctgggattactggcatgagccactgcgcccggccaacagaatatatattgtatatatatacaataataattgtattataaggagaggattgtatgaagagctttcctaggagaatgatttgtgatgragttttacccagagcaggaataggtacggctgtgagtcacaaggtggtaggactctttatttgcttttttgcccaaatgtcatggaggacacagagcagagaacctggaaaaatgtgccattgggagaacgtgatgcaccattttaggccagaatgac

SEQ ID NO: 180318 - DNA, 529 bp, Homo sapiens
cacgcgcgggccaacgtgcacttctgagccagatcacctagccacaaggagggggagagagkgggagataggaggagagaggggaagatagggggagagacgggggagagagagggagaggcagagagagagagagagacagagaagagaaaggaagcacctgagacagagagaaagaagagagagaaaggaagcagcttcccccaacgctgcggccttgtgtttcctcccgtgtcaaacgagagggccccaaattgaccccaaatgttttttcttcctttctcaatccaacatttataccagcacgttatttccaggatgcccaggacctctgctatggttgtgctgctgtccctgcaaaggcgctggggatggccgaggtgggggatgtctctgggggctgaaatacgctgccaggggaaggggcgccccgataccaccctcagtggctgctggttgggcgaccggtggccctggcttgagaaagtgaaaatgtccaatctattttgcctggagccttgggtctctt

SEQ ID NO: 180319 - DNA, 582 bp, Homo sapiens
tacttatagtacatataacacagtgttacatctatgtaacagagtatgtccattttctatttcccatcctttgtgacattgctgtcatccacttactgtgctataatcatccaaaatatyattgttattattattagtttaaatatttatcttttagtcagttaacaataattttaaatatttttaaaatttattcctcctctgatgttctttctttacgtagatactagacttttactaatatcaaaacttttccggctgaggaaaattctttaatagttcttgcagcacaggtctgctgctgatgaattcccccaatttcagttttctgagaaagtttttatttcgacctcatttttgaataataattttagtagttagataattctaggttaacttttaaaaaatgtttaacatattaaatattgtagttttcttttttctagcttgcaaattttctgtcatgaagccggagatttcaaattcctctagtgtctttttgtttccactcttaacttctctaagttttcctttcaagagtttgcgtcttgaggccctttcatctataatccactattatta

SEQ ID NO: 180320 - DNA, 582 bp, Homo sapiens
tacttatagtacatataacacagtgttacatctatgtaacagagtatgtccattttctatttcccatcctttgtgacattgctgtcatccacttactgtgctataatcatccaaaatattattgttattattattagtttaaatatttatcttttagtcagttaacaataattttaaatatttttaaaatttattcctcctctgatgttctttctttacgtagatactagacttttactaatatcaaaacttttccrgctgaggaaaattctttaatagttcttgcagcacaggtctgctgctgatgaattcccccaatttcagttttctgagaaagtttttatttcgacctcatttttgaataataattttagtagttagataattctaggttaacttttaaaaaatgtttaacatattaaatattgtagttttcttttttctagcttgcaaattttctgtcatgaagccggagatttcaaattcctctagtgtctttttgtttccactcttaacttctctaagttttcctttcaagagtttgcgtcttgaggccctttcatctataatccactattatta

SEQ ID NO: 180321 - DNA, 647 bp, Homo sapiens
ataaattcttgtggctattctagcaccatctgatataagagaaatgtgattgtgagaaaaaggtggacagaaagaaatagtaatgttagctaattgcagataaataggttattttgcaaaatttataaaaaatacatgctcacgtgagtacattattaatgccccctcatgggcccatgtaagagagtggtcttgaaggttaatctgtattagttttctgataaagattcttctgcttttattcactcccaacactttgggagaagcatctctactcatgtaactcttgagaaacatctctactcatttgaactcttcctgtgaaggatgagattacatttactatgggactttagcttcttaaattatctctaatgttaccgcattattctctttattyataggaattaatcctatttataaaatacaaatatagtattgtatcacattcttcatttatttagaatgcatcacattcttcatttattgtatcacgttcttcatttatttacttccaatgccttctattgttatttaaataaatctgaagtccttatcatcgtttacaaagccctgtcttatcactacaaccaagtctcctgtccctcacatttgttattaaatatcccaatcacactacacttatt

SEQ ID NO: 180322 - DNA, 530 bp, Homo sapiens
gaattcgattaattcaatgagctgcctctgggtacttccaaacttggtgacagtagtcacctgccagctgcggtgaccatggcctgacaaggcaaggtaactagatgaccaaaagttttgagaatctatgtctacaccactctagtggacaagtaaaccaaccagctgacattctaagattggttaagaaagatgaatattaactaaggtcttaggagtaattgctgcaggaggagctatagcttattccactagacttctggtatcacawcatttttagacattatgatcagctgttacttcaaagcatccataacagagtagactagtatagagcataggcagatttgcatggtacaaggggtagccacaagtcaaataggagcactgcccatttattcttggtcagttgaatctggttgagctgcagtagtcacttttcatgcacactttcactgaaaccactctacctcaaggtcttttgtgactgcttgtgatgatggtccttctatagtgctatgcaaaccagt

SEQ ID NO: 180323 - DNA, 560 bp, Homo sapiens
attttgtttttgcttagcaatgacatatatacatataggtatattatatagttgtatcaatatgccactgttagtttttgatcatctatcaaaaatcaccttaattgtgctgacctgggtcccatctttattaggatgtcctagttaaaggatggaaagcagtaattctccatgagctccatcacatgtgatgatggcaatgtgtaggtgccaaggcttccctttgctttctgaaagttttttcaaaagtcacctgacaaaaggcagattaaaaggaaaaagcttacaaatgtattaacatgcacaggagttacagaaaaaaaatgggggccttggagcaagacaatacaggttacggcagcaaaacaggttgtgggayggaaaacaagaggatgcctgtctagcaaatatggtcttgtcttgtaaagcagatgaaatctctcacaggtattaaccctcagggagaaaatatggtaaatgtttcttttaggtcttcaaagctatcagaccttcagttaatctttcctagatctggacaagggagggccttcagagaaagc

SEQ ID NO: 180324 - DNA, 560 bp, Homo sapiens
attttgtttttgcttagcaatgacatatatacatataggtatattatatagttgtatcaatatgccactgttagtttttgatcatctatcaaaaatcaccttaattgtgctgacctgggtcccatctttattaggatgtcctagttaaaggatggaaagcagtaattctccatgagctccatcacatgtgatgatggcaatgtgtaggtgccaaggcttccctttgctttctgaaagttttttcaaaagtcacctgacaaaaggcagattaaaaggaaaaagcttacaaatgtattaacatgcacaggagttacagaaaaaaaatgggggccttggagcaagacaatacaggttacggcagcaaaacaggttgtgggacggaaracaagaggatgcctgtctagcaaatatggtcttgtcttgtaaagcagatgaaatctctcacaggtattaaccctcagggagaaaatatggtaaatgtttcttttaggtcttcaaagctatcagaccttcagttaatctttcctagatctggacaagggagggccttcagagaaagc

SEQ ID NO: 180325 - DNA, 645 bp, Homo sapiens
tttttatttattttttaaatctgtccagttaatcagttttgtttataacagtgttctttattttattgtattgcatttagagaatgtggtctttaccattactgtctttgagaattaattcaaattaatttatctaaactcagagacatgtgctctctgaagtaggtaaccacattttaaaattattattttctactattatatgtatgaataaagtgtccrtatatgtatgatatatatcatctctctaatatatgggtacttatctggtaaatcttaagctaatgtatccctctcaagataaaagtttatcaagtttgccttgctcagttctacctttttaatgcagaagattaattgttcttattgtttattagtatctagctacaatgaaaatgtgaatacatgctgcctagtgtaggttcactggtcatgaaaaggaattttttcctctagtattttgaagttagaatttgatgatatgtcttaataaatactgttgaaaatattattaggatattatgctggatgtgactcaccaatatctatttgaggtttcccacaaattggtaggacctaaacaaaaacagagattcccattgacacaccaaaacttatcccctatacctaataacttggtagact

SEQ ID NO: 180326 - DNA, 460 bp, Homo sapiens
attttcaatctagattatacagccttctaatggaaggagatgaccatcttctcagagccagcaaggagaagtcaatgcctgccttcaaagcttcaaagaacaagctgactatcttgctagaagctaatgcagctagtgacttgaagcagaagccactgctcatttacctgtcaggaaatcctagggctttaagaattatgctaaacctattctgcctgtactctgtaaatggaagaataaggcctggatcacagcacatctgtttacaacatggtttaccgaaaattttaagcccactgtaaagatctactgctcaggaaaaaaaaaaaaaaaagccctttttaaaatattactgtttgctgacaatgcacttgacacccaatcactccaatatctaaggatattaacattgtttacawgcctgctaacacaacattcattcctaatggatcaaagagta

SEQ ID NO: 180327 - DNA, 299 bp, Homo sapiens
ctacatttaacagtaacattattagytatttattgcaatataacaaactcatcctaaaacttaatggcttagggttttatgggttggactgaacttagcgagactagttcatttgtgctacttagcctcacctagcatagcttgatttgggctggaaattatactttcataaaggttcactcacttaaatggcaagtgatgataattgttagttgggagctcagctgtggcaactgaccacaagtctctgttttctgcaggtgatatctcttgatgtgatagctctatttttcttataa

SEQ ID NO: 180328 - DNA, 299 bp, Homo sapiens
ctacatttaacagtaacattattagctatttattgcaatataacaaactcatcctaaaacttaatggcttagggttttatgggttggactgaacttagcragactagttcatttgtgctacttagcctcacctagcatagcttgatttgggctggaaattatactttcataaaggttcactcacttaaatggcaagtgatgataattgttagttgggagctcagctgtggcaactgaccacaagtctctgttttctgcaggtgatatctcttgatgtgatagctctatttttcttataa

SEQ ID NO: 180329 - DNA, 427 bp, Homo sapiens
cccggtacgcaccagaaaatcattgatatggccatgaatggcgttggatgccgggcaacagcccgcattatgggcgttggcctcaacacgattttacgtcacttaaaaaactcargccgcagtcggtaacctcgcgcatacagccgggcagtgacgtcatcgtctgcgcggaaatggacgaacagtggggctatgtcggggctaaatcgcgccagcgctggctgttttacgcgtatgacagtctccggaagacggttgttgcgcacgtattcggtgaacgcactatggcgacgctggggcgtcttatgagcctgctgtcaccctttgacgtggtgatatggatgacggatggctggccgctgtatgaatcccgcctgaagggaaagctgcacgtaatcagcaagcgatatacgcagcgaattgagcg

SEQ ID NO: 180330 - DNA, 405 bp, Homo sapiens
cattaatgcatttactcagttacgcayttgaatgaatactgaggagctactctgctcagcactgtgataggtgctgggaggacagcagggtgtgaatgacaaacagtggcatattcttatcctcaaggtgttcaccttccagtgatggggagagacattcaaagcaagattgcagtccactctggtgggtgatgaggcacagttcagaaaagtgtggccggaagacagaagaggaaactgactgtattctagggggacagctgggcaggcttcagagaggaggagacatttgatctaggttttgaaggttgagggagagcttgtcaggcagaacaggcggtgctacctctagcgaatgtatttgagtcacacagcccccaagtatgttagcagcggcgaattcct

SEQ ID NO: 180331 - DNA, 618 bp, Homo sapiens
taatggagtcgcagttccacatgactggggagtcctcacaatcatggcagaagatgaaggaagagcaaaggaacrtcttacatggcagcaggcaaaagagagcttgtgcaggggaactaccatttataaaaccatcaaatcttgtgaaacttattcactaccatgagaacagcatgggaaagacccacccttatgattcaatgacctcccaccaggtccctcttgtgacacatgggaattacgggagctacaattcaagatgagctttgggtgggcacacagtcaaaccatatcactctctatgggtgcttttctgctcacctgtggaggcaggcatcactgccacctggaagaaatcgggacactcactctcccagcctcccctccttttcctgctcttgtggccaccccttcagcctgcactgcctctaagctctttaccctggaggacagtaacttcaattttagagaaactctaaagtggcttatatgcacaggaagctgcaaaaacatctgagcctccacttcacgcaggaattccctaccacttgtgagggagagcccataataagcggtgttcattaggattaatgcctgttgactgtgaaaacatgaaat

SEQ ID NO: 180332 - DNA, 618 bp, Homo sapiens
taatggagtcgcagttccacatgactggggagtcctcacaatcatggcagaagatgaaggaagagcaaaggaacatcttacatggcagcaggcaaaagagagcttgtgcaggggaactaccatttataaaaccatcaaatcttgtgaaacttattcactaccatgagaacagcatgggaaagacccacccttatgattcaatgacctcccaccaggtccctcttgtgacacatgggaattacgggagctacaattcaagatgagctttgggtgggcacacagtcaaaccatatcactctctatgggtgcttttctgctcacctgtggaggcaggcatcactgccacctggaagaaatcgggacactcactctcccagcctcccctccttttcctgctcttgtggccaccccttcagcctgcactgcctctaagctctttaccctggaggacagtaacttcaattttagagaaactctaaagtggcwtatatgcacaggaagctgcaaaaacatctgagcctccacttcacgcaggaattccctaccacttgtgagggagagcccataataagcggtgttcattaggattaatgcctgttgactgtgaaaacatgaaat

SEQ ID NO: 180333 - DNA, 516 bp, Homo sapiens
tttttttacctgcagccactgccttcgagtgtaatttaaacttcacatacaaactgcaactcctttgaacttgaggagatttctagttccgcaaacctttcccacacagttccaggggccctctttgaccaccgaaggtgagcctgggaagyggggagcaaactcatagacgcctctagagcaagtctgactcaagacctcccttgcccttgcttttcaggagctcagaaataagatggagttttctcccttgtccccaggaagcccatccacctgccccgatttggccagtttcacctgatgctgagtggacacagctcttctggttttagcaaagttttaaaaccattcaccacccaggtttgctgaagctagcgtcgggttcacctttggcagtgagtgatgcatttcagctgggtatcctgcctccacaggtttttcccttggcctggccgcaaagctgggcagacacatcaggccccatccagaatctaacagaattctcgtcctaagaag

SEQ ID NO: 180334 - DNA, 591 bp, Homo sapiens
tgtttataaatgctctggatgattctctggcaatatggggaagcaagggggttaagtcttggcccaaagctgttccccaattcaagatcccacccagwctcctgagcttcctaactggtagtgattgcccagaaccaggtattatgttttgctgagctcaggcaagccagtctcctagaggcctaaatcactagagcaacagttcccagagtttttaaatgatttaaagaccatccatattagaaacaaggagacaaaatgaatgaggggtatagggcctgttatgcaattcagattcccaggccatgagccaaagatcctgaaacagaatccctgagagcagggcccaggaatctgctttctgaagaagcttctcccccagggacacctttgcccattgacatttgtcaactcctggctggtgtctgatggaggggccatcaagaccagttttggggacctgagatacttagacactccactgaagactggggcctgtgtccagaagtttctccatatcaaacccacttgcagagaccgtcatttctgatccctatttccaagtcagaactcaagaagaaagctctttct

SEQ ID NO: 180335 - DNA, 591 bp, Homo sapiens
tgtttataaatgctctggatgattctctggcaatatggggaagcaagggggttaagtcttggcccaaagctgttccccaattcaagatcccacccagactcctgagcttcctaactggtagtgattgcccagaaccaggtattatgttttgctgagctcaggcaagccagtctcctagaggcctaaatcactagagcaacagttcccagagtttttaaatgatttaaagaccatccatattagaaacaaggagasaaaatgaatgaggggtatagggcctgttatgcaattcagattcccaggccatgagccaaagatcctgaaacagaatccctgagagcagggcccaggaatctgctttctgaagaagcttctcccccagggacacctttgcccattgacatttgtcaactcctggctggtgtctgatggaggggccatcaagaccagttttggggacctgagatacttagacactccactgaagactggggcctgtgtccagaagtttctccatatcaaacccacttgcagagaccgtcatttctgatccctatttccaagtcagaactcaagaagaaagctctttct

SEQ ID NO: 180336 - DNA, 458 bp, Homo sapiens
ggagtctaagctcttgcgtgctggtgaatgagcaccttcccctctgggctctgggaggagcctgggggtcaaccagcggcctccttgagcccttggagaactcagaatgacttctcaacatcaagacggtgacacagtctcagatgtagcccccatcctctcatggctgggcttggtccccagtcaccctctgcagtcgacagagcccctcattaaggggtccccaccgcattgtagtggctgccccagaactgggtcagaatcccacctcgctgccccatctgctctgtggcccctgggcagcttcttgacctctctgagccccctttctcttttgcaggatggcaagaataacagtccctgtgctctagggcagccatgaagactaaatggaaagataatgctgttayaattagagaacggctgagcacctgcagtgtgcaagcactgtgctgagg

SEQ ID NO: 180337 - DNA, 458 bp, Homo sapiens
ggagtctaagctcttgcgtgctggtgaatgagcaccttcccctctgggctctgggaggagcctgggggtcaaccagcggcctccttgagcccttggagaactcagaatgacttctcaacatcaagacggtgacacagtctcagatgtagcccccatcctctcatggctgggcttggtccccagtcaccctctgcagtcgacagagcccctcattaaggggtccccaccgcattgtagtggctgccccagaactgggtcagaatcccacctcgctgccccatctgctctgtggcccctgggcagcttcttgacctctctgagccccctttctcttttgcaggatggcaagaataacagtccctgtgctctagggcagccatgaagactaaatggaaagataatgctgttacaattagagaacggctgagcaccygcagtgtgcaagcactgtgctgagg

SEQ ID NO: 180338 - DNA, 326 bp, Homo sapiens
tgaattcctcttttgacaaatggaaamctcattccactcttgccgatgcatcttctaatccagagcagaacataatccccatctcttttctctggaacgttgggagaatttgtgtctgtcaaatgctttggagaaatgtgaaaagaatgtttaaaatgccagatcattttttcaaaaaaatcaattataggtttgcctttggggtaaccctaagacaacacaaaatctcaaactttcatcccactggagtgaaggaaaataattactccgttaggttttcagcgatcacgcaattgccttggattttacattcaaattccaaccag

SEQ ID NO: 180339 - DNA, 582 bp, Homo sapiens
aatcggtttcggaaccctgcctgtgccctggctaggcgcctcaaggtcatcaccagctcacaaaatcccactgtaatgctgattctcttttgatctcaggtgccagggaagcgaaatgacgctctgactttatttttgtagccatcgagtgacatttaccggctttgtggctctgtgaggggtgtggtggcagctcttggtgtggtgtggagatgtggggacaggtgtgttgggttcccagtgggcctctgagaggctgtgtgcccagggcacggagccacctatctgcagtgggcagagggaagacgccggckcaggcgacacctgcggaacctgcagcagaagaggccccaaatcccggggtcccccagtgtctgggggcaatggcactatcaggagagctcctgacccaagccacacatattaggggtgctgtcttcacttgtgcctgctgctgcctgatcaatctcaaaccaaggtactcggtcaggagcaagtagcaagccaggctctgggctcctccccagactcttcatgaaggtaccacaaggtgaggaggagagaaaggtggcacgcgctggt

SEQ ID NO: 180340 - DNA, 562 bp, Homo sapiens
atgtgacttgctttgttcaacagaaagtggtagaagcagtggcatgctggttcccagcccaggcctcaagggttccaagcccaggccttaaggggcctcgcatgctgctcyggtgtgcctctgctattgccatgagaggaacacactcaggttagccaactgaccccaggggcaggatgagccatcccagctgagcccaacctggattagcatgctgctaagatattgtggttgtttcttgtgcagcattttatgagccatagggaactgctacaatttttattgtaggaaatttgattattatagaatagaatgaagaagaccaagtcatttgtagttgcattacccagagagcatctctgagcattctcgtgttttttcttctgctgtttttctctgtgtatgtgtgaatgcaactgtgagtctacaaaatgaaatcccactgcatgcatattttatggatgtgctcatctcattagtctcctccaccaccccagcatttccaccctcagtcatcaacaaggaatctcttgttgaatttcttcagatgcacccgcaccct

SEQ ID NO: 180341 - DNA, 587 bp, Homo sapiens
tgtctcagaccttcttgtgaaacttgtgaaccatgaggaagttagataagcatctttatgaggggttatttatgctacagtattttttcttgatcttgctgtgaaaatgccttggtatgtaggagtcaaacattagtcattatgttggtttcacttcaagatggcattactcttgccatgcaacaggctgttttcctataataattttttatttaatattttgaatataaaatagagtcacatagttagaagtcaaatgacataaaaaggctaatagtgacatgtgtttctttttcttatcactgttccttattcattcagcttccaattctttgctcttccacagataagtacgttacttagatcttttgtgcatattttcacagtttaaaaaatttaaataaaagcaagtataaaattatattttaaytgtatatcctcttttaaaacaaaatgtagcattctaaatatgatgtcttgcacatttttttcttcatgccacaatgtatcttatagatcttttttatagtaatacctagagggctttctcatctatttttatgttttgtttattccattgtataaat

SEQ ID NO: 180342 - DNA, 574 bp, Homo sapiens
ctttctctatctttgacctctgaaaattttgattattaaatgccattaggtagtcttctttgggttaaatctgcttggtgttctataactttcttgcacttggatattgatatttttctctagatttagtaagttctctgatactatccctttgaacatgctttctacccctatttctttgtctacctcctctttaaagctaatcactcttagatttgcccttttgaggctattttttagatcctgtaggaatgcttcattgttttttattattttttcttttgtctcctctggttatgtatcttcaaatggcctgtcttgaagtttactaatcctttctttggatcaattctgctatkaaaagactctgatgcattcttcaacatgtctatttcatttttcagctccaggatttctacttgattcttttaaattattttaatctttgttaaatttacctgatagaattctgaatttcttctctgtgttatcttgaatttcttagagtttcctcaacaaagctattttgaattctctgtgtgaatggtcacgtatctctgttgctccaatattg

SEQ ID NO: 180343 - DNA, 580 bp, Homo sapiens
aatgatttagagtagcatcagcgagccaagagacagctaatagattctggctcacagtatatgggatgtagaaaaataagcagcacacttttgatgagaaagaccaaggttagcttaaggcaaggacacggtgagagaattatttgaagaggtttagracataggagaatttactcataatggaaagggtgtttcagaaggcacagtaaataaagggttagaaaggtcagatgtggaagaattaggaggaaggaagtacagtgtattctcaggatgttagaaccttggagaacacttgactagagagttgatgattcacccacagaattcaaatttctgttttcacttaatttgtctctagctcttctttgtacttttcaaaaatagtaattgtatcagaggatggagcaagaaggcagaatggaaggctccaccaattgtcttccctgcaggtatgtcactttaacaactagctacaaaaaaatcaccttcataagaaccaaaaattaggtgagtactcatagtacctggttttaatttcatattgcagaaagaggcactaaaaaggtagaaaaaacag

SEQ ID NO: 180344 - DNA, 555 bp, Homo sapiens
agtgttcttggcctttggctaggctctgaggtgttagagctgtggggtgctcaatatggcttctggagaaargggacatagcagtctggtatgtgctgattgaagcctggggcagcactttgatgttaaaaaccaaattggtaagatcatgatgtgaatttgttacatcaattatcttgagttatattaagaagattctatatggagatgggcataaatatgttgatgttaacactttgtaaacatgccccataactaacaactagttttaggtacttgtaaaatatgagcccagcagtagccttctggcttgctacctgctgtaggaacaaagtcatttactcaaattttgtatctttaggtacaagaattacctcacaaccaacctgggacaatcgctttaaggcccttgaatctttatctcttttcacagagttctggattgtggtggtgatggtgatagttggaggaaaaggctatccaaccacatttgaagggatgttaacatttggattcaagactagactttctaatcctctcctagggagttttagt

SEQ ID NO: 180345 - DNA, 585 bp, Homo sapiens
acactgtctgaaagaatgatttctggtttggagcattaagaactttcctacatcttaactctgctgacttgatagtttgtataggtgagtcttcagggaacattggttacaaatttgaatacaaaacataatcttgatattttggggggtataatatttccacaggcctttcattttatccttgtttggtgatttttcttttggttttgcttacagatgatcagaagtgcttttcctgatgtcgattatttcctaataaatatgtgcatccctattctgtctgtattgcctggtcaaggctttgaccttgactaaaacaaacaaaaatgcagatattttttcctggacttcagagaacacataaaaatatgtgtctcatggggctaagctggatccctagaagtataatagctatggttatagaacaagggctcagcttgtttagtttcatcatttttgatttgggtcatgcatctgtrgattaacctcagattcattttgtcagtttgtagattgccttttcttccatgcctaacaatttatttctcacccatacagaaaaactgtgggccaaattgtgtgttg

SEQ ID NO: 180346 - DNA, 584 bp, Homo sapiens
aatgggtttattaacagatattgttttaagttgaatctcagatttattttgtgtmtcaatagcaaacatttgcgaatgcaattttctggtattttccttttactattacttataataaaaatcaaactcactgtagcatccttctttgtaccaaactgatgtggtttggacttgtgtccctgcccaaatctcatgttgaattgtaatccccattgttggagagggacctgatgggagatgactggatcatggaggtgaacttcccccttgctgttctcatgatagtgagtgagttctcacaagatctggttgtttgaaagtgtgtagcacctccctctttgctctctcttcctcctgctgtagccaagtaggatgtgcctgcttccccttccccttctgccataattgtaaatttcctgaggcccccagccatgcttcctgtacagcctgcagaaccatgagccaattaaagctcttttctttataaattaccaggtctcaagtagtttgttataccaacgtgagaatggactaatatacaaatatttaaagcaaaaaataataaacttctgataaaatataaa

SEQ ID NO: 180347 - DNA, 595 bp, Homo sapiens
ttagctctccagtgtggtgggctctgactgttggacattttttcttcctctactattaacacttccaatagccaacatgttggaaattatttagagagtatcttcacaatttcaggtgattggtcagccaacatatatccatcaagtgctcttgagatccaaatcagggaagcttgcaaactttgatttaaaacactacaagaggcaatgcaagagagcacatttcaatgctctggcttattccactgcacatgtctgctcacttagctattttctatgagaatggcaaaaatattgcatggtggtgaaaaacagactctgggagtagcctgyctggatttgcctgattcttctgcctgtcaagattgcatagggaaaggaagcatcttttcttcccatgtttggttcgagctgaagcccccataatgaaagacagattaagaagagaaaagcacacaaatgtgttcaatgttttatatgacattggagactttataaggaaatgaagtcccaaaatccaggtaaacctgtgtgttttatgctaggttgaattaagaagtgggtagtcatggagaaacataattagacaaagagg

SEQ ID NO: 180348 - DNA, 595 bp, Homo sapiens
ttagctctccagtgtggtgggctctgactgttggacattttttcttcctctactattaacacttccaatagccaacatgttggaaattatttagagagtatcttcacaatttcaggtgattggtcagccaacatatatccatcaagtgctcttgagatccaaatcagggaagcttgcaaactttgatttaaaacactacaagaggcaatgcaagagagcacatttcaatgctctggcttattccactgcacatgtctgctcacttagctattttctatgagaatggcaaaaatattgcatggtggtgaaaaacagactctgggagtagcctgcctggatttgcctgattcttctgcctgtcaagattgcatagggaaaggaagcatcttttcttcccatgtttggttcgagctgaagcccccataatgaaagacagattaagaagagaaaagcacacaaatgtgttcaatgttttayatgacattggagactttataaggaaatgaagtcccaaaatccaggtaaacctgtgtgttttatgctaggttgaattaagaagtgggtagtcatggagaaacataattagacaaagagg

SEQ ID NO: 180349 - DNA, 509 bp, Homo sapiens
gtccttttctattttccctaagtgtcgtccagtctgagaaataaagggaaagagagaaattttaaagctgggcgtccgggggagacatcacatgtcagcaggttccgtgatgccccccaagcctcaaaaccagcaagtttttattagtgatttttaaaaggggagggagtgtacgaatggggtgtggatcacagagatcacatgyttcacaaggtaataaaatatcacaaggcaaatggaggcagggcgagatcacaggacctgggcgaaattaaaattgctaatgaagtttcggcacacattgtcattgataacaccttatcaggaggcagggtttgagagcagacaactggtctgaccaaaatttattaggcaggagtttcctcatcctaataagcctgggagcgctacgggataccagggcttatttcatcccttatctacaaccataaaagacagacgtccccagagcggccattttagaggcttacccctagacatgcattctc

SEQ ID NO: 180350 - DNA, 602 bp, Homo sapiens
tgaggtgactttttctctttcatctcttgtagttgaagtttcttcattcataaagtgagcataacattctattgcctacttagtagagtgcttttgaggataaaggtgatgctgtatatgaggtgcttaattaacacagtcctcaacatatggtaaggaatcaattatgtttattactattaggtaytaagcccttaaaattgatttttcaatttaatgtctcatatacattttcagatgcactgttatctataataaagggtaatagaatgcccccttctatctataaaactctgcaactcaatactatgcttatgcattcaagtcatttagctcctctgaactgaacaggaaaatagggtgagttttgcacttgtaccctgaaaattctcaaactaggactacatgcacacccacatacacacaaacacacatatcttaagaccatcatacctcatgtaaggtgaatgtgatggccacttttcatttttacatttcattctcccagtttatatgacttgttgatggctaattggtaagaaatttgaagaacccagcactgtctaaagatggaagctaatctcatgatttgtgtaatatga

SEQ ID NO: 180351 - DNA, 569 bp, Homo sapiens
atctttaccccctggcagttgattggataatctctgtgccatcaggatggatatatctctcctggtatgtcaaacaattyagacatcattgaaatcctggcagccacagttattactgactaaaaataaaatatttacattgtcattcaaaatatatacgctgcagcatttgtcttaaggccaatgacttaaagagagattaaccaatttggtctgcttctaagaagaaaaatcagttgacctcaatctggaattttattcttacagtaaactttaggataaaatgggtgaagtaccatcttcttcatgttttgtaagttggagtatgctgcaaggaattaattttagaagaatgtaaggcaataagctcttatgacttcaccatttttatttataaacaaagattacaaaatttttcaatgctcagcagttgtgtgaaaggaaacaaatatttgaaaggaagaaaacaagatttaaataaatattatattctaaataataattagtaaaataattgatgtaattttaaccacataatcaagtccatactatgtttaattgtgaaaaaa

SEQ ID NO: 180352 - DNA, 427 bp, Homo sapiens
aaattaaattccttgtccctaataccactaagatgtaggtgtgcttggaaccccttatctgtctgaaaaactgtgctctgtccatcatgctgtctctaagatcaggctrttatgcggaacattttgggaggtatagttgcatgaatagtggccacccaaagatatcaagtcctaatccttggaacttgtaaatgctgccttatttgggaaagggatcattgcagatataattaagttatggatcttgagatatttcctttgattatgtagatggacctgaataacaccaaaagtatccttataaaagagaaacaaaagggtataaaacagacactcagggaagaaggtgatgtaaagatgaatgacagagaaaagcattcacaagccaaggaatgctgacagctgacacaagttggaagaggcaagg

SEQ ID NO: 180353 - DNA, 582 bp, Homo sapiens
ttttccaaattgtctttatgactatcaaaaacatttaattcattctttctctttgcttctcaggccatgggcaccatgtacctgttgaattaacacaagattgaatagttatcttagtaaaatcatttgaaaaagtgtaaaatgaaaaaaaaataaccacatgagttattgttgctcaatcaaatagttgatcacttgaaacctaagaaccatctaaatttcattcctgtattatctcaatacgtacttatctcttattatgtggccacactatattagaagactagggatatggcartgagtaagacagacacaagccctacccacaatgccttataatgttgaaaggttttcaagcatttgtgtacacttaaacagaggcagtagcaggctaagtgtgtgtgtgtgcacacgtggggaattacattttcttttaaaaatatactttgtaaacaagtaaattagtctgattattcaggttaacttatcacagttttcaagtaagcacgaatagtcatagaattagagaaactatgtttcaaaacttcgataaaactcattttgttttctgacattggttat

SEQ ID NO: 180354 - DNA, 634 bp, Homo sapiens
cctactgttattgtattgccatttatcttcccctttaggtctaataatatttgctttatatatctgcatgctataatgttggatgcaaatgtatttataattgttacattcttttgctgaattgatcccttttatcattaaataaagacctttttctcttttacggttgttgtcttcaagtcttttttatttgatataattatgactacatatacttgcttttggtttttatttgcatgaaatatatttcctttccttcactttcagtctatgtttgtctttaacagtgaaacagtgagatgaatctcttgtaggtaacatagaaatcgagtcttatttctttcatctactaaccactctacagcttttatttggagaatttaatatatttacattcaaggttattattgatagataaggaattacttctgccattttattaattttctggttgttttgttaawgctttgttcctttcttcctcttccattgtttacttctgtggtttgatggttgtctgtggtactaagctttgtttcctttatctttctcatttgtgtatttgctataattacatttttgtggtaaccatgggtctaacatcaagagtcttaaagttataacagattaattt

SEQ ID NO: 180355 - DNA, 595 bp, Homo sapiens
tctggtttccatctttctcctgtgctggatatttcctgtccttgaacattggactccagtttcttcagctttgtgactcctggatcttcaaccacagactgaagactgcactgtgggcttccctacttttgaggctttgagactcagactgggttcctggctcctccgcttgcagatggcctattgtgggaactcaccttgtgattgtgtgagtcaattctcctaataaactccccttctcccatatgtgtgtgtgtgtgtgtgtgtgtgtgtgtgtgtgtgtgtgtgtgtrtatatatatatatatatatatatatatatctcctattatttctgtccctctagagaaccctaatacagttagagagaaacatgacagggagggggctagaatgcaacccagtattctctttaatgttctcttttagtgaaagaatgtgctacatttctaagtttaaaattcaataagttttttttcttaagatcctctatttgataatacttttataatatacattttaatgatgtacgactttggtagattccttttattgtatacacaagtataatggtacttattaaaaatgatagtaag

SEQ ID NO: 180356 - DNA, 588 bp, Homo sapiens
ttatagtaggtgtcacttggtggtaggttaattattaaaatgccacttgctttacaggaaaaataaaaatccctaggattgattttacatgtatgtagtgcttcacaggctgagaatatcactttgaaattgcagagatgttgaatgtggatcacctttttttccttacataaataaaattcagtaattcactgttaatttggggcaaataaactaaaatttgctcatcttattcctaggggaattgcggcttttggaatcctcacttcctttgttgttcataaatgaatcgaatagtcattctaaaattagtgaatggaactgarttccaaaatttttattatctgagttgactgatcttgtggatgtcattcccctcttccacacccacccccagcacctgccaatttccactcccaatttgttaggtggagcaaacattgccagactcaagtcttgctattatttcaaggaaattactcacattgtgaatactttccactattaatagttcttttttgacaaattgatattcattatgtttcctttggagaaatgcattcaaatttataaaagttctgaaaaaca

SEQ ID NO: 180357 - DNA, 613 bp, Homo sapiens
cagtctttttgctggtggagagtgttgcctcaaagttgatggctgctggctgatcaggatgctgtcaattgtgtcaaactgcagggtttgagatacttgctgctttaccaagtttatgtaatataataaatcctttgttgttctttcaataaccttcacagcattttcaccagaagtaaaatcgatcttaagaaactactttcttttctcaaccataagaagcaactcctcatccatgatgagattgcagcaattcagtcacatcttaaggctccaattctaatgatacttcttttactgttttcaccacattcgcagttacttcctccactgaagtcttgaacctctctaagtcattcgtgaggactgtaaccaacttcttcaaaactcctgataatgttgatacgttgacctcctcccatgaatcataaatgttcttaatggcatttgtattttcaaatggtgaatgctttccataggttttcaattcatgttcccaagatctatcagaggaatcattatctgtggcagctatagccttatgaartatatatcctagataataaaaattaaaagtcataataactccttgatactcaggctacagaattga

SEQ ID NO: 180358 - DNA, 668 bp, Homo sapiens
taacagcatgcagttcttcacagataatattcagtcaatgagtaaatacactacaaaacatctttcttccactccgtttatgtttagcagcctgaactaatcagaaggaaactcacttaaaacaagaactgacttcttgtgaaggatcatgaaagttttgagcattgcatcagaatgcagatatttaaactcctctgtctaacttgcttctcaggaaagatttatagaatgtaagataaggaggttaagatgacagtgtttttttttattagacctagccatgcttaaaccttaaatccaagatstttctcttaatatttttgcatccatataatccacctcctctatgtgttaataaatactttctctaagagggaaggtgggagggaggaaaaggagggagagaataagagaaattgtggaaaaaggtataatcatgaccctcatacagatataagatgaacatatttcaaccatatcaattaaatcactaatcaatgagaaagccagcaagaggcaataactggttcacaggagaatctaaagacacatagataaaccaccaggaatgatgaaataaatacgcttaataggttaaaaaaatgtcaaaactagtcaatatctatgtaataatcaactgactctccttcagacaaaagttgcatttt

SEQ ID NO: 180359 - DNA, 668 bp, Homo sapiens
taacagcatgcagttcttcacagataatattcagtcaatgagtaaatacactacaaaacatctttcttccactccgtttatgtttagcagcctgaactaatcagaaggaaactcacttaaaacaagaactgacttcttgtgaaggatcatgaaagttttgagcattgcatcagaatgcagatatttaaactcctctgtctaacttgcttctcaggaaagatttatagaatgtaagataaggaggttaagatgacagtgtttttttttattagacctagccatgcttaaaccttaaatccaagatctttctcttaatatttttgcatccatataatccacctcctctatgtgttaataaatactttctctaagagggaaggtgggagggaggaaaaggagggagagaataagagaaattgtggaaaaaggtataatcatgaccctcatacagatataagatgaacatatttcaaccatatcaattaaatcactaatcaatgagaaagccagcaagaggcaataactggttcacaggagaatctaaagacacatrgataaaccaccaggaatgatgaaataaatacgcttaataggttaaaaaaatgtcaaaactagtcaatatctatgtaataatcaactgactctccttcagacaaaagttgcatttt

SEQ ID NO: 180360 - DNA, 488 bp, Homo sapiens
ataacagcacctttctcgtaagactgctgtgttgatcaaataagagacagcaagcgaaatccttagcctgcagcctggcatctcataagcccctaataattattactattcatgattactctttttaactaaaaccatgatcatgacaccctttaggtgtttttttagaattgtcataaacttttgaaattataacttcccaataacaaagatgtcttaaaatatgaacaattattttctgagaaagacagatggaaataagtataactaatcattctgagaaatcagagataaatttcacatggccggttcctaaaatagtctataaggtggagggagaaatcacaagacaaactggccgggagggtttgggaccaacgtggtggaaattaagcagagatacagatgcaaayagaattcacaaaaaacaaggacagatgagaacaaagactgtcaggagatctaaacactggtaaaccaaatatttc

SEQ ID NO: 180361 - DNA, 683 bp, Homo sapiens
agctctactgtcttttcctgtgaagatgggagctctggtaactggactcctcttcctacctggcagccagcatggtggtgagaagtcccctttgcaaggggtctctcctcccagtctcccccagcccccacccctcaccgtttatcagagacatgggggggtgaacagaagttacagtcattaggatgtttgtgctggattatttccagcacaaaataatccagtgggaagtggacccacttccactcctgagcagggcatgttgatttgatgagtctttcatcctcagagaagtagatttcatctacttattagtctacttattgattcatttagcagatatttacagggagaagcattcaccaggccctgtgccagggaggtcatcgcacttttcaagaatgcactcttggggggcagtgatgcccctccccaggcttctgtgctgtgtgtggtcaggsgtaaaagggaaattaaacgttttttgaaagccatggtctttatgggtaagcagaagagaaactaataggatcagttatttctagtgaaggggaagagtccatagttgttttggaaagtttttaaaatgcaaatacaattatgggtcttaggaaattccacagtgtgcttcatcttaccacctacctagccccctgtgggcctggattgctgtccccagcccc

SEQ ID NO: 180362 - DNA, 422 bp, Homo sapiens
aaaactgctcaaatgaaaagataggttcaactctgtgagttaaatgcacacctccaaagaagtttctcagaatgcttccgtgtagtttttatgtgaagatatttactttccacaattgccccaaagctctaaaatrtccacttgcagaccctctaaaagagtgtttcagaattgctcaatcaaaggaaaggttcaattctgtgtgaccaatgcactcatcacagagaagtttgtctgaatgcttctgtgtagaatggatttgaagataattccttttccaccacagtccgcaaagggctaaaaatatccacttgccgattccacaaaaagagagattcaatactgctcaatcacaagataggttcaacttggtaatttgaaagcacacatgacaaacaatttctgagaatgtttctgtgtag

SEQ ID NO: 180363 - DNA, 422 bp, Homo sapiens
aaaactgctcaaatgaaaagataggttcaactctgtgagttaaatgcacacctccaaagaagtttctcagaatgcttccgtgtagtttttatgtgaagatatttactttccacaattgccccaaagctctaaaatgtccacttgcagaccctctaaaagagtgtttcagaattgctcaatcaaaggaaaggttcaattctgtgtgaccaatgcactcatcacagagaagtttgtctgaatgcttctgtgtagaatkgatttgaagataattccttttccaccacagtccgcaaagggctaaaaatatccacttgccgattccacaaaaagagagattcaatactgctcaatcacaagataggttcaacttggtaatttgaaagcacacatgacaaacaatttctgagaatgtttctgtgtag

SEQ ID NO: 180364 - DNA, 406 bp, Homo sapiens
catcaagcctgtttcaatggtgtgcatgtttccctgctattggcctcttcaaccccagaaaaggtcatgaactatatccctccagctgcccggyttgttacgtcggctgatgggacagatggcagtgccgatgataacacattaacgaagtgctgtttgccttcattaaatatcacaagcaagttgttcttttattctataaaaagggtgtgtggaaaatatagagtgaatgtagccaattaatttagcttttattcaaaacccccctgaccatgattgacacccaaacatgcttaatccattaaccatcctgggctcaggatcaatgttttgtcagcaggaaatatttcattttttagcaggaagcaaggggaaggcctctgaatgatggactgcagacagacat

SEQ ID NO: 180365 - DNA, 535 bp, Homo sapiens
acaccctagagcaaaacaaagattctggctgggaacagtggctcctgcctgtaatcccagtacttcgggaggccaaggcacgaggatcacttgaggccaggagttcaagaccagcctggtcgatatggtgaaatctcgtctctactaaaaatacaaaaattagcccagtgtgatggcgcrtgcatgtagtcccaactacttgggaggctaaggcaggagaatcacttgaaccgggacgaggaggttgcagtgagccgagattgtatcactgcactgcaacctgggtgacagtgagactccatctcaaaaacaaacgttttgctctctcccaaaaataataaatcgccgtgatattaacatttttttgagaaccgagtccattacaatgtcctgttcgggtggtaagcagtgttgagagtgggcatatttttgttcctatatttaataatactcagaacaaacactatctgcttgctccagagaatactggaccctgcaattaaagctgtaaacaactaaaattgcttaattaaca

SEQ ID NO: 180366 - DNA, 535 bp, Homo sapiens
acaccctagagcaaaacaaagattctggctgggaacagtggctcctgcctgtaatcccagtacttcgggaggccaaggcacgaggatcacttgaggccaggagttcaagaccagcctggtcgatatggtgaaatctcgtctctactaaaaatacaaaaattagcccagtgtgatggcgcatgcatgtagtcccaactacttgggaggctaaggcaggagaatcacttgaaccgggacgaggaggttgcagtgagccgagattgtatcactgcactgcaacctgggtgacagtgagactccatctcaaaaacaaacgttttgctctctcccaaaaataataaatcgccgtgatattaacatttttttgagaaccgagtccattacaatgtcctgttcgkgtggtaagcagtgttgagagtgggcatatttttgttcctatatttaataatactcagaacaaacactatctgcttgctccagagaatactggaccctgcaattaaagctgtaaacaactaaaattgcttaattaaca

SEQ ID NO: 180367 - DNA, 567 bp, Homo sapiens
caacataacccatcccacacccagagaaagactgattcaggaatgggcatcagacccagtcctgtctactcctgtggctttcgttggtatgaacttgtccactggaattaaaactggaaagataaaaaccatggcgattggggcatggggtggcggtggccatagagaaaataaatatcttattaatgcagataacacagagggaagcagaactaagtgatggggtgaaaccgaatcctgaagacgctcagactccaacttggacaaaaatcatcacaacccttttagttccatgagccaataaacttattttaaggaagagaaggcttaagccagtttaatttgggtttctattacatataaccaaaagactatccattttttttttcagtaccaatggggtctycctatgtggcccaggctggtttcaaacttatggcttcaagtgatcctcctatctcagcctcccaaagtgctcccataaattatttcaggaatttatagtagacttgccagtacccactgcttctctgccaccctggcgtcgatccttcccaccagtatctt

SEQ ID NO: 180368 - DNA, 567 bp, Homo sapiens
caacataacccatcccacacccagagaaagactgattcaggaatgggcatcagacccagtcctgtctactcctgtggctttcgttggtatgaacttgtccactggaattaaaactggaaagataaaaaccatggcgattggggcatggggtggcggtggccatagagaaaataaatatcttattaatgcagataacacagagggaagcagaactaagtgatggggtgaaaccgaatcctgaagacgctcagactccaacttggacaaaaatcatcacaacccttttagttccatgagccaataaacttattttaaggaagagaaggcttaagccagtttaatttgggtttctattacatataaccaaaagactatccattttttttttcagtaccaatggggtcttcctatgtggcccaggctggtttcaaacttatggcttcaagtgatcctcctatctcagcctcccaaagtgctcccataaattatttcaggaatttatagtagacttgccagtacccactgcttctctgccacyctggcgtcgatccttcccaccagtatctt

SEQ ID NO: 180369 - DNA, 442 bp, Homo sapiens
aggcagagtgggctgatgaaggagaatgggccggcaacagcccaggagttctgcgttgggtttttatgatgtcagattttttcttgaagttcttgtctctgtcttaagtctctgcctttttcttggtctagttttcctgcttctgccttcagtccccacctttccccttgcctagttcccaccccaggcttgtggaaccctcctttactatttgctggtgcccatgcgtgggccaggtattggttaccagtgctgccttatggctgcattgctcattaccgccacccaggaaggttgtatagtggtcagatccatacttaatgtgcctctgtatctctaaggaatttctcctttgccctcrtctcctccttatcagcatgtagctagcgacaaactgacaggtgaactgctgggtgagcgattactgggggtcttaaggggt

SEQ ID NO: 180370 - DNA, 546 bp, Homo sapiens
tgcaattctttatcccctactctctttactgcaataacctaaacatttggagttacaagttttgttagagtttcttgtctttgaatgatcatctttgaactaataattaagtgtatgtgattattcatagttcatttatttgaaatttttttatttgtgtttaatgctgtgggagagatgttagtgtttcagttatttcctctccaaatcctctaggcaaaattcatcactccctccttggtgcaccctttatgcctcttgcataattcttctcacattgcgctttgcttggtttttctatrtgtccatccctccaagaaactgtgagcctttcagggaaagaactacatcttcttcatctcagggtccccatttccactgtgtctggctcgtaaatgtttgtacaactaaattgagttgtgctccttgtgggaaaacagaagaagccaactaacttaacatttatcttcagtgcttgttggtctttgacaggacattttcctccaaaaggtaattgatctcaactgtgcttatgtttcagccatt

SEQ ID NO: 180371 - DNA, 546 bp, Homo sapiens
tgcaattctttatcccctactctctttactgcaataacctaaacatttggagttacaagttttgttagagtttcttgtctttgaatgatcatctttgaactaataattaagtgtatgtgattattcatagttcatttatttgaaatttttttatttgtgtttaatgctgtgggagagatgttagtgtttcagttatttcctctccaaatcctctaggcaaaattcatcactccctccttggtgcaccctttatgcctcttgcataattcttctcacattgcgctttgcttggtttttctatatgtccatccctccaagaaactgtgagcctttcagggaaagaactacatcttcttcatctcagggtccccatttccactgtgtctggctcgtaaatgtttgtacaactaaattgagttgtgctccttgtgggaaaacagaagaagccaactaacttaacatttatcttcagtgcytgttggtctttgacaggacattttcctccaaaaggtaattgatctcaactgtgcttatgtttcagccatt

SEQ ID NO: 180372 - DNA, 539 bp, Homo sapiens
taaaaacgtactggtcaaaggaacaaaatagaaagtccacaaacatatgtaaaactacatgcaattttagagggtgaagaaaatagcacatcaaaatttggaaagacgtattaactatttaataaataatattgagacaacaggctattacttaaaaataaatttatagctgtaattcttttaaaaagccaaaattaatgttaattagattaagatttaagtgcataaaatacaaccatagaatatgagatgaaaatatacctcattacaatggaagaagagtgtctaagcatggcacatayaaccttagtcataaagaaaaacattaataaatttgcctaaataaaatttaactattaattttaatgagacataaatatcatgaactataaactaatgatagcacatgtaatagaaaagggttaatattctttcccttagggtgcttttacctaattaattagtggaaaaataagcaaaaaacacaaaaaggaatatcataaatgaaaaaatataaacagaaaatttaaaaagttaaa

SEQ ID NO: 180373 - DNA, 497 bp, Homo sapiens
gaattcttctgtttgtgaaatattatacwtatcaactaactcatataaccatctgtgtcatctctgttaaatacgaatctgacactcagatttgtcccttggttagcttagttttgagagtttcaagataaagcaattcaatttcccttcagatcttaatgagcagtagccataaattataagcttcttgaaggaagagatttcaagtttctaaaagtaaccactatgatacttgttccttggtttacacataggagccttaataagagaaatgtcaatgtgaagagagtttatggcacatggagtctgtgctaatatcaaagtgtattattgaattggcatctcccaacactaaaatgatctgcatatttttgtgatgccaatattctttcataactgaagtgaggggatgatgcatattccaacagatactgaggagaaaacaagggctatagttagatactttctgaagtacaaacctgtggtttcttttcctg

SEQ ID NO: 180374 - DNA, 553 bp, Homo sapiens
ttattttccaattttatttttatttttctggtttaatattgatttggctgttctctgatttttgcttcttcatataaactttatagtaagtaagtttgtcaatatccacaaaataatttgttggatatattatttttctgaaagatataaagctatggggtgacttgatggaaatatttattatattccagagtagagagagttaktaaaattattctttgaattattcatgattttatttctatcataactatatagaaaaattttaatactaataatgataataaaatttgtaatatcactttggagtatgcatttaataattttttcgttgtgttcatgtgattgcacacatttttatttcataggatttagatcataaagttttatgaactatagcctcataatctgatactttccaataatattatgaccaatttcttattaaaatattaagagaacagttttactagtaaaacaaaattacatttaatacatcattcgtaattgacttgattttttaatcaatttttatatttattatatagaaaat

SEQ ID NO: 180375 - DNA, 553 bp, Homo sapiens
ttattttccaattttatttttatttttctggtttaatattgatttggctgttctctgatttttgcttcttcatataaactttatagtaagtaagtttgtcaatatccacaaaataatttgttggatatattatttttctgaaagatataaagctatggggtgacttgatggaaatatttattatattccagagtagagagagttagtaaaattattctttgaattattcatgattttatttctatcataactatatrgaaaaattttaatactaataatgataataaaatttgtaatatcactttggagtatgcatttaataattttttcgttgtgttcatgtgattgcacacatttttatttcataggatttagatcataaagttttatgaactatagcctcataatctgatactttccaataatattatgaccaatttcttattaaaatattaagagaacagttttactagtaaaacaaaattacatttaatacatcattcgtaattgacttgattttttaatcaatttttatatttattatatagaaaat

SEQ ID NO: 180376 - DNA, 528 bp, Homo sapiens
taattctccaccagagaatgaaaacattgctatacaaaatccatctgacctttagttttagataaacagaagctactacctgtgtgcagaatagacaaggagattcaatgggaacctcctcctgtacagcccaactgaacaactgccaacacaagcagaaaagcagatctcttttctatcctctgtactcctaggacttgaatttgaaggtctaccatctgcatgtgcctcttaagtcctggatttatcactccaggcaccttcatayacaaacaggtggaactgagttcaaaatgcgaaagctttcccttccaacaatcagaagtggtagatgtgctgattcagtggagaatatgtatttacacatacacaaatgtgtgtttactcaaaaaattgtttacatatcatataggacaggtttggtagttcagcagttcaggaaaaggggtactaccatattctttgtatttatttcaagggtttaaagtttaaaaagtcacctaactccaagaatttttccctggggtt

SEQ ID NO: 180377 - DNA, 528 bp, Homo sapiens
taattctccaccagagaatgaaaacattgctatacaaaatccatctgacctttagttttagataaacagaagctactacctgtgtgcagaatagacaaggagattcaatgggaacctcctcctgtacagcccaactgaacaactgccaacacaagcagaaaagcagatctcttttctatcctctgtactcctaggacttgaatttgaaggtctaccatctgcatgtgcctcttaagtcctggatttatcactccaggcaccttcatacacaaacaggtggaactgagttcaaaatgcgaaagctttcccttccaacaatcagaagtggtagatgtgctgattcagtggagaataygtatttacacatacacaaatgtgtgtttactcaaaaaattgtttacatatcatataggacaggtttggtagttcagcagttcaggaaaaggggtactaccatattctttgtatttatttcaagggtttaaagtttaaaaagtcacctaactccaagaatttttccctggggtt

SEQ ID NO: 180378 - DNA, 610 bp, Homo sapiens
tcatctgggagcaagatcctggaatgaggatctcatgactctgattggtgcccctctcctgctatggctgaattgatacccaagatgtaaagcaaagtccttcccactcttctctactcaagcataaggaaggggtcttttttggagctgtgaactgtgcagcctggggttagaggaggggtgatgccaacactcccttagctgccccagctcgtgtctcagtatgtcacrtccccgcaccagtccactgtctctgggcctagttcagcactaggacctgcctatgagttgtagttcttgagaattcaagtttggactactgggatcagcgaatccccttctggttagggctgatctaaatgctttctccatgggcagcatcagctgagttaggtatggttttcctttctgctctaacaggacagcagtgagttcaatgccttacagttgctgtgttctccctcccccagtgtccagatatgctctctgcaccctgccactgctgctgaggggagaagaaagggtggtgtcagtgattaactactgctttttctacctcttcaatgcctctttcagtgatataaagttaccaccaggtactatgagtgct

SEQ ID NO: 180379 - DNA, 561 bp, Homo sapiens
agaataataatcgtacctattctatagggttgttttgaagataaactataataatatatgtaaagtgcttgaaatagcacatagaaactatgctaaaatatagagaatggaatttttcacttagctatttgcaataataatcttaaattatgtagttagaatttggctcagcaataattttattatacttagccaatgagagtcatatttgtttaattaataagtgtacacaaattttttaaccaaaaaatatgtgaaaagttccctatagccatgcatgctaacataactatttaacaactgacaaaccagaacctatgcttccctgatctctaatccccacatcccaaaattacctctgcaatccctctgctgagaccgccatggtataagayattctctcacaataatacttttgacactatggacaataccctctttgtaagagtgccccatacttggtgttggtataccaacagtctttggaataaactggcgtgaacatagagatcaaattttacatgctaagaacttattgaggatacagactacactgaagag

SEQ ID NO: 180380 - DNA, 552 bp, Homo sapiens
aatgtcaaatatagtactcaatgtctctgaaaattgttaaatataaggacaaatattgtacagaaaatttgactgataaatgtgaagctatgcattatctatagtaattagtatattgcaaatttmttaggctttatttctctttagaaagtttctgaaagcattcatggtattactggagagtgtacattaaaaagctcctcaaaagtccttaatactccagaaatatagatgttaatgtacacttctctcaccttgtacttgctaccatgaacagaagattgtgaaggtaaaaccatttgctctttgatttataaggatggcttgagtccatataaaatagactcttcaatgctataatgtacattttaagattaaaaatattaatattcaaatatgagagagtgattttaacattaatttttaaattttttacaaaatcatattcccaaaatatttttggctttcataaattgaagaaaataatgaaaatcctgttgatgttcatatgtcaaattatatgcacatattcagtttaatgtcacaaattcc

SEQ ID NO: 180381 - DNA, 552 bp, Homo sapiens
aatgtcaaatatagtactcaatgtctctgaaaattgttaaatataaggacaaatattgtacagaaaatttgactgataaatgtgaagctatgcattatctatagtaattagtatattgcaaatttattaggctttatttctctttagaaagtttctgaaagcattcatggtattactggagagtgtacattaaaaagctcctcaaaagtccttaatactccagaaatatagatgttaatgtacacttctctcaccttgtacttgctaccatgaacagaagattgtgaaggtaaaaccatttgctctttgatttataaggatggcttgagtccatataaaatagactcttcaatgcyataatgtacattttaagattaaaaatattaatattcaaatatgagagagtgattttaacattaatttttaaattttttacaaaatcatattcccaaaatatttttggctttcataaattgaagaaaataatgaaaatcctgttgatgttcatatgtcaaattatatgcacatattcagtttaatgtcacaaattcc

SEQ ID NO: 180382 - DNA, 565 bp, Homo sapiens
aatgttccaataaaatgtcaaatatagtactcaatgtctctgaaaattgttaaatataaggacaaatattgtacagaaaatttgactgataaatgtgaagctatgcattatctatagtaattagtatattgcaaatttattaggctttatttctctttagaaagtttctgaaagcattcatggtattactggagagtgtacattaaaaagctcctcaaaagtccttaatactccagaaatatagatgttaatgtacacttctctcaccttgtacttgctaccatgaacagaagattgtgaaggtaaaaccatttgctctttgatttataaggatggcttgagtccatataaaatagactcttcaatgctataatgtacattttaagattaaamatattaatattcaaatatgagagagtgattttaacattaatttttaaattttttacaaaatcatattcccaaaatatttttggctttcataaattgaagaaaataatgaaaatcctgttgatgttcatatgtcaaattatatgcacatattcagtttaatgtcacaaattcc

SEQ ID NO: 180383 - DNA, 644 bp, Homo sapiens
ttggttgcatgagaaggttcaagatggcctcactcattgtattagtcccttctcatcctgccaataaaagcatatcagagactggtaatttataatggaaagagatttaattgactcacagttccacatggcttgggaggcctcacaattatggcagaaggcaaggaagagcaaagtcacgtcttayatggtgttaggcaagagagcttgttcaggggagctcccatttataaaacaatcagatctcatgagatttattcactaccacgagaacagtatggggtaaaccacccccatgattcaattatctccacctggccccacccttgacatgtggggattattacaattcaaggtgagatttgggtggggacacagccagactatatcactcatgttcagcagttggtgctataaatctgggatgccccagatcttcttcatatggccttttgtcctccagtaggctaaactgacctccttcatggaagtttcagggcaattcccaagaaaaagaaagcaaaaacttcaagacctcttgaggttgagcctttggaatttatacaatgtcttcattgtggtggcttactaggatgcagttcacaagaccaacccagactcaagtggcagggaaatgaaggcca

SEQ ID NO: 180384 - DNA, 644 bp, Homo sapiens
ttggttgcatgagaaggttcaagatggcctcactcattgtattagtcccttctcatcctgccaataaaagcatatcagagactggtaatttataatggaaagagatttaattgactcacagttccacatggcttgggaggcctcacaattatggcagaaggcaaggaagagcaaagtcacgtcttatatggtgttaggcaagagagcttgttcaggggagctcccatttataaaacaatcagatctcatgagrtttattcactaccacgagaacagtatggggtaaaccacccccatgattcaattatctccacctggccccacccttgacatgtggggattattacaattcaaggtgagatttgggtggggacacagccagactatatcactcatgttcagcagttggtgctataaatctgggatgccccagatcttcttcatatggccttttgtcctccagtaggctaaactgacctccttcatggaagtttcagggcaattcccaagaaaaagaaagcaaaaacttcaagacctcttgaggttgagcctttggaatttatacaatgtcttcattgtggtggcttactaggatgcagttcacaagaccaacccagactcaagtggcagggaaatgaaggcca

SEQ ID NO: 180385 - DNA, 563 bp, Homo sapiens
atgttctttctgtagtcctggaaactatgcataaaattgcaggtccaagaaagtgtcaattgctagctcccttcccactaactcacccataacctctgggaaccctcttaacctcatctgtaaaatgaggcgaataaccttgacctgttttattggctgttgggaggtttggcagtaaatgtttgaaaagcactttaaaaacacacgcagatgaaaaattaaaaaaaaaaggtcatttaggtgacagcagaaatgcatacagtttttgaggtgtaccaagttaaacaagtgtgcacctgagacccctgagtaagagacatgtggtgagtgattcatgttctgtctgtcttcagtggtaactgcttgtcgttgaagcactagataagacaacatcaatagaaaaaggctgtttgactattcccagagaactgtaatttcattattaggggctctaagcaaaaatttagcactataaacactttygaaaaatataaatgcaaagagagctaaggtggaaagggaaagatctcagagacaaaaacactgcatttttccatataaat

SEQ ID NO: 180386 - DNA, 614 bp, Homo sapiens
caccccgttgaaattgttgcaaagttcagctagagattttcttctccctgtgyagttttacccccctgctcctctccctttggatccctgtggtgccaggcaggaatgggctgcgaggggacccagtgagctcccagggcctttctgctgcttcctctacccctatacttcactcaactctccaaattaactcagctccaggtaaagttagaaacttctcctgcaaacagaccttcagcttctccagtgggggtgtgtgtttgggagaggagggtctccttttcctactcccgcagttagggcactcagtttttggggggtctccagggtccttcaggagcagtcttcttccttcagagggtctgtgggtcctcttggaattggtgatttgttcttgcggtcgatctggagctaaaatttacaatgtgagccgcagcccactgctatgtccagagcagcaatgaaatagactttattatttagagcggttttaaattcacagcaaaattaagcaggacgtacagagagttcccatgtaccctctgataccacatacaatctccctctctattaacatcctccagagtagtacgtttgtcatcactgatgaacca

SEQ ID NO: 180387 - DNA, 593 bp, Homo sapiens
aggttgtttgtattcttaaagttttcagaattctttacatatttttgataatattcctttatcagatgtgtcttttgcaaatattttctccaagtctgtggtttgtcatttccttgtcttgataatatctcttgcagaacaaaattttttaatttcaataaagtccagcttaccaattctttcttcaatagatctttacatttggtgctgcaactaaaaagtcaccaccaaacccaatgtcatctagacttttttatgccatcttctatgaattatatagttttgcatttgacatttaggtccgtgattcactttaagttaattttcataaagtgtgtagggtctgtatctagattcattttatttgtatgtggaggcccagttgttccagcacaacatgttgaaaagacaatctttcatttattttattgcctttgttcctttgccaaagatctatatttgtgtgggtctatttcctgactgcctattctgttccatcaatcyatttgtctattcttttgctaataccacactgtcttgatttacggtaaagactgacatcaggtagtatgaatcctccagctttgttcttc

SEQ ID NO: 180388 - DNA, 575 bp, Homo sapiens
tttttcctgcattgttccgtaaatttatccattcatttgtctacctgcccatcagatctttattgagatttactctgtgcatccacattatagaagacactaagttaagtatgactctgtcactcctctctagaggagcacaaaatgtccacaagccaattctaatacactataaggccagcaagagcgaacacagtgcttttccagttggggagtggggatcaaaaaaatgtgcttcaacttaaggataagtagaagtcagccagccagctttagaaaaaaaatgagagggaggtggcattgtaggtagtgggaatagcttgtggttagagaggcttaatgaccacagcacagtagggggctgcaagagtgcccttgtggctggagcactggaaacaaatggggcgtgggcagcwatcagtctatgcaagtacagtagatgggtcatgttccattcttgctttctcatatccagatcgatatgaacaactggaacaacctggccagaaactggccttcacatcttctctggccatgctcaagcaaggactatatgcaggccccatttctcctaa

SEQ ID NO: 180389 - DNA, 522 bp, Homo sapiens
agttgggtctttccagagtagagccagcattatgacctcccatcgctcccactttaaataggatttttgacactcttggtgagtgaggaggcccagacaggcacctccacaccagaaatgttatcagcacctgcacccttgccagctaatagtcagaccrtgtgctaacagtttgttccccttgcccaactccacagagggccctcactctatttgcctttgctctctacctatattttgagcgggaagaaaactatttttttccagtaatatccattttacaaccattttgtgcaaaagctgaaagctgtcagagcagtaatgcattgcatcaaattaacatattttcctgaaatggtaattacaccctttttgtgtgcctctgaatacatattttttgaagtgtgaatgaggtgctgacatcaaagtctcactttaaatcatcattagtagtgcgtctgtccaaatgattccagggaaatagctggcagaggttgttaagtttagaggaatttaaaggtg

SEQ ID NO: 180390 - DNA, 420 bp, Homo sapiens
ttctgcccctctgggcttttgcctgcatccyatctgcctgaatcgttaaatgaatgaatgaatggggaaaaagagcatgtgtataagccataatggcttccaaaactattatcaccagccttcatcacagaataatttaattggttcctcatgatgggtcatgatgaaggcagccaggagtatcttgggattctggtgtgaagttgcagggacttcttttggggcttaatatgattgatgtgatacaagccctggaaatgaggctgccaaggaaagtccccacctccctcccagcccaccaacccaccatgacacatctgtttgaacaactgggctgcagactgagctcaagcaaaagtcatgtgggaacctggttctagtgcacagagaggtttgacaaattgccatttggacacctga

SEQ ID NO: 180391 - DNA, 420 bp, Homo sapiens
ttctgcccctctgggcttttgcctgcatcctatctgcctgaatcrttaaatgaatgaatgaatggggaaaaagagcatgtgtataagccataatggcttccaaaactattatcaccagccttcatcacagaataatttaattggttcctcatgatgggtcatgatgaaggcagccaggagtatcttgggattctggtgtgaagttgcagggacttcttttggggcttaatatgattgatgtgatacaagccctggaaatgaggctgccaaggaaagtccccacctccctcccagcccaccaacccaccatgacacatctgtttgaacaactgggctgcagactgagctcaagcaaaagtcatgtgggaacctggttctagtgcacagagaggtttgacaaattgccatttggacacctga

SEQ ID NO: 180392 - DNA, 508 bp, Homo sapiens
tgaaaactgtcacaactggtgttctgaattcgtagatatcttgggtgccttgtaatgccttctatttttcatttagaaaaaagaaaatacctgtctttgaaaatcacagtggcttatgaagtggtcagactgagtttcagttttgagctctctaggtgccgtgggccgagtggctggcatgtaacacattcaggcagagatgctccatgaggaacttcttaaaatatggtgcagagaacatrggctcaagagcttgacttgaggtcctctcctttccagccctgagacctttggcaaattcatctccatgcacttgttttcttcacctgtaaaatgggatccagatcaacaccctctccaaatggccaaggggattaagtgagattcattcatccactgcccagaacaggactttgactaatgttttagtcctacctgtagcatttgaagtaattaacaaaatgcttttcaaacagtacctgttagataaccctgtgtggaaagaatg

SEQ ID NO: 180393 - DNA, 526 bp, Homo sapiens
gaattctttgcttttactgttgcttttccctgacctttcagcctgtcttcatcctggggtattttccaagcacctcctttgaaatgcgtcctataaaattctccatgtctaagaggggtcaaggtttatctgatgctatcatctacctcactttctgcacacttacgacgtcagccttggtgcagttgccctgatagactccgcctcctctgacctyagggcccttacacatgttgcttgcttcctgtatctagacatctcttccctgacttttcacctgggaaagtatgttttgtctttggatctcagctcaattggccttctcaaggaagtggtctctggccagccagtcaaagtgaaagccttctagtctgtgctttcctctcagcagcctgggtttttcttcattgcatgcctcacaactgatactgaaacattcattcgtgtgattccttggcttatatcaatatgccccactctgcagtttggtagtttccaaagtggagtatacaagatgatccaatga

SEQ ID NO: 180394 - DNA, 571 bp, Homo sapiens
tgatattttataatattttattcattgtgctgggcataaagtaagcttttaaaatctgaaaacctataacctttaattatggcaaattttctcattctagctcttgtataattttctcaattctaatttcttcatttcctggaactttcctcagttacattttgaaccttctgactaattttttaacacacttatcttttccttactcttttccattactttgtctttttattctactatctagatttcttttcaaatacatatacagatamatttgtccattctatcaaactttgtattttggctttcataattttaatctctaggagaaattttatttgttatttttgaagctccttttaaaaatcatgtaattcttgtttcatggattcgatattttttacctctgtgagaatgtaaattggagagtttccccgcatagttttcccttctctgagttctgcatcgtatttattttctctaggctcctttactctgtttatctgcctttcagttagaggtgttactcaactgttttaatatctggtatcttttcgcatttaaaagtgaa

SEQ ID NO: 180395 - DNA, 511 bp, Homo sapiens
tcataaatatctattttatttgcacctatgtctcccactgtgatcagccataaccggatagtaaatccaactgacaggcaaaaaaaaaaaaaaaccataaaaaatattgaagtaaaacrctcatctttgtgttgttttttctagtcatatattcaacatagctcttcagccaaagactccttaaggcagatttctctgacgcttgtcagtactgcttctttgattgagtggtaattagttcaacttacaaattgcagttattttactaatgaatctcaaatggaatgaaaccaatcagaaattatttactgggcatgacaatatgcaaaacaaataataaatattaactcatttgttaatctataggattacaattattacatataaatatgtgtaatatgtgtgcatatgaatttgataattgttttaattgtatataatttattaataattttaatcattaccaaaaaaagtatgacaggttcttacccttaagaaggttagcatctgt

SEQ ID NO: 180396 - DNA, 581 bp, Homo sapiens
cagtgaggacaaacctctgccatttccatgacagaagagttctaatataatcaacctgccaccaggtagctgactgatgccccaagaaatggtgccataccgaaggctcagtattggtctctgctgctgaaattgggcactcagcagtggctgtagccaggtcagccttgayaggtggaagtccatgttgctgagcccatgtgtaacctccatctctgccaccatggcctctttgttcatgggcccattgggtgataacaggggtggctcaggaaacaggctgagtggtatccacagaatgggtcaccctatccacttgattattaaaatcctcctctgttgaggtcacccgttggtgaacactcacatgggatacaaatatcttcacagtttttgacctctcagaaaggtctatctgcatacctcttccccaaatttctttatcaccaattttccaatcatgcttcttccaagtccctaaccatccagccaaaccattggctacagcccatgaatcagtatataatcacatatctggccatttctccttccatgcaaagtgcacaaccaggtgcactgct

SEQ ID NO: 180397 - DNA, 581 bp, Homo sapiens
cagtgaggacaaacctctgccatttccatgacagaagagttctaatataatcaacctgccaccaggtagctgactgatgccccaagaaatggtgccataccgaaggctcagtattggtctctgctgctgaaattgggcactcagcagtggctgtagccaggtcagccttgataggtggaagtccatgttgctgagcccatgtgtaacctccatctctgccaccatggcctctttgttcatgggcccattgggtgataacaggggtggctcaggaaacaggctgagtggtatccacagaatgggtcaccctatccacttgattattaaaatcctcctctgttgaggtcacccgttggtgaayactcacatgggatacaaatatcttcacagtttttgacctctcagaaaggtctatctgcatacctcttccccaaatttctttatcaccaattttccaatcatgcttcttccaagtccctaaccatccagccaaaccattggctacagcccatgaatcagtatataatcacatatctggccatttctccttccatgcaaagtgcacaaccaggtgcactgct

SEQ ID NO: 180398 - DNA, 581 bp, Homo sapiens
cagtgaggacaaacctctgccatttccatgacagaagagttctaatataatcaacctgccaccaggtagctgactgatgccccaagaaatggtgccataccgaaggctcagtattggtctctgctgctgaaattgggcactcagcagtggctgtagccaggtcagccttgataggtggaagtccatgttgctgagcccatgtgtaacctccatctctgccaccatggcctctttgttcatgggcccattgggtgataacaggggtggctcaggaaacaggctgagtggtatccacagaatgggtcaccctatccacttgattattaaaatcctcctctgttgaggtcacccgttggtgaacactcacatgggatacaaatatcttcacagtttttgacctctcagaaaggtctatctgcatacctcttccccaaatttctttatcaccaattttccaatcatgcttcttccaagtccctaaccatccagccaaaccattggctacagcccatgaatcagtatataatcacayatctggccatttctccttccatgcaaagtgcacaaccaggtgcactgct

SEQ ID NO: 180399 - DNA, 526 bp, Homo sapiens
acctgcatctctatcttttagtaagtgcacaatattatactaaaataacctatgtacatttctgacattttagggtagtcaatcaggaacaaccctcagtctgccatccaacttagaaacaaattgaaaaaataaaggagctaggcagatggagataaaaacatcacctttattactgataaaattaatattggagaatgtagcaaagacctgtagccaaaatggctatgagttagacataccatgcaccatccctgctggttctgaacttccaaaaatctcccccaaccctgaccctgaatattcacatggaggagtcaaaaagaatgtatactttcttcaggtaagtataccccaaataaaagaagaaaggaggtcactgagccacttaggctctgttctttctcaaagagaaggcagccctccttacccagaaggagtgagaggaakggatggggccagaaatcatgagtgctgctctagtgggatgcctccatgtggaagcatgaagccaaggaaaatgagg

SEQ ID NO: 180400 - DNA, 583 bp, Homo sapiens
tgaaggctgttaacaggacttacttttctgtcctctagaattaggaattgygttcgttccttacaacagggcctccaacttcttttatatatagcacagagagcacctggtgtctagagtcacaaggatctgaacctgaatgttagcactgcatgtcacccacaggacgattgtgttaactgtgccaagtgtggactcctcacctccaaggggtgctatctcctagtcgatgatatgattgtaccctctggaactggacaacatgcagcctttgtgtgacttgaattgcttatcctctcaaagcctcagctccttcaagtgtagaataagggtgttaataataacaggggcattcagagtatctacctagttaagtgatggtgaaaattaagtgagatagtgtaactgaccacaatccctggtggactgaacaaaggaagatgaacgcgggaataaaagacaaagacaaaagagtatatttggaagaaggggtaaaggggcaccttgcctctagtggacaagggccctgagctttttcagccttccaaatttattaggtaaaagagataacgagaaaggggag

SEQ ID NO: 180401 - DNA, 583 bp, Homo sapiens
tgaaggctgttaacaggacttacttttctgtcctctagaattaggaattgtgttcgttccttacaacagggcctccaacttcttttatatatagcacagagagcacctggtgtctagagtcacaaggatctgaacctgaatgttagcactgcatgtcacccacaggacgattgtgttaactgtgccaagtgtggactcctcacctccaaggggtgctatctcctagtcgatgatatgattgtaccctctggaactggacaacatgcagcctttgtgtgacttgaattgcttatcctctcaaagcctcagctccttcaagtgtagaataaggktgttaataataacaggggcattcagagtatctacctagttaagtgatggtgaaaattaagtgagatagtgtaactgaccacaatccctggtggactgaacaaaggaagatgaacgcgggaataaaagacaaagacaaaagagtatatttggaagaaggggtaaaggggcaccttgcctctagtggacaagggccctgagctttttcagccttccaaatttattaggtaaaagagataacgagaaaggggag

SEQ ID NO: 180402 - DNA, 563 bp, Homo sapiens
tgcaaaaaaaaaagtttcatctctcaggctctcttacagcatctttattctctaccctgacttattttctgcctagacttttttactatttattattttggactttatctttcactttctggagctgtcaggataaatgggctggagtcttacctttcagtttgcccacttttatggagtcctcaagtttaggtctgacaccacctccccattcccctctaggtctagtgtcccactagctctgccaagctggcagtggaaaaamaaatggagaaagatagtcacgaggcaaagtgagaatggtcactctttatcccaactttccaataaacctatctattcagctttctatttcattctgctatgtctgtcctcacactttcttggcacctgctgtagccagttactgcaactttctggggactggctgagtgcattggcttgttccttatcagtatcccctctgtgtacacctgggctttcctccttgctgccaggttaccaactattccttcatctgcctttcatcctcatatgctggtctggagtaacagatgtcccca

SEQ ID NO: 180403 - DNA, 407 bp, Homo sapiens
aagatctgtgagaacaaatcgtctatgaaattgtgaagaaggaaaaacaaatttgtgctagttttgctgtcacacctcaarctgcaaaagttacagtcacagtgcataagtgcttggttaagacaggaaaagcattaaatttgtgggtggaagacatgaacagaaatgtgttccaattaatggcaattgggttcagtactgtctgtggtttcagggatccactaggggtcttggaacatatcccccacacataagagggcactactgcattgcttagaagcaagtcacaggtcctcctcacacttaaggggatggggtcatacaaggatgtgaaaaccaagattagaacataatggaggccaccttaagaatctattcactggcattttaaggaagtcctgggagtg

SEQ ID NO: 180404 - DNA, 407 bp, Homo sapiens
aagatctgtgagaacaaatcgtctatgaaattgtgaagaaggaaaaacaaatttgtgctagttttgctgtcacacctcaagctgcaaaagttacagtcacagtgcataagtgcttggttaagacaggaaaagcattaaatttgtgggtggaagacatgaacagaaatgtgttccaattaatggcaattgggttcagtactgtctgtggtttcagggatccactaggggtcttggaacatatcccccacacataagagggcactactgcattgcttagaagcaagtcacaggtcctcctcacayttaaggggatggggtcatacaaggatgtgaaaaccaagattagaacataatggaggccaccttaagaatctattcactggcattttaaggaagtcctgggagtg

SEQ ID NO: 180405 - DNA, 608 bp, Homo sapiens
aatcgtctatgaaattgtgaagaaggaaaaacaaatttgtgctagttttgctgtcacacctcaagctgcaaaagttacagtcacagtgcataagtgcttggttaagacaggaaaagcattaaatttgtgggtggaagacatgaacagaaatgtgttccaattaatggcaattgggttcagtactgtctgtggtttcagggatccactaggggtcttggaacatatcccccacacataagagggcactactgcattgcttagaagcaagtcacaggtcctcctcacacttaaggggatggggtcatacaaggatgtgaaaaccaagattagaacataatggaggccaccttaagaatctattcactggcattttaaggaagtcctgggagtgatgtcaccaatatggcagagtagtagatctacaagccttaatctccccataaaaaaatatagatagccattcacaaaccagaatagccctgatagtgctcaaggatctatttaagaatctrccgcaacacactggagaaaaaaaagaagaatatccacagaaaggattgctgttgaaattggcatacttgaggcaccaggagatggttaggaacgaa

SEQ ID NO: 180406 - DNA, 608 bp, Homo sapiens
aatcgtctatgaaattgtgaagaaggaaaaacaaatttgtgctagttttgctgtcacacctcaagctgcaaaagttacagtcacagtgcataagtgcttggttaagacaggaaaagcattaaatttgtgggtggaagacatgaacagaaatgtgttccaattaatggcaattgggttcagtactgtctgtggtttcagggatccactaggggtcttggaacatatcccccacacataagagggcactactgcattgcttagaagcaagtcacaggtcctcctcacacttaaggggatggggtcatacaaggatgtgaaaaccaagattagaacataatggaggccaccttaagaatctattcactggcattttaaggaagtcctgggagtgatgtcaccaatatggcagagtagtagatctacaagccttaatctccccataaaaaaatatagatagccattcacaaaccagaatagccctgatagtgctcaaggatctatttaagaatctgccrcaacacactggagaaaaaaaagaagaatatccacagaaaggattgctgttgaaattggcatacttgaggcaccaggagatggttaggaacgaa

SEQ ID NO: 180407 - DNA, 453 bp, Homo sapiens
acagataaaatcctaacttttgaatataaaacagatgtccctttatgtactgggtccttcccaccttgccagtatcagttcttggatctccttcattgtcaccttatttacagccacccccaaatccttgtcatctccatttgctatatgaaaacttggtgattttgcactgggttgctcctctctggaatgttttcccttctttcctgctgattgaaaagattattcatccatcaggactcagctcccatgtatcctttcttattaaacagcccctgaccttcctcctgctcccaycttccttaggtaatttaatttccttcacaatagcttgtgcacacctttattctaacatgtcaccccagactgcagttatctcattatctgaccttttctgagggtaggaaaatcaagtcttgcctgtatttgtaatataacgtgcatcacaacaag

SEQ ID NO: 180408 - DNA, 500 bp, Homo sapiens
agatctttgttttaaccccaccaatttccattttatttatttcatctcttaataaccatctaaagattttcaccctgctgggtcatgggactctcccctttcttttttccccttagtttcaccccatcaatgttttctgtattcattttatttcttaattaccctttaaaattttccactttcctgagatgaktcctttgactctctcatttgcttttcccattttcttattaattaatctaatgttttattagcatctgtaacatgagggaaagctggaacagcagacttgataaggatcctcgaacctaacaacatcatcctatggagtgcccatgcagaaggggcccccttaaccacagcatttaccatgacctgggtgatgggcacattcagcgcatgactgtccctgacatcataaatctagctccatatggcttgcatacaaagcgtatcagttgctttacctgggggcactccactaggcatttataaggagt

SEQ ID NO: 180409 - DNA, 481 bp, Homo sapiens
gaattcttccggaactcaacacaaaataattcttatgccaaagtggcatattttggggtggcatattctgatgccctcgactgcttactgtaatgggcacaagactggatcattggtcttttatcctttttagagatgtttatcaattcctaattattgtttgaagggattgagtctaatgtagaagggaatgatgctgtttaaccagggcaaaaatttctgagaaagcagaagagcagaatccatcaatagcttataaaggtagtgtattgtaatggatagtraagcaaaccctgaagggaaagattcatgttcaactcccagttcagtacagtcagccctctggatccatgggttttgtatccatggattcaacaaaatgcaggtaaaaaaattatgaaaaaaaagacaattaaaaatacagcaaaaaagatacaaatacaaatatatatagcatttacattatattgggtattgtaaa

SEQ ID NO: 180410 - DNA, 504 bp, Homo sapiens
tcagcacatcctttctatataggacagtgattatcaaattttatgtacataaatgttacatgagcaattgcttaaaatgcaggttcccagaactcaccaccagagattctgtttcagtagaatctagtggtattaatcccaggaacatgtaaaacaaatgycccttggtgattttaatatatgtggtcccggggtcacatttgtaagtgcatcgttcaggagagattttcatggaaggacaaatcatagcaaaactgctatttggaaagaaatcagcccaatgttgggtgagaagtgatggaatcagaaaatgttctgaatgcattaattttatgtttccattaatgcctttctcttccattgcttttcttagactctatgctgatcacattctacccctctcaaaaaaaaatttgaacttaaaggtatatactaattaggattctttaagattgcaagtaatagagacagattcaggttgcctcaggattttgtaccaagtaa

SEQ ID NO: 180411 - DNA, 623 bp, Homo sapiens
gatatcctttcttctgctgatttaatcggctattgaagcttgtgtatgcttcacgcagttcttgtactgtggttttcagcaccatcaggtcatttaaggtcttctctacactgtttattctagttagccattcgtctaatcttttttcgaggtttttagcttccttgcgataggtcagaacawgctcctttagctcggagaagtttgttattactgatcttctgaagcctacttctgtcaactcatcaaactcattctccatccagttttgttcgcttgctggtgaggacttgtgttcatttggaggagaagaggcattctggtttttggaattttcagcctttctgctctaggttctccccatctttgtggttttatctttggtctttgatgttggtgacctacagatggggttttggtgtgaatgtcctttttcttgatgttgatgctattcctttctgttcgttagttttccttctaacagataggcccttcagctgcatgtctgttggagtttgctggaggtccactccagaccctgtttgcctgggaacagcaaatattgctgcctgatccttcctctggaagctttgtcccagaggggcacccacctgcatgaggtg

SEQ ID NO: 180412 - DNA, 623 bp, Homo sapiens
gatatcctttcttctgctgatttaatcggctattgaagcttgtgtatgcttcacgcagttcttgtactgtggttttcagcaccatcaggtcatttaaggtcttctctacactgtttattctagttagccattcgtctaatcttttttcgaggtttttagcttccttgcgataggtcagaacatgctcctttagctcggagaagtttgttattactgatcttctgaagcctacttctgtcaactcatcaaactcattctccatccagttttgttcrcttgctggtgaggacttgtgttcatttggaggagaagaggcattctggtttttggaattttcagcctttctgctctaggttctccccatctttgtggttttatctttggtctttgatgttggtgacctacagatggggttttggtgtgaatgtcctttttcttgatgttgatgctattcctttctgttcgttagttttccttctaacagataggcccttcagctgcatgtctgttggagtttgctggaggtccactccagaccctgtttgcctgggaacagcaaatattgctgcctgatccttcctctggaagctttgtcccagaggggcacccacctgcatgaggtg

SEQ ID NO: 180413 - DNA, 633 bp, Homo sapiens
cttggattttcccatacttgccagggtcttactctcctttctcttcctacaattcatcatcttcagaatctctacatatgggcctgagcagacccctcatattggtttgagttggacaccattttgatcattagacctttgtttgctgtttggtggttttttgttgttgttgttgtttttcagaaacaygcaaatgttgtgtttgatctgtggttaaacacttcttgaacacttcagacctcggcttcttggtgatctcataaattttccacagactgtgtgtcattcacaacctaaggatctggaaggaaacccagctttaaaatgcacttcccagtgatttcagcctgaaaggtgatatgtctgtttttctaacatctcaaagtcactggaatgtgcattggcaatgtttctagaccagatttctggggaactggctcatttgtctgagagacacagttaagttaaagacactaaaatctcaattctcttggctacttcacttcaactacacagatggctgctttggagactagcatatatattagctgagataaacaggaatatgtcctggcagaagagtattgtccaagtgatattagaagcaaagcttctgagaatgtcattaagaat

SEQ ID NO: 180414 - DNA, 543 bp, Homo sapiens
acattactgaatatggagcacctacaatgagatgggccctatacaagatattgaacatttattttctaatgtaaatcttacaacaatctgaggattggtgatatgggaattattattattcccattttatcgaggagggaaaagattcagaaagagattaagtcacaaagttagttaagtgggggaacccagacttgaacccacactggtctgcctccaaagcctgtgctgcttcctcagtgcccaccttttctggtatgttaggcaggcatcagctttggtagccaaatctggttgataaacttcatcggcgtgaaggttcagaagatctggtcaagccaaagcatggattgatagtgtgttttactagtgtgcaactctccaaatcgagtttttggatgtgcaaaaagggagaccccaccatgattctgccactctgcaggtctacccacctcctccctctgtggcacttctgagggacagcaagagagaccaamactcactgaacacttactatgagccaggcacaggggaaggcacttc

SEQ ID NO: 180415 - DNA, 574 bp, Homo sapiens
ctggtgacttaagcaactacctctgccttttaatgaacattcatgaaaaaaatgcaaatttgtgttcactagatacataatcaatcacaactacacagctggaagaagtagtgacagagatgggggccagaaatccactcagctttttgtcctgtttaaaatacatttaaaggattggcccaattggcagtgttggagaaggcatcaccttgagggccagttgtggggtcactacagcaccgtcatgggaacgtccatctagcctccattgtgaatggttttaagaaatttggaaggccgagacaggcrgatcagttgaggccatgagtttgagaccagcctggctaacatggtgaaaccctgtatttactaaaaatacaaaaaaattagccaggtgtggtggcgggcgcctgtaatcccagttacttgggaggctgaggcaggagagtcacttgaacccaggaggcagaggttgcagtgagccgagaccgcctgggcaacaagaatgaaactcagtctcaaaaaaaaaaaaaaatgaaatttgtatataggggatggaaatgcttataggttt

SEQ ID NO: 180416 - DNA, 566 bp, Homo sapiens
tgctgttagtgacgatagaatgcctttattttgtacaccattcaaaatattggacatctgacattttcaaccaaaacttcaattatatactgtgatttttcacttgttgcaatacattaacatttcagagctacattgggttaaaaagctgggatttctaagtcagtatgtacatgtgcatttcatataaaaagcttttaatggtgtgcagagtattatatactaactggacttttccacatctgtatgttatatgtattttgtggtattgaaattaaagaaagtttagcatgtcaaacatgcatttaatgcttatttttaaacaaatttatgacaattaaaatacttggaaacaaggctatcacattttaatttttagagaactttttactctactggtcattaagatgttttgtataatgccaaaccatacctggtgaarttgaataaatatcaaatagatcttttaaaaaagaattgtcactcttggtggaaatgcaagtctgaattaggaagacagacagaacccagattcctcctccatgttgaattttaaatagttgtta

SEQ ID NO: 180417 - DNA, 562 bp, Homo sapiens
attcccacctaataaattttagtcagaccggttgtctgctctcaaaccctgtctcctgataagttgttatctgtgacaatgtgtgcccaaaacttcactagcaattttaatttcgcccyggtcctgtgatcttgccctgcctccatttgccttgtgatattttattaccttgtgaagcatgtgatctctgtgacccacaccctatttgtacactccctccccttttgaaaatcactaataaaaactttctggctttgtggtttgggggcatcatggaacctgcagacatgtgatgtctcccccgaacaaccagctttaaaatttctctcttttgtactctttccttttatttctcagaccagccaacacttagggaaaatagaaaaggatccacgtgaaatattgggggctgaatttcccccgatatgttctcaggatctccagagggctgtgtcaggggtcattggttcagaaaatttcttcaaatattttactgagttcaactctttatgttgacacatagctttgctattgtatctcttcaatatattgatttcctttc

SEQ ID NO: 180418 - DNA, 508 bp, Homo sapiens
tgactctcactctctctgctttgcagttttcacttcctrttggagtcttttggtgaacagaagtttataattttaatgtcatataacttatcaatattttcttttttatattgggccttttgccaaaatctgcatgtattattttctgtctcttttcctttctgcacctgcatctaaggcattattcatggtgttttattgttgttttatttcttggattttagttttccctttatagtttcttctatgatattttgaggaaagaataatgcagccttaggaatttgctatcttggtagaaaattgaaaaaaataacattcattttagaaaattaacatggattgttcatctattctgtaccaggttcaggaataaatgttgaggaagtgtctttatttcaaaatataccttcatataaatgtacttatagaaaaacacatatacgaagaaaaaataatgacacaagtgcaataaagatgtttgcatgtgtggggctgtagaagaaca

SEQ ID NO: 180419 - DNA, 517 bp, Homo sapiens
gtttctgcttttgcttcttcctcatttttctcttgctgccaccatgtaagaagtgcctttcacctcccrccatgtttctgaggcttccccagccatgtggaactgtaagtccaattaaacctctttttcttcccagtctcaggtatgtctttatcagcagtgtgaaaacaaatgaatacagcccccattcattttggcagccagtggctaccttctgacattgtcctgcctttttgactgctgagtataaagtcactgctatattttgaggtcaaacattaaagttgctatattacagcccttattttcatgacgaatgttgggtatttccatatgcctctctctgcaattatttaggttattaaattttttttctcttgtatttaacatgaggatcttcattgaataatttaagaatattaagctaacctcataatctcaagataagatcaacatggtcataacatattattctttgcatatattgttgtatttattttgacaatattttcttaat

SEQ ID NO: 180420 - DNA, 587 bp, Homo sapiens
gacttttgaaaaacacgtgtwtattcacatactacttgggatctagaaaatgaagtgtgcatgtagggctagttgaatgtccaggagagatgagtgagtcccatctgtcacccttagctaacaattgggacctgttttaactattaagggaaggctaaggcaagaacatgaaatgttgtcaactgccaactattgaaaattatttcaaccttcacccagagcttcttggcaaagagtaaaagaacagtgattcaaggcatttaatgaaatcactgaccaataattaactgagcactaatctaactaaaaagagatatcatttggctaatattatagaaaatacagatttcactcattagtccagacaagtcaatgaatgaataaatagcagcaacaacagcaaataaacaataaaaattagccctgaaaggagaggaaatatagttttcagagttgaacattatattatccattttaagtccttgatttaaagccctgagaggaaatataattttcagagttggacattatattatccattttcaatacttaatttaaaaatcaaattttcactaatatatcattaa

SEQ ID NO: 180421 - DNA, 323 bp, Homo sapiens
tagtgctatggttgaacgtttgtgtagccccaaaattcatatattgaaacagaattcacaacttggtgttattacgaagtggatcttttgggaagtgattaagtcataaggattctactcttattaatgagatgggcatctttataaaagtggctaaatgaatcatgcttgtctcttctgccacatgaayacacagctacatggtgccatcggtaaagaatgggccctcaccagatcaaaactgccggcatgtttgtctggaacaccccagtatccacaactgtcagcagtaaatttctgtgatttattaactacccagtcta

SEQ ID NO: 180422 - DNA, 323 bp, Homo sapiens
tagtgctatggttgaacgtttgtgtagccccaaaattcatatattgaaacagaattcacaacttggtgttattacgaagtggatcttttgggaagtgattaagtcataaggattctactcttattaatgagatgggcatctttataaaagtggctaaatgaatcatgcttgtctcttctgccacatgaatacacagctacatggtgccatyggtaaagaatgggccctcaccagatcaaaactgccggcatgtttgtctggaacaccccagtatccacaactgtcagcagtaaatttctgtgatttattaactacccagtcta

SEQ ID NO: 180423 - DNA, 323 bp, Homo sapiens
tagtgctatggttgaacgtttgtgtagccccaaaattcatatattgaaacagaattcacaacttggtgttattacgaagtggatcttttgggaagtgattaagtcataaggattctactcttattaatgagatgggcatctttataaaagtggctaaatgaatcatgcttgtctcttctgccacatgaatacacagctacatggtgccatcggtaaagaatgggccctcaccagatcaaaaytgccggcatgtttgtctggaacaccccagtatccacaactgtcagcagtaaatttctgtgatttattaactacccagtcta

SEQ ID NO: 180424 - DNA, 488 bp, Homo sapiens
gaattctctctccactgaaagtcaatttaatgttcgaaaatttttctacaaagtagtgtagttaaagcatacattagttataattcaaattctcttttgatgtattttaactcttagccatagatgatcacaagtttttcaaattcakatggactttctagaaattatttcaaaatatttgccatccttttgtacttttcagcatttgtcttcaagtaattcaactttgaatttaaaattatatttttgaagaaaagtagtactcttttttacagagttccaaagttgtgttttgcacataattactagtaaccttggagttagaaccaagatacaattgtccaaaatgctaccctaccaatgactaattggcttggcttttacaaactcaattatataattaagggcttcattttgcttatctttaaaataagaatcttgaattaaatgatctctaagcatgaaagagaaattttttggataaatga

SEQ ID NO: 180425 - DNA, 606 bp, Homo sapiens
tacagaatattttagctattatatttatacattactgaacattcagaacacataaaagtgcctacagcaaaagcgaccaactttttattataatactgcatgcaaatacataaaaaggcaactatcatcttaaagaataaaactctattaaaaactggacctatacaaattttaatttaacaatttacaagaacgaaacttttttttttttttttttttgagacagagtcttgctctgttgcccaggctggagtgtagtggcgtgatctcagctcactgcaagctccgcctcccgggttcacgccattctcctgcctcagcctcccaagtagctgggactacaggcacccgccaccacgcctggctaattttttgtatttttagtagagacggggtttcaccrtgttagccaggatggtctcgatctcccgacctcgtgatctgcccgccttggcctcccaaagtgctgggattacaggcgtgagccactgcgcccggccaagaacgaatcttaaatatttaataaggcaaataaaatgcatctgttaataatcaaactttaaaaataaagtgtctttctgagcaaagctatatgttatatttgac

SEQ ID NO: 180426 - DNA, 566 bp, Homo sapiens
actttgtgaatgaatacaatagataaatttctgttctcttatttaaccttcttgtggtgtttgccactgttaagtgttccctccttgaatttctcttttctattaaattccacaacaccacattctttcaatttttctctgctaatatcactgctctgtatcataaactttcaaggattcttttcatctgcctgctccttaaataaactccattttcaacctacctgcttttatttttragaagatcaaagtaggaggaggatatgttctagagttgggaaaaacctaggtttgaatcttggctctgtcacatgctttcagtgaacacatggaaagcaacctaatccctcaggcccttgttttccctttactaaggcagaaaagagtttttgtataaggtggttgttggtattaaatactcacaactatgaatgtcacataataaatagttaataactagtagttattattactctgattttataatctctcttgagaaatttctactcttcaactatgacatataaactaatgaccactctctcttttatctccagccccaattc

SEQ ID NO: 180427 - DNA, 375 bp, Homo sapiens
gagtacatatatgactgaatcaaaatgtcgtttttgaaaaaaatgataatagtttaatatatttgacttcccttgttatcttatgcacattattttatgcatttaaaaataattattttgagaagggatccagaggcttcacagatttcctgtgttagttatctagggctgtcctaacaaagtattataaactggatggcttaaggaagggaaattcattgtcccatagttctggggactagaagtctgagattaaggtgttggcagggttggtttcttctgagggcttttagggagaatctgttscatgcctctttccccgtttatactgttctgctggcaatctttagcattccttggcttgcaggtacatca

SEQ ID NO: 180428 - DNA, 594 bp, Homo sapiens
atcagggcctattagaacattcatctgtttctgtcattagtatgaaaggcacacaagaaaccccgtatttattatgttgagaacagagcctctcctcagacactccacatcaaacaggcttaaattccaaattcctcatccatataaatcccgtagtatggaacaccgactcccccataatagctacctgccattcagattcaaatttcactgaaggatcctaagtactatatagtggtcccatgatttcccctcaactctaatggattatggagactcaagcccatctcccaacttccagctgccaatattttaatccccacccattctccccacaatactcctattctcccaattaaaaaatcagatggctcctatagactggttcagaatttrcgacaaatcaactctgctatggttcctgtttatcctgttgtccaaaacccctacatcctcctatcatgaattctttccaacactagctgtttctctgtattagacctcaaaggtgccttttttactatctctctacatccctcctctcaaaaccttttgggttcacttggaccaaccctggcacaagctattcccaac

SEQ ID NO: 180429 - DNA, 594 bp, Homo sapiens
atcagggcctattagaacattcatctgtttctgtcattagtatgaaaggcacacaagaaaccccgtatttattatgttgagaacagagcctctcctcagacactccacatcaaacaggcttaaattccaaattcctcatccatataaatcccgtagtatggaacaccgactcccccataatagctacctgccattcagattcaaatttcactgaaggatcctaagtactatatagtggtcccatgatttcccctcaactctaatggattatggagactcaagcccatctcccaacttccagctgccaatattttaatccccacccattctccccacaatactcctattctcccaattaaaaaatcagatggctcctatagactggttcagaatttacgacaaatcaactctgctatggttcctgtttatcctgttgtccaaaacccctayatcctcctatcatgaattctttccaacactagctgtttctctgtattagacctcaaaggtgccttttttactatctctctacatccctcctctcaaaaccttttgggttcacttggaccaaccctggcacaagctattcccaac

SEQ ID NO: 180430 - DNA, 510 bp, Homo sapiens
caggattttacctcagctttatacatttaattatctcagtatttcagggagaggaatttcattgacccaasttaggctgggtgtctacttgatgctatggtggccaagatggtaggagaatcattggtacaggtatagacacccaaccacatgaacaaggaaaggagagcacatagacctgttctttgaacagcatgtatcatagtcaagcatttagagcaccaggcactaggggcagagtaaacaaggagaaaagaaagaaacaagagcccaggtaagttttctatggggttctgactttaaactgacaccactaggcccactatggtcttaggactgttaaagctcctttggtatgactaagtccatgatagcatcatctcctgttttctgattgctcttgagtcccatgaggggatcttgttcatgttaagaagacagatcctgtggatatcccaagtaaaaacaactctcattttggaagtaattccctgctcctgaaaggttctc

SEQ ID NO: 180431 - DNA, 510 bp, Homo sapiens
caggattttacctcagctttatacatttaattatctcagtatttcagggagaggaatttcattgacccaacttaggctgggtgtctacttgatgctatggtggccaagatggtaggagaatcattggtacaggtatagacacccaaccacatgaacaaggaaaggagagcacatagacctgttctttgaacagcatgtatcatagtcaagcatttagagcaccaggcactaggggcagagtaaacaaggagaaaagaaagaaacaagagcccaggtaagttttctatggggttctgactttaaactgacaccactaggcccactatggtcttaggactgttaaagctcctttggtatgactaagtccrtgatagcatcatctcctgttttctgattgctcttgagtcccatgaggggatcttgttcatgttaagaagacagatcctgtggatatcccaagtaaaaacaactctcattttggaagtaattccctgctcctgaaaggttctc

SEQ ID NO: 180432 - DNA, 327 bp, Homo sapiens
cttaaatttgacactgtattttttatttccaggaatttgtaccgaggaaataatcaaaattgtctaatattatatgcaaaatgttcattatagcattatatctgagagcaaaacataagtcaattgcaatgttaatcaataggttaaaaaaaggtggttcattcataggataaaacactatatagtcattaaaatgatatatccaaagattatcttattatgcagaacrgtgctcatggtgcagattaaatgttaaaagcaggctataacattctacatagggtaagaaacaattttctaaaaatgtacatatgtgcatagtgcaca

SEQ ID NO: 180433 - DNA, 421 bp, Homo sapiens
aattgccatgacagtattttttcaataactcttattcctttttgatttgtgctactgtctttatctgattttaaagttttacacagttaatttctgggttacatattatatttcactaacctatcaattcttaggccaatattttgtttattttaattaccatatctataaaataacctaactacaaatatatgttaaaatacttatgattttaatgtktttaacatgggtcagtttattttactcatatatcttataaccacagtttggtttttagagctgggtctgtcgtttgaaaacactgccaataataatgataccctgctttctctctaaacagtatttatttcacagctccatcaaatgtattgtgttatttgagacctaaatggggctattatgacattcttcagattagccc

SEQ ID NO: 180434 - DNA, 421 bp, Homo sapiens
aattgccatgacagtattttttcaataactcttattcctttttgatttgtgctactgtctttatctgattttaaagttttacacagttaatttctgggttacatattatatttcactaacctatcaattcttaggccaatattttgtttattttaattaccatatctataaaataacctaactacaaatatatgttaaaatacttatgattttaatgtgtttaacatgggtcagtttattttactcatatatcttakaaccacagtttggtttttagagctgggtctgtcgtttgaaaacactgccaataataatgataccctgctttctctctaaacagtatttatttcacagctccatcaaatgtattgtgttatttgagacctaaatggggctattatgacattcttcagattagccc

SEQ ID NO: 180435 - DNA, 421 bp, Homo sapiens
aattgccatgacagtattttttcaataactcttattcctttttgatttgtgctactgtctttatctgattttaaagttttacacagttaatttctgggttacatattatatttcactaacctatcaattcttaggccaatattttgtttattttaattaccatatctataaaataacctaactacaaatatatgttaaaatacttatgattttaatgtgtttaacatgggtcagtttattttactcatatatcttataaccacagtttggtttttagagctgggtctgtcgtttgaaaacactgccaataataatgataccctgctttctctctaaacagtatttatttcacagctccatcaaatgtattgtkttatttgagacctaaatggggctattatgacattcttcagattagccc

SEQ ID NO: 180436 - DNA, 206 bp, Homo sapiens
taaaatataaagaaacacatatataaagtgaggacagtcttgtgggatagagcccttaaaccctggatctgataactccatgcacttactgctagaattgaactgggttgtaggacacccasgtggtatctggagagctggagaattgattggtgtgaagaaaaaactcacacatttgatgtgagaaatattgtcattgaaaagtt

SEQ ID NO: 180437 - DNA, 343 bp, Homo sapiens
cagcatccacaatgcaggccctggccagtactcacctgttctctgtccatatagtggtgccttwgcaagaatgtcatataaatggaattacaaagtagtcagtctttgaatttgccttccttcacttaacatcatatacaagagataaatctgtgccactgcttacaagtggttcattcctctttattgctgagtagtattccattgcatggatgcaaccacattccccattcaaggggcatgtgtactgtctctattttttcatctgttaagttgagttaagaaaatgttactggtaaccaaggcaaaagctgttttagttcagtggttggaatgaaagctg

SEQ ID NO: 180438 - DNA, 561 bp, Homo sapiens
tgcaatcagctcactgcagtctcaacctcccaggttcaagcgatcttcccacctcagccccctgagtagctgggactacaggcatgcaccaccatgcccagctaattttgtagcaactgggttttkccatgttgcccaggctgatctctaacttctggactcaagcaatccacccacctcagcctcccatagtgctgggactacaggcataagccaccatacccagccttgatatttttttttctgtacatatatacctctgtaaccaaatacaagaataaaacataaaactttttcactacccaaaagcccccttatttttctttccagtcaacattctctgaagttaagcactgttttgacccctagtgtatgctcttgaaatttacaccaatgaaatcatacaacacgtactcttttgtgtctagcctcttttacttaatattatatctgtgccatccatccatattcttgcatggaatcattcatttttttgttattatataatattccattttaagaatacagaacaacgcctttattttaataatggacatttgg

SEQ ID NO: 180439 - DNA, 464 bp, Homo sapiens
ttcattttcaaggcacctctgccaggtgaggtcactgcaatggcagaaatgtttcctctgctcggtggaatggggctgcttgtgccatttaggaatgttccaggagatgttgggagcttgagatcctcaagcttgtccaccgaaatatttccatcacaggtctcaaggtgctgctcttggggctccttgtttagtcacttttggagcttagtcttattattatccaacttgggactgatttgttacataatcagccctgtagctgcagaagatgaaagtcttctctagaccttcccaaggggcctcctggccatcacagtatcccttaaatgggcaacatgccactctgagtctctcattttcttttagtgcggtccttcttcagtcctgttgaaagtagccctcccrcaccagactcattccaatgatcactgcccgcatagcagttaaggatagcagccact

SEQ ID NO: 180440 - DNA, 563 bp, Homo sapiens
gcttctccatccccttttgctaaaccattaaawtatctgccccaatggccggtgtgcatgtttttttctcaaaatgtgtttgcagatttagttactggagtgatcatgttaaaattaaaataaggtttacacccctttaaaaaatatttcagtaatgctccattgcacctttataaaatttaaaatcctcaaaattatatgatctttcggataaagtcttgggccacacttcttcctatacatagctttgctccagaaataataaaatacttgcagcttccaacaaacaacctacagtatcttctagagaatctgatctcccttctgtcctcagtaactttccatactacttcaccacagggtttccatgtctagcagacattacttcctcaggaaactctatgtgtcagttacctattgctgtataaggaaccatcctcaaatttactagattaaaacagcggtattttcaattgttcgcacacgagtgggctggcaatttgagctagggtcagcagaaaagtacttttgctgtcttctctgtaatcacttgtgaggctgca

SEQ ID NO: 180441 - DNA, 551 bp, Homo sapiens
acataatgtccatgatggcagaaatgtttgtctttgtgtgtgtgtgtgtgtgtgtgtgtgtgtgtgtgtgtgtgagagagagagagagagagagagagagagasaggatctaactctgttacccagactggagtacagtggcatgattatagcttattgcagccttggcttgcagagctcaagtgatcctcctttctcagcctcctgagtagctgtgattacaggtgtgaatcaccgggcgtgatggctcatgcctgtaataccagcagtttgagaggccaaggagggcagatcacgaggtcaagagattgagaccagcctggccaacatggagaaaccccatctctagtaaaaatacaaaaattacctgtgcgtggtggcgcgcctgtagtcacagctactcaggaggctgacggaggcgaatcacttgaacctgggaggtggaggttgcagtgagctgagatcgcaccactgcactccagcctggcaactgagaaatattctgtctcaaaaaacaaacaaacaaacaaaacaatgtagagaaagggtct

SEQ ID NO: 180442 - DNA, 551 bp, Homo sapiens
acataatgtccatgatggcagaaatgtttgtctttgtgtgtgtgtgtgtgtgtgtgtgtgtgtgtgtgtgtgtgagagagagagagagagagagagagagagacaggatctaactctgttacccagactggagtacagtrgcatgattatagcttattgcagccttggcttgcagagctcaagtgatcctcctttctcagcctcctgagtagctgtgattacaggtgtgaatcaccgggcgtgatggctcatgcctgtaataccagcagtttgagaggccaaggagggcagatcacgaggtcaagagattgagaccagcctggccaacatggagaaaccccatctctagtaaaaatacaaaaattacctgtgcgtggtggcgcgcctgtagtcacagctactcaggaggctgacggaggcgaatcacttgaacctgggaggtggaggttgcagtgagctgagatcgcaccactgcactccagcctggcaactgagaaatattctgtctcaaaaaacaaacaaacaaacaaaacaatgtagagaaagggtct

SEQ ID NO: 180443 - DNA, 551 bp, Homo sapiens
acataatgtccatgatggcagaaatgtttgtctttgtgtgtgtgtgtgtgtgtgtgtgtgtgtgtgtgtgtgtgagagagagagagagagagagagagagagacaggatctaactctgttacccagactggagtacagtggcatgattatagcttattgcagccttggcttgcagagctcaagtgatcctcctttctcagcctcctgagtagctgtgattacaggtgtgaatcaccgggcgtgatggctcatgcctgtaataccagcagtttgagaggccaaggagggcagatcacgaggtcaagagattgagaccagcctggccaacatggagaaaccccatctctastaaaaatacaaaaattacctgtgcgtggtggcgcgcctgtagtcacagctactcaggaggctgacggaggcgaatcacttgaacctgggaggtggaggttgcagtgagctgagatcgcaccactgcactccagcctggcaactgagaaatattctgtctcaaaaaacaaacaaacaaacaaaacaatgtagagaaagggtct

SEQ ID NO: 180444 - DNA, 563 bp, Homo sapiens
gcttctccatccccttttgctaaaccattaaaatatctgccccaatggccggtgtgcatgtttttttctcaaaatgtgtttgcagatttagttactggagtgatcatgttaaaattaaaataaggtttacacccctttaaaaaatatttcagtaatgctccattgcacctttataaaatttaaaatcctcaaaattatatgatctttcggataaagtcttgggccacacttcttcctatacatagctttgctccagaaataataaaatacttgcagcttccaacaaacaacctacagtatcttctagagaatctgatctcccttctgtcctcagtaactttccatactacttcaccacagggtttccatgtctagcagacattacttcctcaggaaactctatgtgtcagttacctattgctgtataaggaaccatcctcaaatttactagattaaaacagcrgtattttcaattgttcgcacacgagtgggctggcaatttgagctagggtcagcagaaaagtacttttgctgtcttctctgtaatcacttgtgaggctgca

SEQ ID NO: 180445 - DNA, 343 bp, Homo sapiens
gatctggctgtgtgaggataaaactataaaagtggcaatgtgaatcacagaggttacctatgggcaaagaaaaactgcactcgacaagatgagtaaacagaaattgattttattatgatactattagcagcaataggagggagagcagaaaarggataagagatccaagagctgaggtggagagattctggccatctgtgctaattaattggttttactaaaaggaaaagtaaaatttgttttatgagaggaggtgattttaccacttggatcaaggcacccaccaaagttaggctcctactttaccatggagacagggaacccgtcttccttcaagtttacc

SEQ ID NO: 180446 - DNA, 558 bp, Homo sapiens
gtttctagttctccagcttatagatggcaggttgtgggatttctgggccttcataacacatgagccaattcctttatccctcattggtcctacttctctagataatcctgactaatactctgaggatctggctgtgtgaggataaaactataaaagtggcaatgtgaatcacagaggttacctatgggcaaagaaaaactgcactcgacaagatgagtaaacagaaattgattttattatgatactattagcagcaataggagggagagcagaaaaaggataagagatccaagagctgaggtggagagattctggccatctgtgctaattaattggttttactaaaaggaaaagtaaaatttgttttatgagaggaggtgattttaccacttggatcaaggcacccaccaaagttwggctcctactttaccatggagacagggaacccgtcttccttcaagtttacccttcaaaataatggcccctagtactttgagaaagacaattctggatagtaaatctggcaagaggtttttacatcacaaaggccagaaacag

SEQ ID NO: 180447 - DNA, 597 bp, Homo sapiens
tgtatttataataaaatgtatcatccaaacctacacggtaatttacctacaaggtaaatcatacrtaattgcaagaagtaaagagattgattgtctgggggaaaaaagatgagagaaaatatacgtatagtacaaagaaaaaaatacaaaacttgaatttgatagatcaggaaggaaggcaggtccaccacagtgaggtcagagaaatcctgaacaagaagtcaatcagaaaagttttacaaggaacaaatgattaaaactaggccttaaaacaggaaaaagaaaaaaaatagacatgaggaatgtatgaacagctttctcaaaatggtgaaagtagaaacctagttttgagaacccctgatatgtctagtttggttgtggcatgaatatcaacaggacacttagtgttggctactatgcaaaggtaagtgtagatgacacacattacaaaacttaaacctagagctaaaggataaacactaaacattttgtctagaagggtgttcagaagtccagtttagcaagatgaatctgcaagtaaattagaatgacaagagaccatgatggagaaattcaaataagaaacaatgaaaaaaa

SEQ ID NO: 180448 - DNA, 597 bp, Homo sapiens
tgtatttataataaaatgtatcatccaaacctacacggtaatttacctacaaggtaaatcatacgtaattgcaagaagtaaagagattgattgtctgggggaaaaaagatgagagaaaatatacgtatagtacaaagaaaaaaatacaaaacttgaatttgatagatcaggaaggaaggcaggtccamcacagtgaggtcagagaaatcctgaacaagaagtcaatcagaaaagttttacaaggaacaaatgattaaaactaggccttaaaacaggaaaaagaaaaaaaatagacatgaggaatgtatgaacagctttctcaaaatggtgaaagtagaaacctagttttgagaacccctgatatgtctagtttggttgtggcatgaatatcaacaggacacttagtgttggctactatgcaaaggtaagtgtagatgacacacattacaaaacttaaacctagagctaaaggataaacactaaacattttgtctagaagggtgttcagaagtccagtttagcaagatgaatctgcaagtaaattagaatgacaagagaccatgatggagaaattcaaataagaaacaatgaaaaaaa

SEQ ID NO: 180449 - DNA, 597 bp, Homo sapiens
tgtatttataataaaatgtatcatccaaacctacacggtaatttacctacaaggtaaatcatacgtaattgcaagaagtaaagagattgattgtctgggggaaaaaagatgagagaaaatatacgtatagtacaaagaaaaaaatacaaaacttgaatttgatagatcaggaaggaaggcaggtccaccacagtgaggtcagagaaatcctgaacaagaagtcaatcagaaaagttttacaaggaacaaatgattaaaactaggccttaaaacaggaaaaagaaaaaaaatagacatgaggaatgtatgaacagctttctcaaaatggtgaaagtagaaacctagttttgagaacccctgatatgtctagtttggttgtggcatgaatatcaacaggacacttagtgttggctacyatgcaaaggtaagtgtagatgacacacattacaaaacttaaacctagagctaaaggataaacactaaacattttgtctagaagggtgttcagaagtccagtttagcaagatgaatctgcaagtaaattagaatgacaagagaccatgatggagaaattcaaataagaaacaatgaaaaaaa

SEQ ID NO: 180450 - DNA, 538 bp, Homo sapiens
taactactaatatttgacaggattccttactgataacataaacaggtgataaacacatacatagactaggatctatatatatttattgcatttgtgacatacctaacttttcttaatttttatggtattatggtatttcttggctatgtgattcatctgcaagttttctataattgtaacaaatcttcaaataatttggcaatatatttcttggaaaaaatctacatgtaagggkacccatattattcaaatccatgttgtccatgagtaaactgtacagtaatttggaaagtcaaaggttgaaaatatatataccatacaaagtctaagcatatttctagggccaaatatattttataacaaaaaagatatccttccaaaaaatagacttgaaatttgtctgaaatatgttgaagaaaaataaacaaatgaaggcaaatttttaagcacttggctctgcattttaaaatttccacatttccttcaatatttcttgaatattccttatttaaaaagattatcttatatatgttctatg

SEQ ID NO: 180451 - DNA, 578 bp, Homo sapiens
agcaggacctcagtgtacccactgctactctccacccaagcattctgccagggtcctgcagataatttcacccctgcctacgacatccagtacctacacacaccttcaggggacctaaggacaagcctgcgcagcctggcttcamaaccctcatgcaggagcatgatgtccagggacctggtaattgccaaacccctgtccaccaccattggcacctgagcactcctcctggaagcctgaggttgggcctcccttaccctactgctaccaccacagctggcacctacctgcctgtaccacatgtaggcctggagactggtcagctcagctcaatacaaatatcaccaacaccagccttcactgctcagaaccgagaggattgtcccaatatagctatcatcatcttccacaccaggcctgctgcccaggagccgaagaaccctcccacacccgtggcccacaactgccactactagcttccaagcaagccacctggaagccgaagtattgaccaacctggaccaacttataccagtgccagtgtacattgctctggtgcccaagaacaggcatgctca

SEQ ID NO: 180452 - DNA, 575 bp, Homo sapiens
tctacaaataaaatgataaagtctagatgacagcacatttgtttccagcatggtttactgaatattttaagcctactgtgtagacctaatgctcagaaaaaaagattactttcaacatattacttctcattgacaatacacctaaatcatccaggaactcagagggaggtgtacaaggagattaatgttgtttctcaaggctsctagtgcagcatccattcttgcagcccatggatcaagaagtaatttcagctttcatgtctcatataagaaatacattttgtaaggtacagctgccaaagataatgatccctctgatggatctgaacaaaataaattgaaaaccttctgaaaaggattcaccattctagatgtcattaagattattcataattcatgggaggagataaaaatatcaacattaacaaggatttggcagaagttgattaactttcatggctgacattgaggtgttcaaggctcagtggcagaaggaaccacagatgtggtagaaatttcaagagaactaagattagaagtggagtgtgaagatgtagcttgattggtgcaatctc

SEQ ID NO: 180453 - DNA, 575 bp, Homo sapiens
tctacaaataaaatgataaagtctagatgacagcacatttgtttccagcatggtttactgaatattttaagcctactgtgtagacctaatgctcagaaaaaaagattactttcaacatattacttctcattgacaatacacctaaatcatccaggaactcagagggaggtgtacaaggagattaatgttgtttctcaaggctgctagtgcagcatccattcttgcagcccatgsatcaagaagtaatttcagctttcatgtctcatataagaaatacattttgtaaggtacagctgccaaagataatgatccctctgatggatctgaacaaaataaattgaaaaccttctgaaaaggattcaccattctagatgtcattaagattattcataattcatgggaggagataaaaatatcaacattaacaaggatttggcagaagttgattaactttcatggctgacattgaggtgttcaaggctcagtggcagaaggaaccacagatgtggtagaaatttcaagagaactaagattagaagtggagtgtgaagatgtagcttgattggtgcaatctc

SEQ ID NO: 180454 - DNA, 528 bp, Homo sapiens
tcataattcatgggaggagataaaaatatcaacattaacaaggatttggcagaagttgattaactttcatggctgacattgaggtgttcaaggctcagtggcagaaggaaccwcagatgtggtagaaatttcaagagaactaagattagaagtggagtgtgaagatgtagcttgattggtgcaatctcatgatacaacttgaatggatgagaagttgctttttatgaatgagcaaagaaagtgttttcttgagatgaaatctacttctgatgaagatgctgtgaacattgttgaaatgacaacaaaggacttagaatattacacaaacttatcgataaggcagcggcacaatttaagaggattgacaccaattttgaaagttctactgttgggaaaatgctatcaaagagcatcacatgctataaagtaatctttcatcaaaggaatagtcaactgatgtggcaaaatttatcatcttatttttaaaaattgtcaatgtcaccttcagcaaccaccaccctgatcagt

SEQ ID NO: 180455 - DNA, 528 bp, Homo sapiens
tcataattcatgggaggagataaaaatatcaacattaacaaggatttggcagaagttgattaactttcatggctgacattgaggtgttcaaggctcagtggcagaaggaaccacagatgtggtagaaatttcaagagaactaagattagaagtggagygtgaagatgtagcttgattggtgcaatctcatgatacaacttgaatggatgagaagttgctttttatgaatgagcaaagaaagtgttttcttgagatgaaatctacttctgatgaagatgctgtgaacattgttgaaatgacaacaaaggacttagaatattacacaaacttatcgataaggcagcggcacaatttaagaggattgacaccaattttgaaagttctactgttgggaaaatgctatcaaagagcatcacatgctataaagtaatctttcatcaaaggaatagtcaactgatgtggcaaaatttatcatcttatttttaaaaattgtcaatgtcaccttcagcaaccaccaccctgatcagt

SEQ ID NO: 180456 - DNA, 528 bp, Homo sapiens
tcataattcatgggaggagataaaaatatcaacattaacaaggatttggcagaagttgattaactttcatggctgacattgaggtgttcaaggctcagtggcagaaggaaccacagatgtggtagaaatttcaagagaactaagattagaagtggagtgtgaagatgtagcttgattggtgcaatctcatgatacaacttgaatggatgagaagttgctttttatgaatgagcaaagaaagtgttttcttgagatgaaatctacttctgatgaagatgctgtgaacattgttgaaatgacaacaaaggacttagaatattacacaaacttatcgataaggcagcggcasaatttaagaggattgacaccaattttgaaagttctactgttgggaaaatgctatcaaagagcatcacatgctataaagtaatctttcatcaaaggaatagtcaactgatgtggcaaaatttatcatcttatttttaaaaattgtcaatgtcaccttcagcaaccaccaccctgatcagt

SEQ ID NO: 180457 - DNA, 528 bp, Homo sapiens
tcataattcatgggaggagataaaaatatcaacattaacaaggatttggcagaagttgattaactttcatggctgacattgaggtgttcaaggctcagtggcagaaggaaccacagatgtggtagaaatttcaagagaactaagattagaagtggagtgtgaagatgtagcttgattggtgcaatctcatgatacaacttgaatggatgagaagttgctttttatgaatgagcaaagaaagtgttttcttgagatgaaatctacttctgatgaagatgctgtgaacattgttgaaatgacaacaaaggacttagaatattacacaaacttatcgataaggcagcggcacaatttaagaggattgacaccaattttgaaagttctactgttgggaaaatgctatcaaagagcatcacatgctataaagtaatctttcatcraaggaatagtcaactgatgtggcaaaatttatcatcttatttttaaaaattgtcaatgtcaccttcagcaaccaccaccctgatcagt

SEQ ID NO: 180458 - DNA, 588 bp, Homo sapiens
ctgtggattttgaaaaatgaaattagttgcatattcacaactataattccatatgaaatgtaatattacccataaaattcctttgctatacccctccatggtaaatccatctcccctcctccccagaccctggcaagaacagatttmttttcaatacccattgttttgtttttactcacatttcatataaaggaatcacatagtatgttgtcttctgagtctgacttctttcacttaggacaatgcatatatgatttgtaatggttaatattgtcaacttgattggattgaaggatgcaaagtgttgttcctcattgtgtctatgagggtgttgccaaaggagattaacatttgagtcagtgtactaggacaggcggacccaccttcaatctgggtgggtacccttaatcagctgccagtatagctaaaataaagcaggcaggagaaggcggaagagcaggcttcctgaatcttccagcctccatctttctcctgtgctgaatgcttcctgccctcaaacatcagactgcaagatgattcaactctgatgttacaacaattgatagatcgatgctatttattgctaag

SEQ ID NO: 180459 - DNA, 588 bp, Homo sapiens
ctgtggattttgaaaaatgaaattagttgcatattcacaactataattccatatgaaatgtaatattacccataaaattcctttgctatacccctccatggtaaatccatctcccctcctccccagaccctggcaagaacagatttattttcaatacccattgttttgtttttactcacatttcatataaaggaatcacatagtatgttgtcttctgagtctgacttctttcacttaggacaatgcatatatgatttgtaatggttaatattgtcaacttgattggattgaaggatgcaaagtgttgttcctcattgtgtctatgagggtgttgccaaaggagattaacatttgagtcagtgtactaggacaggcggacccaccttcaatctgrgtgggtacccttaatcagctgccagtatagctaaaataaagcaggcaggagaaggcggaagagcaggcttcctgaatcttccagcctccatctttctcctgtgctgaatgcttcctgccctcaaacatcagactgcaagatgattcaactctgatgttacaacaattgatagatcgatgctatttattgctaag

SEQ ID NO: 180460 - DNA, 588 bp, Homo sapiens
ctgtggattttgaaaaatgaaattagttgcatattcacaactataattccatatgaaatgtaatattacccataaaattcctttgctatacccctccatggtaaatccatctcccctcctccccagaccctggcaagaacagatttattttcaatacccattgttttgtttttactcacatttcatataaaggaatcacatagtatgttgtcttctgagtctgacttctttcacttaggacaatgcatatatgatttgtaatggttaatattgtcaacttgattggattgaaggatgcaaagtgttgttcctcattgtgtctatgagggtgttgccaaaggagattaacatttgagtcagtgtactaggacaggcggacccaccttcaatctgggtgggtacccttaatcagctgccagtatagctaaaataaagcaggcaggagaaggcggaagagcaggcttcctgaatcttccagcctccatctttctcctgtgctgaatgcttcctgccctcaaacatcagactgcaagatgattcaactctgatgttacaamaattgatagatcgatgctatttattgctaag

SEQ ID NO: 180461 - DNA, 612 bp, Homo sapiens
tataaatactagtcagtttctatatctttgtcataactgagtatggttttgatggttgctttgtctcttttaagtgtgttttccttatcattttataagccttgcaatttttcttaaatccaggcattcttttcaggacagtaggtatgagttaagtagctcttatgaccatgattccgtctaatagatctttattgtgagcatttgagttaatctaggtaagaattgtactagggtgtgaaggtcgttgttactgtggctacattactatgcctttagtgcaatgtctgttcatagaaaaaatgaatttttttaagtatgccaactgttcttactcataaaayggaacaaaaaataattgcgtatgaatggcaaaaatatagttaataatcctataatacttttctttctcttatatggtctggatttgtgtccctgctcaaatctcatgccgaattttaatccccaaagttgaaggagggtcatggtgggagctgactggatcatgagggcagatttcctctttgctgttcttgtgagagtgagttctcacgagatttggttgtttaaaagtgtgtggcacttcctcctttgctctcttcctcctgctct

SEQ ID NO: 180462 - DNA, 612 bp, Homo sapiens
tataaatactagtcagtttctatatctttgtcataactgagtatggttttgatggttgctttgtctcttttaagtgtgttttccttatcattttataagccttgcaatttttcttaaatccaggcattcttttcaggacagtaggtatgagttaagtagctcttatgaccatgattccgtctaatagatctttattgtgagcatttgagttaatctaggtaagaattgtactagggtgtgaaggtcgttgttactgtggctacattactatgcctttagtgcaatgtctgttcatagaaaaaatgaatttttttaagtatgccaactgttcttactcataaaatggaacaaaaaataattgcgtatgaatggcaaaaatatagttaataatcctataatacttttctttctctkatatggtctggatttgtgtccctgctcaaatctcatgccgaattttaatccccaaagttgaaggagggtcatggtgggagctgactggatcatgagggcagatttcctctttgctgttcttgtgagagtgagttctcacgagatttggttgtttaaaagtgtgtggcacttcctcctttgctctcttcctcctgctct

SEQ ID NO: 180463 - DNA, 612 bp, Homo sapiens
tataaatactagtcagtttctatatctttgtcataactgagtatggttttgatggttgctttgtctcttttaagtgtgttttccttatcattttataagccttgcaatttttcttaaatccaggcattcttttcaggacagtaggtatgagttaagtagctcttatgaccatgattccgtctaatagatctttattgtgagcatttgagttaatctaggtaagaattgtactagggtgtgaaggtcgttgttactgtggctacattactatgcctttagtgcaatgtctgttcatagaaaaaatgaatttttttaagtatgccaactgttcttactcataaaatggaacaaaaaataattgcgtatgaatggcaaaaatatagttaataatcctataatacttttctttctcttatatggtytggatttgtgtccctgctcaaatctcatgccgaattttaatccccaaagttgaaggagggtcatggtgggagctgactggatcatgagggcagatttcctctttgctgttcttgtgagagtgagttctcacgagatttggttgtttaaaagtgtgtggcacttcctcctttgctctcttcctcctgctct

SEQ ID NO: 180464 - DNA, 604 bp, Homo sapiens
taactataaattgtacatatatatcccattcagcattatgttccctttgcctagcaacatgtctggcatgtaaaacttatccaataaatgttagttaaaatggatctagtctatctactagtcatgtatattggcatatttttatcttataaagttatatttaactccacagttaaaaagagtttctttattattcttccactagcattggaactaatttatccatttcagtataactctaattggcatatgatagtaaactgttctatartaactgttacataagaaattgttttagtataaattatcttcttctaatagctttttttttttttttcccgcagcagatttctttttttttttttttctggtagcagaaatccccatttgatgccaattcctcatcatcataagggaatgtaatcaaggattctttcctaataatgtgaatagatgtgcagtgactgacagaggtggtacagcgggtttattcttcttatggcagtgatcttctgactgtaacccaagggtgaaagctcatgcactcttagcaacaagtaaattgtacgaacatgccccagatatttcttcatttatttgtaaa

SEQ ID NO: 180465 - DNA, 503 bp, Homo sapiens
tgtgttttctttgaagctgaaacacctacagcagttaaaatatgggaaaaatattgtcttggcaggactaaagtactatttcaagttcaatgttaaataaaggttctctgtagctggaagttttaatataattagctgtagctcaacttatgttatattataataagaatgttatttttcaagacagaaaaaatcaatcagagtcattcctctggagaccacatacgaaatgttaatatttcaccagctatgttgtatacatctctcttttttttagtattcttccayataaaagtaaaaccttaccaaacaagctcatatattttagaaataaataactgacctcagaatattccataggatggaatttttattttttattagtttaagtacaatacaacttaaatccaccagtaaaccaatttatttgctgatcaatatttaatatttatgttttttaaaatttgcatacttcatttgatgttttattaaactattctata

SEQ ID NO: 180466 - DNA, 655 bp, Homo sapiens
tcacatcatcgtgcctgccaaagaaagaccacagtgtggttcttctctagtttcttcatgtccagtctgtgatgacatttttcaggatttcaaatatgcactttatcaaaggccaactggaaacaagcctgggatgtattctaaggcccatttcatgtgcctccaaattctttgttctttatataacatcagttttctcacccattttccagaatttttatcttcttgttctagagacrttataattgaagaagaaattttggatcattcagtatgatcattaatatcatttccttatgcttatacttccggttatatccaaccaattacacattacaacttacacattacatacacattacaactatgggcaggagctgcctcaagtctgcaccttgttaagtgcccctggaatcctgcctaactgaacttaaaatgctacttattttaacactaggcctaactctaataccatagttagactgaaactacattgtgccactcatctacacaaattatgttttttaagttagtaaataattgcattgtgagttattttcaatgtcaaatagcccatagcaatttgaaaaattgctacatgttggctatgtaatcatataaatctttgagtgatacaaattaaaaaaaagaacaa

SEQ ID NO: 180467 - DNA, 649 bp, Homo sapiens
ctttttttgattaatctatatgcccagaaaattttaaagaaggattcttgtactagtttgctgggattgcaaacaaagtaacacaaaccgtgtggcttaaaacaacagagatttactgtctcacaattcaggaggctaaaaattcaaaatctagttgttagtggggctatgaaccttggagcaaaaaatcttttcttacactttcctagcttctggtgatttgccagaagtccttggcattccttagcgtgcaactgcagaactttagtctctgcctctatcatcacatgacattctcccctctgtgtctgtgtctaaatttccctcttatgaggactgcagtcatrctgaatatcaagggtccactctactctatgatgatgatatcttagctaattatatcagctatgatgccatttccaagtgagttcacattctgagatactggggtttaaacatgcatttcggggggacacaattcaacccataacagttctcatatttactttacctttatctattcatagggcattgtgatacatggagagttgtatgtgttctaatggtgacatctagcccagctatattcaaaactatggctatggggacttaatggagtgctcacgtttggctgaatgtgaagacttta

SEQ ID NO: 180468 - DNA, 593 bp, Homo sapiens
aggttgctaattagctgaccttaaataaagatattattctttattaatggctatatgtaaaacagagagggagaggtgtgagtgtcagtgatgcaaaagcccaaaagaaggaaaagggccataagtcaagcaatataaacagcctctagaaaatggaaaggcaagaaaatggattctcgagcctccagaaataaatgcatccaggccaatgagacccattatggacttctgagctmcagaactgtaaaaataataaatttttgttatgttataccactaaacttgtggtccatatgatagaggaaggaaagcagaaaagggagaaaacaaataaaaaataggatgaaatagtaaatgtataaaatatttggtaatggaatttctagagagaaatcaccagagataaaagattctttgcttttcttctaaagctacccccaccctgagatttttctcctttcagtacatgccacaccatctaccagatgtcctgatgtatgaaagtatgcatcagtgtatctatgaaagtatgatcacaggaccagggtgaaattaaaattgctaatgaagtttcatgtcccactgggcaagca

SEQ ID NO: 180469 - DNA, 593 bp, Homo sapiens
aggttgctaattagctgaccttaaataaagatattattctttattaatggctatatgtaaaacagagagggagaggtgtgagtgtcagtgatgcaaaagcccaaaagaaggaaaagggccataagtcaagcaatataaacagcctctagaaaatggaaaggcaagaaaatggattctcgagcctccagaaataaatgcatccaggccaatgagacccattatggacttctgagctccagaactgtaaaaataataaatttttgttatgttataccactaaacttgtggtccatatgatagaggaaggaaagcagaaaaggkagaaaacaaataaaaaataggatgaaatagtaaatgtataaaatatttggtaatggaatttctagagagaaatcaccagagataaaagattctttgcttttcttctaaagctacccccaccctgagatttttctcctttcagtacatgccacaccatctaccagatgtcctgatgtatgaaagtatgcatcagtgtatctatgaaagtatgatcacaggaccagggtgaaattaaaattgctaatgaagtttcatgtcccactgggcaagca

SEQ ID NO: 180470 - DNA, 593 bp, Homo sapiens
ctgttgtgcagccgtgcaggcgatcatgtgcttcctcttctggaagtcagggctggctgtttaaaacaagccctacccttccrttagtatttctttactaaataattggtttgttgaaataagccacttttcccttcaactttttgttgttgctgctgttcttaatttttaccatgctttgacaaatgtcacaaacattttttacacagagcatatcaggttatcataacatttatagtcttatgtagaaagtagaatctaggaggtcacatttaatttgagcatatgtatttagattgttagggaagaaagtcatatgcactttccttttaggataattatctttagctatacattttattttgtaatttttaagggctacctagctcaaggatatgtctacaagtagttaattatgagttaatgttcttccccatgcagattgaataaataactatacttttccataacttacaataactgtatgtgctagataattttttaaatgtgatggttattcaattcattttgaactcaggaatcaaatttttaggacttaatcttgcagctctgagtagcactagagagtgtag

SEQ ID NO: 180471 - DNA, 577 bp, Homo sapiens
aagccaacatttccaacattcaagggtgttgggagattgacaaaatcctccccagcaagtctgacctctgagtcttaagtccagcagccatgatatttgctcttaattggctgacagaggcctggtgttttatttgatcttgaggaaaaagaaaaaaaaggataagaagcctcagaaatgaaagtaaagagttggaagtctgatctgactcacccttctgacaatcccagatgaggtcccaaatattgcagtctgcttagtctctagctcagccaggtccgagttcttgttctacaaccaagaagaataaggcatgcagacacccaagagtgagtagagtagagwttcttaaaaaaaaggatagctctcagcaaacagaagaaacctgaaaataggtggccagaaatggggctgagttctgggtcttttatgtggcaagaacaaggaagccttctggggattctgcccaaaacgataggggtaaagtttcctcctaagggtgctgtaactgtgcatgcctgcagttggccagcgtgactccatcttggttattactcatgagtgcctaagtgaaacc

SEQ ID NO: 180472 - DNA, 512 bp, Homo sapiens
agagctgaaagcttaggtcaatactttcagaatgaaattgcaagtattaatagcagaattaaacaagctgaggaaaaaaatctcagagctcgaagactgattgtccaaaacaactcagtcagacaaaaataaagaggaaacaataaagaagcatgaacaaaacctccaagaaatatgtgattacgtaaaaaaacaaaacaaaaacacaaatttgtgactcattgacttcccggaaagagagagagagaaagtagacaacttggaaaacacatttcaggatatcatctaagaaaatttgcccaacctcactagagaggacaatattcaaattccggaaaggcagagaagccttgtgaatactacacaagatgatcatctccaaaacacacagtcatcaggttttccaaggtcaaagtaaaaacaaaagaagaagaaaggaaaactagagagaaggggcaagtaacctacaawggaaaccccctcaggctaatagtgttcttttcaacagaaac

SEQ ID NO: 180473 - DNA, 614 bp, Homo sapiens
ccattacccttagtgaactaacacaggagcagaaaaccaaatgccacttacaaatggtatgttttgacttataaataggagctaagcagtgagtacatatggacacaaagaagggaacaatagacactgtcggcctacttaagggtgaagagtgagaggagggtgaagattgaaaaacttcctattggatactatgtttattacctgggtaatgaattaatctgtacaccaaaccccctgacatggaatttttcctacatagcaaacytgtacctgtatccctgaacctaaaataaaggttaaaaaaaaagaaaattatgtatatattttggaatcctctgcaatattggtttttaaggtggtggttagaacttcaaaacaccattaaatatcagttgaacatcagttataacatatgtaacagttaatttcttagtaattctggctgtgaatgacctaatttacctcggtagttgataagcacaaagatgagtgtgatgattatttgcacagaaaaatctcaggaaatgtactatacaaaaaagaaagcaaattattgactgtatcaagttaacaggacatagtttagcataaaaattaattgtaataatatt

SEQ ID NO: 180474 - DNA, 594 bp, Homo sapiens
ggaaacattttgcaaatgtgattttatatacatgaaagtcttacagagtcatactgaactaaaaccaaaaccatgaagatactatgacttggtttatccaagaagaaatcacttaaaattcatattttttaattaaaaaatgcaaagcattattttcctaatttaatcataagcaattgcagttaagaagcaatctgctattggttaaatggcaagatacatagagaagagtttacctcatccttctgaaacttgaaaataacaacttagttcttttatcatgtatgttttaataaaattcataaatgtaatatgtcacattttatagctttttctactwtgatttgtgttttaagtttagttttatgtttggttctctgaggcaatataaccctgagtacaacagactatttgcccaataacctatagagtaatacacatttttcacaatggaaatgtcagcaacaattatgtttttctgaacagtacctccagcacactgacagcacaggcatgtgcctgctctcagggacaagaggccattccaactctgttgtgttcatttttccttcttttacactgttttctgaaact

SEQ ID NO: 180475 - DNA, 624 bp, Homo sapiens
tggagcaaccaaattatacccttagcttttttgtataacaacacacccccatgcatattggttttacagctaaacattcaagtttagatatatggctgytccagatttccaaatcatcacaaagttaggaaagcatttccaatttcagatctctagcttagtttcaattacatacattgatgcctgtgaatctcctgaattttgaaaatttgactttctcactatttatcagcacagaaatcagctggaattagatattcagggtaagaaaaaaaagttttcccaggtggaaaaaaatcaccttatgagccttatttaacatgaaaataagagtaattaataaaaagtaagtaatgaaagattttattgttgtagggaattaaaatgtgcctcccaaaaatatgccagactggcttaaggattattctgagctgaaggcaattaagaaaaagcaggcatagggcaagtttctgccctcccccatctgcctgaaaacaaggcgtaaattttccctctgaaggtgcctccctctcttcccatcaaggaggaagagaacaatccgtatcaccagagatgaaggtggcttaaaaacaaaccttacagcctagaccttaaataacacta

SEQ ID NO: 180476 - DNA, 495 bp, Homo sapiens
agacatgtagagagagagacagagagagagagagacaccatgtgttcccttcccctttccaagtgaaattcttacgttgtcaagttactccacaaaacaattaaacaaatttttaataagacaaagtatactaaaagctatacagcctacattgtactaaatccataatccattttaatctattattttcaaagagttttattcattcccctctgacctaattactaccctttctttccttattattactttaatrtgagtattcataatataaactcccactaattactggaaattaatggaacaagcatttatatgtgatgagaacaaaattattaatctagccatattaacatacttccctctttttccaacccattatagaaagttgtataattcagagtttcttattgctacccatgacccattaatggataataaaatcaactggatgagtcataaccaaaatttttttaagtgcaagaggatatagtg

SEQ ID NO: 180477 - DNA, 418 bp, Homo sapiens
agaacactattcttaccctcattgtgtgtcagacaaatcaagtgctgtaaattaggcacttaaatggtcacatatgtattttatttartatttcctcaaaaatggtgtggatatgccttgaattggctagcagtctcacctctgtgacaggccccggttcccattcatttccaccatggtgaacaaataccaaatgtgaacgtggtccaatagaacatcctgcttcactacaggagagcaaggtggctcacatacatgcgtgtactcacatgtgtcactggcaccactaagagaccagggagccaagccttgtgggttatctggtggctgatgggctggcaaaaactcatggccctacctgtgtggactgttgatgaattttctttgtgtagcttatcaaatttaaatataacctggg

SEQ ID NO: 180478 - DNA, 543 bp, Homo sapiens
tgcccattatcaaatgaatggataaagaaaatgctgtatatrtatatacacaatggaatattattcagctttttaaaaggtggaaattctgtcatttgtaatcacatggataaacctggaagaaattatgctgagtgaaataagccaggaacagaaagccagatagcacatgatctcacttatgtggaatctcaaagtcaaacccatagaggtagagagtatattggtggttaccaaaggttgggggaagggggtggctgagggagggaagatgttgatcaaagaatatacagttttagttagacaggaagaatacactttagtgatctattgcacagaaaggtgactataataaaaatgcattatatatttcaaagttactaaaatagtagattttaaatgttttaacccatcaaaataataagtatgtgagctgacagatttgttaattagcttcatttatccattccataatgtaaatttatatcaaaacatcacattatatcaaataaatatataatatatacaattatttgtcagtag

SEQ ID NO: 180479 - DNA, 538 bp, Homo sapiens
actgcattgtgtacatgtgccacattttctttatccattcatctgttgatggacatttagattgcttccaaattttggctactgtgaagagacacacaatattggagtgcagatatttcttcaatatattgatttcctttcttttgggtatatacccagcagtgggattgctgaattgtatggtagctctatttttagtttttcaaggaacctccaaacttctccatagtggttgtactaatttacgttgtactaatttacaccaacattaaaygtgggttcccttttctccatatcctctccaacaggattgtttatcttttgtctatccaccagtttaagaggaggtgtgggtaatgtcagaacatgcattttattcactttattgagtgggaagactgctcttacttgagcaaggaccacgtctacttctatagccgattcttatactggaaatgttggaagtacgtagaaaggacaaaagagaatctcaccactgaggctgccttcttaagtcatctcaactattattttactg

SEQ ID NO: 180480 - DNA, 538 bp, Homo sapiens
actgcattgtgtacatgtgccacattttctttatccattcatctgttgatggacatttagattgcttccaaattttggctactgtgaagagacacacaatattggagtgcagatatttcttcaatatattgatttcctttcttttgggtatatacccagcagtgggattgctgaattgtatggtagctctatttttagtttttcaaggaacctccaaacttctccatagtggttgtactaatttacgttgtactaatttacaccaacattaaacgtgggttcccttttctccatatcctctccaacaggattgtttatcttttgtctatccaccagtttaagaggaggtgtgrgtaatgtcagaacatgcattttattcactttattgagtgggaagactgctcttacttgagcaaggaccacgtctacttctatagccgattcttatactggaaatgttggaagtacgtagaaaggacaaaagagaatctcaccactgaggctgccttcttaagtcatctcaactattattttactg

SEQ ID NO: 180481 - DNA, 593 bp, Homo sapiens
aaattttggctactgtgaagagacacacaatattggagtgcagatatttcttcaatatattgatttcctttcttttgggtatatacccagcagtgggattgctgaattgtatggtagctctatttttagtttttcaaggaacctccaaacttctccatagtggttgtactaatttacgttgtactaatttacaccaacattaaacgtgggttcccttttctccatatcctctccaacaggattgtttatcttttgtctatccaccagtttaagaggaggtgtgggtaatgtcagaacatgcattttattcactttattgagtgggaagactgctcttacttgagcaaggaccacgtctacttctatagccgattcttatactggaaatgttggaagtacgtagaaaggacaaaagagaatctcaccrctgaggctgccttcttaagtcatctcaactattattttactggtacagttttagcttttgatggtctttcaagtttcaaaagaataggagatctcttctattgctcatgagccttacaatttgtgtgattttaatcaagttacttaacctctaaggctgtttttaa

SEQ ID NO: 180482 - DNA, 558 bp, Homo sapiens
aaaacacatgcattcaagtatattctaatatagaaaaatatacagaaattctaatacagaaaatggaaatacagaacwtagaaaagcacagacttcatgcgtccagtaacaagtaatgtactcttacattttcttgttaaataatttttcaatatgtactcataggatattgttatgattgatataaaattgtcacatttatagattccaaaaactggaaataatttattttgaacttttttccctgttatgtttttatttatcttgaagtgtttgtagtttgttgcttttattggaattccttttatatgagtaactatatcttgacaactcctgttatattcccgagttcatggatatagattctatgcagactcttgcagatacttcagaatgaaaatagtgaaaataggagatgatgtgtgaaatgctgcagcagtattgattgccctgccacatgaacagaaacaaaccaaattactgctgttatccaggtcttttaataattatgggcaaaggccaaggttaagctggaaggtgaattgcatttagaatgtt

SEQ ID NO: 180483 - DNA, 558 bp, Homo sapiens
aaaacacatgcattcaagtatattctaatatagaaaaatatacagaaattctaatacagaaaatggaaatacagaacatagaaaagcacagacttcatgcgtccagtaacaagtaatgtactcttacattttcttgttaaataatttttcawtatgtactcataggatattgttatgattgatataaaattgtcacatttatagattccaaaaactggaaataatttattttgaacttttttccctgttatgtttttatttatcttgaagtgtttgtagtttgttgcttttattggaattccttttatatgagtaactatatcttgacaactcctgttatattcccgagttcatggatatagattctatgcagactcttgcagatacttcagaatgaaaatagtgaaaataggagatgatgtgtgaaatgctgcagcagtattgattgccctgccacatgaacagaaacaaaccaaattactgctgttatccaggtcttttaataattatgggcaaaggccaaggttaagctggaaggtgaattgcatttagaatgtt

SEQ ID NO: 180484 - DNA, 533 bp, Homo sapiens
ctgtctttaatgtcaaagataacgagttactcaatgaaataggaatttctttcctttttacttggtaaatagaacctgagtagaatataaagtagtcttaataaataagagcagtgaaagttagtaatcagggcatcctacgctagattgtaaagtttaccagttgaaaattttctttccagtaaccttgttaaaatagtttttatcagtcttcctcatgctcatggttatgtgccatgggaaaatrttttctgctcaatactgcaatagattacatgttctctgctcagcatgtggtagattttaagagaatattgcttttgcaattttaaaatatcatatgtctataaacaatataatctttcaacttgagccaaaatatttgcatttgagaaatagcccatttgttttatttattgtctcctatttcttcctgactgtgtctggttacaagctcagggggaaaaaagtaatgatgctgaagtcttggatgtagtgtattcaagctggttggatttgtggctatttgcagt

SEQ ID NO: 180485 - DNA, 532 bp, Homo sapiens
tttttacttggtaaatagaacctgagtagaatataaagtagtcttaataaataagagcagtgaaagttagtaatcagggcatcctacgctagattgtaaagtttaccagttgaaaattttctttccagtaaccttgttaaaatagtttttatcagtcttcctcatgctcatggttatgtgccatgggaaaatattttctgctcaatactgcaatagattacatgttctctgctcagcatgtggtagattttaagagaatattgcttttgcaattktaaaatatcatatgtctataaacaatataatctttcaacttgagccaaaatatttgcatttgagaaatagcccatttgttttatttattgtctcctatttcttcctgactgtgtctggttacaagctcagggggaaaaaagtaatgatgctgaagtcttggatgtagtgtattcaagctggttggatttgtggctatttgcagttctttagacatatttttcttttgcatgtccaattgtggagaaaggaatgaaaa

SEQ ID NO: 180486 - DNA, 582 bp, Homo sapiens
aaattgcaacttctactgatgacttagcatgtacgatttgcctcagacttggattttttaaggacccaagactacgataccagtctcacatcaaaacaggaattctagtagaaggtcaggtgrcttccacttgagtaaatctttactgtatttaaaacacagttattaagtcagcctctcaaaaggtaaacagaagaagtgtaattcctattttacatgcatttaaagatggaggcagtattgtaaaatgggtagggagcattggaatcagggagacctcagatcaaatcctcttttcaaacgtgctaggtgtgagataatgggcaaatgtgcaaaatctctcccagcgtcagttttcttaaaatataggcctataactatttgactctgcatccctggttcttgactgaatactgccatggcctccaggaatggagggtgttaatgaaagtagagaacaaggggctaggagtgaggggtgaacgtgtggtccagtttggtgcctgcacgcaaggtgttcaagtaaggagaatgacaacagaatctgtactgaggactggacgttaaaagaaaattgcaatc

SEQ ID NO: 180487 - DNA, 582 bp, Homo sapiens
aaattgcaacttctactgatgacttagcatgtacgatttgcctcagacttggattttttaaggacccaagactacgataccagtctcacatcaaaacaggaattctagtagaaggtcaggtggcttccacttgagtaaatctttactgtatttaaaacacagttattaagtcagcctctcaaaaggtaaacagaagaagtgtaattcctattttacatgcatttaaagatggaggcagtattgtaaaatgggtagggagcattggaatcagggagacctcagatcraatcctcttttcaaacgtgctaggtgtgagataatgggcaaatgtgcaaaatctctcccagcgtcagttttcttaaaatataggcctataactatttgactctgcatccctggttcttgactgaatactgccatggcctccaggaatggagggtgttaatgaaagtagagaacaaggggctaggagtgaggggtgaacgtgtggtccagtttggtgcctgcacgcaaggtgttcaagtaaggagaatgacaacagaatctgtactgaggactggacgttaaaagaaaattgcaatc

SEQ ID NO: 180488 - DNA, 517 bp, Homo sapiens
tgtggttcttggaccagcagcatcagcaccacttgaaaacttacagaaatgcaaattgttggccactgtcccagaactactgaattagaaagtctgagggtgaaatccaacaatctttacaagccttccaggtgatattgaagcctttgaaaattgagaagtttgagacctgctgccctatgcaatactctactattttaccatagcttcctcttgagggacttccaactgttttggaagctcaggggaaaaaaaattaataaacagtagaaagcaaacatagttagaagccatgaacaatcatttgtgtacttttgcatggctcctttgtgatacttacttatgtgaatatgattttgtcatttataaaacttyataaaagcttagtaacttaccatagttgaaatatatcaaatcagatgtgtttacttgagcttttaaatgaagataatggagtgccagagatttttacaattttccatgttgcggtctataatttccctcttgacttaaagct

SEQ ID NO: 180489 - DNA, 495 bp, Homo sapiens
ggtaccaggctagagagtatctttctcacagacttccttttgctcataatatctatgagttatctagaatcaggtaccattggagcatggaacttactggataactcagagatgtctcagaaacctcaccttttacaggacacctgggtagaatcacgggtcaccaagaagtctctctaacatgtagacagacccttgtgtgaacatgtgtaaaaagttcttggacagaggcattttctagacacgccaattagaaaggacttaggtaagttacaacargactgcgagcttgaagtattaacagttatttcaactttttgttttgcaattaatttcttagactttcttgatcagatttttcaacccccaattttcccaattgctccactttaacaaataatgtgtatgccaatctgcttacttttccaaggtatggttaggttaatgagtgtcatacagaatgcataagttaaaactgaatcttcggtatcctat

SEQ ID NO: 180490 - DNA, 203 bp, Homo sapiens
accatggcactctgagtgcttgcagctaatatgaaattaatttctagtattatcctatctacattttcacttcttccagtcaaatgatatccttatcagaagtcagttgtatttgtttccaaacctgcttayaccagttgtacttattattgaaattatgtatttccatgaaacattacataaactggtataatttgcacttt

SEQ ID NO: 180491 - DNA, 565 bp, Homo sapiens
cttgacaatctcccaaataggaaacaggttgaaacactccaacatttcaaatacaaaaatgctaagtgctaacacacacacaaacacacaaacacacacacacatgattcacatgtacaatacctttagattctttgaaaccatattctttacaaattgctaataagagcccaaaataaacacagtaaatggaaacctgcctcatcaagaattagactaattcaaataytcttattactagaaatgtagttaccaatcaaaactatacagaaattatcaaacatcaaggacagaaattataataaaaatcaagtgtcctatgtcccagaaattgttttaactatgaacttcatcagagggatctaatttaatattcagaataaggctagcaggtagatattaatataatctccatttaaagttgaaaatgtaaggcacaaaactgtttacaagttgcttaaaattatacagctagtaaatggcaaaggtaagatgggaatcctggaagtcaatcttcaggacccacttttaactactaccaaaacatcattaatgaagtattaaa

SEQ ID NO: 180492 - DNA, 439 bp, Homo sapiens
aagacaacatacaagtatctttgtctggggtcattccctacaccatggagattgctctaaactcttctctaaaactagtgccccccttttgacagctcaggctgaatgtttctccttgtcaaaatctttttaggcctccagtcagacttgagtctctgcctcttctgtgccatcagagcaactgtgcatgtgccacatttctgtgtaagcaactttattcctcatatttgaagcacaaggttattatttctcctttgtgcttctycaggcacctaatgtctgtctctgccattgcctgtaaccacctctcagtagactgtatgttcttacaccagcttccctttgcctgtggttcctttgtctttctatagccaacactgagcaccctcatacttaaaagacaaataataaatgtgtgtaccttaattattctccttca

SEQ ID NO: 180493 - DNA, 641 bp, Homo sapiens
aatcacattcttctggcttgggccaatgtgtgttagggatcaagtacagagtatagtaaatggtgttgttggtaaggaaagaccaagtgtgatacaaagaatataaatgaatatgttctctccaaaatgttgttagctgacaacaaaaatataacctctagcttgatgcagtcagtgtaatgccaatcacaacctcttctccataatcaacactctttacctgaaggcaggcttgatatggggggactgtgagagccaacaggagaaagtagtgacacttctcatttcaatttatttctatccaggcagttccactatagaggacagcagtttaagagaggaatgagcttcaggaaataagcaaagatgctttctgatttaatcctgagtttaattaaatacccacggaaatcctattatgtgccattttaaaattgtgcacactgccttattaggcccactagaataatctaaaagtgatgttgctagtatttctaattaaaaccaaaagaaccagtgatgaaagctataaataaaccctgtctggaaagacttttttcttgtcatttgtcttcctgattatgaaaataaggactgtgtcacaaccatactccstgctgcatctgtccatgaactgagca

SEQ ID NO: 180494 - DNA, 511 bp, Homo sapiens
ttacaacattcacctcctttctgatacacatctcaggaaaaaaaaaaaaaaaactactaagtaccaggtcagaaatttggcacaaccctagatgaccaccttgtcatgcaaataaacttagaatggtgctcctgaaagtcagccacagtgcttcaaaaacacatgattttttaaaacaccaaactaagcataccacatagtatagagaccaggctatggagttgagaccacctgggttagaattccatttctttccatttagttgctgtcaccttcctaatttctctgtgttccatarttccatattatccataaaattcagatatgaacacttactatacagagttgttatgaggattggacaatgtatgcatcccacaagtagatcaattacaagtacattttgccccaagtaaagacaacacgtgggaacgctgtgcaagagggaacagcaaaagcagttggaggatggaagtcagtttgcaaacctatgcgcacaggcagccaaaca

SEQ ID NO: 180495 - DNA, 551 bp, Homo sapiens
aaagatgagatcaaggatcaaggaggagggttagatcatcaaaggtgagaagaacaaaataagtgcatctttagatctcatctaaagatgagatcatctttagattttaggaaactagataaggtgaaaagaggcatttgagctggaaaggaagtctggctctagcacaagtcttctcaataatgggctgatgactgagtttgaagcttatgttctgtatgattctcagcacagmagtaggatctgttgacagaagatacagggcacatactatactgcatcccaagaaagaacttcctagcaatccttcctgtctataaatagagagtgatctcagaaatgattgggttccgattcttgccacatgccggggaaacctacttggcagattgctatagggaagatttaaacataaagcaagaaaggtacatgtcaggctgaaagaataaaagatttcaaccaccagtaaagacactcagaaggccagttaaggagcacctagtcttcttatgatgaataactttcttcaacagactagaaaaaacaagcag

SEQ ID NO: 180496 - DNA, 551 bp, Homo sapiens
aaagatgagatcaaggatcaaggaggagggttagatcatcaaaggtgagaagaacaaaataagtgcatctttagatctcatctaaagatgagatcatctttagattttaggaaactagataaggtgaaaagaggcatttgagctggaaaggaagtctggctctagcacaagtcttctcaataatgggctgatgactgagtttgaagcttatgttctgtatgattctcagcacagaagtaggatctgttgacagaagatacagggcacataytatactgcatcccaagaaagaacttcctagcaatccttcctgtctataaatagagagtgatctcagaaatgattgggttccgattcttgccacatgccggggaaacctacttggcagattgctatagggaagatttaaacataaagcaagaaaggtacatgtcaggctgaaagaataaaagatttcaaccaccagtaaagacactcagaaggccagttaaggagcacctagtcttcttatgatgaataactttcttcaacagactagaaaaaacaagcag

SEQ ID NO: 180497 - DNA, 591 bp, Homo sapiens
agataggaatgatgggcacaaactggatgctcaataaactgctgagatctgggacacatgaggtcaggcacgtggctggcacagccaatcttccatatgtgagaggttaacatgctgagtgaaggacgtatgtcaattatttgaggagcatgcgacactgaaagtctacttgagcaaaagagggttgtttttaaaagagaacctgtaggtgacactcatattgacatgccatcgttcttggccttctttaaagtagattttgattcttcagcttggaaagacagggatattactctaattttcatgatgaattggaatcggcaagcctcaaagttctaacaaaagagggatgcagaaagaactctttgcagtttcccagtgatatcatgccagtctatgcctccaaggctttgcccaattccttctgcttaaaatgcccttcctccctggtgagcctctaataaacatctgtaagaaggcttccagcctgsccttaggtttcttcatatcataccgtacttttcatattaatagttaaatattgaaagtaattctgcctctagaattgatgactagcttatattgagccaa

SEQ ID NO: 180498 - DNA, 523 bp, Homo sapiens
tggctacttattagagtcttctctctttttcttagtcctgctaagggtttctcaattttgtttattcaaaaatcaactcagttttgttgatttttaaatagtttttcaattctctatttgatttgcttttgcttcagtttttattatttctttcctcctgctaactttgaatttagttttttctagttcttttatatatgttgcttaattaagatctttgttctctttttagtgtagattttttttatcataaacttcctcttagtactgttgttgctgcaccctgtaagtattggtaagctgtgtttttgtttttatcttgaggtttttaaaaktctcttttgattttctttttgacccgtggtttttcaggaatgtgtcatttagtttccacatatttgggagttttcctattctcctgctgttgatttctggtttcattccattgtggttggaaaagatacttggtatgatttcaaacctattaaatgtgttaagacttgttttgtgacctaacatatga

SEQ ID NO: 180499 - DNA, 587 bp, Homo sapiens
aacaaacgttctatgacatggtattcatatttatatccaaggcccaaacttaaaaaatttagaaaaccataacatggagcaaatagtttggcaattcataaactacattaaaaaactgtcaatctctctcactttgtcgctccatgaacttaggtcagataatgataatcaactccaacccagtactactgttcaagcagacctgttcatgcacacaaacccacagagactctacaaaacaaattcaacagttcaccaccctaccaatataagaaaaacaaaaagagacaaacagaaaactaaaatcatagtagaatgaaaatgctacatacttayaggctatgagtcccccaaaccagaatgaaaatatgtagggtgagtgtccaaaaacaattctgtgtgttaataatacaataaatcaggcccagatgtcataaacacaataaatcaattgaaactgccaaaccacttctctcaacctactggatttaattaaaaccaccactcggttcatgagaggccttctaatagagccgataatatcactccggctcaaccatccacctaacctgatgtgggagacgcag

SEQ ID NO: 180500 - DNA, 493 bp, Homo sapiens
ggcagtgattccagattgctaatgccactagttgtgtgctaaaaacaaatgtaaaaaattacatttgtccttaaatgattgatttttttcaaatgaagcttattgaggtacaatttacattcagttaaattccccctttttattggacagttctatwaattttgacaaatgcatacactaatttaactgccactatgataaagatatggaacacgtctgtcatctcccaaagttccctcatgtccctttgtgatcaatctgcttcctccacaccttgtccatggcaattactgatttaatttttgtcactatggttttgtcctttctaggaagttgtattaatgaaatcctgcagttgttgccttttgaatctgtgtattttcacttaatattgtacatttgaaattcatgtctgtgtttgcacaaagcaatcatttgttctactttgtcactaagtaatattccattgtatggatgtacaacagtttattat

SEQ ID NO: 180501 - DNA, 458 bp, Homo sapiens
ttatgttgcccaggcttatctcgaactcctgggccgaagcgatcctctcacgtcagcctcttaagtagctggcactacagatgtgtgtagccttacccatctaattttgaggagaccttagtaataaattctaaaatgtttttgaggttataggacatggtacaaattgaatgggagccaagagagtatgtactgatgttcattgatatgaaacttaattttaagtgttaatttttatgatgaataaaaagcacttggcatgtttgctaggcattttgcagcttgtatctttgcaggcctagccagaatggactgttttaacagtttgggttgcttaatctgctgctcactctctggtggtaactaaarggtaattgtagcccatatactggaaatagcatttcattaaaattttatcactttcaggaaggtgacagcattgagtgaggggtggaaat

SEQ ID NO: 180502 - DNA, 369 bp, Homo sapiens
cggccggggctcctgtgtgcatctgtctctcccagtgcccagcacaggcgtggaacggaagaggtgaatggaccgatttgaacacatcatcctggattctccgttccctctcaagccctgcagctaacccatcggcaagccctggaggctctgcctccaaaatcctgcctatcccatgtgcaaacgcctctcaccaygtccactgctatttgcagttctgtgtgtgtggaaatacttccacaaatttggaatgaacaggtcacagctgtgcctggagggaatggccagggaaatgtgccctcgccttgctgttctatccaggcccacccagctgaggatgggggacctgccaccactctcctggcagtt

SEQ ID NO: 180503 - DNA, 635 bp, Homo sapiens
tattgacaggagtgggtgtctggtgggggtgtcgttgcttcttttaaagttagtatttgtgacccaccaggatataggaggtaggatgtcagctcaccgctggcataaacctccaaggaagggggtggtctcaaggggtcaagctgagacacaaaggagtcagggcccggactcctggtgtcacctgggcctgaccaccacttctcagaacaagaaatgacgccctcctcctggggctgccccaaagcccaggagcttggcagcatcgcacacaggatggtgctatcagcagacattttggacaaggtgctgaagtgcctgatggacttggctcttgtcatgaaatgaatgtgcatcctgaggaagcctctttttcagaggaagcctctccttcagaggaagcctctccagtcacctctgccctctccaatgacatgagtcctcccaggtgacctcagccctcccaggtgatgtccttccatggtgactctggctcttgcaggaggtgggctactgcagggayctgagccacatcgccgccttgttcctcctctatcttcctgaggaggatgcattctgggcactggtgcagctgctggccagtgagaggcactccctgcagggtaagtgaacag

SEQ ID NO: 180504 - DNA, 497 bp, Homo sapiens
gacagatagatggggctataggatagggtttgtggttaaakgtgaagatgtggttgaacattgttctaggtagtgggatgcagttggatactgaaggttttaaatataaatgaagaattttaatagtgcagtgctgtggaagaatgttagtgtggggagtaatatgaggagaactttcttttaaattttttttttttttttttttttttttgagacagggtctcactctggtaatcaggctggagtgcagtggtgcaatcactgctcactgcagcctccatccacctccagggctcaagccatcctcccacctcagcctcctgactgactgggaccataggcatgcaccaccatgcccagctaatttttgtatttttttgtagagatgaggttttgctatgttacccaggctggtcttggactcctgagctcaagtgatttgcctgtctcggcctcccaaaggctgggattacaggcatgagccaccacacccggcc

SEQ ID NO: 180505 - DNA, 420 bp, Homo sapiens
cggaattcgggaggtggaggttgcagtgagcctctgagttctcaccactgcactccaccctggccgacagggtgagaccccatctcaaaaaaaaaaaaaaaaaaaaaaaaaacccataaacattgtttcattttccttgtatatatatcatgccttcctaaatatcattcaagcttttcaagatcaaaagcagagtcttgttatatcccaagcacatagacctaagtgtcctccaaaggctagggttccatatgtgtggaacagagaaactcaaggtcatttctcaaggggatcccacttcaragcccctgaaacaacattggcctaccaagatgctctcaggtgagcccaagtaagagagcacagtagactctgaatgttgaccttaaatttcctgttttgttttccacttctaatgca

SEQ ID NO: 180506 - DNA, 504 bp, Homo sapiens
aggcagttaataatttgaattaacacaaggaacatatgttgaatataaactatctgccatataccatctgctgaacatgacatacaggcaaacaacttacgataattcaatgtgacatgttataccagctatcagaaaaagcttcaggtaggcctgaggaggagcatgttaatccatcctttcctcttcttattgactggaatgatttaacctggttatgcgtgtatctctgtcacttctgtgatttttattttgacaaatcatgagtgacagctatgtccttagctctgagggttggggggagggaagcaatgaggagaaraaaacagcaaaaagtcgaacaacaaacaaatgctctcttgcttatgagaacctcagggtgtatgaaagagacgacgtgacaagggctctcatagagccactgctgctgaggggagtgaggagaagcttcacaggtgaggggaggtgggatgggttgtgggttgagcaagctctctccacaga

SEQ ID NO: 180507 - DNA, 568 bp, Homo sapiens
aatttccacaaacctcagatgctttcgatctgctttgcatcttacagacagtaacaactgtgatacataaccattgtacaccatgattacattcatatctgtcccaaaatactttctgtgccactgtagattactcaagattagaggtgctggaaagaataaatacagtaacaacatcttttattaatttcattaaaaggtaaaataaaactgatgtggkgtgtgtgtgtgtgtgtgtgtgtgtgtgtgtgtgtgtgtctatttcctatgaagacttttatttgtaattttatttagaagttgtggctagattttgtactatggtcatggaaatttagtttacttgaaatttcataaaattgtttttcctaaggtcaacaagtttcttttgtgtagcaggaatatattttatttaggtgtagagtttaaatcttactttctcattgtttttatgacttttggataacctggtcataaatttgttaataggttggatatagaatgttactctgccatccaagaatatcttaatttattatttattaatttgtttgtgtattaaacaaac

SEQ ID NO: 180508 - DNA, 382 bp, Homo sapiens
acatatgactttataatccatcatttttcgtcagtgccaaattggttaaaattatagcatgtcattgcttagtatggggaacggtgccatacctccttggtagactagcccgagatttatttacactgtcccttgtatgagtggccagggatatgttctctctgacttcatctttcaagacaaggttggatttctttytccatggttaatgggtgctatatatctctgccttcctagtcacccccaaatcatactttattgtccccttctcaggtattagtagacatggagtgatctctttgcctgtacttcaaactagaaaggcattccccaaggctccaatgcagaatggaagttttccttctgtgcatctgccaactag

SEQ ID NO: 180509 - DNA, 551 bp, Homo sapiens
actgggtagtttgaataatttcagtgggctctgagatacaggggttatctctagttgcctgatacccagccctgggataatttggacagatgaatattgcctcctggagtataagaaccagacagaataggtggttgagagtatggacttgggattggttgattcgtatatcaaaagcacacttttaggccaaaaaaataaaagtgtgcttttgctatacaaaccaaccaatggttgcttttttgctatgtctaggaataatctaaccttggaaggggcaatctgtccagggacagaaacactccagatgccagagcatcaagaatagagaaaataagaaaatatgctaatgcatgtatgtattttatttgactcactaatttactatctagggttttatactatagaaatccatgcgtaagcagagatgtgtaacacaaatgctcaatgcaacactgcttgcgacygctaaaacttggaaacaatatatatatttatcaagagcaggtagtgggattgattttgctataaacagaatgggttgtgcaaat

SEQ ID NO: 180510 - DNA, 543 bp, Homo sapiens
agttcttcctgggacttgagcctactggacttcagactggaactacacaattggctctcctggacccccagcttgttgattgcccatcttgggacttgtcagccctcataccctcatgagacaattgtttatagtaaatctccttctctctctctctctctctttctctctttattctcccttccttcccctccccttttgttccctcctctccccttctccttcsctcccccctctctccctcattctctctctctccctctcttttgaatgctggtttttatcatggaactccagccctcaattttttgttccaagcaacaagctgaagaaagatggaagggctgacatctggccaaatcagctcactgtacaccttctactacaactcactggccagatcttcgtcatgtgccctctttatctgaaaagaaagctgggaaatgcagtttctcagttagatacactgccattcccacacccaacagaaaacagagttctgctcaggaagaagtaaagattgaacatgggatagacatcttt

SEQ ID NO: 180511 - DNA, 257 bp, Homo sapiens
ctggtcaatcatctcccttctaacctttgcaacattcaatactgtcttctattcagggtagtaacattgggtcctgcagggtttctgaaagtgagattcatggaccatatgcctgtaaataaccttagtcatctgttgaaaatatggctttctgctaccataytttaaacacatgaatcatccattagatgtttctgatgaacatcaaggtttactaacaggaatatgggactggaaatcacaaagccctcatttgc

SEQ ID NO: 180512 - DNA, 559 bp, Homo sapiens
aagaaaagagaataaattacatttattaaatacctactatgtgccagtgattttacaaacaatagttcattccagggctctgtttttgaatttgcaaaattgggagggagttactctagtatttctattatttttttacttccagatggaaattcaataaggacagtttctgtctcttgctatatcaacatctcttatatcagaggaaaattgaaaataaaattccaaattagtgcaaacacattcctgactttcatgagttcacttttaggtcacttctaaatcagtgttctatttattggaacaggttggttcattmcactgattggtgttctctttccaaggctcaataaaattccatgaagcatcaacctgaagaataacagccatgcaaaaaaagctcatcatcactggtcattagagaaatgcaaattaaaaccacaatgagataccatcttatgacagaatggtgattattaaaaagtcaggaaacaacagatgctggtgaagctgtggagaaataacaacacttttacactgccattgtggaagacagtgt

SEQ ID NO: 180513 - DNA, 576 bp, Homo sapiens
cttggaatgggtaaagaaaagagaataaattacatttattaaatacctactatgtgccagtgattttacaaacaatagttcattccagggctctgtttttgaatttgcaaaattgggagggagttactctagtatttctattatttttttacttccagatggaaattcaataaggacagtttctgtctcttgctatatcaacatctcttatatcagaggaaaattgaaaataaaattccaaattagtgcaaacacattcctgactttcatgagttcacttttaggtcacttctaaatcagtgttctatttattggaacaggttggttcattacactgattggtgttctctttccaaggctcaataaaattccatgaagcatcaacctgaagaataacagccatgcaaaaaaagctcatcatcactggtcattagagaaatgcaaattaaaaccacaatgagataccatcttatgacagaatggtgattattaaaaagtcaggaaacaacagatgctggtgargctgtggagaaataacaacacttttacactgccattgtggaagacagtgtggcg

SEQ ID NO: 180514 - DNA, 489 bp, Homo sapiens
ttctatatttgtgcaatccaacatggtagccactagccacaggtggctattgagcacttgaaatgtcactagtgaggctgaagaactgaattgtgtgttttatatgttttaattaatttaaattctaataactactagtggctaatggctatgatattggatagtatgactctagaatctatataatctggggcgaggaaaggttgataggaagaaaaatattttctaattaacattcttcagtctttattttactttttacatttttttttcgtaattttgactttaattttggttcaggaggtggatgtacaggtttgttacatgggtatattgtgtgatgctgargtttttggtatgaatgatcttgtcacccagatagtgaacatggtacccaatagttagtttttcaagcccatgcccccttcccttcctaccctctctggtaatttccagtgtttattgttgccatctttatgcccatgccca

SEQ ID NO: 180515 - DNA, 493 bp, Homo sapiens
cattatgatgaagtaaatctgtggtgttttccccacacattgagcatgggcacttaaataacatggcaaaaatgtgggacacacagatgaaattcttatttgttctccacttttaacaagtaataggtgtatttttctactgtttgtgactagaagcaggggcagtgctgaaccaagttctcattttgttaatgtggtcctttccatgcagatcatacttttttttttcacatgcctagtatgcagtggtgctcaatgcaatgaatgaacaaacaaggcatcttctactacaatagttcatttaaacttaatggttccaggcctctggatgcctttgcacttcytgaagtctagttcccagtgtattaagctgcgtaacttaagaacagcatctgcttttactctttctgaaattcatttgaatttcatctctttgtctctccacatttgcactcttgtgctttgcattaggcttctgaatgggagacattcc

SEQ ID NO: 180516 - DNA, 598 bp, Homo sapiens
tggatgcctttgcacttcctgaagtctagttcccagtgtattaagctgcgtaacttaagaacagcatctgcttttactctttctgaaattcatttgaatttcatctctttgtctctccacatttgcactcttgtgctttgcattaggcttctgaatgggagacattcctctccatatacccgtaaaaatcttttatgcattcacttagaactctgcattaatctttgctaggatcggttttcttaagtgacactaaactactgggctttcatcttgtgctgctctttgcatcttaacttttcctggaagtctacccaagaaagcccctttagatggtatgaccacaaggtctgtaatcgtcgatgcctcctctctttcccaacttgctgaaatctactgcaatgaccatttgctctacctacmtgtggggaccctttgatggtcacaacgttctggtcagttaggacagctggaacccaatagttctcaccatttctttttggtgtcagccaaaaaggattaaaggaaaggactttaattttctcttcctaattttggacatgaataacttctaggtagtgggtggctatgaaaacag

SEQ ID NO: 180517 - DNA, 456 bp, Homo sapiens
aagactcttagaaaaatggaagcagcaagaggaagttaacgtttatatgcatgggccataaaaaatgtatccttctttatttcaaattggcaacaaaacaaggagaataagaatttatatatatatgtaggtcacatactrttttatttaatttacacagaacatagcatatcacatgcatctctgcttaatattttaaacctctaattatttagaattgaaaccagaatgtaaatgtccaaaggattagttttctcccagctctcaccaatgattatctggaacaactgcaaaatctgtgtagatctcagcctaagatctatttatactacacacacacacacacacacacctctacatatattatatattatatacattatgcatgttacatgtaatatatatgatttatacctaatattagtgacaactcagttaaaatatttagttaaccat

SEQ ID NO: 180518 - DNA, 451 bp, Homo sapiens
aaatggaagcagcaagaggaagttaacgtttatatgcatgggccataaaaaatgtatccttctttatttcaaattggcaacaaaacaaggagaataagaatttatatatatatgtaggtcacatactattttatttaatttacacagaacatrgcatatcacatgcatctctgcttaatattttaaacctctaattatttagaattgaaaccagaatgtaaatgtccaaaggattagttttctcccagctctcaccaatgattatctggaacaactgcaaaatctgtgtagatctcagcctaagatctatttatactacacacacacacacacacacacctctacatatattatatattatatacattatgcatgttacatgtaatatatatgatttatacctaatattagtgacaactcagttaaaatatttagttaaccatactactcc

SEQ ID NO: 180519 - DNA, 451 bp, Homo sapiens
aaatggaagcagcaagaggaagttaacgtttatatgcatgggccataaaaaatgtatccttctttatttcaaattggcaacaaaacaaggagaataagaatttatatatatatgtaggtcacatactattttatttaatttacacagaacatagcatatcacatgcatctctgcttaatattttaaacctctaattatttagaattgaaaccagaatgtaaatgtccaaargattagttttctcccagctctcaccaatgattatctggaacaactgcaaaatctgtgtagatctcagcctaagatctatttatactacacacacacacacacacacacctctacatatattatatattatatacattatgcatgttacatgtaatatatatgatttatacctaatattagtgacaactcagttaaaatatttagttaaccatactactcc

SEQ ID NO: 180520 - DNA, 533 bp, Homo sapiens
tttctccaccctgttcttgccccatgaagctgacctctgaggactggacaaacaggctcttttgccctcttggcaagagataagaggattaaaggaagagaytaggctatttgtttccctttactttcctgcctagtttccatggactggtggcatctttctaccaaaggctatagctcctgtcagagccctttccacacaactcccctctccagattcccagtcccactctccccttccccttttcagcctaggagaaataacgatcccttgttggcttcctacactctgcccacacctaaataaaaaaataaccctttattaaactctcttcagttacccagtttgaaaattttgtctgcttcttgccaggactctgactaatgcagtaaccctctaggaatttaagggattcaataatttcagtgttactcatagagaatccagcttgggagcacacaactagggtctcaccagtcactgagcaaacccatcacaaatgtcctcaaaagatacccctcctaataattcca

SEQ ID NO: 180521 - DNA, 524 bp, Homo sapiens
cctgttcttgccccatgaagctgacctctgaggactggacaaacaggctcttttgccctcttggcaagagataagaggattaaaggaagagactaggctatttgtttccctytactttcctgcctagtttccatggactggtggcatctttctaccaaaggctatagctcctgtcagagccctttccacacaactcccctctccagattcccagtcccactctccccttccccttttcagcctaggagaaataacgatcccttgttggcttcctacactctgcccacacctaaataaaaaaataaccctttattaaactctcttcagttacccagtttgaaaattttgtctgcttcttgccaggactctgactaatgcagtaaccctctaggaatttaagggattcaataatttcagtgttactcatagagaatccagcttgggagcacacaactagggtctcaccagtcactgagcaaacccatcacaaatgtcctcaaaagatacccctcctaataattcca

SEQ ID NO: 180522 - DNA, 460 bp, Homo sapiens
tattatataaagggtttcagattaaatgtgacatgactgagtgattggagaaaatgataaaattaaaatttgttgctcagagtccttttaaatataagttcctattctaattcatacaaatccaaactgaaaacatagatgccctgtgactacaggttagatttaaaaaatatatatttggctgggcatgttaatgcgtgcttgtactcccagctacttgggagactgaggcaggaacactgattgagyccaggagttctgggatatagtacactatgctgatccaacattcacactaagtgcagcatcaatatggtgacttcctgggagcagggaaccaccaggttaccaaaggaggagtgaacctgcccaggtcagaaatagagcaggtaaaaattcctgcagtgatcagtagtgggattgtgcctatgaatagctaccacactccagcctgggaagc

SEQ ID NO: 180523 - DNA, 577 bp, Homo sapiens
aaaacctacagtaaatacacaaaagataaacagtaaggaatcagtgaattctactagagaaagtaatctaatcacaaagaaaaccatcgagagggaaagaaggaaacaaaggtcctacacaacaaccrgaaaacaattaacaaagtagcagttgtaagtccttacctatcaaatattaccttgaatgttaatggattaaaatttccaattaaaaaacagtggctgaataaatggaaaaaataaaggtaaagcaaagaaagcaaagcaaaacaaaagaagtgactcacttgctgcctacaagagactcacttcacctttaaggacacacaaagactgaagtgaaagaatgcaaaatgatattcattgcaaattaaaataaaaaagaacatggctagctacagttcgacaaaatggactttaggccaacaactgtactaagggaaaaaaaaagggccattatataatgataatgaaataaattcttgaaaactgtataacaaatgtaaatatatatgcactcaatattggaggagctaaatatataaagcagatattaatagaactgaagaaaaagata

SEQ ID NO: 180524 - DNA, 592 bp, Homo sapiens
ggttgctaattagctgaccttaaataaagatattattctttattaatggctatatgtaaaacagagagggagaggtgtgagtgtcagtgatgcaaaagcccaaaagaaggaaaagggccataagtcaagcaatataaacagcctctagaaaatggaaagrcaagaaaatggattctcgagcctccagaaataaatgcatccaggccaatgagacccattatggacttctgagctacagaactgtaaaaataataaatttttgttatgttataccactaaacttgtggtccatatgatagaggaaggaaagcagaaaaggtagaaaacaaataaaaaataggatgaaatagtaaatgtataaaatatttggtaatggaatttctagagagaaatcaccagagataaaagattctttgcttttcttctaaagctacccccaccctgagatttttctcctttcagtacatgccacaccatctaccagatgtcctgatgtatgaaagtatgcatcagtgtatctatgaaagtatgatcacaggaccagggtgaaattaaaattgctaatgaagtttcatgtcccactgggcaagca

SEQ ID NO: 180525 - DNA, 523 bp, Homo sapiens
tctctggggaagcacagagtgatttagggagttggacatgtgtcaggccatctatacccaacaatttgaaggatgagataaggctgtgcttaccatgagcatgaaaaataaattgttgcaaggtgcccactgggagtggcatggccccctcctattccacctgagccctctcctgagacaagatgtgtaggacatgggggaaactatagctgatcttgaagaaactaaaaagggaagagttaaagtyggtgggttactaaaggaaaaggaaaaaaaaaaagggagccctgtctgccagactaagaaagcaaggcctaaatatcccagataggactgccaggaaacgaatgtggtattatctgatctcagctggggtagacaaagaaataatagactggcaaccccatgctttattagtggggctttggaaaaacctgactcctgatcaaggattcagataccttcccagaaccctgccagaggagggaaaaggagaaaaaaaaaaactccacataagagaatt

SEQ ID NO: 180526 - DNA, 497 bp, Homo sapiens
gaattctttggtcagatggtggcatgacaatctctggggaagcacagagtgatttagggagttggacatgtgtcaggccatctatacccaacaatttgaaggatgagataaggctgtgcttaccatgagcatgaaaaataaattgttgcaaggtgcccactgggagtggcatggccccctcctattccacctgagccctctcctgagacaagatgtgtaggacatgggggaaactatagctgatcttgaagaaactaaaaagggaagagttaaagtcggtgggttactaaaggaaaaggaaaaaaaaaaagggagccctgtctgccagactaagaaagcaaggcctaaatatcccagataggactgccaggaaacraatgtggtattatctgatctcagctggggtagacaaagaaataatagactggcaaccccatgctttattagtggggctttggaaaaacctgactcctgatcaaggattcagataccttccc

SEQ ID NO: 180527 - DNA, 543 bp, Homo sapiens
aacccatttcctaaaattatcaactttaggatgcataaaaattagtgtaccagatggcatacacaccaaaaaactgcatgtactatatcttatgagacactttttaaagatttttaaatttaattttggctatatagtcaagctaactttaaagaatccttaaagctgtattctttaaaggatgtgactcaactttagtaaaaacatatacataagagatgacactagccatctgtaagaagacaacaattccagttttgaaaaccactaagacagtagattttaagtgttcttaccacacacaaaaaagatgttatgtgaggtwgtacagatgttaattagttctcttaagccattccacaatgtatacatatcttaaagcatcatgttgtacataatatatagaatttttgtcaattaaaaattaaaatgttttaaaaaattccaagaggcattttataaatgcactacaaatgtaaccaaagatgtaatcaagaacaccccggggtcctaaaaagctttagcctactccatttaacttag

SEQ ID NO: 180528 - DNA, 622 bp, Homo sapiens
gaattcctcctgccttggcctcctgtgtagccaggactacaggtgcgtaacacgatgcctcgctaatttttaaacttttctgtagagatgctgtctggctatattgcccaggttggtctcaaactcctggcctcaagtgatcctcctactttgggctcccacagtgctgggattacaagtatgagccacagtacttggcccatatggtaaatttaatttttaaagaaactgccaaattgctttccaccgtggctgcatcatttcgtatatttattacctttgatttttgtaatcattgcaagattagttacactktttgccactgtgttttttaagaaacagttattaacggcagtatagaataattatgtagcagacactgtgatgccacacccaggttctccctcaggtctgaaaggtctgctcctcccgcttccaggtctgctgctacctgatagtttccttgtgtcagcccccgtcagaaactgttcttagaggaagagtcaccttgctcagggtcatagctccttgtccagggccatggacagcctgtatccaacggctggttgatgtgaggatgtgaaggcctagtcttcttgtcccaactcagaacaattccgaa

SEQ ID NO: 180529 - DNA, 495 bp, Homo sapiens
attaatacccataatatggtacttgaaacatctaccacagggtcatttcaggttcaactaaacattcgggttcacaggactgtcactggccacacttggcattagcttcacttgagattataggacaagagccaaagcctaccagcagagaggcctcaggtgtaccccttctgtgggaatagtgcttgcagtccacacagcaggtcacagagctgcctgggagctgtttgttctcccagagggtggctcaaatgcaaggagaatatatcccattaatagggtgtgggggaatcctgaattagaagccttgcctctcagaagctatagaytttaaggtagctgcctagtaaatattttatcagatatagttgtgtacctacccttccttaaaagaagagatagtcatgtatatgatacaattagctgcttatagtataattaagaaacataagaaggtttaggtaaagtgctatggatctttagaactggtaaaga

SEQ ID NO: 180530 - DNA, 475 bp, Homo sapiens
gtcacagaaagctctgttggacaatgctgcttaagctgttggcatcttgttcatgtccaatacggtcaatggttagatttttctctttaaaaaaatctcagctgggcatggtggctcatgcctataatcccagcactttgggaggccgaggcacatggatcatctgaggtcaggagttcgagacaagcctggccaacatggcaaaaccctgtctctactaaaaataccaaaaaaattagctgggcattgtggyggttgcctgtcatcccagctacttgggaggctgaggcaggagaattgcttgaatccaggaggtggagtttgcagtgagcccagattgtgccattgcactccagcctgggtgacaagagtgaaactccattaaaaaaaaaaaaaactcaagtcagacagttctgacttggcctgaggactcctgggaagtctgttctgtaaatggaagaaatctgaaaatgaa

SEQ ID NO: 180531 - DNA, 461 bp, Homo sapiens
ctgttggacaatgctgcttaagctgttggcatcttgttcatgtccaatacggtcaatggttagatttttctctttaaaaaaatctcagctgggcatggtggctcatgcctataatcccagcactttgggaggccgaggcacatggatcatctgaggtcaggagttcgagacaagcctggccaacatggcaaaaccctgtctctactaaaaataccaaaaaaattagctgggcattgtggcggttgcctgtcatcccagctacttgggaggctgaggcaggagaattgcttgaatccaggaggtggagtttgcagtgagcccrgattgtgccattgcactccagcctgggtgacaagagtgaaactccattaaaaaaaaaaaaaactcaagtcagacagttctgacttggcctgaggactcctgggaagtctgttctgtaaatggaagaaatctgaaaatga

SEQ ID NO: 180532 - DNA, 377 bp, Homo sapiens
cttcattattgatcaaagaatattacttcttcatatctttgggtgaattaatttatctgcccatgattttagacttgagatttcttggatattaactcaaccatgtaatatrtttgttatcactaccagatcggaaaaaaaaatggggagggaaaattaaaatgcctcttttacctaaaggcaaaggaccgaaggaaataatcttgattttctttttgtacaaggtctgtatagctcaggagccttcattaaaacacttgtcggagaccattttaagtcttccctactctgtaatcccaccatgataggcttaaacctcaccaatattcacatgtgtaaatctgatttttcaggatagtaagatttgaaagatatgc

SEQ ID NO: 180533 - DNA, 436 bp, Homo sapiens
gacaacataaaaagagcaaaaaattctcggactttatggttacgtattaaaattagtcatttgggggaggaaaccttaagaaagttgttagacataatatacacttgagcatcctcattttgtctatacatcacaatcccttgtgaagccttttaaaaataaagatttttgagtcacctccattcccacaaaaacctactgaatgagaaygtttgggagatgggtaccaggttttcacatatttaaagaactccaaagatgatttggattgaactggtctaaggactagcatttaggatcagtaatgtagatttcttttttgagagggggggttctatatcctcagcttttaattaacaacatttagaaaaaaatgtctcttggttggattgatataaccatttatacaaccagtgtagacatacgattttagcaa

SEQ ID NO: 180534 - DNA, 603 bp, Homo sapiens
agttcatgcaaattgaaaatgttaatgttatacacttctttttgtacttattttctagtgtgatagtcatttttaggctagtaaaccttcctcatttctcctcaggagaaaaaaaaacaatgtatttgcattaaggaggttccccctcatttttcagttatgttcatctctatgacccacttatttaggttctttggaaaaggagaattcaccctgtgtgggtcaccatattaattactattacaaggagctgatttatggccacagagcccttgcaggtgtttgagaatggtgctccacaatgggaaatggaaacagggtaatcaataaccaccctragactcctgctttaaggctgtccttgaaggtgtgctgtggatctttttccagcacgtctgaagagcaatccttttgccagcaaggagccctacgggaggagaagtaaatattgtctttagacatggcacaaggaccaaagacactgccaagacatcaatactgagatatcacagagggcttgttggtggaggagggaggctggtcacaggcgggaaggtgagatttcttcttttgactgctgagatcactggacttgcagtcaga

SEQ ID NO: 180535 - DNA, 593 bp, Homo sapiens
tttgcattcatcaaacatttctgtgagtactgtgtcccaagctccacatgagttgcaaaagatagtgccaaaaatgaacaaaataaagacagatctggcctgaaggaaatcactgtagtgaggaagacagatacaattttcatatgtagttttacacatatatacatatatctctgttccagtagagatatgtggaaagttctgtgaggacatagaaatgcaaacaattcatcctgggagcatcacagaggagatgagatttttagtggctttgaaggacaagtaggggttcaccacagaaaccagagacggatggtcattcctggatgagaaaagaggactagtcaaagtagtatggakgaaacatctgtcacatgagttgtctgaggtcccaaatgtgtggaggagcagtgagaggcagatgaggttacattgttaaagagttggactggtaatttttttgaaaattaaaaaaaatcgactctaacgtgacataagtaataaaggcaatgcttactgcaaaatctgaaaaacagtactaaattgcctaaagtgagacattcaaggcctaggtctcctcctttttccaggct

SEQ ID NO: 180536 - DNA, 593 bp, Homo sapiens
tttgcattcatcaaacatttctgtgagtactgtgtcccaagctccacatgagttgcaaaagatagtgccaaaaatgaacaaaataaagacagatctggcctgaaggaaatcactgtagtgaggaagacagatacaattttcatatgtagttttacacatatatacatatatctctgttccagtagagatatgtggaaagttctgtgaggacatagaaatgcaaacaattcatcctgggagcatcacagaggagatgagatttttagtggctttgaaggacaagtaggggttcaccacagaaaccagagacggatggtcattcctggatgagaaaagaggactagtcaaagtagtatggatgaaacatctgtcacatgagttgtctgaggtcccaaatgtgtggaggagcagtgagaggcagatgaggttacattgttaaagagttggactggtaatttttttgaaaattaaaaaaaatcgactctaacgtgacataagtrataaaggcaatgcttactgcaaaatctgaaaaacagtactaaattgcctaaagtgagacattcaaggcctaggtctcctcctttttccaggct

SEQ ID NO: 180537 - DNA, 593 bp, Homo sapiens
tttgcattcatcaaacatttctgtgagtactgtgtcccaagctccacatgagttgcaaaagatagtgccaaaaatgaacaaaataaagacagatctggcctgaaggaaatcactgtagtgaggaagacagatacaattttcatatgtagttttacacatatatacatatatctctgttccagtagagatatgtggaaagttctgtgaggacatagaaatgcaaacaattcatcctgggagcatcacagaggagatgagatttttagtggctttgaaggacaagtaggggttcaccacagaaaccagagacggatggtcattcctggatgagaaaagaggactagtcaaagtagtatggatgaaacatctgtcacatgagttgtctgaggtcccaaatgtgtggaggagcagtgagaggcagatgaggttacattgttaaagagttggactggtaatttttttgaaaattaaaaaaaatcgactctaacgtgacataagtaataaaggyaatgcttactgcaaaatctgaaaaacagtactaaattgcctaaagtgagacattcaaggcctaggtctcctcctttttccaggct

SEQ ID NO: 180538 - DNA, 419 bp, Homo sapiens
aatggaaggaaaagactatacaaagaagaatcacatttatggtttgcctttggggtagaagccattcttttgcaccyggggaactggccaggctgtaagaatatggtgccaaccaagtggcacctctgcccaccattgctctagatgccaggctaaatggtccttgtgaaatacggctggaaaaatctctgttatgggcccatctcctattcagaggctggaaaacaccccattcctgtagctctgaagcaggattaattgattggtctcatatgaacctaaaagctgttaagagtaaggaggatgaaaagcaattcaaattgctttattaccattttctagtaaagtaccagtttagttctcagccctactgtgaagcagcgggtttccagatattgactgtgctggcatgtgctcct

SEQ ID NO: 180539 - DNA, 615 bp, Homo sapiens
ggttgactatttttctcccgttcactatcagtgaccctgctgtagggacgaaataggcacggttgggtttgaggactgagtttggctggctgagaatgacagaagggccagaaaggtgaggatttgcaagaagatgattacagcttcagattctggaatctaagctgagtggtgaggaaggaaggaaggcataaagggatggggactctaaaaaggaatgggctcaatgacccagaggtgcagatgtagtcagaaatatatatagactagggattagaaaagatctgccagttcctactttgacacatttggrcaagtttcttagttttttgctctcatttttcttcatttgtaaagcagggaaaataatatctacctcataaggttgatgcaacaaaaatatgttaattgcctagaataattaacatttacaaagagatctagtactggcacacagtatttgctgaaaatcttcttagtaaggttttctacttttgatggttaaggcattggtataatttgaactatgtctacaaaataccaaatatctttataaaaaaagaaaattctggcaataactggattgttattttacccagtttggaaaaaatctgg

SEQ ID NO: 180540 - DNA, 402 bp, Homo sapiens
tatcgctgcctgcctctaggagatattawtattaaaaaataccaagatatggaaagtacaaggatagaaaaacatataaaactgcaaccatagaaagctgtagaggttataaagtagcatcaggaaaataaaatagactttaaaatttttaaaatgtcactgagataaagaaaacattgataatgataaaagtgtaaatccattaggaaggtatatcaattataaacacatatgtccaacgacagagcctcaaaatacatgaagcaaaactgataaaattaaaggaaggaacagacaattcaacaataatgatcaaagaatctaataccccacttttaataacagacaggacaactagagatcaaagagaaagtagaaaacttgagcagcactaaaatcaac

SEQ ID NO: 180541 - DNA, 402 bp, Homo sapiens
tatcgctgcctgcctctaggagatattaatattaaaaaataccaagatatggaaagtacaaggatagaaaaacatataaaactgcaaccatagaaagctgtagaggttataaagtagcatcaggaaaataaaatagactttaaaatttttaaaatgtcactgagataaagaaaacattgataatgataaaagtgtaaatccattaggaaggtatatcaattataaacacatatgtccaacracagagcctcaaaatacatgaagcaaaactgataaaattaaaggaaggaacagacaattcaacaataatgatcaaagaatctaataccccacttttaataacagacaggacaactagagatcaaagagaaagtagaaaacttgagcagcactaaaatcaac

SEQ ID NO: 180542 - DNA, 572 bp, Homo sapiens
aaatggaatcctcatacattgtcgatgggaagctaaaatggggcaatcactttggaamacagtttggcagttcttcaaattgttaaaaatggaattaccatatacctcagcaattccactctcagatgggtactcaagagcaatggcaacatatattttacacaaaaaaattgtatacaggtgttcataacagccttatttataatattcaatagtgtaaacaacccaacagcccatctactgataaacagataaatcaaatgtggtatatacaaatatagatgcaatgatatttggcaaaacaaaggaatgaagtattgataaaggttacagcatgaatgaaccttgagaacatgatgctaagtgaaagaattcagtaacaaaagaacatattttgtatgattctacataaacaaaatgtctagaataggcaaatccatagagacagaaaataaattagtggttttctggttggccagaacaggaatgggaagtgacatctaattgatctgaggcttcattttggggtgatgaaaatatttgtaaattgtttgtggtgatggttgcaccat

SEQ ID NO: 180543 - DNA, 492 bp, Homo sapiens
ggttgtttgaaaattgtgcagcacctcgttctcactcttgccatccatgtgaagatgtgccctctttcccttcaccttccaatataattgtaagtttcttgagacctcccaagaagcagaagcctgtacagcccatagaaccataaggtgattaatcctctttttcttttctaaatttcctaatctcagatacatctttacctcagtgtgggattaactaattcagaaaaatggtaccagagaagtgaggcattgatataaaaatacttgaaaatgttgaagcaactttggaactggrtagtgggcagaggttggaacagtttggaaggctcagaagaaggcaggaagatgagggaaagtttggaaattactagaaacttgttgaatggttgttaccaaaatcctgatagtaatatgaacaatgaaatacagactgatatgatctcaaatggaaatgaggaacttattgggaactggagtaaagttgactct

SEQ ID NO: 180544 - DNA, 519 bp, Homo sapiens
tagacttgttaagacctcgattttagcccattaggttcctttcagacttccaactaccagaactgtatgaggataaattattgttgttttaagccactaagcaattttatatagtggtaacagaaaactaatgcatttcattttataaaaaaaaaaagcctctgtgatagttaatgctgagtgccaacttggttggattgaaggatgcaaagtattgatcctgggtgtgtctgtaagggtgttgccaaagagattaacagttgtgtcagtgagctgggaaaggcgcaccactcctgaatgtgggtgggcatcatctaatcagctgccagtgtggctagaatataacacaggcagaaatatgtgaaaagtctagtstggcctagcctcccggccaacatctttctcccatggtggatgcttcctgcccttgaatattggactccgagttcttcagttttgggactccaagtggttctccttgctccccagcttgcaggcggcctatgtgggactttgtga

SEQ ID NO: 180545 - DNA, 519 bp, Homo sapiens
tagacttgttaagacctcgattttagcccattaggttcctttcagacttccaactaccagaactgtatgaggataaattattgttgttttaagccactaagcaattttatatagtggtaacagaaaactaatgcatttcattttataaaaaaaaaaagcctctgtgatagttaatgctgagtgccaacttggttggattgaaggatgcaaagtattgatcctgggtgtgtctgtaagggtgttgccaaagagattaacagttgtgtcagtgagctgggaaaggcgcaccactcctgaatgtgggtgggcatcatctaatcagctgccagtgtggctagaatataacacaggcagaaatatgtgaaaagtctagtgtggcctagcctcccggccaacatctttctcccatgstggatgcttcctgcccttgaatattggactccgagttcttcagttttgggactccaagtggttctccttgctccccagcttgcaggcggcctatgtgggactttgtga

SEQ ID NO: 180546 - DNA, 561 bp, Homo sapiens
aatcctgactgcagtcccctcctgtgacctcgcctgcatcggtgacttccgcatctcccagcattcagaccttggctgtcctctggtttccctggctcagcgcaccctgccctggccctgactccttggtgtccctatgactcaagactctggctccctgcccccaggaccccaccctgcccatgttctggcccttccagctaaggccccacaagggggaaaaagagagcatttaacccagaacccaccaggttcctgggactctctgcccctgccctgtgcaaggacaacatgggtcttccggttctaygaacacagccactgacccagccgtgcacgcaggacacggcagacatgtaattaatgacccacgaagcttctaacagaggctcattctgagtagctagtactctagggggagtgaagggaagattgactcttggctgcaagccatacccagcatgtcacagcccccagccctaaagtctacttgctccatcctcctccttggtcaggggtatttgggaaccacggggaaggagctttagaaacaggattgct

SEQ ID NO: 180547 - DNA, 511 bp, Homo sapiens
ttcttaaagtcagcgagaccaagaacccaccaattccggacacgcaagtattcgtaacgtaataaccttacacatagtttaaaaaatcatctcaaagttcctaagattgtctttgtttttaaataatcattaatataatgtttgattttctttggagaaaaatatagtttttcaaaatgcttatcaccttcttatgattgaacactccctattcaaacctgtttttgattttccaagtatctcattaaaaatagttatatattttatgttgaaatgtttttacatataatcagkcatgaaatattcatactcagaaggtaacacataaaactcacaacaatcaagattgtcagaggtcattcttatttttctctacttcttagtactttctaacctcttcaccccaagggagagacttatagcatggtgcaattcaagtttgaacttatgattttaaaatggctatttagtctggtagtaactgttaatcaaggacacaatgtttatatgt

SEQ ID NO: 180548 - DNA, 577 bp, Homo sapiens
acagtgctacaaaaataaaartcaatactaagaaaattcctccaaagcattcaattatatggaagttaaacaatctgatcctgaatgagttttgggtaaataattaaattaagtcaaaaataaaggaattctttgaagctaaagataacaaagatacaacatatcacaatctctaggacacccctaaaacaatgttaagatggtcatttgtagcactaagtgcccacatcaaaaagttatatatatatctcaaattaacaacctaacatcacaactagaacagctagagaagcaagaacaaaccaaccccaaagttagtatagaagacaagaaataaccaaaatcagagctgaactgaagaaaattgagacacaaaaatcactcaagagatcagtgaatccaggagtttgttctttgaaaaaattaataagataggctgctagccagactaataaagaaaaaaggacagagaagatccgaataagcataattagagatgacaaaggggacattaccagtgaccccaaagaaatacaaaaaaattatcagagactcctatgcacacctctatgcatac

SEQ ID NO: 180549 - DNA, 365 bp, Homo sapiens
gtgggaaaggattacatcgaaataggagataagtgttggtaataaattatttcctcaacaatcagtttaagtkaaaaattaccgttgtgttcatttactgtgcctttcttctagagaagcagcatccgtaggcaagaccacaccatcacggcagagccactgcttgtgactagtgtgtgcatcgggggcactgcttgtttacttacaatatgcagcaggacacgaagactgaagacaccacagtttgcccacatttcacactcactacatacttagaaatattgaagtcatctcccaagcttcaccaagagcatcaagctcaagtaaaatgggcttgataaattcagtgataatttgaaagctgt

SEQ ID NO: 180550 - DNA, 595 bp, Homo sapiens
acgtggtgaagagagaattacaagcagtccgatactgttggagtaaaaagtctagggcatggacttgtcaaagatagagctggagatgtggtcagggatagacactggaaagctcagacttttgagaaatcataatttctattattattcatgggtagtaattagcatgaatttggttgggttttatttgataccacaggtgaaggacaagacagaaggaatcygttgctatggtagaagtgacagatgatgaagggctttagggagttgcaggagataaaacacagaataggctatagaatatgggctgtgggatatcaccgcttgatgtgaaatccaggcctttctaatctctaagcatgtgacatggattactgttattactgtaccttaatttcatcattagtaaaattgaaatggtgatttaaaaagtctctttatagagttataaattatacatgggatgataagtaaactaagcttagctatatcaggaagcataggaaaacaggtagattcaaaaaacatatatgcaggcaatagattcttggttggctaatatttatgtaattaatgaggaccactcgaatgtcac

SEQ ID NO: 180551 - DNA, 507 bp, Homo sapiens
tataaatctgggtgttcccatattgggtatgtatgtatttagcatcagtaagccttcttttaaaattgaaacctttatcattatgtaattcttttctttgtcaatttaactgttgttggtttaaagttggttttatctaagaataatgacccctgctttttttcattttctatttgcatgattgaactttatccctttactttgagcttatggatgttattacatgagagatggatctcttgaagacagcagaaggttgggcttttaaaaaatccaatttgccactctatgttttttagttggatcttttaggccacttacattcaaggttaatactgatatctgaaggtttgttcctgtcacggtgttgactgagttactttgtagtcttgattgtatagttgctttatggggtctttgatatatgtacttatgtgtgtgtgtgtktttttttttttttttttgaggcagagtctcactctgtcacccaggctggagggcaacggt

SEQ ID NO: 180552 - DNA, 390 bp, Homo sapiens
atcctatattttcctcaccaaggccctggtctttgcataaaacacccaccttggctgagcattcaaaattttttggatcctgactgctacaattattcgttcagcctgtctctcagctatttctcccgctgcactacaggtgataaaggtctctctgttgcctgactttccaactcagtcattaactacttgttagtagtccctggtctgtcatctctctgtaggttatcactataattgagcgatttagctataaccagctaactgatgtgtttttgaaggcattgtttgcccctcaaacactgtatctttacaaygtctgaatcattgcatcagccacttcatttcccatcaccaggacatattttcaggtcaccaccagtgagatct

SEQ ID NO: 180553 - DNA, 466 bp, Homo sapiens
tatttagtcttataatttaaattgtatttaacaaaacttacataatacctactctgttctaggtaccacttgaagttggtactattattactctgattttacttatgagcaaactgaggcacagcaagctaagtcatttgtacaatgccatgcagccagtaatgggtgggaccaagctgaagtgatgcctagtacatagtaaatattatacggttgttgttagataaaatttaaattgtaaaaagtaagtacagtttggtgctatagttgtgtaaaataatatcattattcttatgaaatacacagtgaagtagtcacaggtaaaggacaatagcatatggaaattgcatttaaatgattctagaaaaattgtctgcatgaatatccacacatactcacctaacacgtagacatgtgtatagatggatggataggaaaktaatgaaaaagtgaatgggataaaaca

SEQ ID NO: 180554 - DNA, 608 bp, Homo sapiens
tcttcatggtgtcagaggtagaggcatctttaatcttagccgtccattatgtgtgacttctctaggttatctcatggtcccagatggctgctggagtgctaaccattatatctatattccagccaatgggcaggaaaaaggcaggaggaaagggcacaacctggctttttaaaccagttccagcaagttatacacaycacttcaatcacaaaggcaagggctaagttacatggtcacacttaaatgcaaacaaggttgagaaatatggtctttaatctggcatccaggcaccgcacaaaaaatcatggatcttagtagtgtggaagagagagggcatagctagctattgggggataattagtaattactgatgcaggggatttacggaatttggagaaaggcagtcctgcaacctttgctttgataacagggagtcttttgatccaggcgaaaaagcgttttggatttgtgcctcagggtgttttattagaactacctccttctcccaaaacccttgtttcctgcagccgtggtctagcaggccctggtagcagggtagagtcttcctacctgcacagtggggatgtgcgcctcagctgctcagccac

SEQ ID NO: 180555 - DNA, 562 bp, Homo sapiens
gaaacaacttagcaaaaaaaaaaaaaattctgcaagttaacaactttcctactatttgtaggagaaggaaagatctctctagttcagtaatattttgaaataccaggagttttcaaggtgcaaatcactacacttatatttacttacagtgtagaacctacaaaagaaagataaacagcataatcaactctaagtaaacaccgacaacaaaaaaagtaagctcacattctatccacccctatctccaccattgtcaccaccaccattcaattaaacactaacgctttttaaaaatcatacctgctctccaggatcttacaattttacttgaaatgataagtgtaaaaactagagataaactaattctcataagttattttcaagaatcacttaattctttaactttttaagctcttgttaaaagcattaaaattctaatwcttttcaaatgtatttggagcatctaagatcaacacaccatattattttggtcaatttagtccaccagcaaaaaagcaaagtagtcaaaccactgatttagaattgtgcgggtgccgccaaa

SEQ ID NO: 180556 - DNA, 633 bp, Homo sapiens
tgtgtgttggcatttagcagaaggaaaaaggtaatatatacccctctggcacagggaggacaagggacaggcaatggagggtaagagaccaccctctgcactgcgtttgcagccaaccacggggaaagtgttttgtaaactcctgatccctcgtgggtggtgtgatttaattctttttccttctcttttctgggactgcttttgggttgctagttccagctgagactagaagtggcaacacacagcccagggagcggcagtagaggaaagaagggttttcactaagaaacttttcttccttcttcttgaagcaaaatcaggtaacgctatgggggatattgcttactgaggtattttcctgctgttgaagctggggtcagggcttaatrtttagagggagaaactcaaattgtctttttagaaagcaggatgcacttatcttatggaaaacgattcttgggggtggcaaaatctgttctgccgggatttactgaggtccttctaaggggtctgtgttgggcattattctccataagggaaagtgtcttgactggcatggaaaagctgattcaagtcagtgttggagagaaatggtagagggaggtccctccatggtgccaaaacttccacgct

SEQ ID NO: 180557 - DNA, 432 bp, Homo sapiens
ggaggaagagaaactgagcagcagagctgagccatctctgttgctccagtcaaagccagtctagatcagccaactgccagccgactctcacacatatgagtaagcccagccaaaattagcagagccacttagctgacctccagctgaccctagatgtttactgttgcatgtccctgaggtttttttactgcgagggagcattattgtggaagtagatgactgatttagggaattgcctcatatgctttttttttttytttaatcactccttttccccttgtttcaatcaacttgtcacaaatacatctgaacattgttaggtgtctacccaatatccactctcctgctttttcttactgccagaaccacatgcccagctaaaaacctacattctctggcttcctttgtagaaaggagttgtcatgtgacatt

SEQ ID NO: 180558 - DNA, 432 bp, Homo sapiens
ggaggaagagaaactgagcagcagagctgagccatctctgttgctccagtcaaagccagtctagatcagccaactgccagccgactctcacacatatgagtaagcccagccaaaattagcagagccacttagctgacctccagctgaccctagatgtttactgttgcatgtccctgaggtttttttactgcgagggagcattattgtggaagtagatgactgatttagggaattgcctcatatgctttttttttttttttaatcactccttttccccttgtttcaatcaacttgtcacaaatayatctgaacattgttaggtgtctacccaatatccactctcctgctttttcttactgccagaaccacatgcccagctaaaaacctacattctctggcttcctttgtagaaaggagttgtcatgtgacatt

SEQ ID NO: 180559 - DNA, 432 bp, Homo sapiens
ggaggaagagaaactgagcagcagagctgagccatctctgttgctccagtcaaagccagtctagatcagccaactgccagccgactctcacacatatgagtaagcccagccaaaattagcagagccacttagctgacctccagctgaccctagatgtttactgttgcatgtccctgaggtttttttactgcgagggagcattattgtggaagtagatgactgatttagggaattgcctcatatgctttttttttttttttaatcactccttttccccttgtttcaatcaacttgtcacaaatacatctgaacattgttaggtgtctacccaatatccactctcctgctttttcttactgccagaaccacatgcccagctaaaaacctacattctcyggcttcctttgtagaaaggagttgtcatgtgacatt

SEQ ID NO: 180560 - DNA, 622 bp, Homo sapiens
aaaattaatagaacacttggtctatgtctaatatattctgaaatataacagttctgcatcaagtgtctatccacccataatgacttgtcaaaagtataatttacactaatatcaggaaacctaagatctttaagagctgattctcttgggttgatttggttctatcagaaacaatctcatcaactaaatttgcaaacaactccaggaacatcatatcacaaaccatgttctccatttagggtgaaagttaagaggctccagaaatcacagtgagacacactttcaaagttatataatctctatacaatgacaaaacttrtttcctctttaccctcattagcatggatatatggtaataccagtacacctttctgacactctaaccataagaagttttgcgctccatatattagtctcataactatggatacagaaaaacatcaattttttccattatcgcaagctaggaggtaaatgtatttcagaatttagtgatgattccacagcccattaatatgatctctcagtatattaatacctgatcatataattctctacaatgttctggaacaactttgtcacatttcccttgatagttacttgctcatttgacatgtttttt

SEQ ID NO: 180561 - DNA, 533 bp, Homo sapiens
agaacttttgactcagggagagaaaagttggaaatgtttatttattggtccttattgttcattgctcaataatggcattgtacatttttgggtggggtacatgtgtgagcacaragtgggttcccatgggcatctcatactataatccataggatcccaggagcaaagagtaacacaggtggtgcaggcctgagtcaaggctgagggcacctgggcagaatggttgaagcctatgcaggactgatgatgacaataatagctggagtggccaacaaacatctgaaaaaatactcatcatccctagtcatcagagaaatgcaaatcaaaaccacaataaaatctcatctcacaccagtcggaatggctattattaaaacgtcaaaaaataacagatgttggtgaggttgcagagaaaagggaacatttatacactgttggtgggaatgtaaattagttcatcctctgtgaaaagcagtttgaaaatatctcaaagaactaaaaatagaactatcatttgaccaagcaatcccatt

SEQ ID NO: 180562 - DNA, 561 bp, Homo sapiens
taccctcacgatagaatgaaagtgaaagggaaaaatgagatcttaatattattaaaatcgttttgtccttgcagacctcctggaatggtctcaggagctcccagaggtttstggatgacactctgagaaccgctggtttgtttgtttgtttgtttatattatactttttagagacaggttcttgctctgttgcccaggctggagtgcagtggtgcaatcatagctcactgcagccttgaactcctgggcttaagtcatcctcccaactcagcctcctgagcagctgtgactacaggtgtgttccaccatgcccagctaatttttaaaattctttttgtaaagacagagtctcactatgttgcccaggtaggtcttgaactctggtctcaagggatcctcccacctcagcctcccaaagtgctgggattacagacatgagccattgcacccgtcagagaactgctggtttctatatgttcatgcagcccaatctacctctgtaatttgattccctgatatttcataagtaagtcttatgccccatgccatagtgagcatcac

SEQ ID NO: 180563 - DNA, 587 bp, Homo sapiens
gcagtgggcagcaatcggggcttaatccagacactggktatgactgtgcttattgtacactgagtaactgttggggcatcattcacaatggctgatttttgcaggttatatgatggtggtcttacacgaggtatttcttcattcacatccaaagatgggaaaattgtatttccttcccaaacctaaagaacacaagggctgaagttcatcctaattgaggcatccttgaatgagccctctagccaggagaacaccttgtactctttggttaaatactaggctcacatgctcatcactgaactaattgctctgtcaagaagcatgggattcacaatcagagttgagttaatttcatccaaattgcataactgctacacactggaaatagatagcaggctacacagtgaaaaaggaatacaatagatgtgtggaaaacagtcagaattttgctgtagaggagtttccaggcaggtttaacagctagtaaacaaaatgtattacttcttttctaaattgaagttatactttgtgacccaaatatctgcaaatcaaatgtactagctatctagtcaagcgtattttctgaa

SEQ ID NO: 180564 - DNA, 587 bp, Homo sapiens
gcagtgggcagcaatcggggcttaatccagacactgggtatgactgtgcttattgtacactgagtaactgttggggcatcattcacaatggctgatttttgcaggttatatgatggtggtcttacacgaggtatttcttcattcacatccaaagatgggaaaattgtatttccttcccaaacctaaagaacacaagggctgaagttcatcctaattgaggcatccttgaatgagcccyctagccaggagaacaccttgtactctttggttaaatactaggctcacatgctcatcactgaactaattgctctgtcaagaagcatgggattcacaatcagagttgagttaatttcatccaaattgcataactgctacacactggaaatagatagcaggctacacagtgaaaaaggaatacaatagatgtgtggaaaacagtcagaattttgctgtagaggagtttccaggcaggtttaacagctagtaaacaaaatgtattacttcttttctaaattgaagttatactttgtgacccaaatatctgcaaatcaaatgtactagctatctagtcaagcgtattttctgaa

SEQ ID NO: 180565 - DNA, 559 bp, Homo sapiens
tgcaagtaaccaatctcaaaacttctggtcacaagacttgtgagccaaataaacctcttttctttgtacattacccagcctcaggtattctgttacagcaacacaaaactaaataagacgtggcctttattgtgttgaagtacattccttctatacctaatatgttgagaacctttatcatgaaagtatattctattktgtcaaatgctttttctgcatctattgagatgatcatgtgattattattctttattctattaatgtagtatatcacacttattgaagtgtgtatgttaagccatccttgcatcaagggataattctattttatgatggtgtaccttcctttcaatgtagtgtaggatttggtttgatagtattttgcttaagacttttgcacacatagttatgagagatactggcttgcaattttcttttcttgcagtgtccttctctggtttggaatctggtaattggtaattctggccttgtaaaatgactctggatgtgttccctccccttcaatgtttttgaagagtttggaaagcactgatattaa

SEQ ID NO: 180566 - DNA, 437 bp, Homo sapiens
tgacaatagcaatgtacacatgtagttcccaaatactggtttcttttctttctttctttcctttttttttttttttagaggaagagtcttgctcggccacccaggccacagtacagcactgcaatctttgctcactgcaacatccacctcccaggttcaagcaattctcctacctcagcctmccaagtagctgggattacaggggcatgccaccatgcccaggtagtttttgtatttttagtagagacatggtttcaccacattggccaggttggtctcaacctcctgacctcatgatccacctgcctcggcctccgaaagttctgggatcacaggtgtgagccactgcgcccagtcccaaatactggtttctaaacatcatcctaactaaagggaacaaagactcattaaagaaaaggttaattccaatgttggag

SEQ ID NO: 180567 - DNA, 486 bp, Homo sapiens
atttatgattactatgtatttctaatgagttttatcactatgaaatgcccttctttatctccagtactgtcttgaagtctacttatctaatattaatataacaactccatcttatacttactgtgtgcatgctacacctttcctcatacatttactttcaatctatstgtgtcattatttttaaaatgcatctctggtagacagaatacaggaagtcttgttttctatccaatgtatgaatctctaccttcaaataaaacacttaatctattttcaattaaggtaattattcatagacctgacctaggtttgtaagtttgctatttgttttctttacatcctgatatggtttggctgtgtctccacccaaatctcatcttgaattgtagttcccataatcctcacacgtcgtggaagggacctggtgggaggtaactgcatcatggagcagttaccctcatgctattctcgtgataatgagtgagt

SEQ ID NO: 180568 - DNA, 465 bp, Homo sapiens
cccttgcacttccagggtgaggcgatgccccacctgctccgtgggctgcacccactgtctgacaatccccagtgagatgaacctggtacctcagttggaaatgcagaaatcacctgtcttctgcattgctcacgctggaagctgcagactggagctgttgctatttggccatcttggaacctcctccggaatttttttaaataccctttaagaattgttctttattggtatatagattagtatrtagaaacacaacttatttttgtgtgttggttttatctcctgcaactttgctgaatttattctaaaagtgttttttagaatcttagtgatggtcattgtccagtgcaagagtttgatgtggatccttctggtactattttgctttcttgatgagtagatacataaacttcgatctacattaatgctcaagatagtcatatatgcataatcataattgaattc

SEQ ID NO: 180569 - DNA, 399 bp, Homo sapiens
acatatgcctgcttttcatgatctctcattcatgctgctgctgctggcaaaaccagcacttggaaagttaatctgtagttgaaagagatgtggcttgggccgatctgcctgccctggtggcttttgttgctgctgttgctgcagccaaccccaaaataggcctcaatggcccctccagggggtgcacatcttcactccgagttacacttaaggaacagggctctttgctggactggtgggcctgagsgttataactcattagttttttgcatactgtcagttcctgtgggttgatgtttaccactaagaagcagagatgcatgaggcaggttctgatttagctgcctactgggtctattttaaaagtttccatccaactgactcctggtacacaggtca

SEQ ID NO: 180570 - DNA, 399 bp, Homo sapiens
acatatgcctgcttttcatgatctctcattcatgctgctgctgctggcaaaaccagcacttggaaagttaatctgtagttgaaagagatgtggcttgggccgatctgcctgccctggtggcttttgttgctgctgttgctgcagccaaccccaaaataggcctcaatggcccctccagggggtgcacatcttcactccgagttacacttaaggaacagggctctttgctggactggtgggcctgagggttataactcattagtttyttgcatactgtcagttcctgtgggttgatgtttaccactaagaagcagagatgcatgaggcaggttctgatttagctgcctactgggtctattttaaaagtttccatccaactgactcctggtacacaggtca

SEQ ID NO: 180571 - DNA, 399 bp, Homo sapiens
acatatgcctgcttttcatgatctctcattcatgctgctgctgctggcaaaaccagcacttggaaagttaatctgtagttgaaagagatgtggcttgggccgatctgcctgccctggtggcttttgttgctgctgttgctgcagccaaccccaaaataggcctcaatggcccctccagggggtgcacatcttcactccgagttacacttaaggaacagggctctttgctggactggtgggcctgagggttataactcattagttttttgcatactgycagttcctgtgggttgatgtttaccactaagaagcagagatgcatgaggcaggttctgatttagctgcctactgggtctattttaaaagtttccatccaactgactcctggtacacaggtca

SEQ ID NO: 180572 - DNA, 576 bp, Homo sapiens
tattcagtttgtgctgagaaatagggggcatgtgccaggattttggtgataaagggtatgtacattggtaagatggaaacttgctgatggactgtactgcattcactaagtgtattcagatacaatatactggaggtggtggattttagtctaccttcaggaataagttaccttgaaagagtttgcatagcattaggtgtcacatagtaaaagcacatctttaaatattttcattaaggactttccattcattatgcttgtctctgggtacgaaaattccaagtttacctctggcaattctatatcacttatttgtaattgtaactcaaatctcatactacaaatgcagttatgctgtaggcatttgtgataagagcaaggaacgaatgattttgttgaattatcaagtgagggttaattacgtacctatcatgttcccagttatatgccaagggmtgaagaagacactaaagaagtgtaaagtgcactttctgtcccattaccatcttgtgaaaatccttagaggttcatttcctttttctatgtagactgtgaataaggaatgaagcagtgata

SEQ ID NO: 180573 - DNA, 644 bp, Homo sapiens
aaggctcaacttggttaaaacgtgtcatggctccaagccactcaaaaattttcaggaaaattaagagtgctttggtgacaaaagaaagtcaatgctgttatgactcatgagtgcgatttgatgagggcatggggccagggtgaggcagatgtagttgaagcaggcaaaagtatttgtgttggctgtcctatttgttgtgctggtggttctattcaagcgctgctgatggggtgatttgcttgcaatgggatgacacagcaagcccattaccatgcttggtggagacaggagctaccagcatttccccaggagaaaattttacaagtaaaggctaattttacttttgctgttgatggcatttctcagctatactaattaccatccctatagaaatgctacagaaatataccctatcctcccaagagtgcagaggggaaaagaggttgttcttaaataatccaagaaaaggttttacctgtggattccaaagctacagtgcttccttactcatggctttcttaaatggcagatgccctggcttaaatacaatttctatatttcycttactttcagcattcggactgtgtgatctattccctattcagagtcaattacaaataaaattattttaggaagaaaaatga

SEQ ID NO: 180574 - DNA, 471 bp, Homo sapiens
tcttcgcagcgcctcctcccggcaggccgcggcgcgaagcacctgtccccaatcttccatccccgacgccccttcccgggtacccccctccaaaagctgccaggcacactgggaacttgtcaggtggctttggtgacaggggcagggatggcacttatcttttaagttaagcattggagtaaggggtcgtggttaccataccctggcaccgtccatcagctttaatgttccttaggaggttgaaagaatttcataagatcttcactttattgttcccccaaagaaaggacagaatgaaagataaagacrggaacaagagaaaagatcgcatccgtcatattcactgggtgcctcttctgtgccctgaaatgtgcttgcattgtcccaatttaaggtagaaagatgatgtctgagttgatacgcgcgcacacaggcagatacacacacacacctcaaggtaatgagcaagag

SEQ ID NO: 180575 - DNA, 596 bp, Homo sapiens
ccacctattgtgttttgttccccacatacatccttgacagcctctgctcaaaaggcttgttgtatatgagagccttgttgagagtcctttgagaattcctaaaatcccacatcttttgaaacgtggccaacattttttagtacccccctctgtgcaggcacttacattttctcaactattctcacaaatattctataagatgtttaccaactttcagaaaagttgggtaacataccagggtgatcccatgaagaatttatttaaatcaatgcctgaggttcactctggttggccacccattctcttttcctttgatccgtgggttttaaaaggaacccttgacattcaggggatcaatttattatrtacatgcttatgtacatttttcccacagagagaagattcatggttctcaacagatttctttcaaattgggtccttgacccagaaaagttaagaataattactttaaatagaaagtgactctacatagtaaaacgaagagtggaagttataggaatcttaagcaagtcatctttatcctctctgggacttagttttctgaaaataaaaagcggaactaaagaatcttaaga

SEQ ID NO: 180576 - DNA, 443 bp, Homo sapiens
gctatgcaacatcacataatgcattcaatgaaacaggttcacatgggcaaatgtggaataaatggaatattctggtcttgtcaagagtttcagaatacttctagttttaattgattaaagactttgattttattttttcttttatagccacaaaacctcataagttacctttgaatatataattttttcctctatttttctttgacggtcatcttctatttgcttattcaactcttcaatccattttctytgcagttcttgtttcacagcactgaaagggtgctccagcagtactgtttcctaaacaacagccataaaagccatctaaagttcagttctctttttctaatcacttaatatgtgcaaatcttgccaaagtaacatacagatttaatccactgaggcatttatctgtaagaggagcaataacttcaaacgaattt

SEQ ID NO: 180577 - DNA, 547 bp, Homo sapiens
aaagaaactgtgactagtcctattttataaataaggaaaagaatctctaagtaagtaatttgtctgaagacacacaactattaaattctgaacttttgccactgtggaggaaaactgtaaaaaggtgggctttgctgtgtaattgatattttatacacctttcatatttcaatacctcccctgaattttgttatttttttctgattgtagtgaatcctattactagcttgctttaattttttgcctgggtcttttcagtatctgcatggatggaaatgcagacaagattcaaggtaagaactcttcataggtttctaggctagctcaactctctcgtaagcctttagctttagaaggaaaactgcgtggtgtctgaatataaatcctttggtagcaaaaagcacaagactaaaggaagcagggtttgagtgagacaaataagattacgtgagtctgctgcatggtggaggttttaaagcctgtgtctgtggttatttctctcctcgagagcttcaaacaggycttttctaccttggagttattttaa

SEQ ID NO: 180578 - DNA, 644 bp, Homo sapiens
agacctttctttccaaataaagtcacatccacaggtcctagggcttaggacacagacatatctttgtaggcaatatcattgaagtcactgcaactccccacagcaaccacttcaagagagaaagtagaagctgccatgccttgtaaggcccagaattggcctgggatcatgggggcccatgtccctatttattacattttgcaggtccagcccagattcagagtatcacctgaacaccaacccaaagaagcatggctcactgggacaatgactgcttatttggggggtcattcttcctgaaaccacacacatgtccccctgcctcatgagttagggctctctgagtggactgacagtaacccggctccttagaataaatggtgattaaaagataacaatgttttaatgtggttttctcccaaaaaagagtgacttttaagtcaacytcttcaaaatttcatgtgaaatcacaacctggtaggagaaatattttcagtggagtgagggctagggtgattatcggtgctttgcaagtacctgcacaaagaccactttgtgctttgccatgagtgggctaagtgcagagtgtaggactttcacagggacaattttgaagggtgtgggttttgcaggcagacagatct

SEQ ID NO: 180579 - DNA, 611 bp, Homo sapiens
ctatatgtctccatgtgcatattgtaactttccagttatatttcaaaaacaacaaatttatctggcagtactaagtgttaggtaatattaaatatatatttatttttatatcctgccctgatggctttctttcagtctccacagacattgggcagctaatacagaattgttcaagtaagtttaattcagtattttatatatayatatatatatatatatatatatatagtttaatataagtccaaataaatgacatcatatgtttagcaagtcacaatttgtgatttttatgcaaacaggtaacaaaggctctcacctacatacttcttggtgttaagtaagtgttctcatgctcgtaacctagttgctgggttaaattgccattttatagcaattttcgtttagatgcctaacccccgtatagaaatagcagatacagtatacctagagaaaaactcacagggttgggtgccagtgacctgggttgaagacaatattatgaacaatttaatgaaaatatttttgacaacttagattcttagttgtcaacttttttgaaagtgacaaattaacaatgaccacacaagaatggctttacatatactaaagaa

SEQ ID NO: 180580 - DNA, 705 bp, Homo sapiens
ggcaggctttgtgggttaaccaatgtccaaaaattaatartgataacaacagaagattaacgcttacaagaactctataaagtaggcaatcttattagtctaatcttaagaagaaactgaatatttccataataggctgaaacctaatggtatttagtggaagctccttctttgcccaccatatgtattattatcttgttagtgcctgggagtctttgcaggctgtgcccaggttctggaacttgatgctactagatggcaggatggaaggatatccaacagggaggtggcatggtgacatctactttttagatggaattctcttgtggggataaggtagtgcttgagggagacaaggtagagaagcaggaaggtgagcgccaaggtgggcctgtactggaatagccacagtaaccatagaaagacgatgaaggattggagacagatgccagacactctggaacaaggagatttccaaagttcagtggagaagatggctgttgattgctaatgtctgcagtatgtgtgtgcaagtgacagtaatattttcaagtgttagatatttgtcattcataaatcaggaagtgaaaagtatggggatgattggattgagggagtggggtgagaaagaggagggaactgggcataatccctgcttctccagctttaggaattgggaggagcagagaggacaagacttggagg

SEQ ID NO: 180581 - DNA, 433 bp, Homo sapiens
gaattcttttaggtctgtggcattagcccaatatttagtttcttttcttaaaacgtaatttcttctagatattgatttgcaccaacaatacccatatgaagaatattggggtcactamtcactcagtgttagatccaggaataccgaatcacagaaagcataccatttgaccttaccctaagttaaatgtgggttattgaaaacctgtttaatacattttagtaaacgaaatcattttaaatacacggagaggtctgcacttttagcaacaggctatggtggactgtaggaagtgatcaagcggagtgtttcagtgtcagtaactgcctcctgattggtttgttctaagagtatggagcatagtgtgcgtctcttggatttgtagcatggctgctcctgtctgtgccacaaggggcgcttcttaggcccacag

SEQ ID NO: 180582 - DNA, 592 bp, Homo sapiens
agaggagacaatcatttataggacatttacagaattttatttacaggaaagctacttttgacaatttctctaagtaaaatttatttcctccatctctctgttctctctctcgcttgctattttttgtcctctttctttaccttcctttcttttagcttggcctttatttgtacattgtttatagatgaaggcaagcagttcacagggaggagcacatggaaagggaaggcatcctgatccatggttctttgcctgttcattctaaaccgaccttgacaaattaataaagaaatacttayggccttgtcattttactctaaattatgttttatattaatcaagtatatccagttaacaaaaacaaatatgtctataaatcttctaatagaaatgcctattctatttaatttcatatttctgaataaaatagttttatatattaagttttcaattttatagaacacttattaatattctgctctgaaggagtagttcttttagatagttatttttcactttctgtctctccccaacttacagttaactcctctatcctcctaatactgctaaatcaatattaagtgtttatatt

SEQ ID NO: 180583 - DNA, 592 bp, Homo sapiens
agaggagacaatcatttataggacatttacagaattttatttacaggaaagctacttttgacaatttctctaagtaaaatttatttcctccatctctctgttctctctctcgcttgctattttttgtcctctttctttaccttcctttcttttagcttggcctttatttgtacattgtttatagatgaaggcaagcagttcacagggaggagcacatggaaagggaaggcatcctgatccatggttctttgcctgttcattctaaaccgaccttgacaaattaataaagaaatacttacggccttgtcattttactctaaattatgttttatattaatcaagtatatccagttaacaaaaacaaatatgtctataaatcttctaatagaaatgcctattctatttaatttcatatttctgaataaaatagttttatatattaagttttcaattttatagaacacttrttaatattctgctctgaaggagtagttcttttagatagttatttttcactttctgtctctccccaacttacagttaactcctctatcctcctaatactgctaaatcaatattaagtgtttatatt

SEQ ID NO: 180584 - DNA, 492 bp, Homo sapiens
tgaaggagtagttcttttagatagttatttttcactttctgtctctccccaacttacagttaactcctctatcctcctaatactgctaaatcaatattaagtgtttatattactctgcctatgaaatactgttcacagacaagttacctayagttctgtaattacaaatagtctcttgtgcagctttttactttcttgtgagttaaaaattacattatttttcatttgcttaattttatatgtacctattaattcattccttattttgcaacaaagttgtaaagctcctctcaataagatcaaacacacccagaaattgaatctattagttttattttctttcctttttaagacctctcctccagccttccgttttcctgctccacgttggccagttcgcactctaggccaggaatctgcaagctttttctgtaaagggccagatagtaaatattttaatcttgtgggtcataaagttttcattgttgctac

SEQ ID NO: 180585 - DNA, 527 bp, Homo sapiens
gtggcatttaggacactcacaatgttgtacaaatctccctggttccaaaatatttctaccgctccagagtaaaacccctcacccatgaaacagtcactccttactcaccttgccctccagtctctggaaactacaaatctacttcctgtctctctgaatttgcctattctgcacatttcatataaattgaatcctgcagtatgyggtcttttctgcctggcttctttcactgagaatgatgtttctgaggttcgtccacactgaggcatgtatcagaacttcattctttttgatgactgagcaatatttcattgaatggatggattgcatttgtttatccattcacctgtacaaaccatgtatcttcaggacccacagcttgacaaagtggataagagaaggagctctgaaattgcccagctctggtttgaatttcagttctactgatgagaaaccgctaaacaactgggccccaaaatacaacgaagccgtggggttggtgcaagggctaatgagatgccaagacc

SEQ ID NO: 180586 - DNA, 422 bp, Homo sapiens
gaattccctctctgctaagcattctccaacccaagggctcacatccacgattgtgaccccttaagggagggaagaggctggggtgatgggaggagcccaggacggcctgggggcagggagctgggaccaagcactcggrggcgggcaccacaggtcacgccttcgcccaccccccaccccggctgatggatcctctgaccctgcgtcctgtcccgaaacgcacctctcccttggaagctatccccagagagagcaggagccactgtggccccatggttcggagccaccacagcaaagtgaattaagggaggtggctcagacctcggctagaagcctcggtggcactcgggagggacttcacaaaccaggatgcggacgggggaagcgccagggcttttcctgtagatgtggggcgggctctg

SEQ ID NO: 180587 - DNA, 218 bp, Homo sapiens
cccttggaagctatccccagagagagcaggagccactgtggccccatggttcggagccaccacagcaaagtgaattaagggaggtggctcagacctcggctagaagcctcggtggcactcgggagggacttcacaaaccaggatgcggacggggraagcgccagggcttttcctgtagatgtggggcgggctctgggagtcagttaaggaacacagaa

SEQ ID NO: 180588 - DNA, 530 bp, Homo sapiens
ctagcaatcatcaaaaagtcaatctatttttcttttttttgttttatatatatggtaactttaacatgtaaaatatattaagccaagccacagttggataaaacctactttttcacatcaatgaattcaatctgacctgttttgttttgttttgtttttgagacagcgtctctatcacccaggctggaatgcagtggtgccttctcagctcactgccgcctcgacctcctggaaccacgtgatccttcctcctcattgccacccagtagctgggattacatgcatgtgccaccacattctttctacagacagggtttctccatgttgcccaacctggtctcaaactcctgggctcaagtgatccacccacctccgccytccgacatgctgagatttcaggcgtgagccatggcacctggcccaatctgacctctttaacttaacctacaaaagctcttcccaataggtttacattttctgccttaactttattaacttctgtcactccagaggtctattttcaggcacat

SEQ ID NO: 180589 - DNA, 521 bp, Homo sapiens
aatgcctaataaaactaaaaggatagatatctacacatgtgataaattaaaaaactgacaatgcctagaggtggataagataagaaaccactggaatttttacaacattgttggtaggattgaattatgatacaacttctttgaaaaacagcttggaggtttataaatagctaaatttatayctatgatgtggcagagtcactccactcctaggtatgtaccaaagataaatgaacatatatgtctatacaatgactgggaaacttatgttcataacagttttattcctattagcctccaacgagaaagaatccaagtatctttcaacagttcgatttatccttcactgaataaattgcagtgtattcataaaatggaatactattaagcaataaaaagaatgaactgacaaatgacacaacatgagtgaatctcagaaatatgctaagagaaagaaactagacacaaaagttatcatactgtatgattcaatttacatgaaattctggaaaaggccaaac

SEQ ID NO: 180590 - DNA, 407 bp, Homo sapiens
tatgcccctaactttacttttcatttacttcatctttcatatctgcttgtaatttargatactcttctgtattttatgtttttttttaagctaattaacacttatttggaacaactcaggggagaaaaaggcatagagttgtcttttaaataaagtattagttcctataacatctccaatgatgatacactttggtacatctacatttatatattcacttagttatttacttactgcttactataagagaatcaaggtgctacagcctgggctactgtttttcaaactcattatccaggaaaggagaaaaataaaagaaacccatagttttaatacagtgtgacaagtgctttgataaaccaatcgtaaggtgctgtgcaaggatataagatatacaccaaactcaa

SEQ ID NO: 180591 - DNA, 548 bp, Homo sapiens
ggcgtattagtctgttttcacgctgctaataaagacatacccgagactgggtaatttatacaggaaaaagggtttaattggacttacagttccacgtggctagggaggcctcacaataatggcaggaggtgaaaggcatgttttacacggcagcaggcaagagacagaaygagaaccaagcgaaacaggtttccccttaacaaaccatcagatcttgtgagacttcttcactactgcgagaacagcacaggagaaaccgaccccatgattcaattatctcccaccaggtccctcccacaatacgtgggaattatgggagtacaattcaaggtgagatttaggtggggacacagccaaaccacatcacatggaaaacatggtaggcatggtctctgcctatttggaggttaaatttgaggattgaaactgagagagacaagacaataaacaaatgaataaacaaaataaccaaagaaaatgaaaagaaaggaaggaacatgttgcaataatagataaacaatggactgggtatgcacctccttaaaatg

SEQ ID NO: 180592 - DNA, 635 bp, Homo sapiens
cctttgctccataggggctgctctggctgtcttctctattctgggctctcacatcaacttactatttcctggggctactcttcttctcagccctgtgaattgctctgtcatcttcatccttctttttttttttttttttttttttttttgagacagagtttcactcttgttacccaggctggagtgcaatggtgcaatctcagctcactgtgacctccgcctcccaggttcaagtgattcccctgcctcagcctcccaagtagctgggattacaggcataggccaccacgcccggctaattttgtatttttagtagagacggggtttctccatgttggtcaggctggtcttgaactcccgacctcaggtgatccacccacctctgcctcccaaagtgctgggattacaggcatgagccaccaagccttgccatcttcatccttctttatgccatgtgctgtacatggtgctacacagttgtgtgttctaacccttccagggtgttctcagataagttcccaaagtcttactggrtgggttggattggaggtggggcgggggctgaaagagggtcatgacaggttagaatgtctgaaagatgtaaaagacagtcctttttttttttttgccgatat

SEQ ID NO: 180593 - DNA, 497 bp, Homo sapiens
ttcagaccatcgtgggattggtgggaggaggaagaatgtgccataggtaggaatgagaagaagttagctgaattgtcaacaaaacttgaacagctgcatatggactatcaagacagcagcawccccaggatctcagccttacagcagagctgcacctacctgccagctccttccacatcaagtgcatggggttagcacgtcgatgtctggggacagagcaggagagctgagagagattgttcctgtggagaagcagggcaggtgaactgagatagaactctccaaagccctctgagccttcaccaatctttaagccttcaccatcctgtctgcagcaggctgagacgggaccaaagaaatcttttcagggcactgctatactctcccaagtgcaccacagcaaccctcaggggctgggacaagatgaaaggtctgagagagagaggtgtttgaaggcatgaacatccaggggtaagactgaccagcaaagagaattc

SEQ ID NO: 180594 - DNA, 588 bp, Homo sapiens
catgggaataacatacttatattgtagcatgactactactaatagcatatattagacaagactagaaagggcaagcaaaatcaagttaggaaacctataaaaacccaggcaaggtgagaatgatgaacagatattatctacagatccataacctaatgttgtctgtgaaccctcatgttcattcccactaatgctgcaccattacaaattctcatctcctctagcttaaataccataatcatctcctgagtgatttccctaattcctttgaattagactcaatttctccaaggcaaagctctgatttatcttttctctgctcaaaagccttcattaatttctaatgtctttctaaagccaaaattctatgcattagcaagaccctttctaatctatcctaattcttcctccacagctctgaactttactattcctttgctcactgttccctctgcccagactaagttgaaatgcctccttgcaccatgaygcactgctaaatattccttgtcagaaataaactttttaagttactgctcccaaagcactttgtttataacttccttaaagcaactattatattcttcc

SEQ ID NO: 180595 - DNA, 588 bp, Homo sapiens
catgggaataacatacttatattgtagcatgactactactaatagcatatattagacaagactagaaagggcaagcaaaatcaagttaggaaacctataaaaacccaggcaaggtgagaatgatgaacagatattatctacagatccataacctaatgttgtctgtgaaccctcatgttcattcccactaatgctgcaccattacaaattctcatctcctctagcttaaataccataatcatctcctgagtgatttccctaattcctttgaattagactcaatttctccaaggcaaagctctgatttatcttttctctgctcaaaagccttcattaatttctaatgtctttctaaagccaaaattctatgcattagcaagaccctttctaatctatcctaattcttcctccacagctctgaactttactattcctttgctcactgttccctctgcccagactaagttgaaatgcctccttgcaccatgatgcactgctaaatattccttgycagaaataaactttttaagttactgctcccaaagcactttgtttataacttccttaaagcaactattatattcttcc

SEQ ID NO: 180596 - DNA, 613 bp, Homo sapiens
gcctaatttttaaaatgaagttaatgtattttgtacaggccaatgctgataaaagcaataagcaaaatattaaaagaaacaggctgggcgcagtggttcgtgcctgtaatcacagcactttaggaggccaaggagagcaaaccacttgaagtcaggagttcgagaccagcctggccaacatggtgaaactccatctccaccaaaaatacaaaaactacccagaagtggtggcaggcacctctagacccagctacttgggaacctaaggcaggagaatcacttgaacctgggaagcggaggctacagtgagccaagactgtgccactgcactccaacctgaacaacagagcgagattgtttcaaaaaaaaaaaaaaaaatatatatatatrcatatatacacacacacacacacacacacacacacacacatatagaaatgtaatacttcactgttaaagtaatttttaaaattactaccagatactgtggtttgctcaccacagcacccgcaatacctagcgcagtacttggaacagaatatatactcaataaatatttgttgacttaagtgataccttaataaacatgagaaggaatgtgagcaaacaatgt

SEQ ID NO: 180597 - DNA, 613 bp, Homo sapiens
gcctaatttttaaaatgaagttaatgtattttgtacaggccaatgctgataaaagcaataagcaaaatattaaaagaaacaggctgggcgcagtggttcgtgcctgtaatcacagcactttaggaggccaaggagagcaaaccacttgaagtcaggagttcgagaccagcctggccaacatggtgaaactccatctccaccaaaaatacaaaaactacccagaagtggtggcaggcacctctagacccagctacttgggaacctaaggcaggagaatcacttgaacctgggaagcggaggctacagtgagccaagactgtgccactgcactccaacctgaacaacagagcgagattgtttcaaaaaaaaaaaaaaaaatatatatatatgyatatatacacacacacacacacacacacacacacacacatatagaaatgtaatacttcactgttaaagtaatttttaaaattactaccagatactgtggtttgctcaccacagcacccgcaatacctagcgcagtacttggaacagaatatatactcaataaatatttgttgacttaagtgataccttaataaacatgagaaggaatgtgagcaaacaatgt

SEQ ID NO: 180598 - DNA, 186 bp, Homo sapiens
cacccttgatcaggctctagaagggcaaagtcatgwggcattttcctctctcaaacgtgaccacataggtctgctccttctacaagggcaatttctagaaaactgagatgtgggtagggaagaaaatgaaaccagccaagtataagtgataaggcagggcatcaggctagcgtagaggcagaattc

SEQ ID NO: 180599 - DNA, 408 bp, Homo sapiens
tattacaccacagcataatataattccaataataaaataaataccttttctactcctctgagaaatttgtctgttcctgtatagtttctccttggatctgttaacaattcacatagtcgctgaatagtaaaagggatactgcaaaaaaatataattttacagtgtgagatcactgataatcaagaaaacgaggaacattatttcttttgctaggtaaagctgtatctagtcacycatgtattaagctacaaaagaaaatgctataatagggaaataaatggatgagtcatttaaaaaaagacaataaaataagcatacctttctatttaacaaaaaaaccattctcccttcctttaaaaagcaataaaggtggggggggagggaggggggaatggttaacgggtacaa

SEQ ID NO: 180600 - DNA, 231 bp, Homo sapiens
ttcatttacagcagcaaagacctatattaaatggactgaatatttaaggagtaattatgttgagtaatgtgtttatttatagttttaattatacattatcttttttggttatctttaaaatatattaagcttatgcaaatasgatatgcatcataacccaggatctattatctgaattgcttatatacttataataacataactttaaaagaaagaatcaaaccatattgc

SEQ ID NO: 180601 - DNA, 540 bp, Homo sapiens
gtaacatacaccattattttatgtaaagtaaggaaataagccacccactgaaacaggacacgtgcctgcacaatgcatggactggtcacaacagcctctcctggcttgacattttcatttcttcagaggaattttgtgggtattttcctctcttaagctctgcagagctcttagttttggcttggcaagaaaatgtggaatttcagtcatccccacaatgacaaatacatgctcttctaatgtcaaagttactccttcctgctctgtttccttgacttttggaaggacatgctaactttttgtctcactgtggagtcagtatagtcctcctaaagacatttccagtggtgattaatttcagtatgtgtgctacgccagcaacgcacataacttcgattggatcaaccgcgatgaccaactttgcatacgttcttgcaacagcagcagccacagggatttatgcrtcgagatttctgagacaacaaaaccagcgttctggagtcaaacatctcagaaagagccatcaatcaatccaggcag

SEQ ID NO: 180602 - DNA, 551 bp, Homo sapiens
tattatcttcattttctatataaggaaaccgacaactagaaaaaatgaattacttttgtaagacagtgtggaccatattttctgtttcttagttttaaataatgagcctgtatactatatgtctccttatgtggaaaatagaaatatgaatcccatccccctcaaaaaagactattttgacaggtagtttgtgaaaattttacattttaaataacatgttatttaattcataatataggatgkgaggacaggcatgatggtgtgtgcctgtattcccaccaactcaaaaggctgacatgggaggatcactagagcccaggagtttgaggcccacatgggcaacttagcaaaaacctgtctctaaaaatcaaaacagagaaacaggatgaagaatgttcatacggattctgttatctactatttaaccaggtaaagagaaatgctccaaatagtttacgtgtttacaatacatgtttttgaataaatgaatgaatggcaaatgtatgttataataatttatcaattgtatagaaataatagatgattagaag

SEQ ID NO: 180603 - DNA, 551 bp, Homo sapiens
tattatcttcattttctatataaggaaaccgacaactagaaaaaatgaattacttttgtaagacagtgtggaccatattttctgtttcttagttttaaataatgagcctgtatactatatgtctccttatgtggaaaatagaaatatgaatcccatccccctcaaaaaagactattttgacaggtagtttgtgaaaattttacattttaaataacatgttatttaattcataatataggatgggaggacaggcatgatggtgtgtgcctgtattcccaccaactcaaaaggctgacatgggaggatcactagagcccaggagtttgaggcccacatgggcaacttagcaaaaacctgtctctaaaaatcaaaacagagaaacaggatgaagaatgttcatacggattctgttatctactatttaaccaggtaaagagaaatgctccaaatagtttacgtgtttacaatacatgtttttgaataaatgaatgaatggcraatgtatgttataataatttatcaattgtatagaaataatagatgattagaag

SEQ ID NO: 180604 - DNA, 479 bp, Homo sapiens
ttgtttaaattgaatcatataatatgtggtctgttgtgactggcttctttcacttagcataatgctttccaaggtttccttggtatagcttatatcacgtacataattcctttttattgttgaataatatgtcattgcatgactataccttttttttattcatcagttgatggactttgtagttttctccttctgcactattatgagtaagattgcatcattgtaaacacttttctgtgcttttgagtatagccatcttaataaatatatatcatattatattatctcactgtggtttggtttttatttgcctaatgactaataacgttgagcatcttttcttatgtttattggtcatttgcataacttcagtggagaaatgtctattaaaatcctttgtctatttttaaatttttttatttatcttgtattaktttgtttcaagaattctttctatatatatatatatatatatatat

SEQ ID NO: 180605 - DNA, 560 bp, Homo sapiens
aaagccatggggagatgggaggaatacctattagaaagccgtagcttctcaatgttcttrccaagatttcatagattttcttaaataaatgtttctcaatctgctgtaagtcctttcagcaatcttcaagtaatctgaatgattggttttgcttaaatttcagcagcataatgaatgatgtttctctaagcatcttataccagcattctggaagtcctgcctccaaattttaattggggaataatagttctgacatattttcaaaagttctaggcatgactcctggagaataaattaaaggaaacaaaagtaaaaagaagggattcctggtaggaaaagagtgccgctgtcccagtgagagatatttgtgttaaaagttgagttgaagaaaactgggtaaaatccacacatacattaagggcaaatttgatagaatttgctatgggattaaatttctacatctagtgtccctagatgggttgaatttaggtaggtgtgcatgattttgtctttaatagatggttatgtgatttaatagcatgaaagaaaaagcagacaaa

SEQ ID NO: 180606 - DNA, 560 bp, Homo sapiens
aaagccatggggagatgggaggaatacctattagaaagccgtagcttctcaatgttcttaccaagatttcatagattttcttaaataaatgtttctcaatctgctgtaagtcctttcagcaatcttcaagtaatctgaatgattggttttgcttaaatttcagcagcataatgaatgatgtttctctaagcatcttataccagcattctggaagtcctgcctccaaattttaattggggaataatagttctgacatattttcaaaagttctaggcatgactcctggagaataaattaaaggaaacaaaagtaaaaagaagggattcctggtaggaaaagagtgccgctgtcccagtgagagatatttgtgttaaaagttgagttgaagaaaactgggtaaaatccacacatacattaagggcaaatttgatagaatttgctatrggattaaatttctacatctagtgtccctagatgggttgaatttaggtaggtgtgcatgattttgtctttaatagatggttatgtgatttaatagcatgaaagaaaaagcagacaaa

SEQ ID NO: 180607 - DNA, 447 bp, Homo sapiens
atttggaatagggtaattatatgttaactactctatcatacttactactgcactgacaacaaacagaaaaatagaaggctggaagcagggaagccagtagggaggccatggaaataatttcggcttgagtcaacrttgccttcaatcacggtagttgggatggatggaggtggtaaaacactgggaaattggatgtactttcaaggtagaggcaacaggatttgcagaagaatttgatataagatgtgagggaaaaaggaatgaaggtaaattcaaagatttcttccttatcaatagagaatgtgatcctcccactttcaattctataagacaggatttagaagaaaacttttgagtctagtatggaaaatctgaaggtaaggacggatatgaattagcagctggagggacataatatttttcataggtaggagaaattagaggatg

SEQ ID NO: 180608 - DNA, 472 bp, Homo sapiens
aatctgaaggtaaggacggatatgaattagcagctggagggacataatatttttcataggtaggagaaattagagsatgtgttatgttgatgataatgattcagcaaaaaaagggaaaaaatggttcaggagagagatgggaaaattgcctgaaaaatatccctgaggaggaaagtacagatggggcataatgttcaagtgtgggttttgggctttacaaagagcacaaagaaggaactgggggtgtgttttcatcttaattgctctttcaggagcactcttcttaaaatacccttattgaaataatatcttccaatgcttttctttttctaaatttcattttacctactttgaaatgaacagatataatataggttgtgacaaatgaatacatacatagaaagcacctttattaaaatatagacatagctccctttcgtcttagttcccagtcaataacctcccactcacc

SEQ ID NO: 180609 - DNA, 472 bp, Homo sapiens
aatctgaaggtaaggacggatatgaattagcagctggagggacataatatttttcataggtaggagaaattagaggatgtgttatgttgatgataatgattcagcaaaaaaagggaaaaaatggttcaggagagagatgggaaaattgcctgaaaaatatccctgaggaggaaagtacagatggggyataatgttcaagtgtgggttttgggctttacaaagagcacaaagaaggaactgggggtgtgttttcatcttaattgctctttcaggagcactcttcttaaaatacccttattgaaataatatcttccaatgcttttctttttctaaatttcattttacctactttgaaatgaacagatataatataggttgtgacaaatgaatacatacatagaaagcacctttattaaaatatagacatagctccctttcgtcttagttcccagtcaataacctcccactcacc

SEQ ID NO: 180610 - DNA, 156 bp, Homo sapiens
tgaagtaaaaaacaatacagcaaataaggctcatactagtttaaacatatttactgtaactaagaaaaaaagttttttttttwatctctaaaagctcagacaatgcctgcaaagaagagcccgtactttaatccttgcacataaattagtttaatg

SEQ ID NO: 180611 - DNA, 569 bp, Homo sapiens
ccaatcacctcacaccaggcccctcctccaacattgaggattccaattagacatgagatttgggtggggacacagatccaaaccatatcagtcatctttatatcccttaagctacttagaaggagagcatcctgagcatgaaagaaagtgaatcagtaaaaataaaagaacatatctgtacaaagatgtaattctttatagcctttgaaatttatcagctcttaacaactcaccaaaatacaagtgactctgagttgaaaaatctcagatggagaaataaattttgagtragaaacagctgtgttgcttccttatgtcttacagagttgtaggctgatttttgtcttggaggatattgaaggaaaggagataattcagtgttttgacttcagaagaatatggaaagaagaagagggaatatggatttcaaagagaagtggaatgaaagagaacatggcaacagcttggggaaaagtgaataaatacaaagtcaggaattataataagaatttcagccagtcatagttggcttgttctctccaatatcactactgcacacttggacaagt

SEQ ID NO: 180612 - DNA, 553 bp, Homo sapiens
tgtgaatcagccattactggtatttagtttgacagcacagatttgttcacagtgaggttctcagataagttattcacgcaacaaaggaggtaggttacctaataagagcccaatgcattcaaactattctataaggcagacatacagcaactggggtacaaaattagaagaaayggggaggaggttgaacttggagactgtcttaacaagtgcactggaatgccattgcttaggctgagaacaggtttcaaaatttaaagctgtaaggacacacacatttaataattagagatattcccattaattgaggattagttctagaagtagaatgatgatttacttgacatagactactttagctaaatataaaaatggcatatcatgtcttatctaaataagacctcattcctctaatcttgtctctacaagatgggcacactgtgtctattctctagatgccttatttgattcaagacgatactcagtaggctttcatctggattttgattattcattccaaggcacaacttaacagttttgttcaaagtactaa

SEQ ID NO: 180613 - DNA, 412 bp, Homo sapiens
tcataggctacttctgcatgaaatttcaaagagaagctggaatttgtgctcatcctggaaaggtatatacaatacatatacttcagatctgagagtgatacartgattcactgttactagctatttcagttatccacatagcaaatagctcccaaattgtgtaactcaacaacaaatattcactttttttgtgattctttaattgtatcagggacttggggggccatttatctttgtttcacattgtgttggctaggatagcacatgcagcaggatccagctggaagttttagcttgggtgtcagaaaatactgagacctgaatggttctctacctcaaggagggtagccaggcttcttacatattggctcggggatccaagagagtgaaagcagaagcagtcaggcctctt

SEQ ID NO: 180614 - DNA, 412 bp, Homo sapiens
tcataggctacttctgcatgaaatttcaaagagaagctggaatttgtgctcatcctggaaaggtatatacaatacatatacttcagatctgagagtgatacagtgattcactgttactagctatttcagttatcyacatagcaaatagctcccaaattgtgtaactcaacaacaaatattcactttttttgtgattctttaattgtatcagggacttggggggccatttatctttgtttcacattgtgttggctaggatagcacatgcagcaggatccagctggaagttttagcttgggtgtcagaaaatactgagacctgaatggttctctacctcaaggagggtagccaggcttcttacatattggctcggggatccaagagagtgaaagcagaagcagtcaggcctctt

SEQ ID NO: 180615 - DNA, 412 bp, Homo sapiens
tcataggctacttctgcatgaaatttcaaagagaagctggaatttgtgctcatcctggaaaggtatatacaatacatatacttcagatctgagagtgatacagtgattcactgttactagctatttcagttatccacatagcaaatagctcccaaattgtgtaactyaacaacaaatattcactttttttgtgattctttaattgtatcagggacttggggggccatttatctttgtttcacattgtgttggctaggatagcacatgcagcaggatccagctggaagttttagcttgggtgtcagaaaatactgagacctgaatggttctctacctcaaggagggtagccaggcttcttacatattggctcggggatccaagagagtgaaagcagaagcagtcaggcctctt

SEQ ID NO: 180616 - DNA, 412 bp, Homo sapiens
tcataggctacttctgcatgaaatttcaaagagaagctggaatttgtgctcatcctggaaaggtatatacaatacatatacttcagatctgagagtgatacagtgattcactgttactagctatttcagttatccacatagcaaatagctcccaaattgtgtaactcaacaacaaatattcactttttttgtgattctttaattgtatcagggacttggggggccatttatctttgtttcacattgtgttggctaggatagcacatgcagcaggatccagctggaagttttagcttgggtgtcagaaaatactgagacctgaatggttctctacctcaaggagggtagccaggcttcttacatattggctyggggatccaagagagtgaaagcagaagcagtcaggcctctt

SEQ ID NO: 180617 - DNA, 557 bp, Homo sapiens
gaattcacgtaacactttgcttaataattttttgaggcactcaataagatagctatcatagccttgggcaagatggctgaatagaaacagctcttttctgcagctcccagtgagaccaaagcagaaggcaggtgatttctgcatttccaactgaggtacctgattcatctcattgggactggttagacagtgagtgcagcccacggaggacgaccagaagcagggtggagcttcgtctcacccaggaagtgcaaggggtcaaggaactccctcccctagccaagggaagctgtgagggactgtgctgtgagggatggagctatctggcccagatactacactgttctcatggtctttgcaacccacagaccaagagattccattgggtgcctacaccaccagggccctgggattcaagcacaaaactggcagccatttggacacacattgagctagctgcacaagtytttttgttttgttttgctttgtttttttgataacccagtggtgactggaatgccagcaagagacaattgttcactcctctggaaagaggg

SEQ ID NO: 180618 - DNA, 480 bp, Homo sapiens
gcagacttaaatgttcctgtttgccagctctgaagagagcagtggatcttccagcaaagtgctcgagctcagctaagggaaagacaacctccttaagtggatccctgatccctgtgcctcctgactggragacacctcccatcaggggccaacagacacctcatataggagagctccagctggcatctggtgggtgcccctctgggatgaagcttccagaagaaggaacaggcagaaacctttgctgttctgcagcctctgctggtaatacccaggcaaacagggtctggagtggaccctcagcaaactccagcagacctgcagcagaggggcctcactgttagaaggaaaactaacaatcagaaagcaatagcatcgacatcaacaaaaatgacaaccacgcaaaaactccatccaaaggtcaccaacagcaaagaccaaagatagataaatccatgaagatgagaaaaaaacagagca

SEQ ID NO: 180619 - DNA, 578 bp, Homo sapiens
gcaagctgtttcatacagcagcaccaaggagagtcccaagcattggatgcaccagttactgtggaagtagatggtgagaaatgtagtgagaaatgataaaagtatgtataaagagcatgtagattcccaggtagcctcccacacctcatagttaagtgactacctctgctccaatctagcaaggactggaaggtgtattctctagagaatccaggcagtctttatggccaatgacaaaattccattttaagcttttaggcaaattcagaatttagaaaacttgtatctgcacagtaaagaaacagtttgycaatacataaagacttttctgattaatggctttattaagaatgtgtttatttgatattatacaataaaaagtgtcaaatttggaagatctgcatatctcagtgaagcaatattttccaaatgagcaatatgccatgcagagagcaacacacacatgcacacttacgtatgtatgaatatatttatttttatgacctccatatattgaaaactttggggtttatattagctttccctgttttctgtaattgtaacttttttctccaact

SEQ ID NO: 180620 - DNA, 511 bp, Homo sapiens
atgggtggaagggaccatgattcactgggactctgaggtttcctctgcacaaaatctaatgcagttgaccctaatgttgggggaagctggtttcatagtgtcacctctccaatatgccacaaagagtatactctgcccatttgtggttattcagattcccacatctctcccaccagcatggggaccccttgggctaaagtcagcttaaaccatcacatcctcccttggtgatccccgtggcttccactggagatcatgttccttggttcctgtcctaaatcagtgctgagctttgcacacttgatgtgctttttctccactatctttttttaggtgagggtgractgaagtccaaggatcaggtgctggctacagaacagagagatttagtttctgtcaggatcaaaggtgaacataaaccaaaaataaggtcagtacctccactgttagggtcctttcagacaataaaacaggatacatatttataatctgtaaacaccactcaggagaa

SEQ ID NO: 180621 - DNA, 577 bp, Homo sapiens
caggtgaagtaagagtaattttcctacatggtggcagcatggttgggatgagaggtgcagtgtatgagtaaggatgtggtgtgcagatgacaggggccattctagctaaggaagctggaaagayggtggtagggcaaagcaaaaagatgagcaaagcaaaaaggtaaagcaaagcaaaaaggtgggacagaatcagggcagctaaggattgtaaacctcatccagcctggaatttttctgtgcagatatgtcaactatactttttatggtcatttgacagctggtgagaagttttaaacctgcagaggttattagtgattacctttgccatcgctgagtaatgatgaatagagcatttacataagctgcagctttgtgcacacagcagtggccctcaacattactctgcttctcaaacctacagaaagatttagaaaaggtataagaatggatttaacttatgatagaaatctcaaaacagggccataccttgtgcagaatactaagtgatacagaatggaaacagcaagcccttcttaattgtcccaagcttgctagggtctgtttctcagttctt

SEQ ID NO: 180622 - DNA, 577 bp, Homo sapiens
caggtgaagtaagagtaattttcctacatggtggcagcatggttgggatgagaggtgcagtgtatgagtaaggatgtggtgtgcagatgacaggggccattctagctaaggaagctggaaagacggtggtagggcaaagcaaaaagatgagcaaagcaaaaaggtaaagcaaagcaaaaaggtgggacagaatcagggcagctaaggattgtaaacctcatccagcctggaatttttctstgcagatatgtcaactatactttttatggtcatttgacagctggtgagaagttttaaacctgcagaggttattagtgattacctttgccatcgctgagtaatgatgaatagagcatttacataagctgcagctttgtgcacacagcagtggccctcaacattactctgcttctcaaacctacagaaagatttagaaaaggtataagaatggatttaacttatgatagaaatctcaaaacagggccataccttgtgcagaatactaagtgatacagaatggaaacagcaagcccttcttaattgtcccaagcttgctagggtctgtttctcagttctt

SEQ ID NO: 180623 - DNA, 597 bp, Homo sapiens
cccaaagtgagaacatacattcctgttttcctgctcaaatgttaccttttccaaaacctcccatggcctgccctgccccacatgctatgtccataaaaaccacaggttccaccagcagaagagaggagaaacaatggatgtcggaggctacagttagagagaagcagcttgacttcagagggacagcttgatggcataacttcagagaggagtccagctggagacagccagactccaagagaaaattaccttcctgctccatccctttttcatctccccttcccgctgagtgccactctcattggcaataagatcctccacatttaccatccttcaaatttgttcatgtgacctcattcctcctggatactggatgagaactygggtgcgggtgcaaaagactgtcacattgaccctccactgaggtgttaacacttaagctgtccacaggtggcaaaactaaaaggacgttgactgtaacactcttctggggcttcagggtttgcaggcacccccactagacgctgccacaggacctatacagagttcattcctgccaacagccaaaagcactcacccaggctcctgcacttgctc

SEQ ID NO: 180624 - DNA, 597 bp, Homo sapiens
cccaaagtgagaacatacattcctgttttcctgctcaaatgttaccttttccaaaacctcccatggcctgccctgccccacatgctatgtccataaaaaccacaggttccaccagcagaagagaggagaaacaatggatgtcggaggctacagttagagagaagcagcttgacttcagagggacagcttgatggcataacttcagagaggagtccagctggagacagccagactccaagagaaaattaccttcctgctccatccctttttcatctccccttcccgctgagtgccactctcattggcaataagatcctccacatttaccatccttcaaatttgttcatgtgacctcattcctcctggatactggatgagaactcgggtgcgggtgcaaaagactgtcacattgaccctccactgaggtgttaacacttaagctgtccacaggtggcaaaactaaaaggacgttgactgtaacactcttctggggcttcagggtttgcaggcacccccactagaygctgccacaggacctatacagagttcattcctgccaacagccaaaagcactcacccaggctcctgcacttgctc

SEQ ID NO: 180625 - DNA, 522 bp, Homo sapiens
tcataacctctgaaattaggctacaagcacacayaaacacacagacacacacatacacacacacacacacacatacatggggttggggagaatggatgatatggggaagagtggagaagtattaacaaaaggctcccaatagaaggaaagatgctaaacatcacacttaatcagagaagtgacatttctcaactatcaaattggtgaaaaattcaaaagtttgctaacatattttgtaggtgagactatggggaaataggccttttcataaattgctgatgaaagcctaaaatggtacaattcctatggaagataatgtgagaaaaacaaacagaactgctttttgaccagcaactctatccctgaagctacatctcaacaatagcaaaaatctgtgcctgagattattcacttcagtattatttataacagcaaaatagtggaagccacttacatgaccattcataggagatattaaataaaacatagtccatagacacaatggagtactaggcagttgtc

SEQ ID NO: 180626 - DNA, 522 bp, Homo sapiens
tcataacctctgaaattaggctacaagcacacacamacacacagacacacacatacacacacacacacacacatacatggggttggggagaatggatgatatggggaagagtggagaagtattaacaaaaggctcccaatagaaggaaagatgctaaacatcacacttaatcagagaagtgacatttctcaactatcaaattggtgaaaaattcaaaagtttgctaacatattttgtaggtgagactatggggaaataggccttttcataaattgctgatgaaagcctaaaatggtacaattcctatggaagataatgtgagaaaaacaaacagaactgctttttgaccagcaactctatccctgaagctacatctcaacaatagcaaaaatctgtgcctgagattattcacttcagtattatttataacagcaaaatagtggaagccacttacatgaccattcataggagatattaaataaaacatagtccatagacacaatggagtactaggcagttgtc

SEQ ID NO: 180627 - DNA, 522 bp, Homo sapiens
tcataacctctgaaattaggctacaagcacacacaaacacacasacacacacatacacacacacacacacacatacatggggttggggagaatggatgatatggggaagagtggagaagtattaacaaaaggctcccaatagaaggaaagatgctaaacatcacacttaatcagagaagtgacatttctcaactatcaaattggtgaaaaattcaaaagtttgctaacatattttgtaggtgagactatggggaaataggccttttcataaattgctgatgaaagcctaaaatggtacaattcctatggaagataatgtgagaaaaacaaacagaactgctttttgaccagcaactctatccctgaagctacatctcaacaatagcaaaaatctgtgcctgagattattcacttcagtattatttataacagcaaaatagtggaagccacttacatgaccattcataggagatattaaataaaacatagtccatagacacaatggagtactaggcagttgtc

SEQ ID NO: 180628 - DNA, 522 bp, Homo sapiens
tcataacctctgaaattaggctacaagcacacacaaacacacagacacacacayacacacacacacacacacatacatggggttggggagaatggatgatatggggaagagtggagaagtattaacaaaaggctcccaatagaaggaaagatgctaaacatcacacttaatcagagaagtgacatttctcaactatcaaattggtgaaaaattcaaaagtttgctaacatattttgtaggtgagactatggggaaataggccttttcataaattgctgatgaaagcctaaaatggtacaattcctatggaagataatgtgagaaaaacaaacagaactgctttttgaccagcaactctatccctgaagctacatctcaacaatagcaaaaatctgtgcctgagattattcacttcagtattatttataacagcaaaatagtggaagccacttacatgaccattcataggagatattaaataaaacatagtccatagacacaatggagtactaggcagttgtc

SEQ ID NO: 180629 - DNA, 646 bp, Homo sapiens
cacagctttgtggtgtgtcaaggacagagaagaaagggagtcccaaacaaaagagactagtgtgagcttctcatgactcattattcacgaacaacctcgggaaatcgacaccacccttgcaaagagtctttttagttaaagttattgctttgaacttgggggagttgatatgcaacttacaattggcatttattaataattttgaagtgttacttttagacatgtgtgtcctttagaagagaccatggtcttgctctcttatctgtatgtttgatatttttcacgtttttgctacaaaccaagtattgatctttatttttaaaaagcttttttgaggtgtaattcacttacagcaaattgcacatatttaaagtctacaatttgataagctttsacatagcttttacacctgagaaaacatcaccactatcaggcagtgaccacacccatcattcccaaaggtctcctcacacttctctgtattccccctcccaaccctcccacctccatctctagtcaaatgctggtgtgctttctagcactaaataatagtttgcatttcctggaattttatcttggtgaactcacatggcatatactctttttggtaaggcttcttatacttcgcatgtttattttgagactc

SEQ ID NO: 180630 - DNA, 579 bp, Homo sapiens
aaataaattcaataaaatttgaattttctgcccttttcatgtatcacaaaagtttttttcaaccatttaaaaatgcaaaagccattcttcactagccagccacacaaaaacaagctactgtgctttcctgactcctgatgagtggacgtatttactggtgggactagttaaacaatttcgttgattgctgatttttaaaattattttgaagggatagacttttatatttctgaagtaaaaattgaatccctcccgttgctctaagcaagagtgcttagaaaggatgtttgtatttcacttctcttggttgttaataacaaarttattctttaaatagagcaattagagtatcagtatcaaggttgagatctcagatacgattttgcaagttggttagtagactgttagatctcttctacattgggaagtaattgtttctcattagaagataaattttcctagattttgaggttttcctactttttctgtgttgatgtgtcctgttaagttttcagagctcccaatttcagctcaaacagttggctctaagtatacttagcaggtctttatcatctcccc

SEQ ID NO: 180631 - DNA, 579 bp, Homo sapiens
aaataaattcaataaaatttgaattttctgcccttttcatgtatcacaaaagtttttttcaaccatttaaaaatgcaaaagccattcttcactagccagccacacaaaaacaagctactgtgctttcctgactcctgatgagtggacgtatttactggtgggactagttaaacaatttcgttgattgctgatttttaaaattattttgaagggatagacttttatatttctgaagtaaaaattgaatccctcccgttgctctaagcaagagtgcttagaaaggatgtttgtatttcacttctcttggttgttaataacaaagttattctttaaatagagcaattagagtatcagtatcaaggttgagatctcagatacgattttgcaagttggttagtagactgttagatctcttctacattgggaagtaattgtttctcattagaagataaattttcctagattttgagrttttcctactttttctgtgttgatgtgtcctgttaagttttcagagctcccaatttcagctcaaacagttggctctaagtatacttagcaggtctttatcatctcccc

SEQ ID NO: 180632 - DNA, 453 bp, Homo sapiens
gatgcctctgggaagctttctcattaggccccagcattttttttttttttttttttttttagctaagctaacgtttccctttcttggcagggagctttccccaattccttgcacagcgcctgtggctggccgtaactaacctcggcatcacaagcctcgccctgcccctcggagccgcgctagaccccgctgggcgccttctcgtctcccagcacggacctggtgttcgcagggactggggctctttgggtccgggcgggactgcgtggccgarcccgcgggcccagagccggcagccggggaaagtgggctcgagtttccgcgcccgagaaacgagcgccggcgccggcgggcggggccggggcggagggatctcctgcgctcggggagcgtgaggcgccggcgccgagctgggcggccgggcgcggggagagggcgcggggagagggcgcg

SEQ ID NO: 180633 - DNA, 453 bp, Homo sapiens
gatgcctctgggaagctttctcattaggccccagcattttttttttttttttttttttttagctaagctaacgtttccctttcttggcagggagctttccccaattccttgcacagcgcctgtggctggccgtaactaacctcggcatcacaagcctcgccctgcccctcggagccgcgctagaccccgctgggcgccttctcgtctcccagcacggacctggtgttcgcagggactggggctctttgggtccgggcgggactgcgtggccgaacccgcgggcccagagccggcagccggggaaagtgggctcgagtttccgcgcccgaraaacgagcgccggcgccggcgggcggggccggggcggagggatctcctgcgctcggggagcgtgaggcgccggcgccgagctgggcggccgggcgcggggagagggcgcggggagagggcgcg

SEQ ID NO: 180634 - DNA, 453 bp, Homo sapiens
gatgcctctgggaagctttctcattaggccccagcattttttttttttttttttttttttagctaagctaacgtttccctttcttggcagggagctttccccaattccttgcacagcgcctgtggctggccgtaactaacctcggcatcacaagcctcgccctgcccctcggagccgcgctagaccccgctgggcgccttctcgtctcccagcacggacctggtgttcgcagggactggggctctttgggtccgggcgggactgcgtggccgaacccgcgggcccagagccggcagccggggaaagtgggctcgagtttccgcgcccgagaaaygagcgccggcgccggcgggcggggccggggcggagggatctcctgcgctcggggagcgtgaggcgccggcgccgagctgggcggccgggcgcggggagagggcgcggggagagggcgcg

SEQ ID NO: 180635 - DNA, 543 bp, Homo sapiens
aatttagagatctcttaaaaatactttaaaaatgtgacactgaactgaactcgaaattccaaattttaatcatgagttaaattctactgacgctttcactatgttgatagaaaatgagagtggagaagagcacagtgagggagaacacwgagttctcaacttaataattttgtgtttttatcataacatgtgaaatgaaaagtttaataatgtcctgttccataaaggctagaatgactacttgtgcttgtaagaattgtgaccgctcagtaataaatatgcggcgtttaacagaattggtgcattgtgtgatgctgtgtctcacctaatgtcctgtctctgtggcgtgtgaaacccttcgaagacttgagcttgaggtcatctaaacacttgaatatatgcagttaggttttcagcacaggggctgtgttctgttttgtgaagaatgtgcagtcacagtaattgatggaagcattttacatgaaggtctccctaatgaagaaatatgaagatattaatatctgatttttactgcaaaagtta

SEQ ID NO: 180636 - DNA, 560 bp, Homo sapiens
gtattcccttcaactgaggtgagcattgctctctctactaaaaaagagaatactggcaggtcctgagctttgctctatctggtagkttgcatttgtagatgagtccgtctctaagcagccagcaagctgtaagcacaccggttgtgagaatctgtataaggaaatctacttccctcagttaaactctctacaccaaagtaaattcatcaacctcagattcctactctaaattcttggactctgactcacttatgacaatcctggaagctggaactcaaatatctatgggcagtcagcaaataaaggcctgaagagctgtaatcaaccaactgttccattaaaacagacaactactgtctggtttagaaaaataatggatttcttacttccagatgattaaagatgcattcatttggtactgctgcctttagaagagttccccatggtgcaggaaggcagaaagtttgtgcaccataattatttgagaattttcacccccccccgacattctgaagaaaacatgtagcgatttttttcctgcattcttcctccacattcat

SEQ ID NO: 180637 - DNA, 518 bp, Homo sapiens
gtacaccgtctgctcttggtgtgtgcctccctggattggcttggccgttgtcttttgctcagtgctgttgaagacccactgggaaggccagctggcactgaccacagctacagggagctttggttaagaaagctcattaagtttcatcaccctcttcgtggtggaggccagtagttctaggacactcctacttatcggtcaggcacattgaagcagctgcttccagtcctctaagtcactcctggcatgatccaagcacctcatttcatgcctcggactgtaggcctgtcctcccacctggagtttgtaggtcatcactagagcgcacctgctcacctggctgcctacatgctgcaggctgctgccggggggccgtaatttgcacctgcacactcgtgtgcttggcatactgaggctctattagtcaggctgcccaaagggccccagcaagagaagcaggaagtgaggcaaactttsaccagtgggggaagagagacaggaaggggctggccgattat

SEQ ID NO: 180638 - DNA, 547 bp, Homo sapiens
ccctgtcttcctgagtagcctccaggaaagtcagcacgtctctcaaccaactataaactttacctatggaaaaatgaagtgttgggccattagatgatctcttagtgctcacctattttgagacttcagtgagataatatttttaaagtgctccatttagtgcctgacacctgattctaataacaaatacttttatagcctrtattatgtgccaagtgttctaatcattatatgcatgttagttgaatatactattattgtctctattttagaagaaaggaagctgagtcacagaaaggctggttaacctgctcaaggttatgcacctagtaagagacatataaagctctcagtaagccgtagttgttgacactttctgaagctggcagttttggtcgttgatgtgctgctttacgcttttcttttttctctctaggtgtcatagagacgtcagatcgactggaccgtgaatcgacctcccattattggctaacagtctttgcaaccgatcagggtgtcgtgcctctttcatcgttcatagagatct

SEQ ID NO: 180639 - DNA, 500 bp, Homo sapiens
agaaaaaaaaaaaaacctgattgaaaaatgggcaaaggacttgaatagacatttctcaaaagaagacatacaagtggccaataagtacatgaaaaaatgctcagcatcactaataattagggaaatgcaaactaaaaccacagtaakatgtcactttacaccttttagaacggcttttataaaaagataaaagatacgtgtttgagaagatgcaaagaaaaggtgctattttacgttgttggtgcaaatgtaaattagtatagccatcatgaaaaacagtatggaagttcttcaaaaaactaaaaatagaactaaattatgttctagtcatcctacttctaggtatatagccaaaaaaatgaaatcaatatgtgcaaggtatatctgcactcccatgttcattgcagcaatatttgcagtagccaatatatggcataaacctaagtatccaacaattgaacagactttttaaaatgcagtatatatacagaatggaattc

SEQ ID NO: 180640 - DNA, 506 bp, Homo sapiens
tagaattcaaacaactcagtagtaagaaaaaaaaaaaaacctgattgaaaaatgggcaaaggacttgaatagacatttctcaaaagaagacatacaagtggccaataagtacatgaaaaaatgctcagcatcactaataattagggaaatgcaaactaaaaccacagtaagatgtcactttacaccttttagaacggcttttataaaaagataaaagatacgtgtttgagaaratgcaaagaaaaggtgctattttacgttgttggtgcaaatgtaaattagtatagccatcatgaaaaacagtatggaagttcttcaaaaaactaaaaatagaactaaattatgttctagtcatcctacttctaggtatatagccaaaaaaatgaaatcaatatgtgcaaggtatatctgcactcccatgttcattgcagcaatatttgcagtagccaatatatggcataaacctaagtatccaacaattgaacagactttttaaaatgcagtat

SEQ ID NO: 180641 - DNA, 503 bp, Homo sapiens
gaattcaaacaactcagtagtaagaaaaaaaaaaaaacctgattgaaaaatgggcaaaggacttgaatagacatttctcaaaagaagacatacaagtggccaataagtacatgaaaaaatgctcagcatcactaataattagggaaatgcaaactaaaaccacagtaagatgtcactttacaccttttagaacggcttttataaaaagataaaagatacgtgtttgagaagatgcaaagaaaaggtgctattttacgttgttggtgcaaatgtaaattagtatagccatcatgaaaaacagtatggaagttcttcaaaaaactaaaaatagaactaaattatgttctagtcatcctacttctaggtatatagccaaaaaaatgaaatcaatatgtkcaaggtatatctgcactcccatgttcattgcagcaatatttgcagtagccaatatatggcataaacctaagtatccaacaattgaacagactttttaaaatgcagta

SEQ ID NO: 180642 - DNA, 503 bp, Homo sapiens
gaattcaaacaactcagtagtaagaaaaaaaaaaaaacctgattgaaaaatgggcaaaggacttgaatagacatttctcaaaagaagacatacaagtggccaataagtacatgaaaaaatgctcagcatcactaataattagggaaatgcaaactaaaaccacagtaagatgtcactttacaccttttagaacggcttttataaaaagataaaagatacgtgtttgagaagatgcaaagaaaaggtgctattttacgttgttggtgcaaatgtaaattagtatagccatcatgaaaaacagtatggaagttcttcaaaaaactaaaaatagaactaaattatgttctagtcatcctacttctaggtatatagccaaaaaaatgaaatcaatatgtgcaaggtatatctgcactcccatgttcattgcagcaatattygcagtagccaatatatggcataaacctaagtatccaacaattgaacagactttttaaaatgcagta

SEQ ID NO: 180643 - DNA, 446 bp, Homo sapiens
gaaggagtaaaggtcaggcgggcaaagtagatggatggttggatggatggatggatggatggatggatgggtggatggatggatggrtggatggatggatggatggatggatggatggatggatggatgaatggaagcataggtgggtgggtaggtggatgaaaggatggtaagcgggtggatggatggatggatttttgcaaggattggtgggtggatggatatctgagtagatgattagattaatcataaattgccaattttagagagtaatagctcatcattttgaaacagaattgtgtgttttctccgtcctcactgggtttgcccataattttaaatcattttctatctgaagtcatacagaacccatttactattgtcatagtctaaaacaaacccataatatttgaaaaggacaaaaactgtgtctgattcagcaaaga

SEQ ID NO: 180644 - DNA, 455 bp, Homo sapiens
ataatgagattagtgccctcataaaacaagcccaaggaagaacattcatcccttttaccatgtgaggacacagcaagaagttggcagtctgcartccagaagagggttttcaccagaatccaaacatactggcaccctgatcttggacttcttagcttccagtactgtaagtaataaattttcgttgtttataatctacccagtttatgttatggcagcttaaatgggctaagacaacatgcttgtaatttatccctccacctagatcctaaaaatttgagaagacttacaataaaggcaggtatacttagcaggctggtcagtgtgattattattcatatcagaaggtagcggaaccaaaatgcctttcaacagggcaacagacaaattaaagtatattcatacagtggaatattattcagcaattgaaaagaatactgctgctatatataaca

SEQ ID NO: 180645 - DNA, 594 bp, Homo sapiens
aatccagaaccacctgagcctaggcatggaggtcagaaaggtcaagatgagctgaaggaggcagaggacatttcagataagcttaatatttctgtttgcagcagaggaaaatgtgactctttaaatttttggatgctcttctctgaagatagggtagcctcagcaggggctttccactcaatctcacygttggaaaccttattttattttattttttttttgagacggagtctcactctgttacccaggctggagtgcagtggtgcgatctcggctcactgcaagctctgcctcccgggttcaccccattctcctgcctcagcctcctgagtagctgggactacaggtccctgccaccatgccctgctaattttttttgtattttcagtagagacggggtttcaccgtgttagccaggatagtctcgatctcctgccctcgtgacccacccgccttggcctcccaaagtgctgggattacaggcgtgagccaccatgcccggctcgttggaaacctttacctgtcacatctcctcagagaatgaagagacccttcatgtctcacgaagttaacagtaaaagccaacgtttattg

SEQ ID NO: 180646 - DNA, 594 bp, Homo sapiens
aatccagaaccacctgagcctaggcatggaggtcagaaaggtcaagatgagctgaaggaggcagaggacatttcagataagcttaatatttctgtttgcagcagaggaaaatgtgactctttaaatttttggatgctcttctctgaagatagggtagcctcagcaggggctttccactcaatctcaccgttggaaaccttattttattttattttttttttgagacggagtctcactctgttacccaggctggagtgcagtggtgcgatctcggctcactgcaagctctgcctcccgggttcaccccattctcctgcctcagcctcctgagtagctgggactacaggtccctgccaccatgccctgctaattttttttgtattttcagtagagacggggtttcaccrtgttagccaggatagtctcgatctcctgccctcgtgacccacccgccttggcctcccaaagtgctgggattacaggcgtgagccaccatgcccggctcgttggaaacctttacctgtcacatctcctcagagaatgaagagacccttcatgtctcacgaagttaacagtaaaagccaacgtttattg

SEQ ID NO: 180647 - DNA, 594 bp, Homo sapiens
aatccagaaccacctgagcctaggcatggaggtcagaaaggtcaagatgagctgaaggaggcagaggacatttcagataagcttaatatttctgtttgcagcagaggaaaatgtgactctttaaatttttggatgctcttctctgaagatagggtagcctcagcaggggctttccactcaatctcaccgttggaaaccttattttattttattttttttttgagacggagtctcactctgttacccaggctggagtgcagtggtgcgatctcggctcactgcaagctctgcctcccgggttcaccccattctcctgcctcagcctcctgagtagctgggactacaggtccctgccaccatgccctgctaattttttttgtattttcagtagagacggggtttcaccgtgttagccaggatagtctcratctcctgccctcgtgacccacccgccttggcctcccaaagtgctgggattacaggcgtgagccaccatgcccggctcgttggaaacctttacctgtcacatctcctcagagaatgaagagacccttcatgtctcacgaagttaacagtaaaagccaacgtttattg

SEQ ID NO: 180648 - DNA, 594 bp, Homo sapiens
aatccagaaccacctgagcctaggcatggaggtcagaaaggtcaagatgagctgaaggaggcagaggacatttcagataagcttaatatttctgtttgcagcagaggaaaatgtgactctttaaatttttggatgctcttctctgaagatagggtagcctcagcaggggctttccactcaatctcaccgttggaaaccttattttattttattttttttttgagacggagtctcactctgttacccaggctggagtgcagtggtgcgatctcggctcactgcaagctctgcctcccgggttcaccccattctcctgcctcagcctcctgagtagctgggactacaggtccctgccaccatgccctgctaattttttttgtattttcagtagagacggggtttcaccgtgttagccaggatagtctcgatctcctgccctcgtgacccacccgccttggcctcccaaagtgctgggattacaggcgtgagccaccatgcccggcycgttggaaacctttacctgtcacatctcctcagagaatgaagagacccttcatgtctcacgaagttaacagtaaaagccaacgtttattg

SEQ ID NO: 180649 - DNA, 668 bp, Homo sapiens
ttcttgcttgaagtatactttgttgaaattccaggaccttaggctgcctctagaacagaagccatccagctgagcacctggaaaataccattttccacttgtgtttatyaggagctccctggtcatagactttttaaaaatgtaggaggtacaagggaaggtttcatgtatgcatgtattttgcagtggtgaaatctgagctttttgtgaacccatcacccaaagagtgaactttggacccaataggtaatttttcaaccctcaccttcttcccaccctctcacctttttgtagtctccaatgtgtattatttcactctgtatatccatgtgcacccattacttagcttccatttataagtgagaacatgcagtatttgactttctgtttctgagttatctcaggataatggtctccagttccatccatgttgctgcaaaatacataagtttattctttttaatggctgagtagtattccatggtgtgtgtgtgtatatatatatatgtatatatgaacatgctataaatatccttatgtatgtcctaaaaatgttcattgttaaaataaccttttaaaagtacagtttccacttgttaacaaagcaacagatgagtatttgtttagatttttcagctttaattcaaatatatgacatattggtaaag

SEQ ID NO: 180650 - DNA, 668 bp, Homo sapiens
ttcttgcttgaagtatactttgttgaaattccaggaccttaggctgcctctagaacagaagccatccagctgagcacctggaaaataccattttccacttgtgtttatcaggagctccctggtcatagactttttaaaaatgtaggaggtacaagggaaggtttcatgtatgcatgtattttgcagtggtgaaatctgagctttttgtgaacccatcacccaaagagtgaactttggacccaataggtaatttttcaaccctcaccttcttcccaccctctcacctttttgtagtctccaatgtgtattatttcactctgtatatccatgtgcacccattacttagcttccatttataagtgagaacatgcagtatttgactttctgtttctgagttatctcaggataatggtctccagttccatccatgttgctgcaaaatayataagtttattctttttaatggctgagtagtattccatggtgtgtgtgtgtatatatatatatgtatatatgaacatgctataaatatccttatgtatgtcctaaaaatgttcattgttaaaataaccttttaaaagtacagtttccacttgttaacaaagcaacagatgagtatttgtttagatttttcagctttaattcaaatatatgacatattggtaaag

SEQ ID NO: 180651 - DNA, 529 bp, Homo sapiens
ttcactgccaggatgtgtgagaagcagggcttacagctgggcagccctcatgccaaaagtgcataaacccaaaatggaagctggagggaaaagaaaggcaggcttagcacatcaatcctcccacttgctccccattggagttggagctggggmgagcagacgtaaaaacatcaccagctggtgtgtttcctggcagggacaccagccgtagccttgcccgcccccagacataatactgcagcaaacaacttccatctgtagctccatttcctttatttactagcactactaggcaggagaggagaacaaaccaatgttttggaggcccatcaggacctgggcgttgcctccagcagaacagtgttgatggatggtagacagtcaacagacaaagcctcattatacttgtaaacccaaatacaaaataaatgattcttcttttgcattactgctgcagcgcctgctctcagcacctgccctcatgcctaccctgttcacacttctctctctcaacagccctaacagttca

SEQ ID NO: 180652 - DNA, 529 bp, Homo sapiens
ttcactgccaggatgtgtgagaagcagggcttacagctgggcagccctcatgccaaaagtgcataaacccaaaatggaagctggagggaaaagaaaggcaggcttagcacatcaatcctcccacttgctccccattggagttggagctggggcgagcagacgtaaaaacatcaccagctggtgtgtttcctggcagggacaccagccgtagccttgcccgcccccagacataatactgcagcaaacaacttccatctgtagctccatttcctttatttactagcactactaggcaggagaggagaacmaaccaatgttttggaggcccatcaggacctgggcgttgcctccagcagaacagtgttgatggatggtagacagtcaacagacaaagcctcattatacttgtaaacccaaatacaaaataaatgattcttcttttgcattactgctgcagcgcctgctctcagcacctgccctcatgcctaccctgttcacacttctctctctcaacagccctaacagttca

SEQ ID NO: 180653 - DNA, 528 bp, Homo sapiens
gaagtaaagatttgttacaatttttgcatattatcttattattaaaatgcatattatgctatttttactgtttttgcctcaaagttgcctgtcttttaacttttagattctcagggtatttttggttctgacagttcaatatttgtgctaatgactgacattatactaataacttttataatgtttatagtgsctttttattttacttaaatttccaatatttaatttttatgatataatgtgacttttttcttattaactatgcaaaataatttgggtttattccactttctatgttgtttgttcttcctcttcatctttttagtcatcacatttctaatatgtaaaaatatgatatctccatatttttatcctacaggtttatctggttttataattttctttaaagtaattaaatataatcatgcttactatcatatatgttgccagttttctcagccattaatgggttgcttgaagcgtatcttctagtatagtcatttgaaaaggtctacgactatagctctc

SEQ ID NO: 180654 - DNA, 415 bp, Homo sapiens
gtagcctgagatgggatctgaagctggttctaaaggatgccctctagggattaaagacaggtaaaaatttccaccacttcagcttggctttgtgkgtcgactgtgctgttagctgatacctgtgactgtgtgccactattgtcaggtatacaaagctaccaccatgatttgcacacttgttggtgtaggctacttgctttgtttctacctcaccccagatggtctagctacactgtcacccctgtgtttcctgtgaggtgagatgggagtgggcttcttgagaagtaactcaaaatgctagggaagctgtatgtccacctccagttctctgtttccactgtagaaaccatgggccctggggaatcctctctgtgtgctactgtgccaacttcaggaagaggtagggatgacacaa

SEQ ID NO: 180655 - DNA, 576 bp, Homo sapiens
gtgtggtggtggaagcctgtagtcccagctactcggggaggctgagacaggagaatggcgtgaacctgggaggcggagcttgcaaagtgagccaagatggcgccactgcacttccagtctgggtgacagagtgagaactctgactcaaaaaacaaaaaacaaacaaacaaaaaagaacagaggcctgaatggataaaataaggaagcctatcaatttgttgcctacaagagacacactttatctataaagacactcgtagactgaaaataaaggcamagaaagaaatattttatgtaaatggaagccaaaaaaaagcaggaatagctattcttatatcagacaaaatggattcaaaaacaaaaactataaggagagacaaaaaatattatataatgacaaagggtaaattcattacgataatatagcaattgcaaatgtatatgcacccaacattgaacacccagagatataaagcaaataattttagagctaaagacagagagagaccccattacaataatagctggagcctgcaacatcccactttcagcattgcacagatcatccagacagaa

SEQ ID NO: 180656 - DNA, 548 bp, Homo sapiens
tataaatttcaaaaaaataaaaacattggcccatgaaatttaattgaaatactaggttgtatataataatgcttaaatattattttgtaaagacacagttgaaaaattctaaataactgacagttaaaagaagttaagagtattaacaattaaatacatacacattatatggagacatgcttctaacagaatctgaaggtttagccatttcaaaaactaaatatttgraaacatttaaatatataaaagtatgtatatgtttcaatatatagtctgcatatattttaaccataatgttattcatcgagatagcacttgagaaaaagcgtgctgtgtggtttaaaatgatacagcttgcctttcactccacttcactagactatctataattttaagaaataatgtcaaattgattaatcatttggaatacaattttcttaatataatagctttcacctattattgtgatgattctaattataaatctatagacaagtgtgcaatagagcagacgttatttttttacttaagggtgatgtgataaaatg

SEQ ID NO: 180657 - DNA, 580 bp, Homo sapiens
gatatgtttttactttgctcatagttgtatcccaaacccctagataggaagagactgaataaatatgaattcgggcattaatgaattgtgtaaacaactgtagtctcagctgatacattgagactttagttatcttaagtgtcatcaaaacctattagtttgctaaacataaattaatgcacatactttggagtaaaggtaaagaacacatttcagtgaatatgctttggcatcatctgttttcttacattaattaagcaagaaaaactattctcattaaaagagacactaaggttrcgttttatcttgcatacttgtgcttcttcattttctttttcgtttttataaatacactaaaatgctgagacttgtattcaccaaacttagagacacattgaaggtaatcttaaacattctctccagcctgaatagaatgttatactctcaatagattttatggttttcaattttccttcacaaatcttaagtaatctccatttctcaaagcctaatgtatttcaatgtatgccatctgtaactcgatttcttcttcttcaaaaatgctgaagtctacttaaat

SEQ ID NO: 180658 - DNA, 432 bp, Homo sapiens
aaacaactgtagtctcagctgatacattgagactttagttatcttaagtgtcatcaaaacctattagtttgctaaacataaattaatgcacatactttggagtaaaggtaaagaacacatttcagtgaatatgctttggcatcatctgttttcttacattaattaagcaagaaaaactattctcattaaaagagacactaaggttgcrttttatcttgcatacttgtgcttcttcattttctttttcgtttttataaatacactaaaatgctgagacttgtattcaccaaacttagagacacattgaaggtaatcttaaacattctctccagcctgaatagaatgttatactctcaatagattttatggttttcaattttccttcacaaatcttaagtaatctccatttctcaaagcctaatgtatttcaat

SEQ ID NO: 180659 - DNA, 589 bp, Homo sapiens
ctgattcccctactattaatgtttttatccagatatagcattacatcttctgtagcttttgtttcataaagataatttctgactaatgtagtccataaatattgagggacaatatttcttcattgtaaattatgacttttagcagtaaaacaaacttttcacatttgatgctgtttagttgaattatatttttgtaaaatatcatgatgagtattcttacttttycccccatattttgcatattcctttgactacacattaatttcagtatttctgattaattttaatttatgtccattttacagataatagttgcatcttgctttgtcagctagattagaacttttttatttgtccattaaagaaaatcttttttattgataagttttatttccaccccatcatactattttataattaaacttgtgtgaatacgttacattttttgacaaaatgtgtattatcatcttttaagaataaatttatatttcacatggttcatatttttgttccagttagctttggaattataccttaagatcctaagttcactgtttagattttaactagtttgtcatttttaaatggt

SEQ ID NO: 180660 - DNA, 552 bp, Homo sapiens
catattttgtgtttttgagaaatagagctaaataataaatctcaagaagaattcaaagttatattttaactttagatgaatgaacaaagatgcaaatgtttactataactttgagaacactagctttgtttgttagtttagtactaactttgagaactaaagttgtctactataactttgagaacactacaaatttgagaacaaattgtatgctttgtgtataaatatatgctttaatgcacatttgaaatgtactctagaagtctggttctagttcaactaaatatcatttaaaatataacttttgcacatattatatagtctgtattttaggcgtaaattcaggagtacaaacgatgatactgaggcatactgatttcctgcatcttrtaagtaaactttgaagtcaataagcaaaataactaacaaaattactccctttgtcaatctggggaatattagttttaccttcacttctagaaaatgagaccatctcataaacaacaaagacaaacttttttacacataaaacacactcatactggtggggag

SEQ ID NO: 180661 - DNA, 417 bp, Homo sapiens
taaaaagaaaagaattgagtaggcctttagacaaatagatcaaaaaacaaacyaaccatattttttaatgtaataatcctgagtacttaatgattgttgagtttttggtttacacggacttcaaatcaaacaagtttaaagtaccactttgctatatgattgatcaatacctttttttttttttggtttaaacttatcttatgtggaattacatgtcttgcatttcctgatcagtaatgccattaagacatttttttcttgaaaaaggaccagaagacttaagtcttgaaaaaggacttagatgactcctaaggcaaacttttcttggtcagttttaaataatgaaaacaaacaaacaaacaaacacttattttgcaacaagttgcaaaacggtgaaatcagtcctttaaatgagtg

SEQ ID NO: 180662 - DNA, 396 bp, Homo sapiens
aaatattaaaactagtgcctctcatggtaatatttactgatctcttgtgaccaaaggctttgatttctatacccatgtcaaagacaagagagccttgtctgtggtrtgatcacataaccatataagatgagatattaagtttgtaaacacaagcctctgtattaagctacagccatcagtctaaaacttccatgaaacagtatgctaggtgaaaacaaacataccttatgagagagaagacttcttttttttcttaatcactagtaactgctgacttctgctgttctacttaccatttatttcttatctctctgacctcttaattttgtagtgtgacaatgtccaggattttgaaatctttattttatattagtattaattctcttatagtaccac

SEQ ID NO: 180663 - DNA, 416 bp, Homo sapiens
tgattgtttaaaagtgtgtagcacttcccacctctctctcgatcctgctcctgccmtgtgagatgacgctcctgtgccttccaccatgagtaaaagctccctgtgacctccccaggagcagctgtcgccatgcttcctgttcagcctgtggaaccatgagtcaattaaacctcttttctttataaattatccagtctcaggtattcctttatagtagtgtaagaatggcctaatacaagaaattggtactgaggagtgggggcattgctatacagatacttggaaatgtggaagtggttttggaactgggtaacaggtagatgtcagaagagtgtggagggctcagaagaagacaggaagatgaggaaaaatttggaacttcctaaagacttgttaaattgttatgaccaaaatgc

SEQ ID NO: 180664 - DNA, 588 bp, Homo sapiens
ttgtttaaagatgtgcagcacctccccactctctcttggttctgctcctgccatctgagactcctgctcttgctttgccttctgccaagagtaaaagctccctgaggcctcctcagaagcagctgctgccatgcttcctctacagcctgtrggactatgagccaattaaacctctttgctttataaattacccagtctcgagaatttcttcatagcagttgtgggaatggcctgatacagtaaataacccaattcttatgttttagggtttttttctaaaaatttatatgaacaactttaattttaaacacatattatgaatttacatttagtcccctatgtcttctggtattttcctttttttactaagtggcaccaactctgaatggctatgccaatgagttttcatatattcttagagacatctttcaagcctacaatatcctttcatgaaaaaagtctctgagataatggatctggacacttcactatttgctctattaagcctatagtccttgacgattaacctagtagaggtaatgtaataagtcagattaatatgctcaatatttaagatgtcaacgttat

SEQ ID NO: 180665 - DNA, 363 bp, Homo sapiens
catcattaatcagaaatattcaagtaacagttgtcaaatatatcaaatttgttcagttcaatgaaaacacaaaaagcttctctaaaattagatgcagcgattcatacatctgatgcaataaatcaagatttttcattagtaatgtgtataaaagtagctatgaattatgtaaactgaaatcaggacttagtgataaatcttttaacaatttataatttaaagaaattacaatgtaatagcataactttctcaacacatgaaaatatgstattataaagcatagagagtaatttattgagaatacactaaattttcataacatgcaaagctttatgtaacatgactattggtactacagtcctt

SEQ ID NO: 180666 - DNA, 570 bp, Homo sapiens
atttatttgaggcaagcagttaaaaagtaagaggcctcaatgtcccttccatttcatggatttcctaataatatgcagtaaaaatcaaaatatggcacatgatcttatgtagaaratctcagcaccaaaatgaaaatgagttgtggtcaattttatctaaatcagagctattctatttatatgagcaatatttaagaagactaattacagtctgcctctgacttttttcctgcttcctacttttccagcagaggccaagatggatatgctaatgggatctagtgcttcttacctgatggacaggttctataccattatcgagccaatcctaaccactggaaggtgttaggcccatccccacctcaggaagctccctgaattggcccttctctgtatcactgggtcactgctgggagcctactttctggttctgacccaggtaacctagctaatactatcaattctatctagatctggtgttctcatccctaatattaatctcacagttggaagtcaagtcccctgtggtttgcttcatgctgattctcttttctaggacttaagacttcc

SEQ ID NO: 180667 - DNA, 526 bp, Homo sapiens
cagatgtgagcatgtgactcatttacctaaaagacttcatttattccccatttcccttcaaagtaaaatcccaaaacttagatatggaaaataaatggcagacaggaggcaggtctaacttgcagcaccctctcagccagaaagaccagcatgtggaggctcacattgtgaacttttactctaaaaacaggaacataccaggaaaactgaaggaacccacagacactttgaaggaggtggattgctctgcaggctctgtgggacagtggaggaactgtgaatcrgcttgctttctcagctgggaggcttgtggcctggggcaagttctgagcctggggcagctcaccagctacctggaaataaactcagtgctgttcagggagcacggtgggagtgagactggccttttaggctgtgggccacataggagctgggtgaggcctgtggctgccagctttcccccatttccctggagaccagtgtgacacagaagaggcaaacataatcctctgtgaacataaattca

SEQ ID NO: 180668 - DNA, 563 bp, Homo sapiens
cattagtccttttttatgttgttgttgctataaaggaatacctgagactggtgagtttataaagaaaagagattttttttggcttacaatttttcaggctgtacaggacatatgatgctggcatctgcttctggacaggcctcaaggagcttacaataatggtggaaggtgaagaaggagcaggtgagttgcatggcagcaagagaagcaggggaggtgccacacatttttaaacaaccagatctcatgtgaatgcagagtgagaactcactcatcagtaaggggatggcactaagccatgcatgagggatccacccccatgatacaatcatctcacaccagkccccacctccaacactgaggattacatttcaacatgggattagaaagagacaaacagccagaccatatcaagacttttcagattgacttctttcatttactaatgtgtacctaagtttcctccatagcttttgtggctagacagttcatttctttctagcactgaataatatttcatagtatggatgcaacataatttatctattcatctactaatggac

SEQ ID NO: 180669 - DNA, 405 bp, Homo sapiens
aataccaaagagctgaactgctagacaattaggtaagtgtatgtttaactttgtaataaattgccaaactatcttccaatgtaactgcaccattttgcatttttcccagcaacgagtgggagttcctgttgctccacattcccatcagcatttggtgttgtcagtgttgcasattttggtcatccaatagctgtgtaacagacgaagtagctcattgttattttaattttcatgtccttgataacataagatgaaaagcatctattcatgtgcttatttgacatatgtatatattcttatttatatgaggtgtctgttaaggtctttggcccatttttaaattaggtttttgtttttttattgttgaggtttaagaatattttgtatgttttggataacacttct

SEQ ID NO: 180670 - DNA, 477 bp, Homo sapiens
atttttctgcctgcaatttctttcttctcttaccagaaatgatctgagttccayaggacctcatatatccttcttatattgagagaaaggaatcagtgctaaggtgatttttccccctgctttttcatatttgtggtctttcttattttctagtttcatatcacaaacaatgcaaagtgggtgcttgaggggagctggtggtttcctcctgctgaatccaccctgcattagatcttactggcaccagtgatcctcagaggctcagatgttttctctagctgcccctaagcttatctgttcacagtgcagcctctggtatgagttttccttgcttacaactttacaactttggaatctccttaaatataggcaaatctgtggctctcttcatccctttgttgatatgaggacaaccatggtgaagaccacataggccctacatctgcccagacctgtgaggtagttatttttactctg

SEQ ID NO: 180671 - DNA, 480 bp, Homo sapiens
ctaccctcctgccctaaattcctgatgaacccctggcatcactaatccctgctatactcctataatttagtcatttcaataacattgtttaaatggaatcatatgatatgtatcctgttgtgactggcatttttcagtcaacataactctctgagatttatgcaggcttttgtgtaaggcaataatttgttctttttcattgctaagcaatatttcatggtatgaatatcttgcagtttatttaactattcacccactgaaacacaatctgggttgtcttcagttttggctattacaaatggaaactgcgtaaacattgtgtgcaagtttttgcatagacatatgtcttcatttctacggggaagatgcccaggaatgcaattcytgaaacgtatggtagttgtatgtttacatttttaaaaatgccaaacagtttttcacagtgggtttgcaactttacattttcattagcaatgtatg

SEQ ID NO: 180672 - DNA, 411 bp, Homo sapiens
gtaaaattgggatacacctatttaataaagaataatatgaagtgttttaaagtgacttgtctgcttagcaagaatctgactgttacccaatgaatgttaaaagaaaattgcacccaagagaaactagacattagaaatgaggggtaataatagtctaggaataagaaacgacagatggaaaagtatcagttgggaatgaacaggaagttgaaagaaataaaaggraagtaactctatacactggtggatgtgaagcatgatgatatagggaaggaagttgatcaggtatgctaagaatagatcgattggagttaatttgccgcagttataagtttccattgaatttcaatattgatgaaaaacattgaataattttaagaaaaagtatgtaatgatgtggtttatgttttt

SEQ ID NO: 180673 - DNA, 595 bp, Homo sapiens
aaacaaacagcaaaagctatgctgaatcctgctgattttttttttttttgtagattattaggtaaatttcagtgcattccacctgtgtcttaatacttcttatggagagagttcagatttgggatgaaactgacacaaaatacattatggaacacaaaagagattaacaacactcaaatgtcaaatgactcaaacctaaatagtctaattttcttataaatacccaggttcgaggatgggttatgtrttagccaatatgggcattgtgctattaggaaaaaaatgattaaattctcactctttgtaactaaaaatattttaatgaaaaatacatgaaattaactttctcatttaaaagacaattttatatttctgttttatttttagcacctctgtgggcatgggggcatagtcagctcaatttaaacactgctacactttgttgatattgttatttaaattaattacaggtttgaagtacaataaaggcatggattaattccctttcccttaatattggtgaaattatattaaagcaaatgtttatttaaactatattaaaccacgttttcagtatttcttatgtgttccatcc

SEQ ID NO: 180674 - DNA, 595 bp, Homo sapiens
aaacaaacagcaaaagctatgctgaatcctgctgattttttttttttttgtagattattaggtaaatttcagtgcattccacctgtgtcttaatacttcttatggagagagttcagatttgggatgaaactgacacaaaatacattatggaacacaaaagagattaacaacactcaaatgtcaaatgactcaaacctaaatagtctaattttcttataaatacccaggttcgaggatgggttatgtattagccaatatgggcattgtgctattaggaaaaaaatgattaaattctcactctttgtaactaaaaatattttaatgaaaaatacatgaaattaactttctcatttaaaagacaattttatayttctgttttatttttagcacctctgtgggcatgggggcatagtcagctcaatttaaacactgctacactttgttgatattgttatttaaattaattacaggtttgaagtacaataaaggcatggattaattccctttcccttaatattggtgaaattatattaaagcaaatgtttatttaaactatattaaaccacgttttcagtatttcttatgtgttccatcc

SEQ ID NO: 180675 - DNA, 581 bp, Homo sapiens
ctcagggcacatgagtctttgctccattaagacctttaactgattggatgaggctcattcacatcatcacagacgatctgctttactcaaagtccacttatttaaatattaaactcatccacaaatctcccttacagaaatatccagaataatatttgactaaatatctgggcattgtggcccagctatgttgacacataaaattagccatcacaataagagacacaaaggtgacataattaaaaatttggtaaaaaaaaaaaacacttttgagaaaaggatattttctttgacttttaagagtgggtacgaagatatctgtgtccagggtgttacatacacaatgggtgggtttagtcacttggcaggtgacagcccaatgactgcaatcgaggaggatttgacaagtagggagaacacctgagatagttcccaaggcagtgcctctctggacaaaggtcatagcagagcttttgttgcactggttagctgagttattctrtgtaaaggctgggcaaaggccacataggcatagttctcgatcatggttcttcatacatcacgtctattgaaaatggcca

SEQ ID NO: 180676 - DNA, 374 bp, Homo sapiens
attacagacagaaattataggatggaaatctgcaatgtgaaagttctaaacaatgggaacagccacactaaaaaaggaattgtatgtaatacacacaatttgatatgtttaacgtataaagaaaagtgatgaaatacaacttctaatgagatctggatggggagtcagaacatgaaaaataaagattaagaatctcaagtaagtaactatactggctcaggcttactttttwacctcatcacttacaaggtctgtgagcttagaaaaatcacttcatttccacaattcagtttttccatatgctaaatgtgataataaaaatacctacgtaataaggttcatttgtaaactgtgttaccatttctggcatacag

SEQ ID NO: 180677 - DNA, 541 bp, Homo sapiens
tattggacaggttacatttattgaaaacaatgaaggcatgcagttaatcacyagatttttctaattaattagttttgtgtgtgtgtgactagaatatattttttggctaatcatagcactttctgttagagttggatgaacctggttttcaagaagtgtggccatgtccttttcactgtatgtttgtacccatgagccctctttatatcctgaagagcccctacattgcctcctgatgtgcatcactagtgccagagacttggggaggatgtgtggttcaatgcaaagagaattgaaactgagagccacttaatcctggattgcaatcccagctctgacactgagttttaccttgaaaagcctccctggacctcaatttccttatgcataaatggagatattattatccacttcacagtattggtgtggggtctaaaataaatgaaatgtaaacagatgattatatgtgctagatcctgatgctcaattgctgagcccttccaatggaatagatacacacacaaaaatgtttcatgcttac

SEQ ID NO: 180678 - DNA, 541 bp, Homo sapiens
tattggacaggttacatttattgaaaacaatgaaggcatgcagttaatcaccagatttttctaattaattagttttktgtgtgtgtgactagaatatattttttggctaatcatagcactttctgttagagttggatgaacctggttttcaagaagtgtggccatgtccttttcactgtatgtttgtacccatgagccctctttatatcctgaagagcccctacattgcctcctgatgtgcatcactagtgccagagacttggggaggatgtgtggttcaatgcaaagagaattgaaactgagagccacttaatcctggattgcaatcccagctctgacactgagttttaccttgaaaagcctccctggacctcaatttccttatgcataaatggagatattattatccacttcacagtattggtgtggggtctaaaataaatgaaatgtaaacagatgattatatgtgctagatcctgatgctcaattgctgagcccttccaatggaatagatacacacacaaaaatgtttcatgcttac

SEQ ID NO: 180679 - DNA, 615 bp, Homo sapiens
ttttttggtggctttttttaatcttttgccrttcaatagatatattttacgattctgctttcacttgttcgtcattatcttcaaaacaacatttagaaataaaaacaaaactaaataagaagaaaacaaactttttttttcctttcgggggtcccaacccactgcctgtgattgcctgagtggatggctgcgtccctgatccttcctgcctggcttctctgataaaccctgcagcacgtcccttttctctctgcagacagcattaacagaactgatcctgtatcttctaggtttcctgtacgctcagaacagcaccaagcgcagcattaaagagcggctcatgaagctcttgccctgctcagctgccaaaacgtcgtctcctgctattcaaagcaagtttgtttttttgtttttttttttcctccgaaactcttgtttcgtttctttaggcctgcatgcattgccgttctctacaaagaatcagtatattctacaaaagcaatctattgatgtactcatgtttacctaaatacccaggagaacatttgggcaattaggagtcattttccattttgcagactgacagcacagtcttagtgacaggagcctgtcctg

SEQ ID NO: 180680 - DNA, 290 bp, Homo sapiens
attcaacaaatatttattgtatgtcactgcctgcttcttgtgctgggagatggagcagtgactaaaacagattaaaaaccaaaccaaaacaaaacaaaacaaagaaagctcttctattagagcttacattatattctgtggggagaggaggcagaactaaataactttcgttagcactaagcyaatgcacatacaaaaattaaaattatagtttagatacattgctgtgatttttttctttcattgcacacacatgcacaccatctcacaaaacataacatcatcagcaa

SEQ ID NO: 180681 - DNA, 619 bp, Homo sapiens
aatgtttgaaaattaaatgtatttctcatttttaaaatgtcaaaggcaaaacttctaagtcccaaactactgtgttaaataaaccacatatcttgactttgatgtttgagaagactatcagacaaatatcaaaaagcgccattgtcttggaaatgtaccaggaagcaacacacatggcttcaagacaggaggtgacagatctatgccatagccaatggccttctcccatcgagctacctgattggtagttgagcaagagtaatagatatcatctaatgagaattaatttaggccttagaatgtcttccacctgacactagtatcgcctcaaccagagtaagaaatgagacagggatagagtcagcagtaccttggctgtgaacaaagaattgtcttgttcacatttttggcccatcccacgatcccctaggcagtcaattgccygcagctctttgaacctccatcccaggatgcggatgaatgcacagccagatgtagtctcctaatcaccatcactctgtagcactcactctgagcgtcttatatcattcattggcatcaagagctgtccagttgctgaagtcggaatcttctctctgcttaatgatcccccacccac

SEQ ID NO: 180682 - DNA, 544 bp, Homo sapiens
acatcattcctgcatttagcatatgcctaacaaatagtagtctagcaagtattttaaatggattaattaaggaactstaaactacaagacaccaaggaacagatgttcagataaatacataaagatataatctacatgacaatgaaaaggttatgttaaaagtaaaaccctgaagtgcattagaataaatatttaaaaatactatccaggacatataacagttgctatttttctatttaatgaggtatattttggatcccagtcagcaaacaactctctctaccaaaagtagctgactatagcccagcctgtctttgcagttcatggcagaagaagagcagagaacacacagggctcaggtccagagttagctcagagaaaacagaaaatccaatctcagcacagtaaacatgtaggaattcagcatctcatagaggttactgaaagcaaagaatcaaaaataataaatggttataaatagtccatgctctcagagaactttgagtgcataaacaaaacctataaatcttcagcaaatgaaaat

SEQ ID NO: 180683 - DNA, 601 bp, Homo sapiens
gtttcatatgtcacctgcaaaattgaagaataacatctcatagatgctttgcaaagacaatgaatgtaaagcaaaaagcacagaccctgtctcatgacaacactcaaaatgtagctgctattattgttattgctattatcattatcactattagcaccattattatcatgccagtactctgaattgtgttgtataatctagaagttctttcttaaagtttctttttccccctctcaaactttgattcayattatgtacatatatatatataaatttgcttttgaaaaataacctatctatatatatatatataatatagatatatacatggtatacaatatagatatctacttgctttttgaagaataatctaaaataggggaatctaatatattcttatatctatgtgtatagatatatagagatagatgtctataggtagatatttgctttttgaaaactatgtatatctatatctatagatctatatctctatagatgtatatatgctttattcaaattggaatatagttgaatttgggtacatgctaagcactggatgtctaatgacttacttgttagacatcactttataagtttt

SEQ ID NO: 180684 - DNA, 601 bp, Homo sapiens
gtttcatatgtcacctgcaaaattgaagaataacatctcatagatgctttgcaaagacaatgaatgtaaagcaaaaagcacagaccctgtctcatgacaacactcaaaatgtagctgctattattgttattgctattatcattatcactattagcaccattattatcatgccagtactctgaattgtgttgtataatctagaagttctttcttaaagtttctttttccccctctcaaactttgattcacattatgtacatatatatatataaatttgcttttgaaaaataacctatctatatatatatatataatatagatatatacatggtatacaatatagatatctacttgctttttgaagaataatctaaaataggggaatctaatatattcttatatctatgtgtatagatatatagagatagatgtctataggtagatattygctttttgaaaactatgtatatctatatctatagatctatatctctatagatgtatatatgctttattcaaattggaatatagttgaatttgggtacatgctaagcactggatgtctaatgacttacttgttagacatcactttataagtttt

SEQ ID NO: 180685 - DNA, 473 bp, Homo sapiens
gctttttgaagaataatctaaaataggggaatctaatatattcttatatctatgtgtatagatatatagagatagatgtctataggtagatatttgctttttgaaaactatgtatatctatatctatagatctatatctctatagatgtatatatgctttattcaaattggaatatagttgaatttgggtacatgctaagcactggatgtctaatgacttacttgttagacatcactttataagttttatcgcaatggtaatattatacatatattcacacatacagatttgagagtcacctcccwaaaaaaagttagaaaacacagatttgttcttagccctacaaagagttgtcagaggacaaatctgaaaatagtgcctttattgtggttacttttattctgtcccttgagttcctccagaagctaacataatctttctcataatgattccctcactgggattttgcaaa

SEQ ID NO: 180686 - DNA, 598 bp, Homo sapiens
cctctcctggtctgaggaccttttggttccttctcatgcttccaatgtcatcttaaacatcatctcccctaatcacagctccatgtaggtgaaacccctgctgtgtccagtttgttccttacttagcatttatcattatctctaataattaatgaatttgtttattgttttctgagatgggaggtaaatgagggcagagttgctgctgtctggcttacccacatatacccagtaccctgtacttttcctggcacatagttgcttctcaataggcattattcgacacctgaacaagtaaatgtattcaagacaccccactgagccctctccctaatttcacttaggcagggccatgggatctctagggcttctgtgactacatctgggtttcaggaaatttctgctaatcccaactcttaccaatagaaaccacttactcttctctggaatatctggtttgtttggtccttgttttggtsctggtttcagtcctggtctctgttccaccttttcaggtgaattctatgcaggcctagactctaaattccctcttgagctacctgctatgtattcttggatcccgagatctgcagccctg

SEQ ID NO: 180687 - DNA, 646 bp, Homo sapiens
aaaataaggtcatttctacaaacaagagtaatttgtaattgtcagagtcaggcaagttatttccttgtttagtaagaagaaaggatagccctgtaagaaacagacaattcagctaaaacaaactagatttgtttcacttttctcataatctgtctgattatggtttctcttatgttagaaatatccattccactggagtctattttttctctttttgggtaaaaatcttcaatgtgagtttcccagattattaaaggtgaasatatccctttttttaatatgtggggataaaaaatgaagttcttatgttaaaggaggaggaaaagcttccgttaataaccaggtccaaagactgcctctaggagctgtgtcacactcaaaggggcataacggggctagaggatctaggcaaaaccaagcataactatatcttcagtgcaatgccatcagattgctttacaaacactaagaagagggaagttttattggagataattatgttggaacagagtttaacatggggatggataaccttggtaagacattgtacatttcagtgaatcagaggctgccgtgaaagtactgaactcctggacaaaaggaccagggagatgttagaatttacgaaagggaaaaagaactaaaa

SEQ ID NO: 180688 - DNA, 457 bp, Homo sapiens
tacctaatgttaatgggtgcagcacaccaacatgacacwtgtatacatatgtaacaaacctgcacattgtgcacatgtaccctaaaacttaaagtataataataataaaaaaaagaagctatcaacaaagccaacaggtaacctacagaatgggagaagatattcacaaatgatgtatccaacaaaggcctaataccaagaatctatacagtagggaacttaaatcaacacgctaaaaccaaataaccccctttaaaaacgggcaaaggacatgaatcaacatttctcaaaagaagacacagaggtggccatcaaacatgaaaaaacactcagtattagtaatcatcagagaaatgtaaatctaaatgacaatgagataccatctcataccagtcagaatggctattatagagaagtccaaacaccagatgctggtgaggctgcagagtaaaggtaa

SEQ ID NO: 180689 - DNA, 576 bp, Homo sapiens
atttccttctcgagtgatcaacagatttctagacaacaacccttccacccacttgcagtttgcagattgggtgagatgatttcatcctcagctccaagggtgattcttaattagcttaagtcaatcagcaaagtccacagctaagccatagtaattggattgggaataaacatgagactcargtggtacaaaggaggctggagagtagctgagctgggcttttgggagagaatctcctttgttctctgggagaactactgagagggttattctttcttcctgaaggaggaaatgcataggctggatgctgctggttaccatattgtaacaagaagaaaatcagtgaacactacacagaacaaatatagaaaaataaatgtagcaaatcttacattaagcctatgctaatttgggactttcatgctatccataattataaggatttctttttatcatcattcatgtaattcaatgttgttgttctgtaattggggcacttttgttcctggaattaccttaactgctaaaaacctggctgttggcagtgatgatcagaataaaggcaggattagataa

SEQ ID NO: 180690 - DNA, 556 bp, Homo sapiens
acagttaaaatacctgcatttaacctacagaacaacaagaattaggcggattaaagatgtgttactgttgtaacgcagaacctgtgaacaagttctttcatttcatagtatttttattgctttctatctacttagaaataagaagccaaaaaatcaagcaagcatccgacaggacaaacagtggattcactcagaacacaatatgctggtgataaatgaatgcagctatcaaaattagctgcaytggcctgggggtgaaatccatcttacaagatcgtgttgggcgagagaaaggaaaagaacaattgagtagtaggtgtatcatgtcttccagaaaagtcatgtcagccaaacagtaatcgaatctcaatttagaaacttgaatacacactccaaatgttactgaattccattccagggactccacactcagatgaaatcctgatgatcaaaatggaggtttttctgaagtttttattaaatttagcagaagcaatgtcatcaagaacaacaccatggtcacgtcagaggccatgctagtgcaagtagaaacact

SEQ ID NO: 180691 - DNA, 533 bp, Homo sapiens
ttctgtacctagggccactgcacataaacaatgagtgtctaaattcaagaaggagatggtttcgaggaaaatctcatggcaaatgttgctactttcctgtctccacagtctctcactcttcatgtctcccccatcacccaacatatatatgtggatgacagtctgtttccatagctttgtattgctgtgaattttccaaccctctacatagatcaggtcaagggctggaattgaaggggttgtttgagaagtttggatgggctgtgaggctcttggcagcttaatgagtcatcttgagtaacaagtcacacaaaatccatgacaattctcacctctcttcaaggttattccttcccctcccaaaggaaacctaagaaaaagcagtgaaatacatcagttgatttcatgagctctttttgagcggataaaataatttgagttagaatacaggctgccattgttgttgcagttacagttcaagttrcctggcaccatacaacattggaacataaaccactgacaaaaacaaactc

SEQ ID NO: 180692 - DNA, 424 bp, Homo sapiens
atgcctatttaagtcagcttagccctggagcatgatatatgtccatacctttgtttttctgtggcattttctttcaaattttccctcttgagtctttctgctgtatcatactgctataggcatttggtgctatcatgtatttctgatttctcactacatcctggacttggatgtacattttgattgacacattgttgctggtcatgcaaacatgattttactttgaatatgattttagtttgatagatgccyagtgtgtttgtcatatacatagagcctgaccatacaggattttcttttggccaactttagctctagaccattaccccaatgccatggtcattccttaggcactgcaggctttgtgccaggcctggtttctattgacctacctctgctctcttttgctccttccatattagtc

SEQ ID NO: 180693 - DNA, 496 bp, Homo sapiens
ttttactttgaatatgattttagtttgatagatgcctagtgtgtttgtcatatacatagagcctgaccatacaggattttcttttggccaactttagctctagaccattaccccaatgccatggtcattccttaggcactgcaggctttgtgccaggcctggtttctattgacctacctctgctctcttttgctccttccatattagtccaatactcgaaacactttctatatctaatgagacttagtatgaatccgttgccttggatatgaaggcttggtgtcccttcctgagcatgagttctccctgcaggaccatgagtcactgctctttgtccctactggtcctagactttatgtggtcagataacatttctgttctggtctcattgctgagttcatgcatcactgtccatttaaaacccctagttccagttaagagtcttcatttggckcctgtcaatgtctctagagattacatatttaactgtgaactt

SEQ ID NO: 180694 - DNA, 591 bp, Homo sapiens
caaacataaagtctctagcatcaagtataagtttatccctgaatgatccccaccctctcattcaaaagttattttcaccacgctctcagccccacagctccactcctactgcaatttttgcgttttgtggaatagactctattatatttctaaaattttgtaaaagctgttctctctgcttggaatgccctacctttctttctctatctgagaggctatgggagttttttccagggtggctaagagyctatgctttggggtaagacatacccgtgatcaaagtccagatctagtatttataagctatgtgatagtaggcaggttgtttatcatctaaattttagtagtattacttttaaaatgcagataacaatacctgctacataatgtcattgtaaagattaaatatgaggtgtttaatgtgatgccagggacataggaacatcaataattggcaactcatgtttgtcctctacagctagactctatgatcctcctctcttctcctaaccacacctctcatgttctgctctggaatttacattacaggatgccagagacagagtctattttgttcacatttatttagca

SEQ ID NO: 180695 - DNA, 530 bp, Homo sapiens
ggatctgcctcagaaccatcagccttctccagcaatatatggtgataataaaaaycaacccagatgtttagtttaatctaggcactttcttaaatagaaagaaaacaatcaggatttttcaaatctttatttacagaataaaatctgtgagcatagcatgtggttgtagaaaaggaggagaaggggaagaaggagtggaagaggaagaagaagaggaaggggagaaagcaggaggtgaaggaggagaaggagaaagaaggagagggagaaagaagaagaaagaacaagaagaattagaaaaggaatgtacttagtaatcaagagaggctgcataaacactatttactacttcttaaggtgtatataacaaatcactggtgcctcattttttccattactggaagggaaaaaataaaagctctataatgaattggttagcccagcttgttcataacctcaattatctcagctattctgagattcatataaacatcatgtgatgttgcaattcctcaccacctggctaacat

SEQ ID NO: 180696 - DNA, 198 bp, Homo sapiens
gcagttggttttcctttgtactaaaggagcaaagtgacaggatcawtggaaaacactaaagttcattagttagctttgctgaatgtgtgccatttaattcttccattttggtggttgtcagatatggtttcagagcttaaatggcgttaatgttttggggtgagaccatcgtggggtgtgtcataaggataaagtgga

SEQ ID NO: 180697 - DNA, 629 bp, Homo sapiens
gtcacttgctcccccttaccttctgccatgattgtgaggcctcctcagccatgtggaactgtaagtccaattaaatctctttcttttgtaaattgcccagtctcaagattgtctttatcagcagcatgaaaattgactaatacactattcaatttgcctgcttcacaattaataagtccagggacatatggaattaaccacacccttaattatgcaggaaggaatcagaatttatttatgcctactacataattaaagcaacttgccaggttttacattaaagttaaaaattgctaacagttaccataataacctgtaatagagacaatgaaaatagatttacatataacrtaagtaaggaaagtaaaatatatttttagtaaaagattataagaatgcatgaaaatgtaaatttttgccttgggttaaaggattgttttgaattagataagataaagctgaaggtttaaacaattggtgaaaggtttgtaaaaattaatcttgcaaaagaaattgtgtgaacatattgactaatttcaaaaaagtattttgtttttgtaaattgagcattgaaataaaagcacaacaaggttttctaaaggcactgatacgctctttaacaacaattt

SEQ ID NO: 180698 - DNA, 629 bp, Homo sapiens
gtcacttgctcccccttaccttctgccatgattgtgaggcctcctcagccatgtggaactgtaagtccaattaaatctctttcttttgtaaattgcccagtctcaagattgtctttatcagcagcatgaaaattgactaatacactattcaatttgcctgcttcacaattaataagtccagggacatatggaattaaccacacccttaattatgcaggaaggaatcagaatttatttatgcctactacataattaaagcaacttgccaggttttacattaaagttaaaaattgctaacagttaccataataacctgtaatagagacaatgaaaatagatttacatataacataagtaaggaaagtaaaatatatttttagtaaaagattataagaatgcatgaaaatgtaaatttttgccttgggttaaaggattgttttgaattagataagataaagctgaaggtttaaacaawtggtgaaaggtttgtaaaaattaatcttgcaaaagaaattgtgtgaacatattgactaatttcaaaaaagtattttgtttttgtaaattgagcattgaaataaaagcacaacaaggttttctaaaggcactgatacgctctttaacaacaattt

SEQ ID NO: 180699 - DNA, 262 bp, Homo sapiens
tggcattataaaattctacttcaatcctgagtaaagaataaagtgctagtgacaaattcccagttgtgttttcctttcttagtatttgagagccatagcaaatgttgcataccctttgatgttaagcagaaacttttgtctagacattgacttcrggctttaaaatacgtagtatctcccccggattaaaggtaactagtccctgatttctattaaaatataatttttagaagcttaaaatcatagctctcagacaaatata

SEQ ID NO: 180700 - DNA, 410 bp, Homo sapiens
gcctatgagcatgttatttatatgcaaaccaaccaatccagaatccacaccctcacttgactcttattatatggctcctgtggtctgggacattatccctctgctttcatcaccycagaatcaggtgctggaacactagggactaaattacacaaaaagcactcacactacccagtcttaaacctgctcagctgcttacactgtctcactcattccttccaaggaaaaccatattaaaggctctggctcatgctttagtcttgctccttttgccttcactgactctggtacttccccatatggccccagtgcatgatgtgctgtggctcctgtttccagggctttatgtgtataagaacacgtgacagtcatttctgtctctgcacgtctctccataattaaatggagac

SEQ ID NO: 180701 - DNA, 410 bp, Homo sapiens
gcctatgagcatgttatttatatgcaaaccaaccaatccagaatccacaccctcacttgactcttattatatggctcctgtggtctgggacattatccctctgctttcatcacctcagaatcaggtgctggaacactagggactaaattacacaaaaagyactcacactacccagtcttaaacctgctcagctgcttacactgtctcactcattccttccaaggaaaaccatattaaaggctctggctcatgctttagtcttgctccttttgccttcactgactctggtacttccccatatggccccagtgcatgatgtgctgtggctcctgtttccagggctttatgtgtataagaacacgtgacagtcatttctgtctctgcacgtctctccataattaaatggagac

SEQ ID NO: 180702 - DNA, 429 bp, Homo sapiens
ggtgaattcgaagattttctgattggcatttgagaactggctaaaataatttatctaaagaccggaatcaatagacaggagtgtacgggttaagataaggtgttttagagaccgaggttcttatgcagatgaagcttgcaggtagcaggcttcactgagaatagattgtaaatgatttttatcagacataaaaaggaaaaaggacttggaatcaggaaaaatcaggaaaaagacttggaaagasaacgggattctctacaaaatggagattttccccacagaaacagctttgtagggccatttcaaaatatgtcaaagaaatgtatttttttggtgaaatactttttctttcaaggcctgctatctgtcatgttgatatcttattgctacgaagagtctgttttgtcattcttaagtctctactttaat

SEQ ID NO: 180703 - DNA, 429 bp, Homo sapiens
ggtgaattcgaagattttctgattggcatttgagaactggctaaaataatttatctaaagaccggaatcaatagacaggagtgtacgggttaagataaggtgttttagagaccgaggttcttatgcagatgaagcttgcaggtagcaggcttcactgagaatagattgtaaatgatttttatcagacataaaaaggaaaaaggacttggaatcaggaaaaatcaggaaaaagacttggaaagacaasgggattctctacaaaatggagattttccccacagaaacagctttgtagggccatttcaaaatatgtcaaagaaatgtatttttttggtgaaatactttttctttcaaggcctgctatctgtcatgttgatatcttattgctacgaagagtctgttttgtcattcttaagtctctactttaat

SEQ ID NO: 180704 - DNA, 429 bp, Homo sapiens
ggtgaattcgaagattttctgattggcatttgagaactggctaaaataatttatctaaagaccggaatcaatagacaggagtgtacgggttaagataaggtgttttagagaccgaggttcttatgcagatgaagcttgcaggtagcaggcttcactgagaatagattgtaaatgatttttatcagacataaaaaggaaaaaggacttggaatcaggaaaaatcaggaaaaagacttggaaagacaacgggattctctacaaaatggagattttccccacagaaacagcyttgtagggccatttcaaaatatgtcaaagaaatgtatttttttggtgaaatactttttctttcaaggcctgctatctgtcatgttgatatcttattgctacgaagagtctgttttgtcattcttaagtctctactttaat

SEQ ID NO: 180705 - DNA, 429 bp, Homo sapiens
ggtgaattcgaagattttctgattggcatttgagaactggctaaaataatttatctaaagaccggaatcaatagacaggagtgtacgggttaagataaggtgttttagagaccgaggttcttatgcagatgaagcttgcaggtagcaggcttcactgagaatagattgtaaatgatttttatcagacataaaaaggaaaaaggacttggaatcaggaaaaatcaggaaaaagacttggaaagacaacgggattctctacaaaatggagattttccccacagaaacagctttgtagggccatttcaaaatatgtcaaagaaatgtatttttktggtgaaatactttttctttcaaggcctgctatctgtcatgttgatatcttattgctacgaagagtctgttttgtcattcttaagtctctactttaat

SEQ ID NO: 180706 - DNA, 408 bp, Homo sapiens
aatcaatccagctgtttctgtacctcacttctgatttctatacgtcactttactttgtattgtctataaattcattctgaccatgagacaccsctggagtctctctgaatctgctgtgattgtgggggctttccaatttatgaatcattcattactcaattaaactgtaaatttattttggctgaaggtgtttttttttttttttttttagcagtcctcaccataatgatccatacacgtaagtgtctaatataatctttctagctttcttttttggttgtgtttagtcatactgttgctgattcagctttgtacaaaatgtcggagcaaaatgactatcaataatatagagatctgcaaggattcccacacaggtgaaatatgcatggtggaaagaggcaattctta

SEQ ID NO: 180707 - DNA, 500 bp, Homo sapiens
atggtgttaaaaacaggattktctctgcacaagctctttttttgcctgctgccacccacataagatgtgtcttgctcctttttgccatgattgtgagtcctccccagccatgcggaactgtatgtccaataaacctttttcttttgtaagttgtctggtcggtgggtatgtctttatcagcagagttaaaatggactaatacaatcactctatcaaatgagataatatttattcctttaccactgacaactctctctcggctcttctattcaatcatgttactgatagatgctttgctttttgttgtttgttgtttaacctgatgtgttgatagcttattttatgaatttctgttcttcttttaattttacaacaattttactatttctccttacatgtgtataagtcatacggagactccttctcatctaccctgaccccagaatattaaaacttttcagagtttctggattaattccattatatggacatgatttctt

SEQ ID NO: 180708 - DNA, 467 bp, Homo sapiens
agctctttttttgcctgctgccacccacataagatgtgtcttgctcctttttgccatgattgtgagtcctccccagccatgyggaactgtatgtccaataaacctttttcttttgtaagttgtctggtcggtgggtatgtctttatcagcagagttaaaatggactaatacaatcactctatcaaatgagataatatttattcctttaccactgacaactctctctcggctcttctattcaatcatgttactgatagatgctttgctttttgttgtttgttgtttaacctgatgtgttgatagcttattttatgaatttctgttcttcttttaattttacaacaattttactatttctccttacatgtgtataagtcatacggagactccttctcatctaccctgaccccagaatattaaaacttttcagagtttctggattaattccattatatggacatgatttc

SEQ ID NO: 180709 - DNA, 361 bp, Homo sapiens
ttatcaaatatcttaatttttatgcagatagttacatatgtggtatatgtgacattttccagggagccccataaatccacaaccttctactttgttaaccataagcaattctaaacgaccaagtacattctgctaaaagcatttctgtgatagatgatcactctcctgctagcaaaaaaacaaattgtttgtcaggagctgtcattagtatgtktatataaacaaaatgggctctcttccttctgtggatcctggcagggcatctcactaatcagaaagaatcaaagaccctttcctttccagtctgctctggccttggtcaacatcttagagccaaatattgctggtgtgttatcattat

SEQ ID NO: 180710 - DNA, 535 bp, Homo sapiens
tagttttcattgctccttatgctaataactttaaagttcaaatgctaactttctatctccattttatttagaatgtataataaatctttcatgaaaaaagatggatttctttttttttttttttttttgagatggagtctctctctgttgcccaggctggagtcctgtggcgtgatctcggctcaccgcaagctcyacctcgtgggttcacaccattctcctgcctcagcctcctgagtagctgggactacaggcacccgacaccacgcctggctaattttttttgtatttttagtagaggcggggtttcaccgtgttagccagggtagtctcaatttcctgagactatcaaggcgtgatctgcccgccttggcctcccaaagtgctgggattacaggcatgagccaccacgcctggcctctatttttgaaagttaccttttgtcatttttttatctgcagtagtgtggattagaaacctggctcagtcctaccactaaaataattcttaaaagttggatgaaacattaaaaaaa

SEQ ID NO: 180711 - DNA, 575 bp, Homo sapiens
agggggcctaatcggcagaaattagtcatgctaacctaaagctttggagctgggtcttccttaaccaagggagagaaaaggctatcttgggaattggggtcctggcctaataagaaaaaaaaaaaaaaaaaaaaaaacctctcataaaagttaactccttacaaagtggagaaaagaaaaaaaaataaaataaaccagcttaagtgcagggkggggaagatgcctggaggagaaaccttttatttttatgcaaatgagttcctccaatagggagagaacattttaattgctgtctcctcctttctggctcagccaggggaggaaagacactgtgggtgcatggggagagggaagagtgagcaggaaatgctggccacctaggcaagtggggcccttgggttatgtgccccagccgggaggggagggaggttgggagatgccgctctcccatttgtctcacatgtgtacctgtggccattggaggttggggtaagggacatgtctctaaaaacggagggagagcacattgttctgaattgtatagaatttattaagttaaaggaaagctctcagca

SEQ ID NO: 180712 - DNA, 575 bp, Homo sapiens
agggggcctaatcggcagaaattagtcatgctaacctaaagctttggagctgggtcttccttaaccaagggagagaaaaggctatcttgggaattggggtcctggcctaataagaaaaaaaaaaaaaaaaaaaaaaacctctcataaaagttaactccttacaaagtggagaaaagaaaaaaaaataaaataaaccagcttaagtgcaggggggggaagatgcctggaggagaaaccttttattyttatgcaaatgagttcctccaatagggagagaacattttaattgctgtctcctcctttctggctcagccaggggaggaaagacactgtgggtgcatggggagagggaagagtgagcaggaaatgctggccacctaggcaagtggggcccttgggttatgtgccccagccgggaggggagggaggttgggagatgccgctctcccatttgtctcacatgtgtacctgtggccattggaggttggggtaagggacatgtctctaaaaacggagggagagcacattgttctgaattgtatagaatttattaagttaaaggaaagctctcagca

SEQ ID NO: 180713 - DNA, 575 bp, Homo sapiens
agggggcctaatcggcagaaattagtcatgctaacctaaagctttggagctgggtcttccttaaccaagggagagaaaaggctatcttgggaattggggtcctggcctaataagaaaaaaaaaaaaaaaaaaaaaaacctctcataaaagttaactccttacaaagtggagaaaagaaaaaaaaataaaataaaccagcttaagtgcaggggggggaagatgcctggaggagaaaccttttatttttatgcaaatgagttcctccaatagggagagaacattttaattgctgtctcctcctttctggctcagccaggggaggaaagacactgtgggtgcatggggagagggaagagtgagcaggaaatgctggccacctaggcaagtggggcccttgggytatgtgccccagccgggaggggagggaggttgggagatgccgctctcccatttgtctcacatgtgtacctgtggccattggaggttggggtaagggacatgtctctaaaaacggagggagagcacattgttctgaattgtatagaatttattaagttaaaggaaagctctcagca

SEQ ID NO: 180714 - DNA, 529 bp, Homo sapiens
ctaaaataggaattagcttagaaaggtcatcaacgaccaaaattatctgagtttggtggagataaaaaagcaagactgaaagttatatttttttcaagcaatgtttgaatggataaagtacagaaggagaaaaatggttgcatttctatgcattgaaaatgcttatttggttttcttttaagcttgttgtttcaaatggcccacttaaatttactgactctataccaaataaattaatctcayttttcacactgctatccctctagtttcttgcctcaatttattccagaatgacattctacatttattcaataagtactcaaagggatgtgttatgtgcatggcattcaactaaccattagttggacaagacaaactaagtaaaggatatctttcttgccttcttaaagtttgcagtttaattatcttgatatttcaaggctcattctcttacattttcactaattttccatattttttctaagtctctgaaaagttttgatagtgaattccatcccttttatattag

SEQ ID NO: 180715 - DNA, 529 bp, Homo sapiens
ctaaaataggaattagcttagaaaggtcatcaacgaccaaaattatctgagtttggtggagataaaaaagcaagactgaaagttatatttttttcaagcaatgtttgaatggataaagtacagaaggagaaaaatggttgcatttctatgcattgaaaatgcttatttggttttcttttaagcttgttgtttcaaatggcccacttaaatttactgactctataccaaataaattaatctcatttttcacactgctatccctctagtttcttgcctcaatttattccagaatgacattctacatttattcaataagtactcaaagggatgtgttatgtgcatggcattcaactaaccattagttggacaagacaaactaagtaaaggatatctttcytgccttcttaaagtttgcagtttaattatcttgatatttcaaggctcattctcttacattttcactaattttccatattttttctaagtctctgaaaagttttgatagtgaattccatcccttttatattag

SEQ ID NO: 180716 - DNA, 491 bp, Homo sapiens
aaatacacttaaccaaataagtgaaagatctccataaggagagctacaaaaactgctgaaataaattagagatgatataaacaaatggaaatacatcccatgctcatggatagraagaatcatatttgtgaaaatgatcttactgctaaaagcaatctacagattcaatgcaattcctatcaaaatactgacatcatttttcatagaattagagaaagcaattctaaattcttatgaaaccagaaatgagcttgaattaaaaaagcaactctaagcaaaaagaacaaatctggaggcatagtgttaagagacttcaagttataatacaaggttttagtaatcaaaacagcatgcatggtactggtataaaggtagataaataaaccaaaggaaaggaatagagaaaccagaaataaagccaaatgtatacaatgaactgatcttccacaaagcattcaaaaacataaataggaaaggacaccctattcaat

SEQ ID NO: 180717 - DNA, 491 bp, Homo sapiens
aaatacacttaaccaaataagtgaaagatctccataaggagagctacaaaaactgctgaaataaattagagatgatataaacaaatggaaatacatcccatgctcatggatagaaagaatcatatttgtgaaaatgaycttactgctaaaagcaatctacagattcaatgcaattcctatcaaaatactgacatcatttttcatagaattagagaaagcaattctaaattcttatgaaaccagaaatgagcttgaattaaaaaagcaactctaagcaaaaagaacaaatctggaggcatagtgttaagagacttcaagttataatacaaggttttagtaatcaaaacagcatgcatggtactggtataaaggtagataaataaaccaaaggaaaggaatagagaaaccagaaataaagccaaatgtatacaatgaactgatcttccacaaagcattcaaaaacataaataggaaaggacaccctattcaat

SEQ ID NO: 180718 - DNA, 612 bp, Homo sapiens
gtagtaaatatatatataaatgtaacataagcatataaaataaaatgtggcaattactattcaattaaaaatacagggacatttgggagagcataacaagtaagggagtgaatacgtgctgagataaatacatttttgttacatgagtcaggagttaaaaaaataaatgaaagatgagagattaggatataaagtatatggggtgccagttcatataacactttatattaaaggaatttgagcttttgggtgaaacaatggaagctattgggagttttaaggggattgatatgaaggaggtacaataggagtctatagcactaatctaaagtggtaagtgaatggaagtcaaagctatttagtggagtaggttgaaccaaaattgatgactaaatacatggtgtgtraaggaaaggaaaagtttaagactgagtcttgggtatctggcatgcatagtatactaacactgatatacacacttactctcacgctcactgaatgagaagtgggcaatgagatacacaacacagtcatgcacttcactttcaagatgtgtgcttaaaacttcccctggcacacatgaaaatatcaagagacatttgtgattatatc

SEQ ID NO: 180719 - DNA, 612 bp, Homo sapiens
gtagtaaatatatatataaatgtaacataagcatataaaataaaatgtggcaattactattcaattaaaaatacagggacatttgggagagcataacaagtaagggagtgaatacgtgctgagataaatacatttttgttacatgagtcaggagttaaaaaaataaatgaaagatgagagattaggatataaagtatatggggtgccagttcatataacactttatattaaaggaatttgagcttttgggtgaaacaatggaagctattgggagttttaaggggattgatatgaaggaggtacaataggagtctatagcactaatctaaagtggtaagtgaatggaagtcaaagctatttagtggagtaggttgaaccaaaattgatgactaaatacatggtgtgtgaaggaaaggaaaagtttaagactgagtcttgggtatctggcatgcatagtatactaacamtgatatacacacttactctcacgctcactgaatgagaagtgggcaatgagatacacaacacagtcatgcacttcactttcaagatgtgtgcttaaaacttcccctggcacacatgaaaatatcaagagacatttgtgattatatc

SEQ ID NO: 180720 - DNA, 596 bp, Homo sapiens
gatgttgctaaacatcctgcaacatacaaggcaatctttccaacaccccatcccaaacatagaattatctggctcagtttgtccatagtaccagagaaaagaccctgctctattaatatgcaggatgagtaatgtgtaattttagatactggcgttaagtatatgtagtactgggagtctgcatgcatttcctcttgattgttatttatctatctatttatttatttattgacacaggaaacaaggtcatcacctggcattgagattgaagaaaagtatgtgagggctgtgaaatgaggaaagaatccataagttaatcttacataagaggaagaaggcaatggctaacaaaagaaaaatgggcttgtttggccgcattaaaggcacatttgcttttcaaggttgtggttttaaagagataacaatcagcacaatttggttgtgtgtttttctcccactgcagtttgggtataaaagcaattgcaaaattgatggagacatgcatgaaactaaggatatagttttgctamgtcagtcatgtttagtagatagaaacttatttgatgaccaagggtggcacaaaatgtttaaaagac

SEQ ID NO: 180721 - DNA, 281 bp, Homo sapiens
tgttctattataaagacacacgcacacatatgttcactgcagcactattcacattaacaaagacatggaatagacctaaatggccatcaatrgtaaagactggataaataaaatgttgaacatatacacccgggaataagatgtagccataaaaaggaacgagatcatgtgttctgaaggaatatggatggaattgaaggccattatccttagcaaatgaatgtaggaacgaaaaaacaaatgccacattctctcacttgtaagtgggatctaaatgatga

SEQ ID NO: 180722 - DNA, 570 bp, Homo sapiens
gtactttgcccttttgaaatagagcaaaattttagattcacagttatcacttagggggaaatatttargctacacataaaacctaattctccactatagtctcaggaggcaccagcaaaggtctgcagcagagtcaatgactttgatgattctcactctatttaagatttgcaggaagagataccctaaatttcagagatttaaggggaaaaatattttagaatcttttcaactgttttaaggtctttacaaagaaacaacataaagcagaaggaagatttctaatagttctatctttataatcctctgctgcttctattcttaccaataaataaaccaggaggcaagttaaggactcagaggtccatttatttgtgctagacagtaggatacagaaaaaaagaaaagtctcttggtatcttaatagactaaatgtaagtcacttcttataaaggaatgatttaataatgtggaaaatagttaatgcatattagattgttttgttattaataagaaagtaatttacaaaggcagattgtctctaagttctttgggttaggatttcattac

SEQ ID NO: 180723 - DNA, 606 bp, Homo sapiens
ctatttaatgaaataatagatgaatacttcccaagtctagcaggatatttagacatccatatacaggaggcccagtgtcccccaaagagatacaatgcaaaatggtctccgtgacactttataggcacactgtctgaagtcaatggcaaaggagaattctaaaaacagcaagagaaaagcatctagtcacccctaaagtagttaccrtcagactaacagtaagcacttactatgtattttcacagttttaggtcgtacatttaagtatacttactatgtattttcatagttttgggtctaacacttaagacccatttaagtgctgacttttccctataaaaaggacattggtcttggcaaagattttatggctaaaacctcaaaagcataggcacaaaaataaaaatagacaaatgagaccatattaaactaaaaagcccctacaaagcaaaataaacagtcaacaaaatgaggagataagctgcagaatgggagaaaatatttgcaagttactcatctgacaggtgactaatatttggaccatataaggaacttgaacaactcaataggaaaaaaaaaaaaagttccaaataatcccattaaaag

SEQ ID NO: 180724 - DNA, 576 bp, Homo sapiens
ctctctttgtgaagcttccatacaatcttgagaagaatgttattgttgaaagaattagtctayagatgttcattatatccagttgatgatgtcactggtgtgttcagttatgccttaatgaattctagctgctggaattttccatttgtgagagaggggagctgaagtctttaattgtaatagtggattcatctactttttcttgcagttctatcagttttagcctcatatattttgatgccctattgttaggctcttatatattaataattattatgtcttcttggagaattgacctcattatcattgcgcagtgccccttgttatccctgataatttccttgctctgaaatctgctctgtctgcaattaatctcgctactcccactttctttcgattagtgttagcatggtacagtaatcccccttatccacaaggaatatgttccaagactcccagtggacacctgaaacagtggatagcatcaaaccttatatatgctgtgtttcttcctaggtagacatatctacgataaagtttaatttatacattggacacagtaagagattaccacca

SEQ ID NO: 180725 - DNA, 576 bp, Homo sapiens
ctctctttgtgaagcttccatacaatcttgagaagaatgttattgttgaaagaattagtctacagatgttcattatatccagttgatgatgtcactggtgtgttcrgttatgccttaatgaattctagctgctggaattttccatttgtgagagaggggagctgaagtctttaattgtaatagtggattcatctactttttcttgcagttctatcagttttagcctcatatattttgatgccctattgttaggctcttatatattaataattattatgtcttcttggagaattgacctcattatcattgcgcagtgccccttgttatccctgataatttccttgctctgaaatctgctctgtctgcaattaatctcgctactcccactttctttcgattagtgttagcatggtacagtaatcccccttatccacaaggaatatgttccaagactcccagtggacacctgaaacagtggatagcatcaaaccttatatatgctgtgtttcttcctaggtagacatatctacgataaagtttaatttatacattggacacagtaagagattaccacca

SEQ ID NO: 180726 - DNA, 576 bp, Homo sapiens
ctctctttgtgaagcttccatacaatcttgagaagaatgttattgttgaaagaattagtctacagatgttcattatatccagttgatgatgtcactggtgtgttcagttatgccttaatgaattctagctgctggaattttccatttgtgagagaggggagctgaagtctttaattgtaatagtggattcatctactttttcttgcagttctatcagttttagcctcatatattttgatgccctattgttaggctcttatatattaataattattatgtcttcttggagaattgacctcattatcattgcgcagtgccccttgttatccytgataatttccttgctctgaaatctgctctgtctgcaattaatctcgctactcccactttctttcgattagtgttagcatggtacagtaatcccccttatccacaaggaatatgttccaagactcccagtggacacctgaaacagtggatagcatcaaaccttatatatgctgtgtttcttcctaggtagacatatctacgataaagtttaatttatacattggacacagtaagagattaccacca

SEQ ID NO: 180727 - DNA, 576 bp, Homo sapiens
ctctctttgtgaagcttccatacaatcttgagaagaatgttattgttgaaagaattagtctacagatgttcattatatccagttgatgatgtcactggtgtgttcagttatgccttaatgaattctagctgctggaattttccatttgtgagagaggggagctgaagtctttaattgtaatagtggattcatctactttttcttgcagttctatcagttttagcctcatatattttgatgccctattgttaggctcttatatattaataattattatgtcttcttggagaattgacctcattatcattgcgcagtgccccttgttatccctgataatttccttgctctgaaatctgctctgtctgcaattaatctcgctactcccactttctttcgattagtgttagcatggtacagtaatcccccttatccacaaggaatatgttccaagactcccagtggacacctgaaacagtggatagcatcaaaccttatatatgctrtgtttcttcctaggtagacatatctacgataaagtttaatttatacattggacacagtaagagattaccacca

SEQ ID NO: 180728 - DNA, 433 bp, Homo sapiens
ccagaaattgtactgcaagtggtttacaattccctgctgaagaggaaggtcttattccaaaccctagtggcctgtgctgtaactttctyattagagtactctgaggactccacacaatgttcttttctacagcagagctcagaatattatagcctacgggacaaatctgactcagggcctggttttgtagttaaggttttattggaacatagacacacttatttgtttacatattgtctgtggttccatttgcactaccaaggcagagttgaataattttgggataatggtagcgttgaatagttgtactacatcagcagagtgtagtcattgcagcaaagaccctaaggccttcaaagcctaaaatatttactacctggccatttacagaaacattctgctgactcctgctctataacttgttggatctgcc

SEQ ID NO: 180729 - DNA, 565 bp, Homo sapiens
ctgctaattatttatcctttctttctttattataacrtaattttcctatatactactttaagaacatttacaagtgtattagttgaaaagtactgtaatatcagaagaattgtgataatttatattacagatcttcaaatgatacccaaactcttaagtgtttcgttttatagatgatacattatctgttggggggataatgtttcattaaacttatgcctaattttgtgtttatacttgtctgaaactatacactgaattcttttttgtaagtacaatagtttggttgtagctgggagctgcttgctacttgaagtctggaattgttatactctcaataactgtcacaaattttttactttgtaaaagaaagttttaacttctcaattgagaaactttattttaacacctccatttattaacacccttaacaaatttaggcagcccttttctatactgtgtgattatttcaactacagagtttgtctaagtattgaaatttttatttacattcttgtttcttcattagactgagaacacatttttttaagggcaatgtcttgtt

SEQ ID NO: 180730 - DNA, 532 bp, Homo sapiens
caagctttaaaaaaatgccagttacattctaaatccctgtagcagcatttcagggaaatagtttgtcaatattactttcctttgtcaaatccgtgaaatagcagttgatttcttaaaataaatctcaagctataaaatgtttctcataggtattgttgctcctagcttccttctgggaagggatagtctttcttttctctctcattcttttcatatgcaaaaagacttcctccctaagcctgattctagacaattcatctttacagtttgtttttgaaactgttttattctagttgtgttcattcaccacacacataacacacacacacacacagagagatgcatgcactcacacagacacagacacacacacagacagcatgcacaaggtacttccccgcctgttttttttttttttttttaatgaaaaataaacagggaatttgctctgactctagcctaragtgtgctgttggataacaaacttaataaaaacgttcagctaccaataaaatcaaaatttggaaggtaa

SEQ ID NO: 180731 - DNA, 627 bp, Homo sapiens
acctcctgctgagatgggtaagggtcagtgcccttaagcctcctgtaggccttatggtttgattaagaggagctacaatacacacctttaaactcttcaaagggtctttgtggaactgaaaactttaactttttgtttttttcttaagttttagcaagaattaacacagccacatctttggctttttctctatatcaagatttcagaagtgatgtctgaattttagcatcttttgccattttaatatgatgagaattttcaaattcatcaagtcctggttcctcgttcctttttgcttcacagttttctcctcaagtgtctctctctctttctctctctctctctctctcwcacacacacacacacacacacattttactataagcaggaggaagaaaccagatggtaccttcaacactttgtttggaaatctctttagctaaataaataagtctatcattagaagttctgcttcccataaacattaggagacaatttttccaggctttctagcactatataataaacaagtgagggtccccagggaccactctatggtctgtctgctacaaccttaaagtctcttccagtagctatcactgcatttgtttttttcaaatcattccc

SEQ ID NO: 180732 - DNA, 567 bp, Homo sapiens
ccaaataatgtcacatttaaaagtggggtggcggtcaggcttcaacgtacattttttgggggggaaacatttcaactcatgacagggctccaatcagcaaaattatcagtcactgagatttaacaatgtcattagggtttccgtacccccaacggcagaaggacttctctacaccagctcctgaaagcatgcrctctgatattattgggatgggagttgcaagtattaacacattaatttttacgctatatttagttgtaaaagcaaccaaaaaagtatattgagttggtctaacaggctcacacacaaggtcacattagccttgttctcctactgtgaaccttataaaccctagccaaattacattgactgtttataagcatctgctcccctcatgggagtgggtacattggtgacttgtgtgcctgatccatcagtcaaaaagttagaataccactttattccaaagttcagtatgtatatgacctttggtcctccttggaactaaagaaatcttggctttaccattaatcttgtttatccttaaagcatattaaattagaatag

SEQ ID NO: 180733 - DNA, 567 bp, Homo sapiens
ccaaataatgtcacatttaaaagtggggtggcggtcaggcttcaacgtacattttttgggggggaaacatttcaactcatgacagggctccaatcagcaaaattatcagtcactgagatttaacaatgtcattagggtttccgtacccccaacggcagaaggacttctctacaccagctcctgaaagcatgcgctctgatattattgggatgggagttgcaagtattaacacattaatttttacgctatatttagttgtaaaagcaaccaaaaaagtatattgagttggtctaacaggctcacacacaaggtcayattagccttgttctcctactgtgaaccttataaaccctagccaaattacattgactgtttataagcatctgctcccctcatgggagtgggtacattggtgacttgtgtgcctgatccatcagtcaaaaagttagaataccactttattccaaagttcagtatgtatatgacctttggtcctccttggaactaaagaaatcttggctttaccattaatcttgtttatccttaaagcatattaaattagaatag

SEQ ID NO: 180734 - DNA, 567 bp, Homo sapiens
ccaaataatgtcacatttaaaagtggggtggcggtcaggcttcaacgtacattttttgggggggaaacatttcaactcatgacagggctccaatcagcaaaattatcagtcactgagatttaacaatgtcattagggtttccgtacccccaacggcagaaggacttctctacaccagctcctgaaagcatgcgctctgatattattgggatgggagttgcaagtattaacacattaatttttacgctatatttagttgtaaaagcaaccaaaaaagtatattgagttggtctaacaggctcacacacaaggtcacattagccttgttctcctactgtgaaccttataaaccctagccaaattacattgactgtttataagcatcygctcccctcatgggagtgggtacattggtgacttgtgtgcctgatccatcagtcaaaaagttagaataccactttattccaaagttcagtatgtatatgacctttggtcctccttggaactaaagaaatcttggctttaccattaatcttgtttatccttaaagcatattaaattagaatag

SEQ ID NO: 180735 - DNA, 567 bp, Homo sapiens
ccaaataatgtcacatttaaaagtggggtggcggtcaggcttcaacgtacattttttgggggggaaacatttcaactcatgacagggctccaatcagcaaaattatcagtcactgagatttaacaatgtcattagggtttccgtacccccaacggcagaaggacttctctacaccagctcctgaaagcatgcgctctgatattattgggatgggagttgcaagtattaacacattaatttttacgctatatttagttgtaaaagcaaccaaaaaagtatattgagttggtctaacaggctcacacacaaggtcacattagccttgttctcctactgtgaaccttataaaccctagccaaattacattgactgtttataagcatctgctcccctcatgggagtgggtacattggtgacttgtgtgcctgatccawcagtcaaaaagttagaataccactttattccaaagttcagtatgtatatgacctttggtcctccttggaactaaagaaatcttggctttaccattaatcttgtttatccttaaagcatattaaattagaatag

SEQ ID NO: 180736 - DNA, 576 bp, Homo sapiens
tttgttatgcagcttttgaaatctttttgtactaatcaagccataaaattattgcatcttctacaaaagtctgctcaggaaagaagctacattatataaaatagattccattagatgtgcacataggaggaaaaagctaaaattaagactttgagcttttaaaaatcctagtgtaataattcacaatatgttaaaaaatatgaaatttagtattttggcatgtgtttagtttcattcaaatggactgaaataccatgaccactttatttgcatatgcacattgtacttaccaaaaatatagccctatagtatcaaaaagattacagtgacaagtcattttccttctgaaattgttttgactttcagattttctcygaaaaagaaaaaaaaatgtgccttttcccctctatggtgaaaaacagcataaatccgaatccatatttagttctgaatgacatacttgaggttctaaagtctagttgtggttctcaacctttccctttttgtacttttcataaaagattgtaaatttcataattttagtgaagtttatcctgtaattttcagaaaaaaaaa

SEQ ID NO: 180737 - DNA, 576 bp, Homo sapiens
taatgagaatatgcagaaaaataagcaactttttccatatacgccgctagtgtcacacctgagaactgagcgcagtcaggttgactttacagcctgacttcatgataaaaggcattttttgttggagaatatrttaattcttattgctatatattattcttattgggttgaataacacaaatttgtttccttagagttctggagtttagaagtcagaaattggttgcatggctagaatggaggtttaagcagggctgtgttccctgaagacactttaggagaacttcattttcctttgaatttttagcttccagaggactactgcattccttgattcagggtctcttcctccatctccaacgccaacaatgtaatatagtcaaacaattttgcccctcttccttgccccatctctgcttgcatcctcacatctctttctctgactctgatacttttgcctaagtcttacaagaacctttgtgaatcattcagcccatgtggataattcagaatagccttctcatatcaggagtcttaatcataactgttagttcccttttgccataaagggtaata

SEQ ID NO: 180738 - DNA, 576 bp, Homo sapiens
taatgagaatatgcagaaaaataagcaactttttccatatacgccgctagtgtcacacctgagaactgagcgcagtcaggttgactttacagcctgacttcatgataaaaggcattttttgttggagaatatattaattcttattgctatatattattcttattgggttgaataacacaaatttgtttccttagagttctggartttagaagtcagaaattggttgcatggctagaatggaggtttaagcagggctgtgttccctgaagacactttaggagaacttcattttcctttgaatttttagcttccagaggactactgcattccttgattcagggtctcttcctccatctccaacgccaacaatgtaatatagtcaaacaattttgcccctcttccttgccccatctctgcttgcatcctcacatctctttctctgactctgatacttttgcctaagtcttacaagaacctttgtgaatcattcagcccatgtggataattcagaatagccttctcatatcaggagtcttaatcataactgttagttcccttttgccataaagggtaata

SEQ ID NO: 180739 - DNA, 531 bp, Homo sapiens
gggttggcgtagaggttatagtcttaaatagaaattttgaattattcttcagtgcagtgcactttctcagtagattattgcattttattaactttttctgcctattttcctaaaattctaactgaacttcactcacgtacaagttcatcctcatatattatgtttcrgttttacatgttatttttattttatttacatatccaaagatggctttgtttctaatttttattcttcgggtttgcactgatttcccttgacagaaaaaaatacccatgagacttgaatgactcaattctcagtttgccacccattcctgttacagcatcagctttaacatgtctcttatatccttgctgcaatgcaaatttccttttacacctttatgaatttccagctactggaatgtcagtcttaataatactaatcatatagatgtatgcatctttcacgtatgttctttatcatctgaagtttccatgtaaccttttaaaaataaaagtgatcagaatgtactttgatagttgtataata

SEQ ID NO: 180740 - DNA, 576 bp, Homo sapiens
  misc_feature (1)...(576): n = A,T,C or G
tgtgctttatttcttggtcaatagaggcaaaagttgtcagttttgttgatgtaaaagatacattttttgtgctcttacaatacacagtacttatctctgatcacaaaaatgtgtgtgagtgtttccctacacattagcaattctctagcaggcaacaactgggtgctctataattcaatttaatgctgaattctatctacctggagacaatgtcagatmcagcagataaagggctccatcccacaagactgccccctacttcagataccagttgcaagcgctagcttgtcacctatacttctgactaactggatatacattggggttcctatgacccccttcttaagtttgattagtttgctagaacagctcacagagctcagggaaatgcttatggttattcatgtattacaaatgatacaaatgaacagccaaatggaagagatgaatagggtaagatatgtggaaagaagtgcaaaatttccattcttttctcggtgcacaaccctccaggtacctccatgtattttgcaaccagaaagctcttgaaaccctannnnnnnnnnnnnnnnnnnn

SEQ ID NO: 180741 - DNA, 620 bp, Homo sapiens
catcaataacctacaaggcaagagccaaatcaagaatccagtcccattcacagtagccacatgaagaataaaatacctagggatacagctaaccagccaggagaaagatctctacaagattaacaaaacactgctcaaagaaatcagagatggaataatcaaataaaaaaaattctgtgctcatggataggaaaaattaagatggttaaaaagaccacactgcccaaggcattttayagattgtatgctatgcctatcaatgtaccaattacattgtttacagcattagaaaaaaaaaagtttctaaaattcatttagaaccaaacgagagcctgaatagccaatgcaatcctaagcaaaaagaacaaagctggaggcatcacactacctaactttaaactatactataaggctccagtaaataaaacagcatggtattggtacaagaactgacacagagaccaatgaagcaggtcagaagataagaagataaggccacactacaaccacctgatttttttaaaatctggcactgaaaagtaatgagaaaagggctctctattcaaaaaatggtgctaacttcctagccatatatggaagactaaagctggattccctcc

SEQ ID NO: 180742 - DNA, 516 bp, Homo sapiens
tgcaaaataaattgaaagaccaagaatgcagcttaggaagaagctctgtgtaataagactccctattattacatcccaatgcttagttccacattaagagtactgagacaaaagaagtaaatacataaaaatcaaacctcaatggaaataagcctaaatactgatccttatgactgtcaaatgacaggaacsttctatacataccaactcacccatactcaccctcctacacttcctccaagattaaatgcataataataggacagcaaagtaagagtttcagaaatataaagaggacttgactggacaaggtctcctattgcccacagtgtctattctggcactacaaaaatagttgggatccatgaccaaaggaacttgctctccaggtacaaaatagatgatatattttttttcactagcacacattttaaaaataaatgtatatatttgtggaatacaatgtgatgttttgatatatttgtatacagggtggtatgattaatcaaacaaatt

SEQ ID NO: 180743 - DNA, 516 bp, Homo sapiens
tgcaaaataaattgaaagaccaagaatgcagcttaggaagaagctctgtgtaataagactccctattattacatcccaatgcttagttccacattaagagtactgagacaaaagaagtaaatacataaaaatcaaacctcaatggaaataagcctaaatactgatccttatgactgtcaaatgacaggaaccttctatacataccaactcacccatactcaccctcctacacttcctccaagattaaatgcataataataggacagcaaagtaagagtttcagaaatayaaagaggacttgactggacaaggtctcctattgcccacagtgtctattctggcactacaaaaatagttgggatccatgaccaaaggaacttgctctccaggtacaaaatagatgatatattttttttcactagcacacattttaaaaataaatgtatatatttgtggaatacaatgtgatgttttgatatatttgtatacagggtggtatgattaatcaaacaaatt

SEQ ID NO: 180744 - DNA, 497 bp, Homo sapiens
acaatctattagaacattatctgtaagtttggggaacaaatgtggagaaaggaaatttacatatgctattgctaaaagtttgatttggcacaactattttgtattgttattttaacaatagctatcaaaattaatagctgagatttactatcacctggctattctaattctgtatatactagataaacccctgtgcatatgttaggcaaatttggaagaaaatatacaaatttgtgatagtcatataatttactactaaacagcaaattgagtaaataaatcagaggtgtatgtagcaatgaggctaaatgaaatgacrttgtgtgaaaaatcaagttgccaataatttgtatgatattttgatatttatataaaatttgaaaatatgcaaccaaggcaatatttttcttcttggtatacacccatatatcaaagaagaacaacatgaaattattaatattagttacttctgaaaatgcagaggtcagtgtgatgga

SEQ ID NO: 180745 - DNA, 587 bp, Homo sapiens
atttgttgagtaaatgattatgggccttagatgacacagccccaaatacctgctttcctattagacactctttccactcmttcactctagctatgctagcactcttggcatctccaattgattttactgcctcaaatccttggcatttgtttactgccttccttctctcccccagctatccccttcacagctgggttgttttgtccttatttttttaatcacaagctgacctgccaaaggcttacatttgtatttatcattcgttattctatgcccagagcttcatatagtgttaaaaaattgtggaataaataaatgaaggagtgaaaggtaaatgggaatatgaaggcaaaaatagacaatgtctcttaggattatagtttaatattcaataataaatttgaaggaaagaaaataaaattttttgtgcctatgtaccaaactcttttttttggtgcttaaaatacattatttaagttaatcttctgaagtcattttgagatagatattacttaaattttaaatagaaaactacatccgaggaacccaggtgaatatgtgaaaagtacacgtaattatgtggaaga

SEQ ID NO: 180746 - DNA, 579 bp, Homo sapiens
gttgactaaatcctcttccttacccctctctaattcttgttttcccacacacagtcacatttcttccctgctgtgtaaaaccctaattttactcatttggggagacagatttgagattgatcaccctcrgctgcatcacctgattaaagtcttcgtctttgacaatacttatctcagtaattggttttgtgtgtgatgagcagcaggacctagacctaacccctggcatttcagtttccagaagtattaacagaagaacagaccaagctgaggaaagaatctcaaagtctgaagaccagattttgaatcaactcagtaatacaaaaagagaaaaataatgaacaaaacctccaagaaatatgggattttttaagcaatcaaacttatgacttattggcatctctgagaaagacagtgtaagcaatgtggtaaacacatttaaggatatagcccataaaaatttccccaattttgctagagaggttgacatgaaaattcaagaaatactagaaaccccagtgagctactatataaaacaaacatctccaaggcacatagtcatcagattcaccaaagtcc

SEQ ID NO: 180747 - DNA, 579 bp, Homo sapiens
gttgactaaatcctcttccttacccctctctaattcttgttttcccacacacagtcacatttcttccctgctgtgtaaaaccctaattttactcatttggggagacagatttgagattgatcaccctcggctgcatcacctgattaaagtcttcgtctttgacaatacttatctcagtaattggttttgtgtgtgatgagcagcaggacctagacctaacccctggcatttcagtttccagaagtattaacagaagaacagaccaagctgaggaaagaatctcaaagtctgaagaccagattttgaatcaactcagtaatacaaaaagagaaaaataatgaacaaaacctccaagaaatatgggattttttaagcaatcaaacttatgacttattggcatcyctgagaaagacagtgtaagcaatgtggtaaacacatttaaggatatagcccataaaaatttccccaattttgctagagaggttgacatgaaaattcaagaaatactagaaaccccagtgagctactatataaaacaaacatctccaaggcacatagtcatcagattcaccaaagtcc

SEQ ID NO: 180748 - DNA, 477 bp, Homo sapiens
cctacaattggagagacaggaaagtgaaaattttgaaaactaatccaaactatcaccaagtcctagcagtagtatgattatatcatactgtatgtgaatattgtgtcttacacttcaaygtctaattgttttccagagtggttacatcaaattatattcccacccattgattctgtatgatatcgcattgattctcattctattctacacttcctctattaaaattttaatttttaaccttgaaatgggaattaaatgaatgtcattatattatttattttcatttcattgacctttaatattaaattacttggatgtatatgtgttgtctgctgtaaaatattaacttatctgttttacgtagtttctatgtattgcttgttttaatcttatatgtctacgtaggtctatgatccatttcaagttgacttttatgtaagatgagaagttttgagtctaaattcatctttttgcacg

SEQ ID NO: 180749 - DNA, 495 bp, Homo sapiens
gaacatcacacaccggggctgttgtggggtggggggagtggggagggatagcattaggagatatacctaatgttaaatgacgtgttaatgggtgcagcacaccaacatggcacatgtatacatatgtaacaaacctgcactttgtgcacatgtaccctaaaacttaaagtataataataataatttmaaaagacaaataaaatttaaaaaaagatttattcattaacttaaaaatatttctttagaatctgttcttgccagacactgtctagggaccaggaccgcagcaatgaacaaaatattacagtcctgatattactccctcatggagcctcagttctactggaagagactgatcaagaaaatgtgtacaaaaaagtcacattttatttttaccttttttcttttcactaaacggttaccatgactattttatttctcctcatttccaataagactgaggttttcattttaacactttccttatttgtgtca

SEQ ID NO: 180750 - DNA, 558 bp, Homo sapiens
cagattggaatttggtattttattgttacagactgctttgtcagtcttgagatctctgttttaatcgtaatgcaggtcagttttgcctgaattccagaaggacaggagtgtaatggggtatgtctgaccgacccattttcctattatggccagaattactttttcaggtttactttggaatgcccttgacctaaaggagggatccattmagttggttggggggactcttagaattttatttttggtttacaagtgtcagcaggtaatgtttttattttttacttcacattttttccctactccttgtcaatatatatctgagctctgtctccaggcttataccaattgatggcaattgcctttacctggtcactttctcaatattgaagtagtaaatcagttgttggtaggccactgacacaagaaacacctggagtagacagacgtagcaggatgcacctgcaccccagaaagggatattccaggagggacccaaaacactgttctggggcacagcctaagggcttcctatggagaaattagtattcacactttaac

SEQ ID NO: 180751 - DNA, 571 bp, Homo sapiens
acatggtactcaaactcacttattattagagctatttatgccaagatttgatttgcccatggtttcctttgccacaccacagttgctaagcctccaaagcactcacattttttatctcagtccctgtaggtcagaagataaccaccatgtcactctacagcagtatgtaggcactctgcatgtaaaccatctaatgccctccattagtttttcagcaatgacttttattcaagaaatatttattgaatgaccccagctgtcaggtcctcttctagatgctgcagacaaagagagacaaaagtcctgtctttggagagtttacattgtagttgggagatgcagatacaaagtaaataaatagtacatatmttaggcaatgataagtgtgctaaagaagtataagcatgtctagggcacagaaacaaatttaaacaggatagtcaacaagagactctctgacatagtgacattttatgaaagatatgaactaagcatgagagcgaatatggagaaataaattttccagcagaaaatagcaaatgcaaatttattgtgatagaaacatgtttgt

SEQ ID NO: 180752 - DNA, 569 bp, Homo sapiens
attgcttacaaccagcaggaacttcgattttttttaactacaagtaggattagaattcacttttataagagatgggtagtacggacttacatgggtgattttcccaaactctcatatgttttgtctataattagctagctctccaagtgttaatctggatgataaacattttatggtatgaggttggtggactttgcttcttatacgaattttcccatggaaaaaaaatttaacttcttaggtctygaacaatttggcaatagcttttttatggaagcaatcaccatacctactttaagaagggtaaacaccagcagtgagggagggcaggacattttctccaacctgagattaaaggcgactccagaaaaatatggtgtatattgacacatgctgctcggtgtacaaaggttttgtgtgtggaccacgcaccaggggttataaaggtgcagtcaaataggagaatttcaagaagaaaagcacttacttttaggtgtttagagtaagaatatcaaatttattattcattcataaaattccttcagctaaatatctcccaattcacagta

SEQ ID NO: 180753 - DNA, 572 bp, Homo sapiens
tgacaactcaagcatatccaaagcagtgtttacycttcaaagtcagacatatttcaagttactgaactatgtatctctttcccattaaaaagtgatgagagtttgtattattttgagcacaagaagagaccttgtatctccagtgcttagaataaatctattttaaattgagttatttatttgccttaagaaataatttatgtttttgtatttatccagagaataaccattatttccaataggactgttcaattataacatagaagctttaccttataaatattttcctaataaatctgacacattaagccacaagttctatttgtgggatgaagtctaaggacaaataatgcatttgtgagttaattatgtgttttttcaaactttacagtacagaaagtatcacctagagatactgttaaaatgcaagtttctggtgtacccccaagattctgattcagcaagtttggaaagtgagactaagaattttcattataataggctccagctgatgctgattctcatggttccatgtggcacacacagaaacaatggattagactttataattt

SEQ ID NO: 180754 - DNA, 612 bp, Homo sapiens
ctgttaaaatgcaagtttctggtgtacccccaagattctgattcagcaagtttggaaagtgagactaagaattttcattataataggctccagctgatgctgattctcatggttccatgtggcacacacagaaacaatggattagactttataatttatcttcaatttacaaatgagtttttaatattgagttctaagtgtttgaattatccaaccastcacaagttggttagtttttgaagaaatttatctaggaacttagtgaaagttcttttcttttttcctcctttctgtctagtgcaatcatggcaatacatggcttccatggagaaatatgagcctttaaaaactccagggaagtaaattgaatttccaaacataagtatccagttattatgtatgatgtatattattatactaaacacctagaactatttgactttaactataagaattattttattacatactagtaatcaagagattacagaattttggcaaatatttacatctactttatgacttaaaatattttaaaatcaatggaagaaattaaaagtacaatattaatcataatttttagaaaaacttataaaaatatataatgactcc

SEQ ID NO: 180755 - DNA, 627 bp, Homo sapiens
ctaagtgtttgaattatccaaccactcacaagttggttagtttttgaagaaatttatctaggaacttagtgaaagttcttttcttttttcctcctttctgtctagtgcaatcatggcaatacatggcttccatggagaaatatgagcctttaaaaactccagggaagtaaattgaatttccaaacataagtatccagttattatgtatgatgtatattattatactaaacacctagaactatttgactttaactataagaattattttattacatactagtaatcaagagattacagaattttggcaaatatttacatctactttatgacttaaaatattttaaartcaatggaagaaattaaaagtacaatattaatcataatttttagaaaaacttataaaaatatataatgactccaattatgtcagttatcactatttcttagaaaatagattaaattttggaaggattttaatatcatttttgtcagagttgtttcatcttggacatatatttgttgaaataaaatagaatgttgtccacgcaaacatattacatatgtaatcatttctatgcttggttactgtagcatgattttttccctcattttattctcacatgtcta

SEQ ID NO: 180756 - DNA, 379 bp, Homo sapiens
ctgacaaattaaattagatgtcttgttgtatccttgtctcagtgtccattaactgcaccatcctcttgctcagattaaaagcctaaggatataattgattgcttttccatctctggcagagagctgttcacttttttaaaaactttttttttatttccataggttttgagggaacaggtggtatttgcttacatgagtaaaatatttagtggtgatttgtgagattttggtgcacccatcaaccaagcaacattcactgaacccaaygtatactcctttatccctcacacccttcccaccctttcccccaagtcctcaaagtccattgtaacattcttatgccttttcatcctcatggcgtagcttccacttatgagtg

SEQ ID NO: 180757 - DNA, 548 bp, Homo sapiens
  misc_feature (1)...(548): n = A,T,C or G
taggttaaacaacaacaacaacaaaaaaccactttgttttaaggcaatttcttgctctgttgcccttgtgctatcacgactcattgcagctttaaccgcccatgctcaagtgaccctcacacctcagcttcccaagtagctggaaccacaagtgcatgccrccacatccgactatttttttttttttcaaaattttttttgtagagacggggtttggttatgttgcttaggctcatctcgaattcctgggctcaagcaatcctcctgcctcagcctcccaaagtgttgggattacaggtgtgagccacagcacccagtgaaaaaaacatttttataaacaaaaattaaataatttttcccataaaagtatgtttcttcttttaagaataagtggataacacttaccagaagaagcctgagaaactttccttctttgataatttcttattgaaattaaattgtgaattataaaaataataaaaacaccaaaaaaccacattatttctcatnttgaacacaaatgctccatttaaattcggtaaaccaac

SEQ ID NO: 180758 - DNA, 455 bp, Homo sapiens
agtttgcatcaagataaaaatagacttgaaaaaccaaaccaaacaaaagagaatttttcagaattcattaaactggagagagaggaggacattaaatataataaatatccttcctttaggtaaattttagcttttatttaaaaaggtgaataaaatacattacgacattttcaaaataagatgctgtagactaatttaatctaatttgaaatttttaacatttagaatttagaattttaatattttttatttggggaaatttcttccttataaaaattcaacccttcctggttgatgcttaagtayatttttttcttttttgtttatgtgttttcataaataaattggtcttccatttgaatcaatttagcctgagtacatatgtaggacagtaaattatttattttgaggctttgtagaatttgaggtctctgagattttaacagaattgagtc

SEQ ID NO: 180759 - DNA, 566 bp, Homo sapiens
ccttaaaaacctacacttgcagctaccatatgatccagcaatcrcactactggtcatttcttcaatatactgctttccttaaagcagtatatcaaagaggcatttgcacctccacgtttattgcagcaatattcacaatagccaatatatagaatcaacataggcatacaatagcagatgaatgaataaagaaaatgtgttatatatacacagtgaaacactatttggccataaaaaggatgaaattctatcattgacggcaacatgaatgaaaccagaagacattatgttaagttaaataagttagagacagaaagttaggcaccacatgttctcattcatatgtagaagctaaataaacattgatctcatagaactcaaaagtagaacagaggacactagaggctgagaaggtgagggggaatgaaaagatagggagagattttttaaaggatacaaaattacagctagatggaaggaataagttccagtgtcctataccagtgtaagataactatagcaaacaaaaacattaaataatttcaaatagctagaaggaggatgtt

SEQ ID NO: 180760 - DNA, 538 bp, Homo sapiens
gcaaattttaaaaatcttactttgagtatttgtattttctcagtaaaatgggaagcaaggtcctctactactaaacatgaagccaagggaaatgctattgctgctttaaggatgaaataatggtctaggaacatggaagtcaatatttaatgtgactgcctatcttctttaggaattattacatgctaatgacctttaatttatagtcagaacagtggtcatgtttgaatactttttctcagccattttctctggttcagaaggtataatttgggttaatctggaagatgatttagttaagccagyaaagtcagagacgagtaaggcatttgggtatatgtgcaagagcatgataataattattaccatgaagttcaaagtaggaaaagggcaatgcatataagtggtctaaaggtattcaaatatggacaagatcattggaaggtccttggttctggtgggatcaaataattttctcttcagaattttaaagagggtttaaagcgtaggagactaggaaggataatgataagattgt

SEQ ID NO: 180761 - DNA, 522 bp, Homo sapiens
ttagccagaatgaaatgattgaaatgatagacatagaatccagaatctggatggcaataaagatcataaaaatttaggagaaagttgaaacccattctaaggaatctaaagaatccagtgaaatgattcaagagatgaaaggcaaaatagtcattttaagaatgaagccaactgagttggtagagctggaaagctcacttacaagaatttcataatacaaacaaacagaaatattaacaacagaatacattaagctgaggaaygaatctcagagcttagagacagtttctttgaattaactcagtcggacaaaaataaagaaaaaaattaaaataataaacacaatctctgagaaatatgggattatgtaaggagaccaaatctataactcattggtgtctctgaaagaaagggagagagagcaaacaacttggaaaatatatttgaatatgtggtcacatatttgaatgtgtgaacctcgctagagaggtcaagatgcaaatttaggtaattcagagaacc

SEQ ID NO: 180762 - DNA, 539 bp, Homo sapiens
cctaccaagattattctttagtaaaagttggaaactgaaaaaattatgtttcaaaaactatagtacacctgttgtttgattctagtcttgcctaatatttttctatgtttcttatttttttacattttggactgaattctaatttttcctggctacaagcatccaaaagagttttccatttttttcttctttttttccttcattttccaaatttgacatcactgaaaactaacctgtgcttttytaaagccctgcaaactgaatctagacaacttaaacttcagaaaaaaaaaaacaacccatttacatacagaaatccttttcatacctccctactgatgtatgaacttcagagtaatgtggcctatattgattttctgggatttttgtttgtttgttgttgtttttctccccttctctccctcttttctcttcataggacatgagacttcttagcctgctaaaaattagctttcctaataactcaggacctacctgttaggaataaaccctgatagacatgaaagatcagacaaaac

SEQ ID NO: 180763 - DNA, 593 bp, Homo sapiens
aatagtaaagatattttctattatctcttggaagttttattgttttaccatcacagttagatctgttgtccatcttgcattgatttttgtgtatcctataaggaaggcatcaacaatttctccataggcatatccagttggcatcttaatccactcagtttacccaatcarggattgatattattcaaagctgagtttcagtgaggtttgtctattttcagttcaattttactggtgaagtatattttttcatcaactcaacaaatatcttgggaaattttctagtatcgctcatctttgtcaggtctctagtccagtttttatatcctaagtctgtgtgggtcagcttctcaggctcttagtttgtgctctcgttattgcaaaatgcctagcatttaacaaaggcacccatgctggactcgtctttaggggatagtttcttcccagtcttacaaatactttttgacttgctagctccacagtgtcttcaaaagaatttttcaagtctttaatccctattttctagttttgctcaccataaaacttggtttaaataatctagcctacattttctaaaaagaacatcctccccc

SEQ ID NO: 180764 - DNA, 558 bp, Homo sapiens
tgagtcacagagagttaagtgatttgcccaagggcacacatctagtaagtgacagtcaagctcagacccatctgaaactatggaccatgctctttctactatactttgttccctctcagctgtaattataattaaaagcaataagtataaacccagagataaatcagaaccaaagatataaaactgaaagccagtggtggcagctgaattcataaggacacatgagctcgtgccctgaatggatcttgtgaacgcaagatttcatgctgccaaatcttcatctcttgctcctcagcttactctatgtccgacaacagtgagcgyctcctcctagaagcaagtcttctcaggtcctccctgaccactagactagcttctgggatgccacactccctggtttctcttccacatcattggtcaccccgtcttggtcccctttgccagctcctcctcctctgccagaactctaaatggtagagcactgcagagcccagctctggctttccctcttctctactgcactccttccttctctacccatgtagcacacctggtgct

SEQ ID NO: 180765 - DNA, 571 bp, Homo sapiens
cctcagacatagttggtggtttctcttcctgatcttacagttctgtatgtttcaatgtaaaaacactacatctggcaagcggaagtttattagaaagtccaagatgatcctatattgctacatttatcatatttggttgtcatttatggccacagcaatcccaacttctttattactaaatctttgtaaccccagagcytagcacagtgccctgcccgcagaagatgtgagttaattacttattatttaatctatcagtgaaggacctagccaggcttgatcaaataattaagaccacttgaatgtccataggtctttggaacaccaggttgacagttcagcacacaatgcatctcaggggcttatcccttcctcatctgagctgtggcccagtgctagaagctgatgaactcttttgcctactgaaaaggaatcatcactgatcattagagaaatgcaagtcaaaaccacaatgagataccatctcatgccagtcagaatggcgattattaagaagtcaagaaacaacagatgctgtcgaggttatggagaaataggaacgtttttacat

SEQ ID NO: 180766 - DNA, 618 bp, Homo sapiens
tgggctactagatagtatttgcaagcctcatggtaacctcaaatcaaaagacatacaacagatacatacaaaaaaagaaagtcagaaatgaaatcataccaccagagaaaatcacctttactaaaaggaagacaagaaagaaggaaagaaggaagagaagaacacaaaacaaccggtacacaaataccaaaatggcagtagtcaggagkacattcttagttatcaacaataacattgaatgtaaatggactctccagtcaaaagacatagagtgactgaatggacaaaaaaacaagaaccaccaatctgttgcctacaagaaacatacttcatctgtgaaaacatacatagacagaaaataaaaagatgcaaagggtattccatgccaacggaaaacaaaaaaataaaaactaagaagtcactatatttatatcagaccaaatggatttcaagacaaaaactataagaagaaaaaaggaggtcactatataatgataaaggaatcaattcaacaagagaataaaacaactgcaactatatatgcacccaacactggagcatgcaggtataaaaaagaaatcttattaaagctaaagagacagatagataacaatacaa

SEQ ID NO: 180767 - DNA, 600 bp, Homo sapiens
taagctttttttccctttaaatttgtagcaataattaatattttcttttaagcaaactaagtttgtatagtcaataataattggagtagtgctcataggtcttaagaaaaaaacacaccagtgagcaatcagctgctgcttctcataagtttggcctagacagagcctttccraacaacttctggttctgtctaggagagtgggggacgaggagagaacgttactagaggagagagccttcctgcaggctgagcagtgtgtacgttgattactcagtttatactttgagacccaaatattccccatagctttcaacagaatctgtacccttaaacaggacagtaccctgatacagattagctgttgatatggtttggatgttttgtttccttcatatctcatgttgaaacgcgacctccaatgttggaggtggagcctggtgggaggtgtttggctcatgggagtgaagccctcgtgaatggtttggcttgacttccccatggtaatgagtgagctcttattctgtgagttatagagagcttgttgtttaaaagagtctggcatctctcttgctccctctcttgccatgtgatgctggct

SEQ ID NO: 180768 - DNA, 573 bp, Homo sapiens
atgttttagtttgatttagattgtttgttatttagagctaaatgcaccataattaatacaaacacacttyggggataaacttgcccttgtgggtcttatgctttaaagttcatagtctagacaaaaagagagtattactcgtaaagtgactggcctacaaacacacccttatgtagaagaagaattggatacaagtgttacaatccatgcttccatatggcacatataacacctttaatatctttaaaccactgtcattttttaaagtttctttaaacatcttggattggatagtactaagtaaggtgatacctttcctcccttggtaaattataattaaacagatacctgaaatattccctttcccatggtgttttcccctagtggcactcctgtgtcctttccactgaatgcctggagcggtcattaaccttatagcttgcctgagcattttgagaatagggatcacgttttaattctttatgtacctttagcttttagaaaaatgcctcaaattcagtggactatcaacaaatgtattctaaaggaatgattcaaggaattaataaaaaa

SEQ ID NO: 180769 - DNA, 322 bp, Homo sapiens
gaattatgtgaaaagccagtaggttacaaaagagcttggacaagtcctgagctcatcagtaaatctggggaaggcatgaaggatgaaaatattcgcagaagtgaaattacatggaccatgtgtgctagattgaggagcttggatctgagggcaatgaagagacactaggagttttacggagcagaaaagtagagttagatttgtcttttggaraacttcactgaatatcaaccattctccacatttgttttgaaagacatattttaaatacatgtctataatttcttactcaaaacccttggaactagatataatttagaat

SEQ ID NO: 180770 - DNA, 414 bp, Homo sapiens
aacatacaatgatattgagcacattgttatatggccatttgtatgttttatttctttattttaatttgaattattttattttaagttctgggatacatgtgcaggatgtgcaggttacataggcaaatgtgtatcatggtggtttgcygcgcctatcaacccattacctaggtattaagcccagcatacatcagctattcttctggatgttctccctccccatacaccacccctgcccgccgacaggtcccagtgtgtgttgttccctgctccctgtgtccatgtgttctcattgttcagcttctacttctaagtgaaaacttgtggtgtttggttttctattcctgccttagtttactgaggataatggcttccagctccaaaggacatgatcttgttacattttgtgaattc

SEQ ID NO: 180771 - DNA, 576 bp, Homo sapiens
tttttcctattagttttaaagtttcctttctcttttactttctcaagccaaagccttgtttgctttttcttttctttctctcttttctcctttctttcatcctatccctatcaccatctctgtaaaaccatatcttcctgtattctactcctaaagtcacaggaaatttcattgaactgagattacaaactcaatttttgccttcttttttctctaatttagcatcccttttataataacatggttatgagcaatttgcatataatgccccattttcacctcaaaagttataaaaacagtcaacttctattatgtctagacaaacattttaacataaaaacaaatttctcttagttccaccagcctaatcattttcaactcaatattttatataatatgtgactactcagttaagtagtatgctttttttgtcattttatacatttttttattgtgaataactttttattatgacrgtctatcaatttgttatataaaagtttacttactattcctcttaatagtatctgttaatgtttattaaatgatgacaacgtacaggcattgttctatacg

SEQ ID NO: 180772 - DNA, 540 bp, Homo sapiens
gatgacctgtctcatagtgtcagtgggtgttgaagtctctcactattattgtggggttagtttcttcataggcctctaagaacttattttataaaatttgggtgctcctgtgttgggtgcatatatatttagaatgggtaatcttcttgtcgaattgaactctttatgattatggaatgccctgctgtcttttttgatcattgttggtttaatgtctkttttgtctgaaattaaaatagcattccatttgcttggtagatttttctccatccctttactttgagcttattggtgtcattgcatgtgagatgggtctcttgaagacagcatacagttgggtcttgcaccgtcatccaacttgccactctgtgccttatcattgggacatttagtctgtttatattcaaggtatatattgatatgtgcagatttgaacctgtagttatgttgttagctggttattatgtagatttgattgtgtagttgctttatagtgtcaatggtttatgtagttaagtgtgtttgtggtatggctggcta

SEQ ID NO: 180773 - DNA, 540 bp, Homo sapiens
gatgacctgtctcatagtgtcagtgggtgttgaagtctctcactattattgtggggttagtttcttcataggcctctaagaacttattttataaaatttgggtgctcctgtgttgggtgcatatatatttagaatgggtaatcttcttgtcgaattgaactctttatgattatggaatgccctgctgtcttttttgatcattgttggtttaatgtcttttttgtctgaaattaaaatagcattccatttgcttggtagatttttctccatccctttactttgagcttattggtgtcattgcatgtgagatgggtctcttgaagacagcatacagttgggtcttgcaccgtcatccaacttgccactctgtgccttatcattgggacatttagtctgtttatattcaaggtatatattgatatgtgcagatttgamcctgtagttatgttgttagctggttattatgtagatttgattgtgtagttgctttatagtgtcaatggtttatgtagttaagtgtgtttgtggtatggctggcta

SEQ ID NO: 180774 - DNA, 585 bp, Homo sapiens
tttcagctccattagatcactttggttctttcttaaagtcatttcatctttcagctcctatactgtttcatgtattccttagatttcttgaattgggcttcaactttctcctgaatctcaatgatcttcattcttatccatattctgaatttcacatctgtcatttcagctatttcagtctggttaataaccattgctaagaaactagtgcagttgtttggagctgagaagacactctgactttttcagttgccagagttcttgcactggttctttcttaacygtgtgggctgatgttcctttaatctctgaagttaccgttcgtggatggggtttttcgcttttgtatcctttgatgccctttggtggtttgattgtgaattaaggtgggtttggtcaactggctttgattccgccccttgagattaggaacctgctgtactagatgacctgaagtgttcctggtccactagctccaacacccagccaaaacactttgttcaggtggtagcagcaatatccatgctcactcatgtttgccagtgtaactgcccagtgggttcaccttgcctgcttcctagacag

SEQ ID NO: 180775 - DNA, 454 bp, Homo sapiens
tactcaatattataactagtagctggaaaaattgcacatcaaaattttaataccttcctatatttacagttgttatgtgttttatcatccttaagtattttaattttttaactttatctcttctttctttaatcaggctcatcaaaaatttctcaattttatcaacctgttcaaacaaccatctttcagcttattactttttgtttcataatttcaactttacagaactcttcctcctgccttgtttcattgtgtttacctatcctttaatcctccaggttttaagttaattgcaatcttaaacaatatatttttgtaattataagagttctgaagaacatgcattgtcctctaggtacaactttagtgtcactccrtaattgttcttcattatttctaaataatttttaggtttattttgtaacctcatctttgatccagagattatttagaa

SEQ ID NO: 180776 - DNA, 499 bp, Homo sapiens
aaacaaaacattttgtttatactgttagagcatctgttagtctaacagacccttctgtgtaattattgatgaggtctatataacagctctcttaccactaaattaactgaattaaaaaatayagcaaatctgtaattgaaatatgtttcagaactttcacacacatgtgatgcaaaatggatgcatcactcaaatgtaaagcataaaaatgcagatgattcagaagtctcattccataccgtaataaatacatttaaaaatatcttctttctatttacctcttatcatattatgactccaatactgtaggtaaaaatgaagattcaagtttttccaaggtggaagggctatgatacgactttacataatattaacttaaatttatgctaagtgccttcccagagatcccttggacttaataggaatacactaacagggactcatttgtgttttcaatcagtagtcacacgaccctgattgcttgttattcatacgtatt

SEQ ID NO: 180777 - DNA, 499 bp, Homo sapiens
aaacaaaacattttgtttatactgttagagcatctgttagtctaacagacccttctgtgtaattattgatgaggtctatataacagctctcttaccactaaattaactgaattaaaaaatacagcaaatctgtaattgaaatatgtttcagaactttcacacacatgtgatgcaaaatggatgcatcactcaaatgtaaagcataaaaatgcagatgattcagaagtctcattccataccgtaataaatacatttaaaaatatcttctttctatttacctcttatcatattatgactccaatactgtaggtaaaaatgaagattcargtttttccaaggtggaagggctatgatacgactttacataatattaacttaaatttatgctaagtgccttcccagagatcccttggacttaataggaatacactaacagggactcatttgtgttttcaatcagtagtcacacgaccctgattgcttgttattcatacgtatt

SEQ ID NO: 180778 - DNA, 551 bp, Homo sapiens
aagctttctattcccaatatgtctaattcctcaaaaaactctttttmtatgtttgtcaacttttcccacattagagaaaaaaaaagattaacttaatttactttttggtgcagaacacttaccccacatatgagagtttatatcttttaaaagagaagttttttattttaatgagatttttagttcttaaatcataaaatggaattactgacccaaagaggctaaattaccaattggacataaaagggaacacacacacacacactcacacacaaacaaacatacatacactccatacaaatatatgtttatttacaaataggagatcatctaaatgtgtaatgtatctggccaggccagagaaagataaatgtgtctatttgaaaaagttaccaaagttgatttttcccttcgtaatgttattttattattatttaaacagctttattaagataaggtggatatacagtaaattgcacatatttgatgtatacaagttgatgagtttggacatatgcatatgcctatgaaaccatcaccataatcaaggg

SEQ ID NO: 180779 - DNA, 551 bp, Homo sapiens
aagctttctattcccaatatgtctaattcctcaaaaaactctttttatatgtttgtcaacttttcccacattagagaaaaaaaaagattaacttaatttactttttggtgcagaacacttaccccacatatgagagtttatatcttttaraagagaagttttttattttaatgagatttttagttcttaaatcataaaatggaattactgacccaaagaggctaaattaccaattggacataaaagggaacacacacacacacactcacacacaaacaaacatacatacactccatacaaatatatgtttatttacaaataggagatcatctaaatgtgtaatgtatctggccaggccagagaaagataaatgtgtctatttgaaaaagttaccaaagttgatttttcccttcgtaatgttattttattattatttaaacagctttattaagataaggtggatatacagtaaattgcacatatttgatgtatacaagttgatgagtttggacatatgcatatgcctatgaaaccatcaccataatcaaggg

SEQ ID NO: 180780 - DNA, 556 bp, Homo sapiens
tgctgcaggattctatttacggtatttgggcttctgaaaacaaatagaaaaaagtcatctgtactaaccacaaatgcctaagctattaaagtaatacttggattctattcccatgtgttttgttttaattatagtttgatatatgaaagggcattatagactctacaaattagaaagtaaaacaatcggtagatggcacttcctaaccrcctgcttggtgtaaatatacatgatgaagtctcagaaatggtattctgtccaaaaatgggattctggacaataaaataaaaattggagtgacctgtaacagagacaatcatattttggcttgtataatgcccagatattttaatgtcacatctcataaagatctggggaaaaatctaatttgctgattttttgatgtgcatttcttccttaacattcctgagatttacctccaatgatgacaaaaaaagcaatgtaatgtactctataagacaatatggtacttcttcataacttaggcacttttcagagagccaagaatgtcaaagttaattgttcagtggtctca

SEQ ID NO: 180781 - DNA, 591 bp, Homo sapiens
atttggtggtgcagttcaggctgcagtctattagatgatgcttatgagtaagagctgacagataggctgctgctaagtggaagcaccttcctgatgaggatggtgggaagagattgtgttggggtgcactgaggtctcgtggaaagggtggagggttcaccagctccttatcctgatttaggaaaaacataatctgcttccctatcatgcctctgtcacagggctcatgaccttcagtttaaggattttgtcctttggttcccaactgcagtgtgccrctgtgggttatggatatgcctttctgatggctaccattaaaagtggggcttggggcatagtctcttctcgctctctagggaaggaatttccacagtatcttcttcattgccaggcactgccactctatgtagggaggggtagcttggcccccgcccccactgtgaaagccccagaagtcagggtttacttggggggtagagggcaacagacatgaaaagtgtgaaaaatgctttcccccagtgcacactctcattggctcccagtgcaaagaactgctgctgcacctgcggcagtgtacagggaggttgctgg

SEQ ID NO: 180782 - DNA, 591 bp, Homo sapiens
atttggtggtgcagttcaggctgcagtctattagatgatgcttatgagtaagagctgacagataggctgctgctaagtggaagcaccttcctgatgaggatggtgggaagagattgtgttggggtgcactgaggtctcgtggaaagggtggagggttcaccagctccttatcctgatttaggaaaaacataatctgcttccctatcatgcctctgtcacagggctcatgaccttcagtttaaggattttgtcctttggttcccaactgcagtgtgccactgtgggttatggatatgcctttctgatggctaccattaaaagtggggcttggggcatagtctcttctcgctctctagggaaggaatttccacagtatcttcttcattgccaggcactgccactctatgtagggaggggtagcttggccccygcccccactgtgaaagccccagaagtcagggtttacttggggggtagagggcaacagacatgaaaagtgtgaaaaatgctttcccccagtgcacactctcattggctcccagtgcaaagaactgctgctgcacctgcggcagtgtacagggaggttgctgg

SEQ ID NO: 180783 - DNA, 607 bp, Homo sapiens
ataaagtcaatattaaaactgtattatattcttatatacaaaagcagcaactgaaaaacaatatttaaaatttgtattttaacagcatttaaaaccactgaacacttcttaatatcgcaaagatgtatagtacttgtacaataaacattttaaaatttttgagataaagatctatataaacaaagagatattccatatttatggaaaagaagacctaatattgataaagagtttgttcttcytaagcttattgatagattcaatgcaattccaatcacattaacactgggctttgctttcatgtaaatactaaaaatgatcctagattttaaaatctaaaaggaaatttaaagttcctagaatagccaaaacactgttgaaaaggatgaacaagtttgaaggacttatactacttgatttcaagtcttttgctaaagcaatagtaactaaagaggtttgtagtaatataaggatcaatatattaatctcttgaacagaatagagggtccagaaataaactcacatgtatgaagacaactgattcgcaatgaatgcgccaaggtaattaaatgacaaaattatagtctgtatggcaactggtaactgt

SEQ ID NO: 180784 - DNA, 636 bp, Homo sapiens
gctggaataatgattaccttaggccaaagttgtaagctactttaaagttctgcattttctatattgttgtgggctcatacttgctaattgcattgacaaaagaaacagagagagaaagaagaaagatagttgtagaccaaagatgagcacatagcataagacaaagcttgctctgaatctctgatccatgaatgaaaaagataatagtagtctgttgtgttaatatctggtgagattgatttgtatgcagcatttcccacatttgcttgctcttgaatcatttgtccacagatacgctttgggtagtactgaagaacttaacatttcattggcagataagaacatttgagttatgagatgtaaaacaaacttgtcctttctgattccatacttcatatttttctttcttttgtttgtttcagtggttttaaaaataattttatcaattagtaagaattcaatttaataaggactggatactttacaaggtccttaatactattaataaaaaatcataaaagccatattctagcatctaaaggtgagctgtctaatatggtgtctacaagccacccagcactattaagcacttgaaatgtggatagcatgaccaaraaactaaattttaattttaat

SEQ ID NO: 180785 - DNA, 404 bp, Homo sapiens
gacaagtaaatcccattttctgaagagaaattcaagccagctgcagaaatttgtataagtaacgaggagctgaatgttaatctccaagacacccagggtccccatgctgtatgcagcctagagactttgtgccctgtgtcacaccgactccagccatggctgacagggactaatgtagagcttagaccgtggcttcaaagggtgcaagcctcaagccttggcagcttccacatgatgttcagcctgccactgcatagaaatcaataattggggtttggaaacatctgcctagatttcagaggatgtatggaaatgcctggatgtccagatagaagtttgctgcaggggcagggccctcatgsggaacctctgctagggcagtgtggaaaggaaatgtggggcca

SEQ ID NO: 180786 - DNA, 642 bp, Homo sapiens
cattccaggtaaatattgatatgtcagtctttgatcctatcataaagttgttagctggttgctttgtacctttcattgtgtggttgctttatagagtctgtgggctatgtacctacgtgcatttttgtggcaacagttactgttctttcatttccatgtttaaaactcccttaaggatctcttgcaaggctgctctagtggtaacaaattcccttagtactagcttgtctggaaaagattttatttctcttttgcytctgaagcttagtttggcaggacatgatattcttggttggaattttttctttaagaatgctgaaaataggcccccaatatctccaggcttataaggtttctgctgagttcactgttagccttgtgaggttctgtttatatgtgatatcacatgcttttctagtgcctttaagattttttctttattgttgatctcagatagtctggtgagcatagccttggtgatattaattttgtgtagtatctcatagatgttctctggatttcttgtatatggatatctacttctctagcaaatttccttgaattatttcctcaaatatgttttcctgattatttacttattttcctgctctcttaggaatgccaataatttgtaggtttggt

SEQ ID NO: 180787 - DNA, 642 bp, Homo sapiens
cattccaggtaaatattgatatgtcagtctttgatcctatcataaagttgttagctggttgctttgtacctttcattgtgtggttgctttatagagtctgtgggctatgtacctacgtgcatttttgtggcaacagttactgttctttcatttccatgtttaaaactcccttaaggatctcttgcaaggctgctctagtggtaacaaattcccttagtactagcttgtctggaaaagattttatttctcttttgcttctgaagcttagtttggcaggacatgatattcttggttggaattttttctttaagaatgctgaaaataggcccccaatatctccaggcttataaggtttctgctgagttcactgttagccttgtgaggttctgtttatatgtgatatcacatgcttttctagtgcctttaagattttttctttattgttgatctcagatagtctggtgagcatagccttggtgatattaattttgtgtagtatctcatagatgttctctggatttcttgtatatggatatctacttctctagcaaatttycttgaattatttcctcaaatatgttttcctgattatttacttattttcctgctctcttaggaatgccaataatttgtaggtttggt

SEQ ID NO: 180788 - DNA, 449 bp, Homo sapiens
aagcaggtactctgaatgcctagtgatctgcataagcctgtagcagaaaggcccccttaccccctgcaccaggatctctgcacaggaatggtagggcagctcaggctgctgatccaagcaagctcatgctccaaatgcctgaagatttgcttggccatggaatggaaagggcctcactgcaccacaatctatgtctaggaagggtggggccgctcatgctgctagttgaggtaagtgggtgctctaaatgcctggattttcacctgggagwgaaagggtggatcacagagggccctgctgcaccctgatctcaggggagaagagaggggcacccagccatggcacacacagacaggtttcaaatcaccaaactggctctggctgtaagtctctctgtccagaagaaactgcagctgtagcggctctcttatcattccagacttgcagca

SEQ ID NO: 180789 - DNA, 593 bp, Homo sapiens
tgccacattgattgactcttcctttcatgaaagattttttgtactgtgtaatgctgtttgacaggatttcatctacagtggaacttatttcaaaattataatcagtcttctcaaactctgcagttgcttgatcaactaagtagatgtaatattctaaatcctttgtcatttcaacaatgtttccagcatcttcaccgaaagtaaattccatccccaaacaactgctgtctttgctcatgcataagaaacaactcctcatccacccaagttttatgagattgcagcaactgaatcacatcttccacctccacttctaattctagtttcctttctgtttttactgcatctacagtgacttcctccactgatatcctgaacccctcaaaggcatatatgagtgtkggaatcaacttcttccacactcctgataatgctgctattttgacctcctctcatgaattacaaatgtgtttattggcatctagaatggggaattttttccagaaagctttcaatatactctgcccagatccatcagatcaatgtctatggcagctgtagcctcttgaaatgtatttctaaaataataagat

SEQ ID NO: 180790 - DNA, 593 bp, Homo sapiens
tgccacattgattgactcttcctttcatgaaagattttttgtactgtgtaatgctgtttgacaggatttcatctacagtggaacttatttcaaaattataatcagtcttctcaaactctgcagttgcttgatcaactaagtagatgtaatattctaaatcctttgtcatttcaacaatgtttccagcatcttcaccgaaagtaaattccatccccaaacaactgctgtctttgctcatgcataagaaacaactcctcatccacccaagttttatgagattgcagcaactgaatcacatcttccacctccacttctaattctagtttcctttctgtttttactgcatctacagtgacttcctccactgatatcctgaacccctcaaaggcatatatgagtgtgggaatcaacttcttccacactcctgataatgctgctattttgacctcctctcatgaattacaaatgtktttattggcatctagaatggggaattttttccagaaagctttcaatatactctgcccagatccatcagatcaatgtctatggcagctgtagcctcttgaaatgtatttctaaaataataagat

SEQ ID NO: 180791 - DNA, 593 bp, Homo sapiens
tgccacattgattgactcttcctttcatgaaagattttttgtactgtgtaatgctgtttgacaggatttcatctacagtggaacttatttcaaaattataatcagtcttctcaaactctgcagttgcttgatcaactaagtagatgtaatattctaaatcctttgtcatttcaacaatgtttccagcatcttcaccgaaagtaaattccatccccaaacaactgctgtctttgctcatgcataagaaacaactcctcatccacccaagttttatgagattgcagcaactgaatcacatcttccacctccacttctaattctagtttcctttctgtttttactgcatctacagtgacttcctccactgatatcctgaacccctcaaaggcatatatgagtgtgggaatcaacttcttccacactcctgataatgctgctattttgacctcctctcatgaattacaaatgtgtttattggcatctagaatggkgaattttttccagaaagctttcaatatactctgcccagatccatcagatcaatgtctatggcagctgtagcctcttgaaatgtatttctaaaataataagat

SEQ ID NO: 180792 - DNA, 593 bp, Homo sapiens
tgccacattgattgactcttcctttcatgaaagattttttgtactgtgtaatgctgtttgacaggatttcatctacagtggaacttatttcaaaattataatcagtcttctcaaactctgcagttgcttgatcaactaagtagatgtaatattctaaatcctttgtcatttcaacaatgtttccagcatcttcaccgaaagtaaattccatccccaaacaactgctgtctttgctcatgcataagaaacaactcctcatccacccaagttttatgagattgcagcaactgaatcacatcttccacctccacttctaattctagtttcctttctgtttttactgcatctacagtgacttcctccactgatatcctgaacccctcaaaggcatatatgagtgtgggaatcaacttcttccacactcctgataatgctgctattttgacctcctctcatgaattacaaatgtgtttattggcatctagaatggggaattttttccagaaagctttcaatatactytgcccagatccatcagatcaatgtctatggcagctgtagcctcttgaaatgtatttctaaaataataagat

SEQ ID NO: 180793 - DNA, 561 bp, Homo sapiens
atacattgatggcagtaatatatttaatatgtattatttaaactgaatgttttatttcaatagacatttattggctgcttagctatatgcatagtactgggatcaatttggaaaggagagggaagaaaatactgttgtactctttgccctaacaggaagattctatctcttcttgcttaattcaagcccccctccaagataggagaatctgctaattcaatcagagtcttgaatttggattggataatagttattagtgagtctggtgactggagtctggtgacatttaaaggatagaatgcacatgtgcagatagcactctcttgcactttcggattctccttttcatatggaagcagacatcagcacggtcaatagccctgagctggatgcagagccacgtctctcctctttccatctcaggacttaaattcagagggacctaggggatcgcatttaagcctcaggcttkgtatatattctccaatctaatttttaccagtgctctgatttaaaggttaaatggtgctattccattaaatatagtaatactttgttttt

SEQ ID NO: 180794 - DNA, 562 bp, Homo sapiens
cttaaatttgagcctaaagatcaaacattgaatttcagtgctgtgatagaaaatccttttacacgtgcaaattcaatgtatgtttaataaaagaacaacttccttcttacatcagggctcagattttcattttgctagcaggaatattcattacaatcccaatcccgtaatttgtgttgctgtcatcttcactgtcacctagtatactaaaaacattaatgaggcattacattttcaatttgaaaactaagtgtatgtcaaatatctgcttgtgtattaaacttttaaaatgttctatatactgtaaatggagtagtatattttgtattgcaggagggctatagtatctaatgtgtattgggtcttttatgggaatattattctggtttaaaagataggagtatttgattctaatctacattcaaccaagattagagctaactgtgtgattttaggsagatcattttacttttattgatctcagattcctgatttgtaaaattatggctctctcctctaaaagcctgctgtaagcagaataattggtcacccaaagatgtcc

SEQ ID NO: 180795 - DNA, 363 bp, Homo sapiens
cctcctgcataaaaaaattaaccaaattgtgaatgcaaaggcaaaagtcttgaagaaaatcaaaattgctactccaataggcaagtagaacacatgatgataagaagcaaaacagccttattgctgatatsgagaaagttttagtggccaggacagaagagcaaatcagccacaacatttttttaagccaaagcctaatccagggcaaggccctaactcttttaaactctatgaaggctaacacaggtgaggaagctgcaaaagttttaagctagcagagataagttcatgaagtttgaggaaagactcaatctccataataggaaagtgcaaagtgaagcagtaagtgcttaggtagaagct

SEQ ID NO: 180796 - DNA, 586 bp, Homo sapiens
gccagcttgccagccaaggagcccactgagagatgagccaggggagagtgagtgagcacacagactcacattggaacttgcaactccacttagcacaggggagctgagctgtattgactcacaccagcaaaagccacctttctcaagctctctcacctccccaacattgttcctgttgcctgattgcacctggagaatcaaattttcttggggcacagcccaagtataattgagacaacaggactatttcctactagtggagaactaagcctttgcaatggaaaatacagagggaagaaacaaccaatattgtcataaaccaacacataagacacactcaaattttagcaactcagattagaagggaggcagaaacagctacagctactgggggaaatgggaggatgcctaggaaggaagtggttataggggctggcacttgaaaaggcatagtatgtcccatctccaaaagaataaaaataatagaaattacttatatagmatacactatatgtcaggaactattataaacactttgtaaaataaatataaattatttaatcttcacagcaaccatacaacataa

SEQ ID NO: 180797 - DNA, 583 bp, Homo sapiens
acttacaaaatagcaagcactctgcagctcaagccttgcagacagctaagcaatgataagaccagttgtgtctactccttccttctccattcattcgctattagtcatttgacccattggagtttgtagatatgaactgagtttgtactctgaagaaatggcaaacagttttttgaaagtgaatcacaaattttgatttgccaactactataatctagtttcacagagcgtggagactatctgggattcagagagggcaagcaaatgtttagatagtagctgtctrtgagtagataacatgatctgtgccagccatgctacactgtccctgcttttatggagattccggtctaaaaggaaagaccagtattaattacctaatccattagtgaatgctacctgcaaaacaagtgaggggctctgacggaaaggaagacaggtcaatatcagggactcataatggaagctgagctggccctggggcagcagaagggcttgccttgagaaacaggtgcttgggttgagagcagaaagatgaaaagccttttttttaggtggcacaagagagatgagaagagaattc

SEQ ID NO: 180798 - DNA, 614 bp, Homo sapiens
ctggtgccaacttaactcagtgagactgacagaacgcccatgagctctttaccaaacatctgtcttcacgggtgtgtgcaacatcttctgtgtgctaagaaccagtttcaagttcaggattgatttttccagcttagtgcagaagataaataatgaacgagagtacagtcagggtaatcacacattttagaattagaaagatgytgcaactacttgagatttggtatctgatatctggaaataatatgctgttcataacaagagcatctaattggataacaatttgatatttaatggtgcagctcatcctgctgttaatcctctcctctacagttcctgttctaatgaggttagcactaaatcagtatgctggctcccctaatctcttgagaatcaacgagtggtcttcatcattaagacttccacaaggtaatgagaaaattttcctgaatatttgattaaaatacaaataaaacaaatggaacaaatcaatatttgctggtaacagtactgtagaggatttgaacagttcatgggcctcactctctcctatacgttgtgattgccttgctgagaatggggctctctgcccatgtacaagactggaggagctc

SEQ ID NO: 180799 - DNA, 546 bp, Homo sapiens
ttaatcctctcctctacagttcctgttctaatgaggttagcactaaatcagtatgctggctcccctaatctcttgagaatcaacgagtggtcttcatcattaagacttccacaaggtaatgagaaaattttcctgaatatttgattaaaatacaaataaaacaaatggaacaaatcaatatttgctggtaacagtactgtagaggatttgaacagttcatgggcctcactctctcctatacgttgtgattgccttgctgagaatggggctctctgcccatgtacaagactggaggagctcaaacctggactaaggatctcacacaaactttctaccctataagaaatttgctgggagtaatgatgaatagcactcacaacactcataactctgacactctacctgcaacgatttaaacatttttcatattttgacccatctaattatgataayagtattgggaaggtgctgtcattatccccaatgcattcattaaagtaggccagctgacgttaacaaataaacccaaatatggaatgactggac

SEQ ID NO: 180800 - DNA, 524 bp, Homo sapiens
ttattttactatgtactttacatgtattagctagttaaatactcatgacaatcttaggagttaggtacctgatctactgataagaaatccaagctacagagtgctaactaactagacaaaagcrtcatggacagtaactgccaggctgacattcatattcatgcaatttggatgcaatgcccatgcgctttttttttttttttttttttttttttttttttttttggaaaaaaagttttactttgtcacccaagctggagtgcaggggggggatctcgggtcactgcaacctctgcctcctggggtaaaacgatttttttgcctcagcctcccaagtagctgggactacagggcgtgcaccacccacacccgggttttttttttgtatttttagtagagatggggtgtcaccatattgagcaggctggtctcaaactcccgaccttgtgatccaaccacctcggcctcccaaattgctgggattacaggcgtgacccaccacagctggcctgcccatgctctta

SEQ ID NO: 180801 - DNA, 604 bp, Homo sapiens
ctaccctataattatgagaatatataattagggctagttgtcaagcacttccacggagttccagagatgaaaataacaaacaagaagcagaggtggtctgcagatgacttagcgtttaaaactccaactttgtgttcactgctacaggctcttrggcttatctattatggtacctggaagggaacatgttttctatcacaaacttagccctggaacttatgtgtatattttgctattttctgctccagtgtattatttcctaataatatgagattgatggacactttaaaacactaatttttgttttgtttgtttgtttgttttctttctcgatctgtttgctttgggtagtgaggcttattgcttcttcttcataagactaacaccaagaagtgtaaatttaagtatcaggtctttattgttaggcaatgtgtaatggaagccttaaaaatcaacatacattttggattagacatttcatctttacaaatatatccaacagaataattagagattggtataaatatttatttataagaacatatactgaaacattatctgttacaatcttgaactgaaaaaaatagttattcaacaatagggg

SEQ ID NO: 180802 - DNA, 498 bp, Homo sapiens
cattaaataaatgtgaacctcaaatgggcaaatatttagtaagcatataataaacaccaggcacagtattaggttctgggagacatagatcaataggaaaagaccattgccctggagaagccctcttcagctggctaaagaatacttcctgcagctaaaatagactcactatgtttcacaaacaaatgaataaacacttctctggtccattagtccattagtccattagtattttctgcctttcgcttcctctgttgttatataatctcaaagtgagaaractttggctgtagttgcctatgcactgttgactagccacttgtgctactgttcccactgtatcaatgtggtcctgcaaaacaaatatgaaaattcccataacctccgtcttcatgggtatgttcaaaagacaaaggatatgcaggggtaaatattattttgataaagctctctgtgtgcagaccttgaagctgacaacctctatgggtagcccagcct

SEQ ID NO: 180803 - DNA, 435 bp, Homo sapiens
aattccatgttccttttattgtccttattgggttctggaaataggagttggactgaacaatttcaaaggctcttccaattttccaacttctagaattcatattagaaattcatagaggttaaatcttatyacatcaaagccacagagatggaataggaccatctttatggctgaggaattaaagactagagaaattaaatgactttctcaagttagttgtcagctttatcaggatgagaacccagatgcctcagtatgtagttcgctgtatttccaatgggacctctgcttttccttaattttctcactgccataattagcatggatgggtaaccaaggagaccactgcaatgcaaccaggctcctccttgagaaatggttctctttttgacttattcttcctgttctcacttaggtgcctatcaccattctaat

SEQ ID NO: 180804 - DNA, 631 bp, Homo sapiens
tattttatatattatgaagataattgttcaaataaacttatgtgtaataatgtagtttgctttatgtctctaaaaactaattttgattaaaattttaattaaataaaaatattaaattagaagagattcaaggatatttatgtaataaaatcattctcactcattttctagaatattcttttgagtgagacagaagtggacttatagctgaaattaacataccatgaatataccatggaagcatatttatattaatataaaaaacaaaagaaacaaaggaaaaaacaaataaaagaaaaatctattgaggacctctattctaaggagtctgacatttggttgcaaagctctagggccaaggayctcctggtagcatttccttactaagcaactctgctacaaagtcttcattgagctatgtgtctccagggccccttcctggtgctcatcacagccgatcttttctcacccttggcctcctgcaattcttcttgcttctgtctggtgtctcctcttggcattctggaaatggctctatctcttgctttgcaaaggaagggaggcttttcctgcagactgttccagaaagatcttaggtactatagactcccttctgcctccgcagtgctac

SEQ ID NO: 180805 - DNA, 568 bp, Homo sapiens
ggtttgtatattcctattctgtatttctttgtccctgcctactgatttgattagtgaccaagttcacgactgatgttattatgtttgcttttgatgatttatgtaatagttaccatgtgcagaagcaaccccaggacccacatatccagaaacaagactggattgggtgtgtgataaatggaaacattatgaacacagctgcaactgaatgatggtctcttttctgtcttcaagtatggcaagggtggtggtttctgtggtggcatttgagggtcactcagaatctctcaaccaggttgaatcacttctctgaatgctcttgtcatttgtgccactgtctttgggtgtagtcatttccagagacgttgtaagaggttctgtttgagatggcatcacactatttcataamcctgacttgcattattttgaggctacccatccccagaagtgaagttttccaggatgagaggggtgtgtgctcatgtgatacaactacacatgtgatttactgttattaattctccttgttgctgcatgtcagatgcctggaaagatatgtagagaaagt

SEQ ID NO: 180806 - DNA, 488 bp, Homo sapiens
ggaattctagataacatcaatgatctatggacacaaacttttatcagtatacaataataaacagtcatttagttcatgagtctgcagggttctgctgatctggggtaagctgatcatgtcagttggcctggtttatgcatctacagtcagctgcaagtcttctaggtggctctgctgatcttagctgagctcattcacatgtctaaaaatctgctgtcagatggctgatctaagcaggcctcatctgggacaactggtttaccaggctctgatccctaagggttccatcttttaatgtgttaattgggcatgttcttatggcagtggcagaggtcaagagggaagaaagcccaattatgcaagtgttttaaagcgttgcttcacattaggtttgtgaacatctcattggccaaggaaagtctcacrgccagatccagaggcagaactggaatacactacaatgtggcatagcaaaaggtgagcaccta

SEQ ID NO: 180807 - DNA, 614 bp, Homo sapiens
taaattgaaatttggatgcttgtaacggaaaactcaaatcagatacttaagtaagagagacttgtatttttttcacattaaagaagtctagaaataacccattcaatgcatgcttagcatttctgtggtcattatggacctaggacatttttatatttcttctctacgaggcttagcatgtggtttccattctcaagttgtcacagggtctgaagtggctgtcagaactctatccatatttgaagcacaaataaaagaatgagaaaaagaaaatctaccagttttctgtcttttagaggggtgttctctgaagttccactcaagaaattttgcttttttttttttctattaaccgaaacgtagtctcatgatcatctagctgttaaaggaagtggggaaatgtactgttatctgggaagtagcttcaaaaagaattggggttatgttgttaagggtaaagtagaatatattagacaagcaaattgtaatccctggtgtagcttcccagtatgcagtcatgtgatgttatagaatttatttgttgttgcacattsatggttttttctaacattttcattaacataagcacattgtgaggaacttgattatgtaac

SEQ ID NO: 180808 - DNA, 585 bp, Homo sapiens
atcaaaataaaatctatgtgtatatgtgtgtgtttgggacaggaacaatgtaaagctaggttaaaatatgtcaatgaggccaaatgaggattttgagaatactgcagacaattcttacctactacacaatttagcttacatctagcattgcttaggcctggaatgcacagatgattacaatgcagtgagcagarcactggacatgcagactttgtccacagcttcccccctttctactttttccccttggattgtggtttcttcatctatatagcgaaataatgatgtctatcttcctttctccaagtgttaggatcaaattcactaaccaaagaaaaaattgtaaaagcaatgtagaacttaaggaggtgcttcttaaggagagaataagggaatattggaataactcaagggacattttcatattatacttgctccttctccaagccctcagttgtttttccctgatatttctaatttttaaaaccccaacattttattatgatatattttcaaacattcataaaagtgagtggaatagtgtaataacttgctattattcatggcttagctttagcaattatt

SEQ ID NO: 180809 - DNA, 479 bp, Homo sapiens
cttaagtagaactaaggaaatctgaaactatgaactgtagttaataataatgtgtcaatattggttcattaattgtaacaaatatatcattaatgtaagattttaacaatagaactagttgtggggtgtatatgtaatttaaaactattctcaaaaatagtcaattacaaattttaaaagtcaccatttggcaaatatcatcgtaataattgttgcagtcagttattgtcaatggatattaaaattagggggcaaaaatacttgtgtagtttaaagtatctgagggtaaaatgcytattaattacaaaggggaagtaagtaactacagtggagaaacctggcagacatcaccttaaccaaatgatcaccttaaccatttcagcagtaatgaaacatagcggcatcctgtgcctcccactgcgattcaatgtccccataggcagtgattctccggttttaatatttatatgaatcaccta

SEQ ID NO: 180810 - DNA, 585 bp, Homo sapiens
gtaaataacataacatttctgccctcagggacctcacaatttaggccaagttagaatacgtgcaaatactatgatatagaatatgataacaaatattggaaataatactccggggagaatggaggaaggagcaatgacgttagagtagctggattaggaaaggacgcagggagagttaatgtcattgcccaatacccagtatgatctggtttgttttatagttcttattcctcttttttttttttttgtttgagcagaatgtaaatgacaaggaacctctttctgacctstacgagattctttgggtcaggagagatttggaactctggaaatagaaaatgagaataaccttgcagatgaagaagggactataagagagttgcagaggtagggtggaaagggtgtctgaggagagtggcaagtctcacatgtgaaggcagagtttatgaaggagatttgacctgtgctgaatggagagcagtaaacgttcagagaaacttgatgtgttcagccaaaacaaatgaacaacatcctgaaagtaaactggttcatagaaggtccagagtaagaattatgatggtgtta

SEQ ID NO: 180811 - DNA, 551 bp, Homo sapiens
ttttttatcttctattctctagcatgcatggcaaacaggcaccaggtgttccagtcctctttggtagcacaattagtagcaaaccatgcatggagtacaattgcttggcccccgagtgatttggctctccaaactgaagaggctgagagcaagctggtgcttccctgaccactcaaatcacagctgggtactccattcataggactccctcccagcctcatcagtgtgtgtccaacctatctgggctcacagaagcttggatagaacagaaggaaacactttagattgctttcaggcacaattcaccatattggttgtttgtctatgaagagtagtgaaaatgggtcctagattttgttttatttgcagaggacttttataccaataatgtcagttgttcaagataatgttccraaagaggattcatttattccaaaattttagtggcaaatactaaaccagaaaaactgtttatgtcaaaaaatgagtcagacccttgggttccaagagactttggccattcatctacataatctttaaaaattataaaa

SEQ ID NO: 180812 - DNA, 625 bp, Homo sapiens
aagttcatacttgaatgaacttgaaatgaatttgtaccaatagccagggagtaaatcaagatacttcaaggaatgagagawaatgcttcataaatgagtgcttcagaatctggaattggaacctgggattacaatgctgtcaggtctttcttactgtccatccatctcatccccacctgactctgcttctctttgtatatcagttaaattacttcctactacagagaagccttcttcatgtggcagtgaatatagctcctatcagcttcagcttagcacaggaaaagtctttcccttttcccaatgaccttgtatcaatctatggaaacagtctggcttctcctgcttcaattaaatgccaactattataattaaggtgcacaaagtccattagtaagaggggaaatctaattgggcagggaaaaaatgcaatttcagtctatttcaaaggctaagaatcaatttctttactgtcatcatttgctgagtatccccttcatcctaggcattcgactaaggactgtcaacgcagataaaatctgtaattcctaaaacattactttatacacacatattaattagttacttttttccctcgatgggctcacgatatactttgagagcc

SEQ ID NO: 180813 - DNA, 625 bp, Homo sapiens
aagttcatacttgaatgaacttgaaatgaatttgtaccaatagccagggagtaaatcaagatacttcaaggaatgagagaaaatgcttcataaatgagtgcttcagaatctggaattggaacctgggattacaatgctgtcaggtctttcttactgtccatccatctcatccccacctgactctgcttctctttgtatatcagttaaattacttcctactacagagaagccttcttcatgtggcagtgaatatagctcctatcagcttcagcttagcacaggaaaagtctttcccttttcccartgaccttgtatcaatctatggaaacagtctggcttctcctgcttcaattaaatgccaactattataattaaggtgcacaaagtccattagtaagaggggaaatctaattgggcagggaaaaaatgcaatttcagtctatttcaaaggctaagaatcaatttctttactgtcatcatttgctgagtatccccttcatcctaggcattcgactaaggactgtcaacgcagataaaatctgtaattcctaaaacattactttatacacacatattaattagttacttttttccctcgatgggctcacgatatactttgagagcc

SEQ ID NO: 180814 - DNA, 557 bp, Homo sapiens
attattgggcgaaaggaaaaaggtcaaaaacacatgtaaagatagatgccagctaataagccctaatattcagagtatgaactgtaataattcccttagcatccacagggattggtttcaggaccactgtggataccaacatttatggatgctcaagtcccttatataaaatggtttagtatttcatgtaacctacatacatccttccatatactttaaatcatctctagattacttataatacctaatacaatgtagatgctatgtaaacaattgttatactgtactgttttttattcccattgtgttttattgctgtatttttatttttgggggtatttttgatccacggttggttggatccacagatatggaacctgaggatatggggtatccactatataatggtcaaattactatttctgaaaaataatagccacattaaraaatgggatgaaaagaaatcaaattacaaatttcactgacatatagccaagaatctagtctaccaaaacaccctctaccttaaccagttacctccataattctcatacaat

SEQ ID NO: 180815 - DNA, 624 bp, Homo sapiens
aagtaatacagaactctctccatgtgtgctctcatgctgttggttcgtgtatattaaagtctaccatgactgatagccctatatggttatattttatttccccaattacagaatttagtccttgagaataggaataatgctttgttcacgtttatttcctctataaggygtaaacagaaacttttacatcgcaagggctccaaaaatagtgtaagtttagggtaagtttggctatcatctattatacactccatatcagtatatgtggtacttctagtccattcaacaaatataatacaaatataaaacaaaaataatacttcacagtgaagtattatttctttttgtaaaagaggtatctgaggcacagacaagattaataactttaaagtcatccagttagtgactgaaatgggactcacacccaagtctgattccaaggtccatgtgattttctgccacaccattctgattcaattaaatgttaattaagttgggatgacctcaccaggcagaaaacttgtagaagaaatagaattgggttagatatgaaacaacattcctccctcaccaagtccactttataagttctctcattgattaaaagtgggaaataaaccccaa

SEQ ID NO: 180816 - DNA, 660 bp, Homo sapiens
caggttctagctctgccatttatcaaagttattgacctttctgagtcttgtgtgctcaactataaaatggagataactgtgtcaacttcatagagctttctgagggcaagtaaggttatgggtgtgaaagtattttgcaaactgaaatgtggtacaaaacttgaagcaayagattgagtccctttctattttacctacatagatgctatgagggcttaaatatttaatataatgcaacatctgggcacatgagccaaaattatacgggaagcagattggagtcagcctgccaatcatgtactgtgctaagtgcaattccacagtgaactacatgtaatacacagctgatacgcagagaatttctcctgtgcaattcaggtagcccagcttagaggtccctagagccacagtggtgcaagcactggataaaagagacgcttcatgcctctcatcacctgtgactgtttccacagagaagaacaactgaattttgagacccgaggtcagagggacagctgtgatgcactgtttaaatgttttaatagctttttcaaattactgggttgagtataatggaaattttattaccttaccttcccatgaagctattcaagtgatgtgtcatcagaagagtgaaaaggatgcatatagaatcttgtt

SEQ ID NO: 180817 - DNA, 660 bp, Homo sapiens
caggttctagctctgccatttatcaaagttattgacctttctgagtcttgtgtgctcaactataaaatggagataactgtgtcaacttcatagagctttctgagggcaagtaaggttatgggtgtgaaagtattttgcaaactgaaatgtggtacaaaacttgaagcaacagattgagtccctttctattttacctacatagatgctatgagggcttaaatatttaatataatgcaacatctgggcacatgagccaaaattatacgggaagcagattggagtcagcctgccaaycatgtactgtgctaagtgcaattccacagtgaactacatgtaatacacagctgatacgcagagaatttctcctgtgcaattcaggtagcccagcttagaggtccctagagccacagtggtgcaagcactggataaaagagacgcttcatgcctctcatcacctgtgactgtttccacagagaagaacaactgaattttgagacccgaggtcagagggacagctgtgatgcactgtttaaatgttttaatagctttttcaaattactgggttgagtataatggaaattttattaccttaccttcccatgaagctattcaagtgatgtgtcatcagaagagtgaaaaggatgcatatagaatcttgtt

SEQ ID NO: 180818 - DNA, 506 bp, Homo sapiens
atttttcttcaaatgatgtaaatgcttgatatttttaataatatcaggggttacatgatactctctagatgtctattccatttattttatggtcaaaaaattacaaccctgctttcagatctaaataattctcataactcccakaaacacattacagtctttccacctgttaccaagtgagagcaaagcttaacaactggctttcatttctggtacattcagccagcaattcatttctgcccatcccacaaagaaaatgcatgtgcaaaaaaaaatatgggcatgtgttcatgattattcttttcaatcagacatcatcataccggcaatattggaaccttcctgttcctggcatcacaaccactcccttccaaagcaaaggacatgaaccctgcctgaactcctgtaccagcaagtcaagggcttctactgaggatctttttcagagtcatgcaaaattgagttcaagaagtgtagactgaaagtagacagggcctgttcttttt

SEQ ID NO: 180819 - DNA, 353 bp, Homo sapiens
tcacacactacatttggttgttatgtctctgaatcttttttaatctagtggttgggagttttgatagctggttttggtggctgaggacaggagtgtcgaagaagcaagggtgaggtgatggattttaagatatgctaaaaggaaatctttagaatcacagagcctgctagtagtagggagatgtaattgtarcttttatgactgaaataatatttttaggcccatgtcaaactttaaaaaatgcctcctttaaagtagtcttatttatatattttgttctatgtgaaacatatagctgaatctgagttgctatttagaatgtttagtcagtaactgaagttatctgttttaca

SEQ ID NO: 180820 - DNA, 401 bp, Homo sapiens
cgataaactttataaatttaatcagtgaagaagggagggagagaaacaaaaataaaccaagcttgcaacacattcagcattcatcaggaggtcttcttgctctctgacctggttcctcatggttgctggcagcctactgttccaaaatcatatagaccttagattacagttccccttaacttccctgcagacaacsatttaagcattgtaaaacattaactttttcatgtgagatattctttcaggttctgcatgtcagtgaaactactgatgccagctgatctgaagggccctgcaatgcaccaactcaccaaagaatgcagtttctacatcctgttgacttcttccctcttaccgctaccccaactttccggccccttgctatccaggatccactggaa

SEQ ID NO: 180821 - DNA, 467 bp, Homo sapiens
tgatagcatttcctgcttggcattttttgcctacatttttggcataagatctatcaacaaaaagtatgaacccaggtttgtgtaatggaatatcttaaacatcaataggaggagtcaatagttctgatgccacacacacacatgtatggtcttctccaycatcagaaaatggcaacaaagtggtagagttatgcagagtgtagcatttgaaatggagatttgaaggtgacaaggaaaggattttgtaagacattagtgtacaagttgagcaatgttggttcctgtcacaatatttttattgatttatttattttattcatttattttttgagatggagtctcgctccgtcaccaggctggaatgcagtggcacgatctcagctcacttcgacctctgcctccccggttcaagcaattttcctgccttagcctcctaaatagccgggactacaggtgcatgccactac

SEQ ID NO: 180822 - DNA, 436 bp, Homo sapiens
gaattccttggttcgtgtcgattgggagatcttcgccccactttgggctgagctgatgtgtacactgaggaaagtcaggcagcccaagaggatcttcactggtcccactccctgcccttcctgtggctcatcaccgtctgaggaactggagctccatctttgctkctagggaaggcgtgcctagtggggttgataaatccaaagttctcttccaggcacttggacactaaaatctagtatgtaagtgcaagttatgtttgttttttcttatttccttttttaataattctaaaattttattaaagaacatttgagacagggtttcgctgtgttgccccagctggtctgaaactgctgggcacatgggattctcctgccttggcctcctaaagtgccaggattactggcatgagtgattgtgaccaggccacatgca

SEQ ID NO: 180823 - DNA, 436 bp, Homo sapiens
gaattccttggttcgtgtcgattgggagatcttcgccccactttgggctgagctgatgtgtacactgaggaaagtcaggcagcccaagaggatcttcactggtcccactccctgcccttcctgtggctcatcaccgtctgaggaactggagctccatctttgctgctagggaaggcgtgcctagtggggttgataaatccaaagttctcttccaggcacttggacactaaaatctagtatrtaagtgcaagttatgtttgttttttcttatttccttttttaataattctaaaattttattaaagaacatttgagacagggtttcgctgtgttgccccagctggtctgaaactgctgggcacatgggattctcctgccttggcctcctaaagtgccaggattactggcatgagtgattgtgaccaggccacatgca

SEQ ID NO: 180824 - DNA, 325 bp, Homo sapiens
aagcttggtccctcagcaggctccgccctgcaagctccaggagtctgggtggagtccggatgctcatcttcatgaatctgcagggaaaacttccagaggacaaacccagagaaaaggcatcactctcaggccaagcccatgcaatctcatcttctcctatggccaaactcactgctctggcaatggtgaaasagtcctcagtttactccaattctactctgtactcagtggccattaagccagcattctgcctctgctgcatcagcatgagcgtctccgaagcagtgaggaagcagggccaccactagcccttcctttctatcca

SEQ ID NO: 180825 - DNA, 325 bp, Homo sapiens
aagcttggtccctcagcaggctccgccctgcaagctccaggagtctgggtggagtccggatgctcatcttcatgaatctgcagggaaaacttccagaggacaaacccagagaaaaggcatcactctcaggccaagcccatgcaatctcatcttctcctatggccaaactcactgctctggcaatggtgaaagagycctcagtttactccaattctactctgtactcagtggccattaagccagcattctgcctctgctgcatcagcatgagcgtctccgaagcagtgaggaagcagggccaccactagcccttcctttctatcca

SEQ ID NO: 180826 - DNA, 325 bp, Homo sapiens
aagcttggtccctcagcaggctccgccctgcaagctccaggagtctgggtggagtccggatgctcatcttcatgaatctgcagggaaaacttccagaggacaaacccagagaaaaggcatcactctcaggccaagcccatgcaatctcatcttctcctatggccaaactcactgctctggcaatggtgaaagagtcctcagtttactccaattctactctgtactcagtggccattaagccagcattctgcctctgctgcatcagcatgagcgtctccgaagcagtgaggaagcagggycaccactagcccttcctttctatcca

SEQ ID NO: 180827 - DNA, 575 bp, Homo sapiens
gaatgcatctatagctctaccatatgaaataaacaatagtttcatttattggatgcatccatactcagcacatatttggagaagaccctattcattcttcaatggagatgacatgcaaggattatwtaataaaattcataaaaatattttttcatcccaccccagttcaaactgtcaccatgcaacctggtgtcagtggaaggtaaggcgcttaaggcagaaataattaaataaatcttcattggaagctaaatgtgagaatcaatgtggaagacacagaccaacaaagtgggtgtgttccaaagtctgttacaagttggaatgcttttgtgagaaaagttaaaagaagggaatgagactcctcctatcagcttttttttttaattttcttttgttttactgacctggcaaggctcaaatagagttgagtttttgttttgtttttgttttttccattggaaggtacaatacagaggttacaatcattgactttagctgacaacataacaagttaaacattttccttgcaagacaaccagtgaaacttcatgatcagaatcaaatcagtgtccttc

SEQ ID NO: 180828 - DNA, 575 bp, Homo sapiens
gaatgcatctatagctctaccatatgaaataaacaatagtttcatttattggatgcatccatactcagcacatatttggagaagaccctattcattcttcaatggagatgacatgcaaggattatataataaaattcataaaaatattttttcatcccaccccagttcaaactgtcaccatgcaacctggtgtcagtggaaggtaaggcgcttaaggcagaaataattaaataaatcttcattggaagctaaatgtgagaatcaatgtggaagacacagaccaacaaagtgggtgtgttccaaagtctgttacaagttggaatgcttttgtgagaaaagttaaaagaagggaatgagactcctcctatcagyttttttttttaattttcttttgttttactgacctggcaaggctcaaatagagttgagtttttgttttgtttttgttttttccattggaaggtacaatacagaggttacaatcattgactttagctgacaacataacaagttaaacattttccttgcaagacaaccagtgaaacttcatgatcagaatcaaatcagtgtccttc

SEQ ID NO: 180829 - DNA, 549 bp, Homo sapiens
catggaccggggaggctgcaggaatttgtttatcttgggctgggggtgcatgggaagtaggtagggctcctgtgaccacaaacccaaggcctctgggatcagaaggcaacaacaagggccaggacctaccccggggcctgtgcttgcagggaccctggctctcatttgtatgtggggtgcctgagtgatttcagattcctcacccatccccrttggctcttctaggggagatgcaactataacacctgtaggtgaccctgtgtaggaaaagattgcagaacccacacgggcccatgctgagtgaggctttctccaggtgggcacaaaaacccctagctccccagccactgccagagcttggggttgggggccctacatggaggcaaatgcagggagcattggcagaggcagggctgagtgaaaggagaagaagagcacatggaaaagacacaggggtctctgacagttccagggccagaggcacttgggagtgggagaggcatgactgggagataggtccagggctttttctgagccctgaggccccag

SEQ ID NO: 180830 - DNA, 516 bp, Homo sapiens
cggggaggctgcaggaatttgtttatcttgggctgggggtgcatgggaagtaggtagggctcctgtgaccacaaacccaaggcctctgggatcagaaggcaacaacaagggccaggacctaccccggggcctgtgcttgcagggaccctggctctcatttgtatgtggggtgcctgagtgatttcagattcctcacccatccccattggctcttctaggggagatgcawctataacacctgtaggtgaccctgtgtaggaaaagattgcagaacccacacgggcccatgctgagtgaggctttctccaggtgggcacaaaaacccctagctccccagccactgccagagcttggggttgggggccctacatggaggcaaatgcagggagcattggcagaggcagggctgagtgaaaggagaagaagagcacatggaaaagacacaggggtctctgacagttccagggccagaggcacttgggagtgggagaggcatgactgggagataggtccagg

SEQ ID NO: 180831 - DNA, 540 bp, Homo sapiens
ctgcaggaatttgtttatcttgggctgggggtgcatgggaagtaggtagggctcctgtgaccacaaacccaaggcctctgggatcagaaggcaacaacaagggccaggacctaccccggggcctgtgcttgcagggaccctggctctcatttgtatgtggggtgcctgagtgatttcagattcctcacccatccccattggctcttctaggggagatgcaacyataacacctgtaggtgaccctgtgtaggaaaagattgcagaacccacacgggcccatgctgagtgaggctttctccaggtgggcacaaaaacccctagctccccagccactgccagagcttggggttgggggccctacatggaggcaaatgcagggagcattggcagaggcagggctgagtgaaaggagaagaagagcacatggaaaagacacaggggtctctgacagttccagggccagaggcacttgggagtgggagaggcatgactgggagataggtccagggctttttctgagccctgaggccccagcaggtt

SEQ ID NO: 180832 - DNA, 561 bp, Homo sapiens
agatctcaagtacatggaccggggaggctgcaggaatttgtttatcttgggctgggggtgcatgggaagtaggtagggctcctgtgaccacaaacccaaggcctctgggatcagaaggcaacaacaagggccaggacctaccccggggcctgtgcttgcagggaccctggctctcatttgtatgtggggtgcctgagtgatttcagattcctcacccatccccattggctcttctaggggagatgcaactataacacctgtaggtgaccctgtgtaggaaaagaytgcagaacccacacgggcccatgctgagtgaggctttctccaggtgggcacaaaaacccctagctccccagccactgccagagcttggggttgggggccctacatggaggcaaatgcagggagcattggcagaggcagggctgagtgaaaggagaagaagagcacatggaaaagacacaggggtctctgacagttccagggccagaggcacttgggagtgggagaggcatgactgggagataggtccagggctttttctgagccctgaggccccag

SEQ ID NO: 180833 - DNA, 546 bp, Homo sapiens
ctgcaggaatttgtttatcttgggctgggggtgcatgggaagtaggtagggctcctgtgaccacaaacccaaggcctctgggatcagaaggcaacaacaagggccaggacctaccccggggcctgtgcttgcagggaccctggctctcatttgtatgtggggtgcctgagtgatttcagattcctcacccatccccattggctcttctaggggagatgcaactataacacctgtaggtgaccctgtgtaggaaaagattgcagaacccacacgggcccatgctgagtgaggctttctccaggtgggcacaaaaacccctagctccccagccactgccagagcttggggttgggggccytacatggaggcaaatgcagggagcattggcagaggcagggctgagtgaaaggagaagaagagcacatggaaaagacacaggggtctctgacagttccagggccagaggcacttgggagtgggagaggcatgactgggagataggtccagggctttttctgagccctgaggccccagcaggtttacttc

SEQ ID NO: 180834 - DNA, 544 bp, Homo sapiens
tggaccggggaggctgcaggaatttgtttatcttgggctgggggtgcatgggaagtaggtagggctcctgtgaccacaaacccaaggcctctgggatcagaaggcaacaacaagggccaggacctaccccggggcctgtgcttgcagggaccctggctctcatttgtatgtggggtgcctgagtgatttcagattcctcacccatccccattggctcttctaggggagatgcaactataacacctgtaggtgaccctgtgtaggaaaagattgcagaacccacacgggcccatgctgagtgaggctttctccaggtgggcacaaaaacccctagctccccagccactgccagagcttggggttgggggccctacatggaggcaaatgcagggagcattggcaraggcagggctgagtgaaaggagaagaagagcacatggaaaagacacaggggtctctgacagttccagggccagaggcacttgggagtgggagaggcatgactgggagataggtccagggctttttctgagccctgaggccc

SEQ ID NO: 180835 - DNA, 546 bp, Homo sapiens
ctgcaggaatttgtttatcttgggctgggggtgcatgggaagtaggtagggctcctgtgaccacaaacccaaggcctctgggatcagaaggcaacaacaagggccaggacctaccccggggcctgtgcttgcagggaccctggctctcatttgtatgtggggtgcctgagtgatttcagattcctcacccatccccattggctcttctaggggagatgcaactataacacctgtaggtgaccctgtgtaggaaaagattgcagaacccacacgggcccatgctgagtgaggctttctccaggtgggcacaaaaacccctagctccccagccactgccagagcttggggttgggggccctacatggaggcaaatgcagggagcattggcagaggcagggctgagtgaaaggagaagaagagcacatggaaaagacacaggggtctctgacagttccagggccagaggcacttgggagtgggagaggcatgactgggagataggtccagrgctttttctgagccctgaggccccagcaggtttacttc

SEQ ID NO: 180836 - DNA, 514 bp, Homo sapiens
ttttgtatttagtagagacatcgtttcattatgtaggccaggctgttctcraactcctgacctcaagtgatctgcctgccttggtgtccagcagtgttgggattacagacatgagccacagcacctggtccatttctggtagaaaattttcaaaataaaaaataatggcatcgattttagggagtccctttagtgttcccccagcacgtttatggtgtgaactgagaatggaggctgtctggggccacaggacactctcattctcattgctttagggtggtaagtgacaagaaatttttcctcaaagaggtagagcttggctttcaggatcctcagtggcagtgtccggtggttctgggattcagtggaatgaaggatgaaaattaataagccagtggtctccttgacccctccctccttggtgtttggaagacattcttcctggtaccagtagaagcagatgattgtgtttgccatgagagtgatacattttccctggatttgtcttctagag

SEQ ID NO: 180837 - DNA, 518 bp, Homo sapiens
ttttgtatttagtagagacatcgtttcattatgtaggccaggctgttctcgaactcctgacctcaagtgawctgcctgccttggtgtccagcagtgttgggattacagacatgagccacagcacctggtccatttctggtagaaaattttcaaaataaaaaataatggcatcgattttagggagtccctttagtgttcccccagcacgtttatggtgtgaactgagaatggaggctgtctggggccacaggacactctcattctcattgctttagggtggtaagtgacaagaaatttttcctcaaagaggtagagcttggctttcaggatcctcagtggcagtgtccggtggttctgggattcagtggaatgaaggatgaaaattaataagccagtggtctccttgacccctccctccttggtgtttggaagacattcttcctggtaccagtagaagcagatgattgtgtttgccatgagagtgatacattttccctggatttgtcttctagagattt

SEQ ID NO: 180838 - DNA, 514 bp, Homo sapiens
ttttgtatttagtagagacatcgtttcattatgtaggccaggctgttctcgaactcctgacctcaagtgatctgcctgccttggtgtccagcagtgttgggattacagacatgagccacagcacctggtccatttctggtagaaaattttcaaaataaaaaataatggcatcgattttagggagtccctttagtgttcccccagcaygtttatggtgtgaactgagaatggaggctgtctggggccacaggacactctcattctcattgctttagggtggtaagtgacaagaaatttttcctcaaagaggtagagcttggctttcaggatcctcagtggcagtgtccggtggttctgggattcagtggaatgaaggatgaaaattaataagccagtggtctccttgacccctccctccttggtgtttggaagacattcttcctggtaccagtagaagcagatgattgtgtttgccatgagagtgatacattttccctggatttgtcttctagag

SEQ ID NO: 180839 - DNA, 518 bp, Homo sapiens
ttttgtatttagtagagacatcgtttcattatgtaggccaggctgttctcgaactcctgacctcaagtgatctgcctgccttggtgtccagcagtgttgggattacagacatgagccacagcacctggtccatttctggtagaaaattttcaaaataaaaaataatggcatcgattttagggagtccctttagtgttcccccagcacgtttatggtgtraactgagaatggaggctgtctggggccacaggacactctcattctcattgctttagggtggtaagtgacaagaaatttttcctcaaagaggtagagcttggctttcaggatcctcagtggcagtgtccggtggttctgggattcagtggaatgaaggatgaaaattaataagccagtggtctccttgacccctccctccttggtgtttggaagacattcttcctggtaccagtagaagcagatgattgtgtttgccatgagagtgatacattttccctggatttgtcttctagagattt

SEQ ID NO: 180840 - DNA, 518 bp, Homo sapiens
ttttgtatttagtagagacatcgtttcattatgtaggccaggctgttctcgaactcctgacctcaagtgatctgcctgccttggtgtccagcagtgttgggattacagacatgagccacagcacctggtccatttctggtagaaaattttcaaaataaaaaataatggcatcgattttagggagtccctttagtgttcccccagcacgtttatggtgtgaactgagaatggaggctgtctggggccacaggacactctcattctcattgctttagggtggtaagtgacaagaaatttttcctcaaagaggtagagcttggctttcaggatcctcagtggcastgtccggtggttctgggattcagtggaatgaaggatgaaaattaataagccagtggtctccttgacccctccctccttggtgtttggaagacattcttcctggtaccagtagaagcagatgattgtgtttgccatgagagtgatacattttccctggatttgtcttctagagattt

SEQ ID NO: 180841 - DNA, 581 bp, Homo sapiens
ctccttggtacaagtgacctcggctccatggttggtggtgggaggcagacagaatcctggacaggaaggtgagggtcactggtgaagctccaccttctgatcaaggagggcctgaagccgtgggctgggccaccagtctagtggaccagagtgggaacatgtgttgccttttctgtgcctgctcatggccacctatgacccaatgagtgcatactttctcctgtctgatgtcaaaaaaaccccagactcagggagaacattaggaagaccagtggcagagaggaactacccactgtggggatgattttcctgtagagacaagcaaccccctccgggtccttttctctgctgagagctgtagagatgatgagatgactttcctgcagagagcagcaacccactccagggccttctctctactgagagcagtggtgatgatggaataacctgccaggagggaggggtcacccaccccagggcctcctctctgctcagwgctaaacactcatcaggacgccctggctgcagaaagaagttacccactgtgggtctctgagctgttctattgctcagtaaagctc

SEQ ID NO: 180842 - DNA, 581 bp, Homo sapiens
ctccttggtacaagtgacctcggctccatggttggtggtgggaggcagacagaatcctggacaggaaggtgagggtcactggtgaagctccaccttctgatcaaggagggcctgaagccgtgggctgggccaccagtctagtggaccagagtgggaacatgtgttgccttttctgtgcctgctcatggccacctatgacccaatgagtgcatactttctcctgtctgatgtcaaaaaaaccccagactcagggagaacattaggaagaccagtggcagagaggaactacccactgtggggatgattttcctgtagagacaagcaaccccctccgggtccttttctctgctgagagctgtagagatgatgagatgactttcctgcagagagcagcaacccactccagggccttctctctactgagagcagtggtgatgatggaataacctgccaggagggaggggtcacccaccccagggcctcctctctgctcagarctaaacactcatcaggacgccctggctgcagaaagaagttacccactgtgggtctctgagctgttctattgctcagtaaagctc

SEQ ID NO: 180843 - DNA, 517 bp, Homo sapiens
tctttgaatgagtaaaaaaataaaaccctactatatgctgttttccagaaactcaattcacctataagcatacatgtagatggaaagtgawggggtagaataagatattccatacaactggaaaccaaaaacagcaagagtagctgtacttatatcaggtaaaatagatgccaaatctcacaatgcactcaggtaaaacagaatacaaatctgagcttgtaaaatattagactacgcttacacaaactatgcctagaaagaacatacatcaaaataatagaagccaaaaatgacaaatccacatgcaacatcatattgaatgaagaaacgttgaaagtattcctgctaggaactacaagcagacaaaaatgctcactttatccacttgtaatcaacataggactgaaaatgtttgtcagagcaatctggtaagcaaaaggaataaagtataattaaattggaaagaaggaagtgaaactacctgtgtttgccaatgatgtgatcatatgtgcttaga

SEQ ID NO: 180844 - DNA, 517 bp, Homo sapiens
tctttgaatgagtaaaaaaataaaaccctactatatgctgttttccagaaactcaattcacctataagcatacatgtagatggaaagtgaaggggtagaataagatattccatrcaactggaaaccaaaaacagcaagagtagctgtacttatatcaggtaaaatagatgccaaatctcacaatgcactcaggtaaaacagaatacaaatctgagcttgtaaaatattagactacgcttacacaaactatgcctagaaagaacatacatcaaaataatagaagccaaaaatgacaaatccacatgcaacatcatattgaatgaagaaacgttgaaagtattcctgctaggaactacaagcagacaaaaatgctcactttatccacttgtaatcaacataggactgaaaatgtttgtcagagcaatctggtaagcaaaaggaataaagtataattaaattggaaagaaggaagtgaaactacctgtgtttgccaatgatgtgatcatatgtgcttaga

SEQ ID NO: 180845 - DNA, 517 bp, Homo sapiens
tctttgaatgagtaaaaaaataaaaccctactatatgctgttttccagaaactcaattcacctataagcatacatgtagatggaaagtgaaggggtagaataagatattccatacaactggaaaccaaaaacagcaagagtagctgtacttatatcaggtaaaatagatgccaaatctcacaatgcactcaggtaaaacagaatacaaatctgagcttgtaaaatawtagactacgcttacacaaactatgcctagaaagaacatacatcaaaataatagaagccaaaaatgacaaatccacatgcaacatcatattgaatgaagaaacgttgaaagtattcctgctaggaactacaagcagacaaaaatgctcactttatccacttgtaatcaacataggactgaaaatgtttgtcagagcaatctggtaagcaaaaggaataaagtataattaaattggaaagaaggaagtgaaactacctgtgtttgccaatgatgtgatcatatgtgcttaga

SEQ ID NO: 180846 - DNA, 517 bp, Homo sapiens
tctttgaatgagtaaaaaaataaaaccctactatatgctgttttccagaaactcaattcacctataagcatacatgtagatggaaagtgaaggggtagaataagatattccatacaactggaaaccaaaaacagcaagagtagctgtacttatatcaggtaaaatagatgccaaatctcacaatgcactcaggtaaaacagaatacaaatctgagcttgtaaaatattagactacgcttacacaaactatgcctagaaagaacatacatcaaaataatagaagccaaaaatgacaaatccacatgcaacatcatattgaatgaagaaacgttgaaagtattcctgctaggaactacaagcagacaaaaatgctcactttatccacttgyaatcaacataggactgaaaatgtttgtcagagcaatctggtaagcaaaaggaataaagtataattaaattggaaagaaggaagtgaaactacctgtgtttgccaatgatgtgatcatatgtgcttaga

SEQ ID NO: 180847 - DNA, 657 bp, Homo sapiens
  misc_feature (1)...(657): n = A,T,C or G
gggttcgtctcaggtgaggtggcccaagtgggctggtggggagggcccaggtgtccaacagaaggaacagctgggtcatgaggagtgaggaggtccaaggagggcccacaggcttctaatggttttggtgaggaagcttagagaggccttggccattgcccagctcctcagggaaaggactgctcatcacccggggtccaccgaggtaacaggaacctctcttctagtggcactgaaaggcaccactaaaagtgggaactaggctgggcacagtggctcacacctgtaatcccagcattttgggaggctgaggcaggtggatcacctgaagtcaggagttcaagaccagcctggccaacattgtgtccagaattggttcctgccggtgggttcatggtcttgctgacttcaagaatgaagccacagacctttgcagtgagtgttacagttcttaaagatggcacggacccaaagagtgagcggtagcaaggtttatggtgaagagcagaaggacgaagcttccacagcgtggaaggggacctgagtaggttgycgctgctgactggggtggccagcttttattcccttatggtcccctcccatgttccatttctgtcctatcagagtgctttttttcaatcannnnnnnnnnnnnnn

SEQ ID NO: 180848 - DNA, 512 bp, Homo sapiens
ttttgaaatgaagacaaaactgcatttaaaggaaaaagtcaaagcttcaaattgttcatacaaaaaaaaaaaaaaagacaggatataactctgtgcctgcactgtcaccatcccaraccggctgactgtaggtcagatgggagtgtccttacagagattagggacttaccagatctggactcagtttgcagggtgctcagacctcaggaaaaaccaagcagaaactccaggcttgaagactttgggtctctcctgtgggtctttagaagcttttattgacctttctaatcacaactcccacccacgcccctccacgtatccgctgctagcttccagtcaaaaagtggtatctgattgcatttctgaagctccacccagttaatcctgattgggtttttggctctccccagattaatggattgaatcagatatccattcataccagatatccatattcatttcatgaatcaagaaagtgacagtattagggatagagtggaagtcaagaattc

SEQ ID NO: 180849 - DNA, 513 bp, Homo sapiens
tttttgaaatgaagacaaaactgcatttaaaggaaaaagtcaaagcttcaaattgttcatacaaaaaaaaaaaaaaagacaggatataactctgtgcctgcactgtcaccatcccaaaccggctgactgtaggtcagatgggagtgtccttacagagattagggacttaccagatctggactcagtttgcagggtgctcagacctcaggaaaaaccaagcagaaactccaggcttgaagactttgggtctctcctgtgggtctttrgaagcttttattgacctttctaatcacaactcccacccacgcccctccacgtatccgctgctagcttccagtcaaaaagtggtatctgattgcatttctgaagctccacccagttaatcctgattgggtttttggctctccccagattaatggattgaatcagatatccattcataccagatatccatattcatttcatgaatcaagaaagtgacagtattagggatagagtggaagtcaagaattc

SEQ ID NO: 180850 - DNA, 518 bp, Homo sapiens
taaaccaaagcacaaatcaaattttttgaaatgaagacaaaactgcatttaaaggaaaaagtcaaagcttcaaattgttcatacaaaaaaaaaaaaaaagacaggatataactctgtgcctgcactgtcaccatcccaaaccggctgactgtaggtcagatgggagtgtccttacagagattagggacttaccagatctggactcagtttgcagggtgctcagacctcaggaaaaaccaagcagaaactccaggcttgaagactttgggtctctcctgtgggtctttaraagcttttattgacctttctaatcacaactcccacccacgcccctccacgtatccgctgctagcttccagtcaaaaagtggtatctgattgcatttctgaagctccacccagttaatcctgattgggtttttggctctccccagattaatggattgaatcagatatccattcataccagatatccatattcatttcatgaatcaagaaagtgacagtattagggataga

SEQ ID NO: 180851 - DNA, 512 bp, Homo sapiens
ttttgaaatgaagacaaaactgcatttaaaggaaaaagtcaaagcttcaaattgttcatacaaaaaaaaaaaaaaagacaggatataactctgtgcctgcactgtcaccatcccaaaccggctgactgtaggtcagatgggagtgtccttacagagattagggacttaccagatctggactcagtttgcagggtgctcagacctcaggaaaaaccaagcagaaactccaggcttgaagactttgggtctctcctgtgggtctttagaagcttttattgacctttctaatcacaactcccacccacgcccctccacgtatccgctgctagcttccartcaaaaagtggtatctgattgcatttctgaagctccacccagttaatcctgattgggtttttggctctccccagattaatggattgaatcagatatccattcataccagatatccatattcatttcatgaatcaagaaagtgacagtattagggatagagtggaagtcaagaattc

SEQ ID NO: 180852 - DNA, 592 bp, Homo sapiens
cctgtagtcccagctactagggaggctgaggcaggaggatcacttgaaccccaggaggtggaggttgcagtgagctgagattgtaccactgcactccagcctgagaaataggctagattcatctcaaaaacaaaaacaaaaacaacaacaacaaaaaagaaaactacatttaaatctcttaagctccacccagttaatcctgactggatttttggctttcttccagattaactgattgaattagatattcatccatgaaagtgaaagatttaggtatagggtgaaagtccatgactcattcactgattcactccacaaacatggaattttactaatatatgtccttcmtagtcctgagtgtgagatagggaagggttgaatctcttcctgacattagacagaaagaaaaaacttgaaagtatctttgttgagggatccttggtcacaaatttatcagaatatttcagagttaaaacagtttacaaagacagagatgacagtccctaagaaaacacaatagaaatcatcatgtatccagtgattacctgggtggtataatttaattttttttggtgttgcagggtggggggct

SEQ ID NO: 180853 - DNA, 625 bp, Homo sapiens
gtttgactttctttatgcttattttcttatgggagggagtttgctcttcttgggtttgtgagtttatagttattaccaattttgaaaaaagttggtcactatatctttacatatttttgttttctctcatttgaatctcctgaaactccaatttacatatatcttagactatttgatttcacccataagtcattgagtttttattttttcacccttttttctttttttctcttttctctcaaaatatttattttgcattttgaaaatttattttgcagtatctaatctacagtcaatcttgtctaatatttcctttttcagatactgtatttctcatttatgtaaatttttttagtttttaaatatatatcttacatttttctcatcatcttcatgttttcctttacctccttgagcatatggartatatttattacagcactttaatgtacatttctgctaataatctcatctctgtcattttggggtctatttctattgattgagtttttttcctacaaatgggtcacattttttcactttttcatatgcttacagtttttggattgttgatacacattattaacttgatagttttgctctctaaattttgttatattccttt

SEQ ID NO: 180854 - DNA, 617 bp, Homo sapiens
tgctgcaatggaaaaaggagaaaacgtaaaagaatagatacacacatttaagtggaggattggtaatcctaagaaagaatcaaaaggaaatgccacaaatcaaaaacactgtcacagacataaaaaaaaatgcctttaatgtactaattgcagcacttgacattgctaaggaaagaattaatgtgttaaacaatacatcagtagaaamttcccaaactgaaatgtaaagagaaaaaaggaaaaacaaaacaaaacaaaacaaaacagaacagaacctccaagaactatggatgtaacaattaaaaatatatatatggtaattggagtaaccaaggaaagaaagaatgtcacagaaaaatatttgaaataataatggcccaaaactttctacagttaacaacagccaccaaaccactggattaaattggattagagaacactcaacagaataaatatgacaaatctacattcatttatatcatattcatactaaagaaaaatgagaaaatctcaaaaggagctggggataaggaatggcaaaacaacttacttacagagaaacatgaaaaataattagagtgcacttctcattaacaaaaaaaataaattaacaaacc

SEQ ID NO: 180855 - DNA, 450 bp, Homo sapiens
gatctaataatgttctctgttgcatatatggcaagagaataaattgaatactaacacaaatcaatgaaataaatctattcactgaatactagaaatattaggagatataaatttaagcaagtccctttatattcggagcttttgaacctcaatcagttggaatatatcttaagttatatttcataattacctaaagctcattaaaatcagcctaagttattcttgctgctgagtaaattgtttttgttttacataattaggtgaagtaccaaaaagccttccatattttacaataatgtaaaactatgtaatttttagtgtggatcataaagaataaataaaatrgtatcagagaagaaataataaattgcagttgcaatcaaatcatagttttaaccttgaacaaatgagaggtgcatttgaaagtcatttccatggcagcccatttgt

SEQ ID NO: 180856 - DNA, 481 bp, Homo sapiens
ataaatggaacttttctacaaggagcagatgcaatttcaagcacaccctccccaagccccatctctctgtctctctgtctgtgtctgtctctgtctctctctctccctccctcccttgctgaagaatttgggtgcaacacctaaacctacaagctgacactgttaaacacaaacaaagcatttactttagagtaagagctgtgtcttacaagtatacttcccaatgaggcaggttccagaaggtctatattgttaatatcttaaytgatcattgtcagcatacatcacttaaatagcctccttattctaacctttccctgtttggaattttgaattttaagaagaccatatcttacaaagcagttttcataaacatagtcaatgtgaggggaatacttggctgctttagttttcaatccttattttcttataggcgttacattatttggagaaaatgtttccaatttaataataaaatatg

SEQ ID NO: 180857 - DNA, 553 bp, Homo sapiens
gaaggctaaatgtgattaatcattaagaagttaaaaatcatagggtgcccatgccactttataaacttatttaatcagaatagatgagcaagatttggcaaaaagtttagaggtctggaaaaatacatggacaacagatgataagacataaaacctataaagattcagatatctgccacatgagaggaactactgagtgttcagaggttcagagcagcagttggcaaactgtttctgcaagtggtcagaccmaatagttaagatttaaggctttgcaggccagacactatcacaactactcagctttgccgttgaagcacaaatatagccatacacaatttgcaaatgaatgggctgtatgaaaatacaactttactcacaataaacaggcagtgggctaaatttggcctgtgacaagtagtttgttgacccttggttttgagggcaaagtaagggacaaattaatccgtttgaaaagttccaccactaggaaggaagcacaacctcttataggcctcttttgggtgaagttagcatattccatacttgggaa

SEQ ID NO: 180858 - DNA, 459 bp, Homo sapiens
tgaattcaaaaatttcacagaaaattttctactgaatggaaagagtcagagaaatatagtataaattttttwaaaataatattaataaataaagtaatgacgtgtttatacatcaagtaatggaaaagctcccatttaatctcggaaatccactaaaactcataaataggaaagtatttaagcatatttctgacctagtctcatctgattgcttgacttgctacactagtacattggatattggttaattgcatagtttatcaatctgcaaactgttttgaagtccagatgctttttagaacgtaattattctagataaatactgttgcagttttcatttcaatttttgatcacatcacagtaatacaacattttctcattacatttcactatagatcatacaccgacattattttctaaacttgcttaccaaatgcttccttcatgaagttttcccag

SEQ ID NO: 180859 - DNA, 459 bp, Homo sapiens
tgaattcaaaaatttcacagaaaattttctactgaatggaaagagtcagagaaatatagtataaattttttaaaaataatattaataaataaagtaatgaygtgtttatacatcaagtaatggaaaagctcccatttaatctcggaaatccactaaaactcataaataggaaagtatttaagcatatttctgacctagtctcatctgattgcttgacttgctacactagtacattggatattggttaattgcatagtttatcaatctgcaaactgttttgaagtccagatgctttttagaacgtaattattctagataaatactgttgcagttttcatttcaatttttgatcacatcacagtaatacaacattttctcattacatttcactatagatcatacaccgacattattttctaaacttgcttaccaaatgcttccttcatgaagttttcccag

SEQ ID NO: 180860 - DNA, 551 bp, Homo sapiens
cttataatttttctttccataagggtaatgtagatgacttttttcagcagtagaaaacatgatgtatttcttggaaaatatggagtgttgccttgtaaatrtaggtaaccagtcaaaaattttctaaatgccatttaaaaaatagcaatgtgttaaataatatatacatgagtttaaaatggtgttgccactaaatgttaccttttgccattgtaacaattgaatatactcacattaacaaatacatttttaaagtaaaaaaactattcaattctcaatatttatcaaaaatcttaaaaaatgtacataaaattaacaactataagaaatctgcattttatttttgaagaacacattaaatcaggataaaattgacaagttagaaatagaaaatatctggaagacaaaaataatgttaaaatatgtgcctttggtccaaaggtatatacatttgccccttggctggccttcattttcccactcctattttctcatggtatcttatttttgctcaggcatactcccctgactatgctgctcatttgcttcaa

SEQ ID NO: 180861 - DNA, 468 bp, Homo sapiens
agggcaagagttgaggtttggagcctccacctaggttttagaggatgtatggaaatgcctggatgtccagacagaagtctgctgcaggggcagaaccctcatggagaacttctactaaagcagtgcagaggggaaatggggagttggagcccccacacagagtccctactgggcactgcctagtggagctgtaagaagaggtccatcatcctctagacyccagattagtagatccactgacagcttgcagtgagtgcctgaaaaagccacagacaatcaacaccaacccatgaaagcagctgagaggctgtaccttacagagtcacaggggctgagctacccaaggccttgggagcccactccttgtgttattgtggcctgaatatgagacattgagtcaaaggatatttttttggagcattgagatttaatgactgccctgctgggtttcagaattgcatggacctg

SEQ ID NO: 180862 - DNA, 468 bp, Homo sapiens
agggcaagagttgaggtttggagcctccacctaggttttagaggatgtatggaaatgcctggatgtccagacagaagtctgctgcaggggcagaaccctcatggagaacttctactaaagcagtgcagaggggaaatggggagttggagcccccacacagagtccctactgggcactgcctagtggagctgtaagaagaggtccatcatcctctagaccccagattagtagatcyactgacagcttgcagtgagtgcctgaaaaagccacagacaatcaacaccaacccatgaaagcagctgagaggctgtaccttacagagtcacaggggctgagctacccaaggccttgggagcccactccttgtgttattgtggcctgaatatgagacattgagtcaaaggatatttttttggagcattgagatttaatgactgccctgctgggtttcagaattgcatggacctg

SEQ ID NO: 180863 - DNA, 468 bp, Homo sapiens
agggcaagagttgaggtttggagcctccacctaggttttagaggatgtatggaaatgcctggatgtccagacagaagtctgctgcaggggcagaaccctcatggagaacttctactaaagcagtgcagaggggaaatggggagttggagcccccacacagagtccctactgggcactgcctagtggagctgtaagaagaggtccatcatcctctagaccccagattagtagatccactgacagcttgcagtgagtgcctgaaaaagccacagacaatcaacaccaacccatgaaagcagctgagaggctgtaccttacagagtcacaggggctgagctacccaaggccttgggagcccactccttgtgttattgtggcctgaatatgagacattgagtcaaaggatatttttttggagcattragatttaatgactgccctgctgggtttcagaattgcatggacctg

SEQ ID NO: 180864 - DNA, 643 bp, Homo sapiens
acatactaaacctattcatcattatttaacaaatatttttagttttttacttgtcttctcattcaacttaatttttttctcaccagcacataaacgtttaacctttgtaaaaaaattaatttctttgcacaatattttcttaaagtacttccttagacataaaataataaggtttataatgtatatatctatatataaaaacataagccaaaataaaataccaaaatctcaaatatagtaaatttctttttgagaattaaaataatattctaacattctaagaagtttattacctatctagctgctagacattttcttctattatatgggaaatttatttggagtgtatactattgtttggtttttgtcttgttttattttgctataaaatattgattcaatttgaacaataatgtgggaatattcattttttgacatggtttcatattaaaataataatcaatgtttattataaatgcatacttaaatataaacactcccccaaattrtaagtccaaactgatcgttaccaaaatatcatgccaacataccaagaaataaactaataaaataaacaaataaactccttttatttgttggtatgtaagaggaggataagaagaagataggaaaaaaaaagaac

SEQ ID NO: 180865 - DNA, 526 bp, Homo sapiens
ttcatttttaacaagcctcaaatrcagacatgcaaaccagacaaaacatgccagatgactgtgtctgtggtaaataatgtaataaatgtcagtctctacagttttacccacaatttcatgtttgtattttatttccccttctagcaaaaatgacaaagttaaaaggaaatatgtattgtgtgtcatcagtggtaatatataagagcagaagtgccttaccatacatcagctccaacattacaaggcagaggcagaaccatttcattgagagtaacgtgttttcatttcaggtggtgaaatcaactccaattactcatctctggacttaactgcttcccattactgaagccaacacttgaaagatggttaggattctctaatcaggtaattagaggtgatggctcctattaacataatcacgacttctgcagaaatgggtcttctctctgcttgtttgcactgttagaatgtctttaatggaactgtgggaggggagggtagaaacctcgccattaagcaacaagat

SEQ ID NO: 180866 - DNA, 551 bp, Homo sapiens
tatgttaatcaatgagcatgcatccaggactctgctagatactatgaagggctcaagaaaaataaactgaattatccttaacttttactttgcattttacagtgacaaaggctacagatcaatataaraaggatgaaatcaaatgtgaaattttatgatacagagagtaaaagctgtcagactgaagaacagacattactctaagttaaaaacaactaaaaatgggccaggcatggtggctcactcctgtaatcccagcacttcgggaggctgaggaggcggatcacgaggtcaggagatccagaccatcttggctaacacggtgaaaccctgtctctactaaaaatacaaaaattagcctggtgtggtggcaggtgcctgtagtcccagctactcgggaggctgaggcaggagaatggcgtgaacccgggaggcagaggttgcagtgagccgagatcgcgccattgactccagcctggacgacagagcgagactctgcctcaaaacaatcaaacaaacaaacaaaactaaaaatgtttatagacaagatt

SEQ ID NO: 180867 - DNA, 551 bp, Homo sapiens
tatgttaatcaatgagcatgcatccaggactctgctagatactatgaagggctcaagaaaaataaactgaattatccttaacttttactttgcattttacagtgacaaaggctacagatcaatataagaaggatgaaatcaaatgtgaaattttatgatacagagastaaaagctgtcagactgaagaacagacattactctaagttaaaaacaactaaaaatgggccaggcatggtggctcactcctgtaatcccagcacttcgggaggctgaggaggcggatcacgaggtcaggagatccagaccatcttggctaacacggtgaaaccctgtctctactaaaaatacaaaaattagcctggtgtggtggcaggtgcctgtagtcccagctactcgggaggctgaggcaggagaatggcgtgaacccgggaggcagaggttgcagtgagccgagatcgcgccattgactccagcctggacgacagagcgagactctgcctcaaaacaatcaaacaaacaaacaaaactaaaaatgtttatagacaagatt

SEQ ID NO: 180868 - DNA, 551 bp, Homo sapiens
tatgttaatcaatgagcatgcatccaggactctgctagatactatgaagggctcaagaaaaataaactgaattatccttaacttttactttgcattttacagtgacaaaggctacagatcaatataagaaggatgaaatcaaatgtgaaattttatgatacagagagtaaaagctgtcagactgaagaayagacattactctaagttaaaaacaactaaaaatgggccaggcatggtggctcactcctgtaatcccagcacttcgggaggctgaggaggcggatcacgaggtcaggagatccagaccatcttggctaacacggtgaaaccctgtctctactaaaaatacaaaaattagcctggtgtggtggcaggtgcctgtagtcccagctactcgggaggctgaggcaggagaatggcgtgaacccgggaggcagaggttgcagtgagccgagatcgcgccattgactccagcctggacgacagagcgagactctgcctcaaaacaatcaaacaaacaaacaaaactaaaaatgtttatagacaagatt

SEQ ID NO: 180869 - DNA, 551 bp, Homo sapiens
tatgttaatcaatgagcatgcatccaggactctgctagatactatgaagggctcaagaaaaataaactgaattatccttaacttttactttgcattttacagtgacaaaggctacagatcaatataagaaggatgaaatcaaatgtgaaattttatgatacagagagtaaaagctgtcagactgaagaacagacattactctaagttaaaaacaactaaaaatgggccaggcatggtggctcactcctgtaatcccagcacttcgggaggctgaggaggcggatcacgaggtcaggagatccagaccatcttggctaacacggtgaaaccctgtctctactaaaaatacaaaaattagcctggtgtggtggcaggtgcctgtagtcccagctactcgggaggctgaggcaggagaatggcgtgaaccygggaggcagaggttgcagtgagccgagatcgcgccattgactccagcctggacgacagagcgagactctgcctcaaaacaatcaaacaaacaaacaaaactaaaaatgtttatagacaagatt

SEQ ID NO: 180870 - DNA, 462 bp, Homo sapiens
tcatatccacacaagagctcttgtaattgagagtaggaaacaaactgattgactttcttattaatacaggggccacatcatttgtagttaacacccacttgttccctgattcaaaagagactatggtggttacaagaatgtcaggggaactgtgacttgccccttcctgcaatctttagattgtcatctytgagaaacaagcctaaagcatagttttttatttatgcctgaatgttctgttctccttctgggttgagatttacttgctccactaaatgttcagattattaaacacatattttctagccaccgtgacttgagtggctgaccactggagcaaccagaattggaaatatgtactgatggaagtagcttcatgggccaaggacatcgttgagaaggttatgcagttgtcaccttgcaggtcaccttagaagccaagctttgcctccggacacctca

SEQ ID NO: 180871 - DNA, 462 bp, Homo sapiens
tcatatccacacaagagctcttgtaattgagagtaggaaacaaactgattgactttcttattaatacaggggccacatcatttgtagttaacacccacttgttccctgattcaaaagagactatggtggttacaagaatgtcaggggaactgtgacttgccccttcctgcaatctttagattgtcatctckgagaaacaagcctaaagcatagttttttatttatgcctgaatgttctgttctccttctgggttgagatttacttgctccactaaatgttcagattattaaacacatattttctagccaccgtgacttgagtggctgaccactggagcaaccagaattggaaatatgtactgatggaagtagcttcatgggccaaggacatcgttgagaaggttatgcagttgtcaccttgcaggtcaccttagaagccaagctttgcctccggacacctca

SEQ ID NO: 180872 - DNA, 462 bp, Homo sapiens
tcatatccacacaagagctcttgtaattgagagtaggaaacaaactgattgactttcttattaatacaggggccacatcatttgtagttaacacccacttgttccctgattcaaaagagactatggtggttacaagaatgtcaggggaactgtgacttgccccttcctgcaatctttagattgtcatctctgagaaacaagcctaaagcatagttttttatttatgcctgaatgttctgttctccttctgggttgagatttacttgctccactaaatgttcagattattaaacacatattttctagccaccgtgacttgagtggctgaccactggagcarccagaattggaaatatgtactgatggaagtagcttcatgggccaaggacatcgttgagaaggttatgcagttgtcaccttgcaggtcaccttagaagccaagctttgcctccggacacctca

SEQ ID NO: 180873 - DNA, 670 bp, Homo sapiens
tttgttaaaattatttaactatatatgagagggtccatttctggaaactattatcttccaataatcaatttgactatctttagtccaatactatactatcttgataatgatagcatgataataaatttgaaaatcagccaartaagccagataaatgtgttttttttccaaagatatttagtctctactagtcctttgcatttgtatgaaaactttaggaccagctcatcaatttctacacaaagaaaagcctgctagggatttgattgtcatttcattgaatctatagattaattttcaaattgatgtctttgtgagtctcttgagccatgaacaaagtgtatctctgcatttatttaggccttctttaataactctcaggaatgttgcgtagattttattctgtgagtttcatgcatattttgtcatattgtcaaatttaaccataattattgcatgttaatgctattgtaagtgatgaattttattacatgctatattatatactcattgctagcatatagaaataccatttgtaattgatctattttacaaacttgccatgctcccttattagttatactagcttcttctgtagattctgtagtattttacacacagatgatcatgtcatctataatgagacagttttattttagcattttctttc

SEQ ID NO: 180874 - DNA, 623 bp, Homo sapiens
atgttaatttataaaagtagcatgaattagttggattgctttttacatagaggttgaggaaagaatgataaagagttaaaggaataactgtcctataatgtccatggagttgcatcagaataggctgacatatcctggaaccccttgctatggtggcttaaactattcttaatttcttgaaccttgttgaaactaatctgagctgagcgaattcctctgtgactgcattacctcggtatatgctgatggaacaacagaaataacttataaaaattcagctctctcacccatggatttgtctatctatgcagtgtcatgtatccagatattttgaaatattatgagtgactgacattttcattcctcaactagaaactctggtagatygttgacccagacttcatctgaaaaagccctttttctggactagaatcttattttagaatgattggcataccttaaaatcaaatattttttgaattgctgtgttactagtctaattcgggaaactaagagaaaccgtcaaaaatttatagacaaactatgttaaatccttaatataaaagtacaaactttaaccattttataacttattaactgctgatgccatcaagtatcaatat

SEQ ID NO: 180875 - DNA, 563 bp, Homo sapiens
tcaatatcaaccaagctgttcagtcaatatgcggcagtgccctctggaaattagctttgacaatatcaggccaataaatggtccctctgcacacgagcaacataaacaattgccataagagtgatctaaagagaagagaactatctcaaaacaaacttccctttccttatagattgtctcagaatgttcagatcattatgggttcagaaacgcaatagattttaaataattagagagcaaaataaatagaggcaatcagtgtcttttaaaaaaaatgttaatttggctaagatggatctagtttcctcaacatcccttctgggttagagatggccaacagagtcatttgaatgagttgtaaagggtagaagtgacgtgacagacattactttgggaaggttaacttcagwgagactatgtaaattgtcttgttttgtgagttccagctcgtgctgctcaccccacttcatgttcagctcttattcctgacttctggctctgcggaccagcaacaattccaagcttaccaccaggtgtagaggctacagccttccacagaattc

SEQ ID NO: 180876 - DNA, 541 bp, Homo sapiens
aaatacaaatacagacattttctatttttctttatttatcatttacaactagctactgtttgtttgttttatttatgatyccaaagattacagcctcttataattaatcactatggacacatacaaagggcatgctattgatagtagaatagtaagcattaggttgttaatcttgattttttaagagtaatgcctatacaatatagccaatttatattaagaaaacagtcaggccttatatacttgtgcaaagtacttaagaaataactggaatcatcatcaaacattttgagtatttcaaatattttacattaaaataataaattgagtagagaggtgaagagtatgactttggaatcaaatatacctgatttaaatcccatcttcatttactatttaggtaatttgtctatttatttaattgcataatatgtcaattacctcacatgtaaaatttgcttcatggagttgttagaattctgtaatgcatttatcaaaatccttggcacataccaaataatattattataaagtgactatc

SEQ ID NO: 180877 - DNA, 562 bp, Homo sapiens
tggcaagccttagggggtgggcatccttggctggactgcactcctgacattccctcatcaagctctctggactacatacaggctggactcccacccctataacctctttaagcagctctccctgccagctcgtgtgtctgtgagggtcatcaggtctcctgcagctaagatcctggaggtccatggtaagaatgtgccattccttgccttttcagcttactccttcactaggagttgctggaggcctggaagcagtcctggtgctcgctagccccatccggggtttccagctttctccctttkcagctcagcatccgtgtccccactccatccactctcaatgccttcccttaaaaaatctgctcagagtgtgccaaacttcccagtgtttctctaacggccatcttggctccctcccctcctcctttaaatctggactgacctgtgactgcttaaccaataaaatgcagtggaagtaatgttgtgcaacttctaggcaactcttgaaaaggattggcaaaattggcttcgtctctgttggaaagctgcttcttgtgatact

SEQ ID NO: 180878 - DNA, 524 bp, Homo sapiens
aataaaatgcagtggaagtaatgttgtgcaacttctaggcaactcttgaaaaggattggcaaaattggcttcgtctctgttggaaagctgcttcttgtgatacttgctctcagaacccaggtgctattccatgagaagcacaaggcacaggcagaggccatgaagacagccaagctaagatcatggtctagtcatagctacgtgctcagtgattgccagcacaaattgacagtcatgtgaatgagtcattttggttgtccagctcgtcaaggactcagatgactccagccttctctggcatgtaattccaactacatgaggggccctaagcaaatacttattagttgatcctatccaactccaaagatgtaaaacataataggaagagttaatttgtaaatttggggaatgatttaatytgcagcaaaacataactaggatgggcatctttagagctacttactttcatgggtgtcttctcagggctccaatatttaattttatattcataattttatattgtt

SEQ ID NO: 180879 - DNA, 541 bp, Homo sapiens
aaatacaaatacagacattttctatttttctttatttatcatttacaactagctactgtttgtttgttttatttatgatcccaaagattacagcctcttataattaatcactatggacacatacaaagggcatgctattgatagtagaatagtaagcattaggttgttaatcttgattttttaagagtaatgcctatacaatatagccaatttatattaagaaaacagtcaggccttatatacttgtgcaaagtacttaagaaataactggaatcatcatcaaacattttgagtatttcaaatattttacattaaaataataaattgagtagagaggtgaagagtatgactttggaatcaaatatacctgatttaaatcccatcttcatttactatttaggtaatttgtctatttatttaattgcataatatgtcaattacctcacatgtaaaatttgcttcatggagttgttagaattctgtaatgyatttatcaaaatccttggcacataccaaataatattattataaagtgactatc

SEQ ID NO: 180880 - DNA, 609 bp, Homo sapiens
catagtcttgagcagcaccacccctgtggctttgcaggttacagcctccctcctgctgctttcatgsgctggcattgagtttctgcagcttttccaggtgcacggcgcatgttgtcagtggacctatcattctagggtcttggggacagtggccctcttctcacagctccactaggcagcacccaagtgggtactctgtgttggggtttcaaccccacatttcccttccacactgccctagcagaggttctccatgagagccctgtttctgcagcaaacttctgcctggacatccaggtgtttccattcatattttgaaatctagaaagaggttcccaaaccccaattcttgacttctgtgtactcatacacttgacaacatgtggaagctgccaaggcttggggtttacaccctctgaagccatgggctgagctctacattgtccccattcaaccatggctggagtgactgggatgcagggcaccaagtccctaggctgcaggcagcagagggaccctgagccgagctcatgaaaccactttttcctactaggcctttgggcctgtgatgggaggggctgccatgaagtcctttgatatgccctggag

SEQ ID NO: 180881 - DNA, 609 bp, Homo sapiens
catagtcttgagcagcaccacccctgtggctttgcaggttacagcctccctcctgctgctttcatgcgctggcattgagtttctgcagcttttccaggtgcacggcgcatgttgtcagtggacctatcattctagggtcttggggacagtggccctcttctcacagctccactaggcagcacccaagtgggtactctgtgttggggtttcaaccccacatttcccttccacactgccctagcagaggttctccatgagagccctgtttctgcagcaaacttctgcctggacatccaggtgtttccattcatattttgaaatctagaaagaggttcccaaaccccaattcttgacttctgtgtactcatasacttgacaacatgtggaagctgccaaggcttggggtttacaccctctgaagccatgggctgagctctacattgtccccattcaaccatggctggagtgactgggatgcagggcaccaagtccctaggctgcaggcagcagagggaccctgagccgagctcatgaaaccactttttcctactaggcctttgggcctgtgatgggaggggctgccatgaagtcctttgatatgccctggag

SEQ ID NO: 180882 - DNA, 598 bp, Homo sapiens
cagaaccctcatacagcaggacttggataatattacacagctgctttggagaaagtttatacaaaatttaaatatacacttaccctatgacctagcaacctcacttccaggtatttattcaagggaaattaaaaaatatgttcacacaatattttgtatgcttttatttatagcagatttactcataatcatctgaagggaaaatatccagatgttcttccactggtaaatgtataaacaaactgtcataaattcgtacaatgatatgctctccagcaatacaagaaaacagactattgatgcacgcaacagcatgaacgaagctcaactgtattatgcaaagtgaaataaaacaaattcagcccaaactagggacaaaaaaatcaatgtttggtaaagactggggtcataaggagaacgtgactatttataggcataaagwatattttgtgagaagatgatggaactactctaatgttggtttactgatagtaacattactgtgtgattgtatcaacaaagaattgcattctgaaaagaatactttttactctacgtaaattataccaaaataaaaagacaatctcatgtttgttta

SEQ ID NO: 180883 - DNA, 535 bp, Homo sapiens
tagatggccccaataattctaacctcctggtgcggtattaacaccttgtgtaatcccctcctcttcattttgtgagagtccagtgactttcttccaataagtacaatctggcaaaggcgttgagctcccttctgaaaaatgttctttctcctgctttttctcttctgctttatctcacttgttcattctgatggaagccagctgacatgctgcatgttgcccaacggaaaaccatatggcgckcaatggagggagcttctggtccaccgccaaggagaaactgagatcctcaggccaacaacagtgaggaactgaatgttgctatcaatcacaggaccgatcttggaagtaaaccctcccttaggtgaggcttcaggagagacaatgactctggctaacaccttaacgtcattcctgtggaaaatctggagaaagaatcagccagctaagctgcacccagaatcgtgactcacagaagctgtgagataataatggcttttttctttgtttgttttaagccattgggttttgcatt

SEQ ID NO: 180884 - DNA, 417 bp, Homo sapiens
gtcacaaaaatttgttgtttgcttgttttttgttttaactctgcagttttaagaagcctccaagcctagaaacagatgcacccagatgatgtttaatcaaatgtctgtgcagtcatgatccagtcaagtaggtatatacatttaaccatcacagtgtccarttattaaaaatatacatttgatagattattcacttcctgtcaaaaaaagaaacacatctattaatcccctcccattatccaaatgcataattatatcattcctcagccatagagtatactatgttaaaatttacttttttttcaaaacctttacaggtttgtttttcataaattgtttaatgttttctccaacaaaatttgaatattttatttgtatatcttgttctttgtcctatttattttctgtttgaattca

SEQ ID NO: 180885 - DNA, 405 bp, Homo sapiens
gaattcagacacttggtcatgacaataagtcacaaaaatttgttgtttgcttgttttttgttttaactctgcagttttaagaagcctccaagcctagaaacagatgcacccagatgatgtttaatcaaatgtctgtgcagtcatgatccagtcaagtaggtatatacatttaaccatcacagtgtccagttattaaaaatatacatttgatagattattcacttcctgtcaaaaaaagaaacacatctattaatcccctcccattatccaaatgcataattatatcattcctcagcyatagagtatactatgttaaaatttacttttttttcaaaacctttacaggtttgtttttcataaattgtttaatgttttctccaacaaaatttgaatattttatttgta

SEQ ID NO: 180886 - DNA, 322 bp, Homo sapiens
tctacctgcctttaaggtttttttcttcagtgtggaccttggaaagtctggtaactatatacyttggtgatgttcattttatatagtatctcactgttgctctctggatttcttgtatctgtatgtctatctctgtagcaagattagggaaatatttttgaattattctcacaaatatatttttcaggtttttttttttaactttttttctttctgaagaatgccaataatttgtaggtttggtcactttgcataatcccatatttctttaaatatgggatatatttaaatattttttctttatttttgtgtgactgggtta

SEQ ID NO: 180887 - DNA, 545 bp, Homo sapiens
tgaaataatagtgagtcatccttatacacaaaaacatcaccatagcaaatatgctacctaagataaacatgctgcatagctcaacctaactttacttatttgtagttaattcactataagaactcattgagagtacagcatgaaacttgttttttaatatcctttcttgctgattgtgtctcaaatccataacttagattttaatatatagactacctgatgataataatgrtgttctagaaataaaggcagctttcggagcttctcttaaaaaaattaaagaccgtctacatgatcaactacctaccagttaactgaaacaagactgggtatcactggcccactgtcctagttcaaactcaatgaaggaatcaacactattctagatcatattcttaacactatgatcttagtgttaagaaatagaaaatccttgactcctgccatatgtcagtagtgaaaatagacccttccaagaccatttccaatccttacctctagaaattacatgctgtttctgattttcagcacatctcaaagagatt

SEQ ID NO: 180888 - DNA, 615 bp, Homo sapiens
cattttagttttttgtttgtttgtttctttacttaatacttgaacctatatttctctattaatgttaatgaggatattatatcaacttaatgtatatwaaatgggggaatctgtactctttacttcccctatgcccttaactcacttgtttcacaggttttgttgatatatccttatataacatggaaccgttatatttttatctttgagtccaaaatttttacaattacattttgtggtgcaccctatttgtgacaaacattgagagaaacctccgcattttcactgttttcaacatagtctaccaacacttaataaactaggtcttccctattactatcatttattttatttataggtagccagtgctcattttttgatatatttttcagagttacatgaagatattatatcagaaatcaaattattttgcttcagacacaaattaaatattaattagttataaaattctccataaactagaggttaaagaaaactcacaaacgcctacacggtacaagctggaaatgtaaattgtgaaatatgcctaatgtaagatcataggtaaagtctatagcatgatgcaaaggcgcagacctattctgaaggcattca

SEQ ID NO: 180889 - DNA, 585 bp, Homo sapiens
aaatgtcatgcttgaaatgagttaaccagaagtcagtagccttgagacattttttgtttttatattctataatgcaaaaattaaatttactttggcaaactaatttttaaaaaaaatatatcattcatctaaccagtctgcactcggtggcatataaaacatcacattgcttttttattatgcttttattcttaaaacataacatgttaactgtacttttgccatctatacatattattgatgtatgtattataacctctgaagtcaaactccattggtaatacattgttttattttttgtttgtttcttaataatctatggtgttttgaaaagaagagctttggagactgactgaatctgagctctgacacttattagctaatacgaatgtggtcatgattctactgtttttgaaycctaaattatcaaatactgaaatgtgttattgggaaggaaaagtgctctagcatctgtaaggcacctttatggacacctttatggaacctaatgtggctcagcaaatgggatttccctcccctgtctttactgaacctcacttccagtaatctttattattttgcatt

SEQ ID NO: 180890 - DNA, 467 bp, Homo sapiens
taaatgacaaataaaagtaaaacgtagtttccttttcaagtactcttccctttccttccatcacagcatactttgggttttcttctaatgcctctagattttgcttatctttgaaggcctgttatcccctaactggcattgaaatttggcatttcacaaaattctacccgactcacttcctttgtccagctttctccttcaatcatactttttcaaactgtgggttttgatagaatcttgagacattaaatcaatacartgggtaataatcaaaattttagaaatgtattaaaaagaaaatagcatgagcaagggtggtgtatttgaagaatttcatgaacttctagaaaactgcattatgttcatttgcacacattctaggacttgagcctggcaggaaaagtaatggagagcattgtatgctgtgagaaatggatagcatttggtcttggaaatgatgaagaaac

SEQ ID NO: 180891 - DNA, 569 bp, Homo sapiens
tttagatacttcatgtaagtggaaccatgcagtatctattcttctgttactgacttattttacttggcataatgtcctccaggttcatccatgtcatcacatttggcaggattcccctcctttttaaggctgaataaattccatcactattcaagtcactattttaagacgaaaaaatcaattgcttgtatataatacattttttaaattcattcatcagtgggtarttaaggtgtttccatatcttggctgttttaaatgatgctgcaatgtgcatgggagtgcagatatctcttctagaccctgatttcaaatctttcagatatatatccagaagtagaattgctgaattatattgtaattctatttttaagtcttttggaattgctatactgtttgtatacaggccacaccattttacattcctaccaatactgtataatggttccagtttttccataattttgcaagtatttgttgttatttttggtaataatagccattctaacaggtgtgagatgatatctcattgtggttttgatttacgtttccctaatgattagtggtat

SEQ ID NO: 180892 - DNA, 569 bp, Homo sapiens
cgtgcaggttaacatgtgaaattctgtgctcaaattctagttctttgaatctagtttccctgattttaaaattgagaggattgctacctgagacataaacaagattaggaagcatgtaaccccttagcccctgatacatagtaaatacttaacaatttccttcttaaaatgattatttttctataatgtatcggtatcgcatttatatatctacaattctgttataacataccatttgtttacaaactaatttaaattgcccttgaaaaagttaaccatatataaataagttaattcagaagaatgactgcttgttttatttaaaatttaaaacattcctaataatagaaatacatcattcttgaaaatatgcccatagaacccatagaagcttcttatgtaaggattttgtttgaaaatatcaatgtgaaccagctgtaaarataaccattgtacagatatatttcacccatctagaagtcactattcaagtcactattccaaagtaatcaatatctatcatttgagagttatggagaatttcccatatgtagaatgtaatagacaaa

SEQ ID NO: 180893 - DNA, 569 bp, Homo sapiens
cgtgcaggttaacatgtgaaattctgtgctcaaattctagttctttgaatctagtttccctgattttaaaattgagaggattgctacctgagacataaacaagattaggaagcatgtaaccccttagcccctgatacatagtaaatacttaacaatttccttcttaaaatgattatttttctataatgtatcggtatcgcatttatatatctacaattctgttataacataccatttgtttacaaactaatttaaattgcccttgaaaaagttaaccatatataaataagttaattcagaagaatgactgcttgttttatttaaaatttaaaacattcctaataatagaaatacatcattcttgaaaatatgcccatagaacccatagaagcttcttatgtaaggattttgtttgaaaatatcaatgtgaaccagctgtaaaaataaccattgtacagatayatttcacccatctagaagtcactattcaagtcactattccaaagtaatcaatatctatcatttgagagttatggagaatttcccatatgtagaatgtaatagacaaa

SEQ ID NO: 180894 - DNA, 604 bp, Homo sapiens
ggctcaagtagagacatatagtttaaagtgaaaacattttgacctgaaattccaaggtgcacctggtaattggtgaccttaacaagtggttatgacagcaaagtcctacagtttgtggaagatagaaagcaaattcactaaarggaaaggtaagaggaggaagcaaagagaaagaatgcaacagagaagaagaaaaaagaataaaagttttccctaattaaatgcttactatcatccctttctcactgctattttataatattaattttatatattactaattaaaaactatataattatatacataattaatttttttctggttcttcaaaatatttgactaaataatttagaggtctcaaataaaaatggtaattttaagaccactgtgatcaagttctggaaatttttaaagatctaggaactttttaaagctttaatattttttgattatttttatattttatacaacatttttactaattccaaagaattataaatgactattatgtatttttatttggaaacattttggttatttgggaaaaagtaggtgttagtccagctatacattgtatgtttactgatggagaaaaaaaaaatc

SEQ ID NO: 180895 - DNA, 566 bp, Homo sapiens
accaccatgtctggcaaattaaaaaaatatatayatttgtagagacaaagtcttgctatattgcccagactgaataatatgcttgatcaaactgctaatattgatttggatttgaatatagtaatccctattatttcaagtaataatatcttcaaagtaatgaatgcaaaggagataaactgatatttgaacacactaacatgaccatttcaagaatatgacatgacctcttcaattgctccattcggcttttagatggaaggagaatgcattagtctcttacaggatgtactgtctttatctgaggaactttgaagagtatgaaaaacagctactagggaaaaaagaaagcttttatattctttgatgtggaggattctgtgattctaacactgtgattatttctttctgtaccagagcttactagcctacacagatattagaattcatagctatatgtaattcaaatttatttctgtatgtgagaaggaatgtgattcccttctctaaaaatcatttactgtatagacataacataacattatccctctattattggtagaaat

SEQ ID NO: 180896 - DNA, 563 bp, Homo sapiens
ttctttatagcaatgtgagaactgactaatacataggtaataaccaggtttgaaggtaggatattaaattcagttttgtatcagttgcaattgatttaggctgcataaacttaaaacagtaatagttgttgaaaccatacaaactccccttctttcacatatcaagaagatcaagagggtagttccaagacgatacactggttcaggcccttttattccatgcctattgcctcattgctacattgctacaaaatggctacaacagacatcatgttatcattaaaggcagaaggatggaacaggaaagtattaacatgctctcctcttgttcttatcccttttataataagcaaattttttacctccaagactccagaagattcatttataggtctacccgagccatggcctctctaaactgcaaaggatgtggactgtttagaaaaggggaaagagatcatcacaattagcttagaacagttgttctcaactctattagacacyaactcttttgattagtaatctgaaatgaaatttacagatgtaatttacctacacacata

SEQ ID NO: 180897 - DNA, 586 bp, Homo sapiens
ttaaatatatgaatgtgcttagctcaggtcttgacagagtaaatactgagtgaatgtggatgtaatgaatctgcttctacaggggttgtcattggggcttccgtgagaggagcaagaggatggggttataaggataaggaagtagcacaattaattcttactctcgctcacatsataggccaggctgtgtttgctcagttctttaatttcagcactaccactctttgaggatttttacccagagatgggtaaaaattattatgggtaacattattattatcataataatcttattaatgaaactgtctttgtctcacttttctggaacaatgcaattttgcaacctctgacaatctaaggcagctatatatactgcccacatagtgaccctcacctcctgcttccacaaagtgaataaattgaaataccctcattctgtttccaggcttctacaaacttgcacatttatacgacctgaaaatatttctgaccacctaaacatctgtagtttgtgtaattactcagattctaaacacttccacctagctttactgcagattttacattgccattcacttgctgcaca

SEQ ID NO: 180898 - DNA, 501 bp, Homo sapiens
tactacagtatataaatcagtggttctcagctttattgcacatagatacacctaagggaatgactgcttttacaccagtattggtgacttgctatgctatgattcttcagcagcagcggggtgtgtattcatcctctaaagaaactgtaatcaaaattgcagggttcagggagatgaagcaacagaatagaggtgatcagctggaaaatgtccccagcatgatcctgggatgccttccttattcatccgtttttacgcttcccaacccctcctcatacctctctgagaattgccaaagcagaaagagttagatcaaaggccaatgctcccttataagaataatatcaaatctcttctctcttcttgggagtgattttgcagtgtcaacatagctaagctaaaaagtaaattaggcaaattctccagaactccctttcctgtgtggtattaggttgttgatcataaagaaataygcactgtttatggaaggcagagataagg

SEQ ID NO: 180899 - DNA, 674 bp, Homo sapiens
tacacatcacctcttggcctgatttcacatggtcattgaaattctctcctgtggcctgttttctgtattctgtgttgatataaacacctacatattttttctttgatactccaaacccattgtgataacaaagctcttgaatttagcatagtctttctaaatcattttgagtagcacagcgtagaaaacactaacaaattgaatactagactattcttattagtagaatattattcttaacagtctttctttcattcacactgttggaatccctcacaggctgtcatttgtcatcaaacatccatgtcctcatctcctcaccttttaggataagtgttgggattcacaaacaacactctccaagcacgaaactttccttactacttcttcttcctcttgtttctccacattttcttatgtatgaaattcagttttctatttttcttcttgcagcagtccttttacttgtgataccaaaacaacctgtaacattatttttctgagtaatcatccaccctggagaaaaattatgtgcctctcttagaaggcatattatytgttttgtcttcattctgcatgaagaactgtagggttttccctctccactctatgtaagaaaaatgataattttataatcctttatattctactttttaatttattttggtgcctgg

SEQ ID NO: 180900 - DNA, 617 bp, Homo sapiens
gctatttgggctcttttttggtctcacatgcattttagaatagtcttttctaattcagtgaaaaatgtcattggtgggtttgttaggaatagcattgaatctgtaagttgctttgggcagtatgtccattttagcagtattgattctttctgttcataagcatgaaatatttttccatttgtttgtatcatctttgatttatttcagcacagttttgtagttctccttgtagagatctttygcctccctggttagctgttttcctagctttgtgtgtgtgtgtgaatgggactattgtgaatgggatttcattcttgatttggatctcatttgaatgttactggtgtatagaaatactactgtattttgtacattggtttcgtatcctgaaactttgcccaagttgtgtaacagatctaggagcttttgcgaagagactatagagttttctaggtataaaaccataataatctgcaggcagacagtttgacttctctgtttctatttggatgccttttatttctcttgcatgattgttctggctaggacttgcagtactatgttgaataggagtggtgagagtgagcattcctgtattgttgtgattcttaagagaa

SEQ ID NO: 180901 - DNA, 356 bp, Homo sapiens
caaaattgatcacttaataaatattaattgaggaacttttgtatgcaagcatttactaattatttttaaaaatgcaaagatgttttatgttttaaaaaatcccttcaactcacattcaagagaaaaaattctttcaggtattctctcattgtcacaaatttttaaaataacagtcttaagtatgtacaaacttaaattaggcctatctctccctctctttgaatatttttgattaaaaatgagaggcaatagtcttgaaatactaatggactaraatatgcttatattaattatttgcatatggtataccatacaaattacatattacctaatgaaaatttttatagctgtcttcg

SEQ ID NO: 180902 - DNA, 606 bp, Homo sapiens
atctacaggtgtcacttgtcctgtatctccaagagtgtttaaggagggtttctagtggttcataactttgactgaacattataattggtgaacttaaaaacwattcctgacccatccctaagaaataataaaataaatctgcagtctcagagatggttttcaaggtccttaggtaacccaaatatgcagctcacactgagaaccacagaggtaaacattctagtgtttacctctgcgtgcaatgtgttctaatgtgtgcaaacacattgtagaaagaagaaataatatttgcaaagaacagagaggggaaaataaatgcaacacacacacacagtaacagaatacatacagtcaaacctttaagtattctaagaaaagaagattagttttgaggctaaggatggggaactaaaataaatttattcaaaagaccatagattttaagagaacagggcaaatgagaaggggaagaagaagaagaagtaggagaagaaggagaaggagaaaataaatataagccatacttcatatcatatttaacattttgattattattttatataataaattggatcccagtgaaatactactttgatttagcatttt

SEQ ID NO: 180903 - DNA, 540 bp, Homo sapiens
agatctctagagcaggggcacaatgccaccaatatctttgctaaaccatagcaagagtgacccttactccagttctcaaaaagttactcatctccatcagagaccacctcagcctgaacttcactgtccatgtcactatcagcattttagtcacaagcattcaacaagtctttgggaaattccaaactttccctcatgtttccatcttsttttgagcactccaaactattccaaccactgcccattaccaaagttccaaagtcatgtccacattttcaggtatctttataccaatgccccacttctctggtaccaattttctgtataagtccattctatcattgctgtaaagacctacatgatactaggttatttatggagaaaagaggtttaatgactcacagttccacaggctgtacatgaggcatggctggggagacctcagaaaagttacaatcatgaaggaaggtgaagtggaagcaggcacaaacttcatatagcagagcaggagagagagagaacaaagggggatatgctgtg

SEQ ID NO: 180904 - DNA, 540 bp, Homo sapiens
agatctctagagcaggggcacaatgccaccaatatctttgctaaaccatagcaagagtgacccttactccagttctcaaaaagttactcatctccatcagagaccacctcagcctgaacttcactgtccatgtcactatcagcattttagtcacaagcattcaacaagtctttgggaaattccaaactttccctcatgtttccatcttgttttgagcactccaaactattccaaccactgcccattaccaaagtwccaaagtcatgtccacattttcaggtatctttataccaatgccccacttctctggtaccaattttctgtataagtccattctatcattgctgtaaagacctacatgatactaggttatttatggagaaaagaggtttaatgactcacagttccacaggctgtacatgaggcatggctggggagacctcagaaaagttacaatcatgaaggaaggtgaagtggaagcaggcacaaacttcatatagcagagcaggagagagagagaacaaagggggatatgctgtg

SEQ ID NO: 180905 - DNA, 540 bp, Homo sapiens
agatctctagagcaggggcacaatgccaccaatatctttgctaaaccatagcaagagtgacccttactccagttctcaaaaagttactcatctccatcagagaccacctcagcctgaacttcactgtccatgtcactatcagcattttagtcacaagcattcaacaagtctttgggaaattccaaactttccctcatgtttccatcttgttttgagcactccaaactattccaaccactgcccattaccaaagttycaaagtcatgtccacattttcaggtatctttataccaatgccccacttctctggtaccaattttctgtataagtccattctatcattgctgtaaagacctacatgatactaggttatttatggagaaaagaggtttaatgactcacagttccacaggctgtacatgaggcatggctggggagacctcagaaaagttacaatcatgaaggaaggtgaagtggaagcaggcacaaacttcatatagcagagcaggagagagagagaacaaagggggatatgctgtg

SEQ ID NO: 180906 - DNA, 591 bp, Homo sapiens
tatgaaaattcaaattttgtgtttcatagttaacattgttacatttcacatgtctattatatggagcatttttaaaagtactataagcaacaaaataaattaatgaaatgcaaatttatattagttataataaacttttaaatagtataaattgtttagctacatagctaattttctgtcagatgttatatttatactgtgatatttaaaattgcatttacatacattcacacatattacaatattcayatattgcaaaaaagatgattcacatttcttgatttgatgtaagcataaaattaaaaccactttattaaaaataaagcacattaagacatgcataatattttaaattactgtttatttttaataatatctattctcatcaatttaaattgtttaagattcaccaaaaaggtattatgatttctaatattaagataagtaaaaggagagtaaaatggtaagacagttagacccaaaacattttgtctcccacagaaataccaaattcagcaacaacacataatcactttcctttatgggaaatcaaaaaaaaaaaactcctatgctcccaggaaagcaaaaaat

SEQ ID NO: 180907 - DNA, 591 bp, Homo sapiens
tatgaaaattcaaattttgtgtttcatagttaacattgttacatttcacatgtctattatatggagcatttttaaaagtactataagcaacaaaataaattaatgaaatgcaaatttatattagttataataaacttttaaatagtataaattgtttagctacatagctaattttctgtcagatgttatatttatactgtgatatttaaaattgcatttacatacattcacacatattacaatattcacatattgcaaaaaagatgattcacatttcttgatttgatgtaagcataaaattaaaaccactttattaaaaataaagcacattaagacatgcataatattttaaattactgtttatttttaataatatctattctcatcaatttaaattgtttaagattcaccaaaaaggtatwatgatttctaatattaagataagtaaaaggagagtaaaatggtaagacagttagacccaaaacattttgtctcccacagaaataccaaattcagcaacaacacataatcactttcctttatgggaaatcaaaaaaaaaaaactcctatgctcccaggaaagcaaaaaat

SEQ ID NO: 180908 - DNA, 591 bp, Homo sapiens
tatgaaaattcaaattttgtgtttcatagttaacattgttacatttcacatgtctattatatggagcatttttaaaagtactataagcaacaaaataaattaatgaaatgcaaatttatattagttataataaacttttaaatagtataaattgtttagctacatagctaattttctgtcagatgttatatttatactgtgatatttaaaattgcatttacatacattcacacatattacaatattcacatattgcaaaaaagatgattcacatttcttgatttgatgtaagcataaaattaaaaccactttattaaaaataaagcacattaagacatgcataatattttaaattactgtttatttttaataatatctattctcatcaatttaaattgtttaagattcaccaaaaaggtattatgatttctaatattaagataagtaaaaggagagtaaaatggtaagacagttagacccaaaacattttgtctcccwcagaaataccaaattcagcaacaacacataatcactttcctttatgggaaatcaaaaaaaaaaaactcctatgctcccaggaaagcaaaaaat

SEQ ID NO: 180909 - DNA, 403 bp, Homo sapiens
tattaagaacccaattagcatctgagaattgttgccacgagtcaggtgaccagatgccttaagaatatctgttctcttaccttgctgcttcttccatttgggctttacctcttctttcccactcctccatccacggtggaaaaaaagaaaaagaaagaaagaaagaaggaaggaaggaagaaakaaagaaagaaagaaagaaagaaagaaagaaagaaagaaagaaagaaagagaaagaaaggaaagaaagaaaaagaaaagaaaagaggcgccatgagcttgtcaccttctctaatggaggaagaggtgagttcatagtttttgtaaaacatttccacttcgaatctgctagtttcatgttcatccataattcatttttctgtcttttctcctgagctgata

SEQ ID NO: 180910 - DNA, 552 bp, Homo sapiens
tttatggagagatttagtactaacgtatttgtaaggagaatgagattgagaggtttctaagcctcctagtgaaataaagtaacccatgagcattccactgaacaataatttgacagctgtctttttctttattcgggggttctttctttactattcttggcttctgttgttttacttagactgggttctgcatacttcttgcactttagtcactatatacatttagttatcgtagactgtactagaatttagtcttttcctttggcctgatttggctactcaccaataatgcttagcagtacttttctatttgcttaatgaaaatgattttcccttggctcttttttgtggcctttttttctttccttttctactgcttctaaataccttgacaatgcaaaatgtgtwtttaaaatttcttcatttaatttttttctttccatttctccaggttagctatttagcagatgtttaacagattcttttgatttgagttgaattagtcccatatgaaagtgtcagaaatataatgcatatgctacacagcagagc

SEQ ID NO: 180911 - DNA, 551 bp, Homo sapiens
attttttaaagcaacatatagatatataacccatattttgagatgtacatcctcttattgtttctagtatctgatcaaaaaktttcatccaattagaggtaatatatactttttgcagataaaaatattgcagacagaaaattcctttttgttgttttatattttctaaaatctacagtgctttccaactcacaaaagagtcagtaaatctaagatatctctatgacctctgaatatgtatctctcaacactggctgaaatattttacaacttttggtgtttgatatgattggaaacagtcatgtttagttgttctgtagtgacggagttatcacacactaacttaattgcttagcaatcgcttgttgaaactgtaggggaagaatagcacatttttattcaacatagttcttagttggaaggaaaccagtaacaacaggtaaattagcaagagaaaaacaaacagaagtttattaacatgtatatttcatatatacatgaatatacccaagaaataagtcattccttctctaagagatggctttgaattc

SEQ ID NO: 180912 - DNA, 406 bp, Homo sapiens
gaattcctttgtcaaactaagacttttacccaaaaaagtatattcaaatagtgaaaaggaaaaacaaacataatgtactttaaagatggcatatgcaacagtagtcatgaaacagagctgagggtttaaccacagctcagaaccatgaggcttgaagtattacaaagtagggatagtttggagactgatggaagaggattttccaagatgagtagaaaaaatattggcagcaagaaagaacataaagatgttaaaatgaaactgtcacctattcttcaataacacttaaaatggtcaacataacctwttgcattctgaaaaacctaagttggtgagaaaatagctgtgtaatttcccaagacctgcaggattgccaataggttcgaaacgtagagccaaggaggac

SEQ ID NO: 180913 - DNA, 557 bp, Homo sapiens
tgaatgttattgttgtatagcaatgctactgatttttgtagattgattttgtaacctgaaactttactgaagtcattcatacaagagccttttgctggaatctttagggttttctaggtatcaaatcaaattgtttgtagaagatagatagtttgaattcttcttttcctattcatatgttgtttattttgttttctctcgtgattgctttggctagctatttcagtactatgttgaataggagtggtgagaatcagcaaccttgtcttgtttcagttctcaagaagattgctcccagtttttgccctttcagtataatgttggctgttagtttgtcatagttgtctcttattattttgagatgtgtttctttgatgcttcatttcttgagggcttttatcacgaagctatgttgtattttatcaaaagctatttctttgtctattaagttgatcatatggtttttaattgtttaagtactaattacatttatttagttgygtatgttgaaacaaccttgcatcccaagagaaaagtctacttgatcatggtgaatt

SEQ ID NO: 180914 - DNA, 557 bp, Homo sapiens
tgaatgttattgttgtatagcaatgctactgatttttgtagattgattttgtaacctgaaactttactgaagtcattcatacaagagccttttgctggaatctttagggttttctaggtatcaaatcaaattgtttgtagaagatagatagtttgaattcttcttttcctattcatatgttgtttattttgttttctctcgtgattgctttggctagctatttcagtactatgttgaataggagtggtgagaatcagcaaccttgtcttgtttcagttctcaagaagattgctcccagtttttgccctttcagtataatgttggctgttagtttgtcatagttgtctcttattattttgagatgtgtttctttgatgcttcatttcttgagggcttttatcacgaagctatgttgtattttatcaaaagctatttctttgtctattaagttgatcatatggtttttaattgtttaagtactaattacatttatttagttgcgtatgttgaamcaaccttgcatcccaagagaaaagtctacttgatcatggtgaatt

SEQ ID NO: 180915 - DNA, 434 bp, Homo sapiens
tacagacacatttagaatactttaatactgtaattatggtgtgtaaaccaatcatatttttagtatraagaatgaaatataaaacaattaaaataataaaaacaatttgataagagatagataaaaagatataaattgaaacattcataagtaaaaaagtaggagaatttggtatttaaatatagagttgtttaggttttggtttatttgtgtacattcttttctttgcattctaagtaaagttgtcatcattttaaaattacatgttatacctgtaagatttttttagagcattatggtaaccacaaatcaaaaacctataatagataccctaaaaatcaaaagcaagtaattaaaatgcactattagagaaaaatcacttaaccacaaaggaatatattaagaaagaaagagagttgttatgaagcaagcag

SEQ ID NO: 180916 - DNA, 434 bp, Homo sapiens
tacagacacatttagaatactttaatactgtaattatggtgtgtaaaccaatcatatttttagtatgaagaatgaaatataaaacaattaaaataataaaaacaatttgataagagatagataaaaagatataaattgaaacattcataagtaaaaaagtaggagaatttggtatttaaatatagagttgtttaggttttggtttrtttgtgtacattcttttctttgcattctaagtaaagttgtcatcattttaaaattacatgttatacctgtaagatttttttagagcattatggtaaccacaaatcaaaaacctataatagataccctaaaaatcaaaagcaagtaattaaaatgcactattagagaaaaatcacttaaccacaaaggaatatattaagaaagaaagagagttgttatgaagcaagcag

SEQ ID NO: 180917 - DNA, 187 bp, Homo sapiens
aaaacaaatcttgagtttttaaaaattgaaatgatatcaagtattttttttctgaccaygatgtaataaaactagaaatcaataacaggaggaaatttggaaactgttcaaacacacagaaattaaatagcattttaatatcaaacaatgggttaatgaataaattaagggaaatttttaaacagtt

SEQ ID NO: 180918 - DNA, 187 bp, Homo sapiens
aaaacaaatcttgagtttttaaaaattgaaatgatatcaagtattttttttctgaccatratgtaataaaactagaaatcaataacaggaggaaatttggaaactgttcaaacacacagaaattaaatagcattttaatatcaaacaatgggttaatgaataaattaagggaaatttttaaacagtt

SEQ ID NO: 180919 - DNA, 446 bp, Homo sapiens
agaatgaataacaagattgaacagtaataaaatgcctcctatcaaagaaagcccaggaactgatggcttcactggtgaattctactcaamattcaaagaagagcgagtaccaattctactcaaactatttaaaaaaattgaaaagaaggaatactttaaaactcattctacatggccagcatgcctccatactaagaccagagaagaacaaacaacaaaagaattataggcatatatctctaatgaacattggtgcaaaacccctcagcaaaatactagcaaacttaattcaacaaaagattaaaaagattatgcaccatgatctagtgagattcatcccagggatgcaaggatagttcaacataagtagatcaataagcatgatgtgttacattaacacaatcaaagaccatatgataattttaacagatgctgaaaaattattc

SEQ ID NO: 180920 - DNA, 654 bp, Homo sapiens
atcccaaatggcataatgctgaatgctgaatctctgaaagatcaaagctcttaaagatcaaaatccataacatmcaaaatcctgaaaatcacaatcacaggctacttgcattatgttaggcaaaactattacattgttactgtctttatgcagaagaaaatagatttcatttgaatcctcaaaccataatgtcagattcggaactgagtgtaatcaaaacttcttaaagtaaatttcaaggtctcaccaataaagcttgctttttccattcacccaatgcatttggaagatcatttaaatgaataatttgaccacaaaatctggttataatgaaaatttcagttgaaaaacatgtcatttgcctgcattggcattcctttcaactgatgacattccacgaccttttaatgaattaaagccacattttcctgaagaaccagtgaagttactgactaatttgaaaataattttgtccatagtaggataagaattaactgacacaacggtattgctgttcaatcaccagtattgtttctgccaaatctgtggtctttatatgagtgcatgagaaatgaattttcagataccccaaacaacatagaagcatggcacagaagatgggataatttaatagggaatgctcaagtcggtgta

SEQ ID NO: 180921 - DNA, 654 bp, Homo sapiens
atcccaaatggcataatgctgaatgctgaatctctgaaagatcaaagctcttaaagatcaaaatccataacatacaaaatcctgaaaatcacaatcacaggctacttgcattatgttaggcaaaactattacattgttactgtctttatgcagaagaaaatagatttcatttgaatcctcaaaccataatgtcagattyggaactgagtgtaatcaaaacttcttaaagtaaatttcaaggtctcaccaataaagcttgctttttccattcacccaatgcatttggaagatcatttaaatgaataatttgaccacaaaatctggttataatgaaaatttcagttgaaaaacatgtcatttgcctgcattggcattcctttcaactgatgacattccacgaccttttaatgaattaaagccacattttcctgaagaaccagtgaagttactgactaatttgaaaataattttgtccatagtaggataagaattaactgacacaacggtattgctgttcaatcaccagtattgtttctgccaaatctgtggtctttatatgagtgcatgagaaatgaattttcagataccccaaacaacatagaagcatggcacagaagatgggataatttaatagggaatgctcaagtcggtgta

SEQ ID NO: 180922 - DNA, 654 bp, Homo sapiens
atcccaaatggcataatgctgaatgctgaatctctgaaagatcaaagctcttaaagatcaaaatccataacatacaaaatcctgaaaatcacaatcacaggctacttgcattatgttaggcaaaactattacattgttactgtctttatgcagaagaaaatagatttcatttgaatcctcaaaccataatgtcagattcggaaytgagtgtaatcaaaacttcttaaagtaaatttcaaggtctcaccaataaagcttgctttttccattcacccaatgcatttggaagatcatttaaatgaataatttgaccacaaaatctggttataatgaaaatttcagttgaaaaacatgtcatttgcctgcattggcattcctttcaactgatgacattccacgaccttttaatgaattaaagccacattttcctgaagaaccagtgaagttactgactaatttgaaaataattttgtccatagtaggataagaattaactgacacaacggtattgctgttcaatcaccagtattgtttctgccaaatctgtggtctttatatgagtgcatgagaaatgaattttcagataccccaaacaacatagaagcatggcacagaagatgggataatttaatagggaatgctcaagtcggtgta

SEQ ID NO: 180923 - DNA, 654 bp, Homo sapiens
atcccaaatggcataatgctgaatgctgaatctctgaaagatcaaagctcttaaagatcaaaatccataacatacaaaatcctgaaaatcacaatcacaggctacttgcattatgttaggcaaaactattacattgttactgtctttatgcagaagaaaatagatttcatttgaatcctcaaaccataatgtcagattcggaactgagtgtaatcaaaacttcttaaagtaaatttcaaggtctcaccaataaagcttgctttttccattcacccaatgcatttggaagatcatttaaatgaataatttgaccacaaaatctggttataatgaaaatttcagttgaaaaacatgtcatttgcctgcattggcattcctttcaactgatgacattccacgaccttttaatgaattaaagccacattttcctgaagaaccagtgaagttactgactaatttgaaaataattttgtccatagtaggataagaattaactgacacaayggtattgctgttcaatcaccagtattgtttctgccaaatctgtggtctttatatgagtgcatgagaaatgaattttcagataccccaaacaacatagaagcatggcacagaagatgggataatttaatagggaatgctcaagtcggtgta

SEQ ID NO: 180924 - DNA, 618 bp, Homo sapiens
acagtgaatgattgcaaggatcatcagttcttatggattatttctgtgcaattgcccacaatctattcctgcaaaacaccatttcatatgctttattttctttttagttatttttgcttttttgagtttttttaattcactattttaaattgtcagcataattttctcaaaattcactatgctatgtatttcatcttcacatcttttccaatactggaagtgtgaatttgtaaagattttttggtgagttttaatctgttttatgcatttttggcaaatttgacttcataaaagtgctttgacttttaggcattgtgtgtgtatatgtaaaaatgttgaaacttcctcwataaatgaaaggttgttctctttatacatctgcattagtgaaagataaaatttctcaagatcttagcttttttgagaggctggtattactggaaatgaggaacaaataaaggaatttaataaagttgcaggatacaaaatcagcatacaaaaatcaggcgtctttttatatgctgatagtgaactatgtacaaaagatatcaagaaatcaatttcatttacaatagccacgaaaagattaaaataactatgaataaacttaaccaaaag

SEQ ID NO: 180925 - DNA, 618 bp, Homo sapiens
acagtgaatgattgcaaggatcatcagttcttatggattatttctgtgcaattgcccacaatctattcctgcaaaacaccatttcatatgctttattttctttttagttatttttgcttttttgagtttttttaattcactattttaaattgtcagcataattttctcaaaattcactatgctatgtatttcatcttcacatcttttccaatactggaagtgtgaatttgtaaagattttttggtgagttttaatctgttttatgcatttttggcaaatttgacttcataaaagtgctttgacttttaggcattgtgtgtgtatatgtaaaaatgttgaaacttcctctataaatgaaaggttgttctctttatacatctgcattagtgaaagataaaatttctcaagatcttagcttttttgagaggctggtattactggaaatgaggaacaaataaaggaatttaataaagttgcaggatacaaaatcagcatacaaaaatcargcgtctttttatatgctgatagtgaactatgtacaaaagatatcaagaaatcaatttcatttacaatagccacgaaaagattaaaataactatgaataaacttaaccaaaag

SEQ ID NO: 180926 - DNA, 449 bp, Homo sapiens
taatattcacatacataaaaaattcaaaaaactcaatagcaaaaatcagataatccagctaaaaatgcataaatggtctgaacagacatatttccaagggagagactcacagagccaacagatatatgaaaaaatgttcaatgtcattagttatttaaaaaaaatcacaatgagatatcatttcatcacatttagaatggccattatcagaaagcccaaaaataacacatgctaaygaggatacaatgtaaagagaactcttatacactgttggcagaaatgcaaactagtacatccattagaaaacatgatagaggtttctcaaaaactaaaaatagaactatcatatgatccagcaatcccactactggatatttttccaaagaaaacaaaatcagtatatagaagagatacccatgtttattgcagctttattcacaacagccaag

SEQ ID NO: 180927 - DNA, 449 bp, Homo sapiens
taatattcacatacataaaaaattcaaaaaactcaatagcaaaaatcagataatccagctaaaaatgcataaatggtctgaacagacatatttccaagggagagactcacagagccaacagatatatgaaaaaatgttcaatgtcattagttatttaaaaaaaatcacaatgagatatcatttcatcacatttagaatggccattatcagaaagcccaaaaataacacatgctaacgaggatacaatgtaaagagaacwcttatacactgttggcagaaatgcaaactagtacatccattagaaaacatgatagaggtttctcaaaaactaaaaatagaactatcatatgatccagcaatcccactactggatatttttccaaagaaaacaaaatcagtatatagaagagatacccatgtttattgcagctttattcacaacagccaag

SEQ ID NO: 180928 - DNA, 449 bp, Homo sapiens
taatattcacatacataaaaaattcaaaaaactcaatagcaaaaatcagataatccagctaaaaatgcataaatggtctgaacagacatatttccaagggagagactcacagagccaacagatatatgaaaaaatgttcaatgtcattagttatttaaaaaaaatcacaatgagatatcatttcatcacatttagaatggccattatcagaaagcccaaaaataacacatgctaacgaggatacaatgtaaagagaactcttatacactgttggcagaaatgcaaactagtacatccattagaaaacatgatagaggtttctcaaaaactaaaaatagaactatcatatgatccagcaatcccactactggatatttttccaaagaaaacaaaatcagtatatrgaagagatacccatgtttattgcagctttattcacaacagccaag

SEQ ID NO: 180929 - DNA, 603 bp, Homo sapiens
ctgccttattgaatttatttatttatttggttttaagatgatctacaaaaggcattataacaaaaacacagttattattttaaactcacaagatcataaaacttcaatctacctgagctaagctaatacagctgagtctcattaatatgtttaccaaggacattcaaacatcaaagatgaaaacatctgtattctaaatcagactttattttatttaataaataaaaattatgcagttcttttcatattttaagtctaacaaatttcctggatcctgaggctttatgagttatgaccaaagcactgtcaagcttgcagacagcaggtaaaagtgatagcaacatttcttttctaattagaatgaattaaagtgggattatttgctgtttccctacacatgtattaaaakgtttctagagtagtgtgacatatcctaactagacttaagtaagagaaaataaaaaatcttaaagaaactttttaaataatgttatatattattgacttgcttttaacagtttatgaaactgctcagaaaacaaaattggtagtttttgccctgaataatgacagaaaactatgattgctacaaatctgaaatgt

SEQ ID NO: 180930 - DNA, 603 bp, Homo sapiens
ctgccttattgaatttatttatttatttggttttaagatgatctacaaaaggcattataacaaaaacacagttattattttaaactcacaagatcataaaacttcaatctacctgagctaagctaatacagctgagtctcattaatatgtttaccaaggacattcaaacatcaaagatgaaaacatctgtattctaaatcagactttattttatttaataaataaaaattatgcagttcttttcatattttaagtctaacaaatttcctggatcctgaggctttatgagttatgaccaaagcactgtcaagcttgcagacagcaggtaaaagtgatagcaacatttcttttctaattagaatgaattaaagtgggattatttgctgtttccctacacatgtattaaaaggtttctagagtagtgtgacatatcctaactagacttaagtaagagaaaataaaaaatcttaaagaaactttttaaataatgttatatattattgacttgcttttaayagtttatgaaactgctcagaaaacaaaattggtagtttttgccctgaataatgacagaaaactatgattgctacaaatctgaaatgt

SEQ ID NO: 180931 - DNA, 521 bp, Homo sapiens
tcatgctttctcaatggtcccccaaagtcttaactcattctagcattaactcaaaagtccaagctcaaagtctaatttgagacagggcaagtcccttctgcctatgagcctgtgaaatcaaaaacaatttaattacttccaagacacaatggaagtacaggcattgggtaagtatttctgttaaaaatgagagaaattggccaaaataaacgggacagaggctccatgccagtctgaaacccagcaaggcactaattaaatcttaaagccccaaaataatctcctttgactccatgtctcacatccayggcatgctaatgtaagaggtgtgctcccttagccttgggcagttccacccctgtggctcttccaggttacagctcttgaacctgctttcacagggtggaattgagtgcctgtggcttttccagtctcacagtgaaagttttaaatggatctaccattctggagtctgtaggatagtggccttcttctcacagctccactagacagtgccccag

SEQ ID NO: 180932 - DNA, 302 bp, Homo sapiens
tattcttctgatctctccaaatggtttcaatctctgcccrttacccaattccaacgttgcttccatattttcaggtatctttgtagcagtgccccaaactcctggtaccaactttctgtattagtctgttttcacactgctataaagaactacctaaaactgggtaacttacaaagaaaagaggtttaattaactcacagttccacatggttggggtggcctcaggaaacttaccatcatggcagaaggcaaaggggaagcaagcccttacgtggcatcaggagagagagaggaaaagtacc

SEQ ID NO: 180933 - DNA, 297 bp, Homo sapiens
tgaaattcctggaaaagtccyggtgctgtgctggacttagagtcagtggatttgagtggcacattacacagtgagacaccagacagggaggccaagagagtccttgagtcactcctaccccaaccccagacaacggagttgctggctttatgtgtgatccagcacatttcaagttgtggtggaaagaatccttttgcttgagaaatcaaaagactaaaagggactttgtcttttagtttacttacaaggttggccacatgggggtaaagcaccaagcaggctcttggaggccctgat

SEQ ID NO: 180934 - DNA, 297 bp, Homo sapiens
tgaaattcctggaaaagtcccggtgctgtgctggacttagagtcagtggatttgagtggcacatkacacagtgagacaccagacagggaggccaagagagtccttgagtcactcctaccccaaccccagacaacggagttgctggctttatgtgtgatccagcacatttcaagttgtggtggaaagaatccttttgcttgagaaatcaaaagactaaaagggactttgtcttttagtttacttacaaggttggccacatgggggtaaagcaccaagcaggctcttggaggccctgat

SEQ ID NO: 180935 - DNA, 511 bp, Homo sapiens
tctggcttggatgacagcccagcccagctgactagagaatcaggtagatacctaaggtttccaactccaggccctggctcccagatagcatatctggacccacgaagtactgggggaaatttaccaccctggaagaaaggaaacaagcctggctggctttacaaaatgctgattttagagccctaggaccttaagtgaacataggcagtagccaggcagtggttgccatggscctcgtgtgagaccgaatgctgttctggattcaggcctgcccggcacggtcccagtggtagtggccacaggggtcattatgtcacctctcccatagctccagacagctcagtacagagagaaagactcagtttgtttgggagaatgtggggaagagaacaagagtctgtgcctggtaatcaagaaaattcttccatgtctatccaagaccaccaagtcagcacttctacaaatccacaagagccacagcattactcagcttggggtgcccgtaatgcaa

SEQ ID NO: 180936 - DNA, 628 bp, Homo sapiens
taggttcataatgagttaattagtcagaacattttttcttccattcattcagatactcattgagtatgtattgtggtctgtgtgtgcatttgtgtttgtaaatatggcaggattccatctctgccctcaagttgcttaactgagggtcaytgcacaaagcacaatatttactgcatagttattgctactgcttcaaggcacaagtcagatatcttccaggaacctatatttaagttgtctactaattattcaactaaatacctgaatgatatctgtctatattgtgctcttactctaagctcccacaaagctggctctatgaaatacaatttactttttcatattcagatagagtttactatatatatttgtggattgcaaatatgacatacctaagaagaataaatatacagttttcctagaaaactaaggtatcaccaatttgaaacaatgaacatatcataaattaaagagtgatcttttacattcaaaagtacttcagtagatgttacccagcatattttccaagtcttaagtaacatagacaaaatgctggtatcaaaaattgagataattataatttagtgaatttcagaagtcatattgtagttctaagaagaaaaaattg

SEQ ID NO: 180937 - DNA, 398 bp, Homo sapiens
cttggatttctctgagagctcacccactgcagctttaagctgggtcaggttctggtagatygcgtcttgctcggattgttcctgacttagggagctggggaccttggacactgggccaagaagaaaaggaactgcaattattaaacacctactgtgtgccaagccctgaactgagccccatagagacatcatttgtgagagccaaggtctcagttaatcccctttgaagatgaggaaaactgacacctggagaaggcagcacagaaggccaaggagagccaggttcttcccctcctcctcctccctctcctgtcctgctctagagtggggaggggctgtgggagaggcccctacagacccccagggacaacatcttggctctcagtcccacctccctc

SEQ ID NO: 180938 - DNA, 398 bp, Homo sapiens
cttggatttctctgagagctcacccactgcagctttaagctgggtcaggttctggtagattgcgtcttgctcggattgttcctgacttagggagctggggaccttggacactgggccaagaagaaaaggaactgcaattattaaacacctactgtgtgccaagccctgaactgagccccatagrgacatcatttgtgagagccaaggtctcagttaatcccctttgaagatgaggaaaactgacacctggagaaggcagcacagaaggccaaggagagccaggttcttcccctcctcctcctccctctcctgtcctgctctagagtggggaggggctgtgggagaggcccctacagacccccagggacaacatcttggctctcagtcccacctccctc

SEQ ID NO: 180939 - DNA, 398 bp, Homo sapiens
cttggatttctctgagagctcacccactgcagctttaagctgggtcaggttctggtagattgcgtcttgctcggattgttcctgacttagggagctggggaccttggacactgggccaagaagaaaaggaactgcaattattaaacacctactgtgtgccaagccctgaactgagccccatagagacatcatttgtgagagccaaggtctcagttaatcccctttgaagatgargaaaactgacacctggagaaggcagcacagaaggccaaggagagccaggttcttcccctcctcctcctccctctcctgtcctgctctagagtggggaggggctgtgggagaggcccctacagacccccagggacaacatcttggctctcagtcccacctccctc

SEQ ID NO: 180940 - DNA, 398 bp, Homo sapiens
cttggatttctctgagagctcacccactgcagctttaagctgggtcaggttctggtagattgcgtcttgctcggattgttcctgacttagggagctggggaccttggacactgggccaagaagaaaaggaactgcaattattaaacacctactgtgtgccaagccctgaactgagccccatagagacatcatttgtgagagccaaggtctcagttaatcccctttgaagatgaggaaaactgacacctggagaaggcagcacagaaggccaaggagagccaggttcttcccctcctcctcctccctctcctgtcctgcyctagagtggggaggggctgtgggagaggcccctacagacccccagggacaacatcttggctctcagtcccacctccctc

SEQ ID NO: 180941 - DNA, 569 bp, Homo sapiens
ttaccttattgtcatattaggcctctctcttaataatatttattgtcagcttaaacgggcagacaaattttaagggaagtatcatcagaggatattttctcaactctctcctaacaattcttaataggggagtgatttacacagttctcattataaaaggcattgattattcctatattaaggtacatgccacaaaagaaattccaaatcatatcaatatgcctatttgtcctgrttaattaatatctttaaattaaagaaaatagactgatggtcacctttaagcctgtgaacacactgggttcctcttttgattattttattttatttctggcatgcacagctttatatttttttcccattgtagttttttttggttgtttttcaaatatgaaacactggcaataatatgaccacatttatttttcagaaggactatctgtattgtcccagccggtgagtcacctctggatgcggcactgcaatcctgataaatcaatctgcaatagcagcatgttttcccttcagagaggaaagggaacccgttggcatttgcaaagaccttcctt

SEQ ID NO: 180942 - DNA, 594 bp, Homo sapiens
ttcctcatccaatccgctgtgtctgaggccgggggagggtcagattgtgtggtatttaaggcttcctctagggctgagtaaagaagaaaggtggtcatcttagcacwtaggctggtttaagccattgtagcagatgctgtcaatatcctactcatacctcctcaggccttaacaattcagtgcagcaagcccaatttccacctgctagtatatgcatttctttgcttgaggtattatttggatctgacatctgctctgccctgccccaccccccaggaagtgttggagaaatactacctcctaggagttctcagtcaatgaacgaaaggaattggtgcactctagttctttgcctctggtgggggacaattttgaatgtgcattctacactcgcttccagggttcccaggattattaaattctagcttcccacagtaatgacttgtttgatgatgtactttttattgggattttttcttccttgtctcacttttcttatgccacatagctctgatcacctcccaaataaactactttcactctaatctttcttatgccacatagctctgatcacctcccaaataaactactttc

SEQ ID NO: 180943 - DNA, 407 bp, Homo sapiens
cataatgtattgcatggtatattttgttttgtatagtagaaatatgcatgtatttatatacatcatttaaaatatacaattatatatttcacacaagatagtttattgcatttttcatgggtacagtctcctccattagagagtttgttggygtgtcattctcaacccagcatgtgacattctcaattctgcttttaatgtatatcctagaaagtggaagggaaagagactcagaaaatcacgttcaaggcttagccttgaacacgtacagctgttcctcagtatacacggggactggttccaaggccctggcatataacaaaacatgcacatgcttaagtcctgcagtcagctctgcagaacctgtgaatacaaaaggttgccactctaatacatgcaggtttctc

SEQ ID NO: 180944 - DNA, 562 bp, Homo sapiens
ttagctcctttgatttaaatcatactgagaaaaaggaaagatttagttttcacttatcaagaaaaagttagtttgttaaaaagtcattaacaacttttactcccattattaacaaatctggggatttataaataccttgcttgtgcataatcactcttccatgagatacaccaggccaaaaagaaaagaaaaacaaaactgtgatggctataatccattattcccagagtgatttatgaaataagataatgcaaataattgtttgtcatggggcacagcagtggaattaaaggaaaatggataaagattttggcaatttctactaaaaaaatatataaagataatgcmtacagctgactttaagaagctggcagaagacagcatatcccatttttttggccaggcatggtggctcacacctgtaatcccagcattttgggaggccgaggcaggtggattacctgaggtcaggaatttgagaccagcctggccaacatggtgaaaccccatctctactaaaaatacaaaaattaaccgggcgtgtgacacatacctgtaatct

SEQ ID NO: 180945 - DNA, 399 bp, Homo sapiens
ctagggcttggaatgtgtgcctcaggactctgcatagtgccctatcctactatggctgagctggtatccaggttgcaaaacaacatcctctttattataccttcatttctcctcaagcagaaggaaggagtatcttttggagctgtgagctgcactgcctgggattggaggaggggtaatgcaggccctcccttggccttcccatctggcctatcaccaggtcatgtgctctccaagtccactgactctgagcccagaacagcactaggacttgcctaggaattgcagtccttgtggcttagattgcctttcaagtttayttaggaccccagagacctttagttcatgacattaaggcttgccaaaacttaagttccttcctctgggatggacgattcc

SEQ ID NO: 180946 - DNA, 565 bp, Homo sapiens
ctatgacgttgaggaggtcatccaacatctctgagttttctctttcttgtatataaaatggaagtagctggcagggcagggcatgtgtcgttgatatatttttaatcctrgtaaaaggaggaggttcaaggcagaaaactcatcaaagcttaatgacaacaatagcagctaacatttgtgaggctctaaggtaaaacccaaggctaagactcttcatgcaaactaggtcaagcagcaagctacaggttagaaacaggcaaggcagcaaaacagtcacatgggtgaactctgggactctgcagtcacactctgactctcctgcttgcacgtgggtgctcataagcaagctagttaacacctcagagccttggttttcccaccactaaatgcaaataataggcaatgctgagttattgcaaagttacttaatctttgcaatagccttctgtggtgagtggcatattcttattattattattagtcctagaagagtcagtgctcaaaggaatctgctttagagccttattgctccaagtgtggttcatgcatcagcaacatcagcata

SEQ ID NO: 180947 - DNA, 565 bp, Homo sapiens
ctatgacgttgaggaggtcatccaacatctctgagttttctctttcttgtatataaaatggaagtagctggcagggcagggcatgtgtcgttgatatatttttaatcctggtaaaaggaggaggttcaaggcagaaaactcatcaaagcttaatgacaacaatagcagctaacatttgtgaggctctaaggtaaaacccaaggctaagactcttcatgcaaactaggtcaagcagcaagctacaggttagaaacaggcaaggcagcaaaacagtcacatgggtgaactctgggactctgcagtcacactctgactctcctgcttgcacgtgggtgctcataagcaagctagttaacacctcagagccttggttttcccaccactaaatgcaaataataggcaatgctgagttattgcaaagttacttaatctttgcaatagccttctgtggtgagtggcatattcttmttattattattagtcctagaagagtcagtgctcaaaggaatctgctttagagccttattgctccaagtgtggttcatgcatcagcaacatcagcata

SEQ ID NO: 180948 - DNA, 560 bp, Homo sapiens
cagcagggaatctctgggtcagagagctcctatgggctgcagtggcttgaggcctttatggcttggggcttatccttggccagcagatattggatacagtttcatggagtatacagagcaggcaggttctaaatggattaccataggcttattggggctatgtttaaagcaagtggatgtgcaaacatttgagtttggcttggtggggtattccaggtctggtctcagcctgcggtgaggaaattaataatcaaggggccagcactttatatagcacaaggcaggggccatggattaggaaakccaggcctggggttcatgcttaagtgaggcttttgttcaactgggaggcggtgcacaggtgactgggaggtggaggggctgagatgggagagaaaagcacagagagggaagacaagcaagcctcaagaggattgtggcttcttccgtcacttctgggcctgatctactacaacactacagaatcaaggacaactgtttgaaaattcaaggctgaattcaggtctttcattggtgagtcagagttttcctacagactc

SEQ ID NO: 180949 - DNA, 560 bp, Homo sapiens
cagcagggaatctctgggtcagagagctcctatgggctgcagtggcttgaggcctttatggcttggggcttatccttggccagcagatattggatacagtttcatggagtatacagagcaggcaggttctaaatggattaccataggcttattggggctatgtttaaagcaagtggatgtgcaaacatttgagtttggcttggtggggtattccaggtctggtctcagcctgcggtgaggaaattaataatcaaggggccagcactttatatagcacaaggcaggggccatggattaggaaagccaggcctggggttcatgcttaagtgaggcttttgttcaactgggaggcggtgcacaggtgactgggaggtggaggggctgagatgggaragaaaagcacagagagggaagacaagcaagcctcaagaggattgtggcttcttccgtcacttctgggcctgatctactacaacactacagaatcaaggacaactgtttgaaaattcaaggctgaattcaggtctttcattggtgagtcagagttttcctacagactc

SEQ ID NO: 180950 - DNA, 560 bp, Homo sapiens
cagcagggaatctctgggtcagagagctcctatgggctgcagtggcttgaggcctttatggcttggggcttatccttggccagcagatattggatacagtttcatggagtatacagagcaggcaggttctaaatggattaccataggcttattggggctatgtttaaagcaagtggatgtgcaaacatttgagtttggcttggtggggtattccaggtctggtctcagcctgcggtgaggaaattaataatcaaggggccagcactttatatagcacaaggcaggggccatggattaggaaagccaggcctggggttcatgcttaagtgaggcttttgttcaactgggaggcggtgcacaggtgactgggaggtggaggggctgagatgggagagaaaagcacagagagggaagacaagcaagcctcaagaggattgtggcttcttccgtcacttctgggccygatctactacaacactacagaatcaaggacaactgtttgaaaattcaaggctgaattcaggtctttcattggtgagtcagagttttcctacagactc

SEQ ID NO: 180951 - DNA, 621 bp, Homo sapiens
ttaaaggagctaataatctgcttcccagattgcatatcaagtttgacaatggaagagaatgaataaaacagaaagtaaactgcacattttaaatggacagaaactaaggaaaataatgtgtgatatcaagagaaataaacaaatgcaagcaataactatggtggattggagtgtctcactgatactttctgccttgtttttctcctaggtcatcagttagatgaatatgtatttgaaagctgttcattcattgtggagatgtgggtagacagcagtaaatatgccccatggcactgattaactcaaagtggctccaggccaaagattttatgcttcagtggagayatttttgccaggtacatgtttttggtgatatcacaccctaaatgttactttgaaagtctatcatagcctgtggcattaattttttccaagatggaccactgtgttggttattattaatctgctacaaaaaaagagctttagacttgggatattttaaaattccttaaaatgtaaaacactagcatgctactaaacctgccagacctattttcttttaatccagacttgttatttgtaataaatagagatatgtaagatatggaatttttaaaacat

SEQ ID NO: 180952 - DNA, 636 bp, Homo sapiens
ctcccagcagtttgcttttttctatttatatgttgaggcaattgcctttcatgttggaggctttgctaagatatctggcagtctctgcttgtctgcttatattcttaagagtgggaggctaaaaagctgatgaaaagctctatgtgcatgagtggttgtctatggacattgcatctcaccgcaaggtgatatagctaggctggttcatcgggaaaaccccagtgtcagtgtttttaaggttggtgcttttgggctggttggattcactatagaaaaatcctcccatacccagcatgtaagatatacaaccgcctgcccactttgtgctggttaagtgtaggaagagggcttgaggagatggctggtagtctcaacgttcctagttacatagactctcatttaatttccatatttttaatattgaatttcgtcttgccctatgaagaaattcctttgtcccctttttgggtaattccaaattatgtayagtttttgtaaactaatagctgctgctgaccacaaaattgaacaggtctctcttcctactttgaggtaataggcacatacaatcttaactaactagaagcctctccttctagattttgagttcaaaattagtgacacaggatgtgggga

SEQ ID NO: 180953 - DNA, 367 bp, Homo sapiens
gggaaacatggtgaactggggggctaaagggatgtcctccaactagaggaacagtcattagttgcctatagccaactgtcaccatatgaaagtgtagcccttgcctgattttcaagggaaactggaaaccagaaatgtawatgaaatgtattgatatttaaaacagtgggttgtggcccacagtttagaacttctgacccaaagacagaaaagacacttctaaatattattttagttattttttaaaatgagataactgttacggcagagtgtccctaatatattgttgaatgataaaagtcagttgcaatacaaaatatattgaataattttatcttgtaaagaactgtttacacaattatggggg

SEQ ID NO: 180954 - DNA, 675 bp, Homo sapiens
ccagtcttaatgcccctactttacaaacatgaaaattgaggtctcaaatgtgataagtactgatctaagatcaaatagctaattgctaatggaaaaactatttgagcacaggtctatcttattctgtagtccatactcttagctcctatcctgcactgcaatagtttcatacatgacataaacattgtcttattatcagatagtctagggccttacagcttttgaatcggctaarcttttcaaagaaatgtttcaatgcactctccaagttgcaataatcttataacactatatatataattgtacgcatacactattttctttcagaacttttttgtaatcactaaagcaatttccattggattattttttaaaactccttcatgaatgttttatgttaccagaaaatagactgctttcagaaagcctgtactcgatactaatagaaagtatcatttgtggacagagaacaagataaatggtcagaattcctaggtttcattcttgattctgtcatcagcatacggtgtggcctcctgaaagcccatttagtcatatgattataggctccttcaacactgacgttaattcactcccgcaaagttagtctctggtatctaatgtctttcgacatcatcttgagacaatagttggagcaaatatgataaggggtac

SEQ ID NO: 180955 - DNA, 580 bp, Homo sapiens
tgaggtctccacagaggacgaggagaccagggagggggttgcagtggccctttgttctgggtaggcaggaacatgttccacttccatatcacccccctgtcccagggatcatgacctttagttcagacagacactgtcctttatctctaggctgtaatgcaactagagtccacagaaaatggctgtctccggcctaaaaacccttggggtggaacctcttctaagccccaaacagacagccctaaggctggttcctaccstactgcaggaacactgctagtctgcatagggagggggagatgagccccacccttcatgcaagcctgtgctggtaagctcatgttaattggggtgcagctgccccaaatagcgctggaaaggctgtctcctagggcacctgtgccaacctgcagcaggaaaagccacagttgcttctgcagcagtggatgagggcagaagaccctctctacaggtctgttcctggctgccagtgccacctcttcactgaagtgaaacgatactcaccacttcagagatcagcaatgcacctgcatctatgctgctcccaggttaactaagt

SEQ ID NO: 180956 - DNA, 376 bp, Homo sapiens
atttaagtaataatattcttaatattcttcacaagaatattaagtaacataattcttcacaagtagtataattctggtcacaagcagggtgcttgtgagagtgtgctatctggtttctaacaggctattctgaaagtcctagataaggtagatttgccactaacttcacacacgtcttctgtagggatccgccytgcccacagccatacttggtgtgttgtggtctctgtgaccctgccccttgcaaaagctggttgaacaaagggtgggaacttgacctgtctatatagtttctgacactttatggcttacgtgatctggtgtgtattggaatggacccaatggcttcctctcttgaaaacttggtcatcaagaa

SEQ ID NO: 180957 - DNA, 555 bp, Homo sapiens
gaatttttccagagtccttagttcatcctactctccaatgactaattctttccccttgcaaatctttaccaaagatgattttgtagcctcaactgataagccactakgaaggatattcagtaagttgagagttcatcaatgctgtaaaaacacctttgaaatgcacaaaccagaaagctcatgtgtgtcaatagatattgaagctaggtggaaaaaaaaaagcaaaacaaaacaaaacaaaaaaacctccaagcattgggtagtatttttgaccccagctggtcaaatacaagaacttgcctgtggtgttcatgaagaataaaatacaagtagtttatattacatgagggtaccatagatatgttcatctgatggtgactttcatatgcatttcagctgtgtaatcaaagacaggtacaaataaacccaagatatgcatgtgtatagcttctttggtctgtttatttgggtgttcctcagggcccctaaacccttcggaagctccagcatcctgcatttacttaaagtcactgtttctccacgtcatgagaaaca

SEQ ID NO: 180958 - DNA, 650 bp, Homo sapiens
aaaatgtaaaactttatgtttaatcaccagtgtcaaaaattattaggtaataaccaccagaggagagaatgtggtaaaagatacaaaggcccatatttaagacataatttttctaatagtttctctgattttaagatgtcatggcgtcatatgaaggttaacaggtcagataccaaatggactttttaaaaaatgttaagtgatcaatttgcactcataaaagggttaagattactggaaactaaagtcctctttgaccatcatctaggcacatcactggctacagagacaataaaattggcttctcctgagtcttcaatttgctgagcaaaagtagatcagagtagttgcttaaaagaagatggccccccagattgggaccagaatatactctggtgtcaaaaccagaattttgacgctagaaaatattgtttgaacatctgcttcattaatccttgtctggctcttgtttctctgtcaccccagtcacartcctccttttgccactgtaagagaagcgcaatgccagggtatcactgctgtgaggtttcatcaaggaaagagaacagtcttttgacaaagctgatttgttttgtaaattgcattttttactgttgaaagctttggctaagagtgagttctaaatctat

SEQ ID NO: 180959 - DNA, 614 bp, Homo sapiens
taagatctgagaagtaaaatgttttagcagaaaagacagtaataaaaatgtttttatttttctttgtgattttagatggatactagtaaaacagataaccttttaaagaatggttgagactgagatatgagaagatagagaagctaaatccagaaatactcatgccatatayatgcttgtaaccccagaattttgggaggccgaggtgaatggattgcttgagtccaggagtttgagaccagcctggacaacgtggtctctaaaaaaataataatacacgcctataatcccagcactttgggaggccaaggcgggcggatcacgaggtcaggagatcgagacccttctggctaacacggtgaaaccacatctctactaaaaatacaaaaaaattagctgggcgtagtggcgggcgcctgtagtcccagctacctgggaggctgaggcaggagaatggcgtgaacccaggaggtggagcttgcagtgagcagagatctcgccactgcactccagcatgggtgactgagcaagactccatctcaaaaataataataatgataataataataataaattaactgggtgtggtggctcccagctgtggtcccagctat

SEQ ID NO: 180960 - DNA, 614 bp, Homo sapiens
taagatctgagaagtaaaatgttttagcagaaaagacagtaataaaaatgtttttatttttctttgtgattttagatggatactagtaaaacagataaccttttaaagaatggttgagactgagatatgagaagatagagaagctaaatccagaaatactcatgccatatatatgcttgtaaccccagaattttgggaggccgaggtgaatggattgcttgagtccaggagtttgagaccagcctggacaacgtggtctctaaaaaaataataatacacgcctataatcccagcactttgggaggccraggcgggcggatcacgaggtcaggagatcgagacccttctggctaacacggtgaaaccacatctctactaaaaatacaaaaaaattagctgggcgtagtggcgggcgcctgtagtcccagctacctgggaggctgaggcaggagaatggcgtgaacccaggaggtggagcttgcagtgagcagagatctcgccactgcactccagcatgggtgactgagcaagactccatctcaaaaataataataatgataataataataataaattaactgggtgtggtggctcccagctgtggtcccagctat

SEQ ID NO: 180961 - DNA, 614 bp, Homo sapiens
taagatctgagaagtaaaatgttttagcagaaaagacagtaataaaaatgtttttatttttctttgtgattttagatggatactagtaaaacagataaccttttaaagaatggttgagactgagatatgagaagatagagaagctaaatccagaaatactcatgccatatatatgcttgtaaccccagaattttgggaggccgaggtgaatggattgcttgagtccaggagtttgagaccagcctggacaacgtggtctctaaaaaaataataatacacgcctataatcccagcactttgggaggccaaggcgggcggatcacgaggtcaggagatcgagacccttctggctaacacggtgaaaccacatctctactaaaaatacaaaaaaattagcygggcgtagtggcgggcgcctgtagtcccagctacctgggaggctgaggcaggagaatggcgtgaacccaggaggtggagcttgcagtgagcagagatctcgccactgcactccagcatgggtgactgagcaagactccatctcaaaaataataataatgataataataataataaattaactgggtgtggtggctcccagctgtggtcccagctat

SEQ ID NO: 180962 - DNA, 332 bp, Homo sapiens
actggagccacagtggttgcaggcaccccttccccccaacttgttcatcttaagcagtgtccagcctgctgccgctggttgcaacctgagcagccaccaagcatctgcacagctctgtgcttggaacccaaggccctggtggcatgagctcacaaatggatctcctgatgggcgagttgcacagatccatgaaaacagtatggyttcctaggtggggtagcacaatcactcactacctcccttggctgggggtggcagctccctttgccccgtgcagctccaaggtgggctgttgctctaccctgcttttccttgctctctgtgggtcactc

SEQ ID NO: 180963 - DNA, 420 bp, Homo sapiens
gttatctttaactcacctcttaatctcatgcttcacaacactttgtgagtaaatcctgttggttctgtcttaaaaatgttttcaaaataagttttttcatcacttccacagaaaactatcttgtctaagactttctcttgctttatctgaattgtaattgtaaaatctccctaagttgtatttctaatctgtctttgccccacttcaagacagttctcaagagactgatcctttttatacatattagatcctgtcatttccatgcacaaaacactccatttaaacatgagctagtgayatcctagctcacttaaatgctaaagtttttacaatgacatcctaggtcctcaaggattgctgatttagctcaagattaattgttctccttgctgttcctcaaacacaatatcatactcaaga

SEQ ID NO: 180964 - DNA, 554 bp, Homo sapiens
gtatgtcaccattatgaggaaaataagtaaatatatatcattgccttttaaaataagcaaatatatactattacctcatggaaaaaggcagtaatgtatacttgattttttttacaaggattttctgtaaaggtccccctcaaaacataaacagtgattacctacaaatagcagaaaaaaaaaaaacagtggaaatttaggggccagtgagtttttttatcgtacatcttttttatrtatatttattctgaaccatgcaaatatattagcatctgaaaaactactataaattagttattagttaattagccatagttaaaacatagttaaataatttggtgttcaatcaaatactttcttataaagcttcctactgtaggttgatcccaaaagtagggaagaaataaaagttgccttattaagactatatgaataatgttcacttcagaacaaagtagttactggttgtacagaaagagatattgaatcctacctaattgcccatcattcttccaaaaagtttatgataataattaaaataaattatgttttta

SEQ ID NO: 180965 - DNA, 567 bp, Homo sapiens
taatataatgcagattgaacaaaagttaattgaacacaaaagttaacatttactctctccagcagccaaatgaaaatgacaataaagcatcagatgcatcaggaaagaagatactagaactcacataaagtttttgtaaatagctgggaactgctgggaaggaagtatttttttatggcacggaattttcaaaatgtgtaaaaactggggacactttatatatctgactgtcaggttaaatgtgaaaagataaagattgaccatttttaataaggggcagytagactcttctgggttctctcttcgactcaaacaagggagtgatttctgagggccatccactgtactcccacccatagaagactggagcgtcaatggtatgttctcaggccaccagaaacagttaaatataaggttgtcaaactgcagtgaaaatcagggttccatgttagcctatgttgttagcctatgtatcaaacattgttaatgaagttatcttcccttactagacctccagaaagctgccagtccacagcttacatccttacataagagatggaggaattc

SEQ ID NO: 180966 - DNA, 533 bp, Homo sapiens
caatttcttagacacatcaacactaaaatataggatttttttttttttgagatggagtctcgctctgtcaccaggctggagtgcagtggcatgatcttggcgcactgcaacctctgcctcctgggttcaagtgattctcctgcttcagcctccgggtagctgggactacaggtgcataccgccatgcccagctaatttttgtatttttagtggagacagggtttcaccatgttgatcagggtggtctcgatctcttgactttgtgatctgccagcctcggcctcccaaagtgctgggattacaggtgtgagccaccatgcccgggctaaactatagttttataattaaattatttcagacactctgcatattataagyaaagtagttcctaaaaagatctgccatgtttacgttatgtcatggttgataaactttgctagctgtcatattgtgtggcttttttctcttagataagtagggtgtttggaggctttccatctagagtttgttgactctagattgtttagtcaatc

SEQ ID NO: 180967 - DNA, 461 bp, Homo sapiens
tattgtattataaacccagatgayatcttagctgggaatgtggctttctttcctacctcaggcatagctatgcctgtgtaataatctcttacactggcagagagtactattgatctgtcaatcaactggcatgttcaacctccagatgtgggctcacttgcaaaatgcaattctgggagtagctgtttgagttattgtaactgggactgatctgggcctcttttgaagggtatgctgcagtcgatagcaattttcattgtcttggtgtatggggtgtgagtgtctggataataggtctgcaggatagtaaaaataatgattttttcttgattataagttacctttgaaatacatatgattgaggccattttgtactatcttttgtgccctacttggaggacatcagcctcttcacattcttctccccactacaagtatttctaggacttgcatgggacatt

SEQ ID NO: 180968 - DNA, 410 bp, Homo sapiens
acagccactcttatttcctcttctgcttcaaccagcaggctatcatacyatgtctactggccaccatgactcttccctcctgcccagtactcatgcacaaagcacaaaagaaagctccccccaccacttttttttttttaatagtgtgaatccagtgctgcttttagtgttgttggtgacagcctcttctctttgagtatgattccaagaagttgctgagctggggatgaaacccacaggtgatggctttctgtattcagaatctgaagtctgtcctaggcaagtcctgtcatgcctggctttccttcctccagagcaagttctccctcagccccttgtacagacttttggtgggcctacctcactgtattagtccattcaggctgctataacaaaataccataaactag

SEQ ID NO: 180969 - DNA, 565 bp, Homo sapiens
tataaccaatgttacgaggcttaatacctgggtgatgaaatactccgtacaaccaacccctgtgatacacatttacctwcgtaacaaactgcgcatcttgcacatgtacctctgaacttaaaagttaaaaaaataaaaaatttaaaaagaatcataagttctgatccatagtcttggacaaagcacttaatttcctggacctcaatttctttatattaaattacaggggtggcatatgactaggctaaaattttccgaattcaaaatgttatcactatataaagtaaatgagaattttatggtgaaagaaatcttttgaatttaagaaagacttgtcattcatcaaaagaaagcactggagagcagggaccatatcttgaacactttatattccattacaatagcatgtattaaatgcaataatatttactgctatgaatgaatgaatcttgttaatgtttcatgtccttacagggaagagtatcaagtgactctcaggaatgtgggcaatgggtgaaagtgattcgatggcagaaacttaaagttaagtaaactcagtgcagaa

SEQ ID NO: 180970 - DNA, 600 bp, Homo sapiens
ggactcctttgtgaggacatttcccatttgccaaaagttacagtttatgaaacttaacagaccaaggacaaagatctcaaaacagaggtgaatggaaggctgaggagacatgccttaggcgcagaccactgggaaagtatggagattctgagagtggccctttgaaattgagtagtatagaatcatatactttgattttgactgtaaattatactttttattttatttttaaacasgtttgtggcatttattatgtgccaagctctatttgcttagcaaatattcattcattctagctacaaataccacacacacacaagtgttcaatatcacccagacaaaggaacccttactgactcctatccttttgcccaatgacaaaacgaaacataaatcttctcaccatcagagcccagttaatgctctgggcctggtaatgtaagaaacctgaggtgagctgagtccaccagaccatggatgagttgggcttgggcttgactaggcttccataaggccatatactaaatttggcaccctggtatgtatcccttcaaatttataattgtagagtttaatggagtaagacagaacccaaggggg

SEQ ID NO: 180971 - DNA, 600 bp, Homo sapiens
ggactcctttgtgaggacatttcccatttgccaaaagttacagtttatgaaacttaacagaccaaggacaaagatctcaaaacagaggtgaatggaaggctgaggagacatgccttaggcgcagaccactgggaaagtatggagattctgagagtggccctttgaaattgagtagtatagaatcatatactttgattttgactgtaaattatactttttattttatttttaaacacgtttgtggcatttattatgtgccaagctctatttgcttagcaaatattcattcattctagctacaaataccacacacacacaagtgttcaatatcacccagacaaaggaacccttactgactcctatccttttgcccaatgacaaaacgaaacataaatcttctcaccatcagagcccagttaatgctctgggcctggtaatgtaagaaacctgaggtgagctgagtccaccagaccatggatgagttgggcttgggcttgactaggcttccataaggccatatactaaatttggcaccctggtatrtatcccttcaaatttataattgtagagtttaatggagtaagacagaacccaaggggg

SEQ ID NO: 180972 - DNA, 406 bp, Homo sapiens
gaattcaccatgcaaattaagcccacctaatcaaatttccaaatataggagtctctgtaatagaggctggtagccttaatgtcgcctgctttatggtctaaatgactgcatacatataattgctggatctcagccatagagaggcaggagtatctggttaaaagaaacaatggaacaaccattagaggaaagttaggtactcttgcatagtccctgtatgtataaataagtctttttggggggctataatgaacaattagaatatatctaaaaataactaaatattattaataattaacaattactraatataagtagaaatattcagttatttttagttatgttcagtaactttaaaaagcatgggtacagttaacaattactgaatataactaaaagcatccct

SEQ ID NO: 180973 - DNA, 411 bp, Homo sapiens
aatcaaatttccaaatataggagtctctgtaatagaggctggtagccttaatgtcgcctgctttatggtctaaatgactgcatacatataattgctggatctcagccatagagaggcaggagtatctggttaaaagaaacaatggaacaaccattagaggaaagttaggtactcttgcatagtccctgtatgtataaataagtctttttggggggctataatgaacaattagaatatatctaaaaataactaaatattattaataattaacaattactaaatataagtagaaatattcagttatttttagttatgttcartaactttaaaaagcatgggtacagttaacaattactgaatataactaaaagcatcccttttctcctaaggtgtatgtacgtaatatgaatt

SEQ ID NO: 180974 - DNA, 604 bp, Homo sapiens
gacataataatactgtagagtcctcagtggctccacagtgtacacaagcctacttctrtaactgcgtagtcatcggtgacctcttctttgctgaatccagtggtaaattcccagttttcatcttaattgacctatcaggaacatgtggcatgatttagtcccttctccttggaacatactttctttccttggcttttaaaatattttcctggctttcctccctcatcactgagtgctgtttcagtatcttctatgctggttcctcttcatcacctctactttaaaaagaaccataaaatcaaacgctgcagtaaccaagggctcagtttctggaccttgtctctcctctaaccacacttatttctgtaacgatttcatccagactcaatgacttcaaatactgatgactttcaaatttattccctgcctgcggacttggattatttattttacgtctctactaaataactaatgaacactgcaaatatcacatgtctgaaactgagttcctgactccctctccaaagctaatcacttttgatttttccacatctcagttaatggtatctttctagaagctcaggtcaaaaaccttggagtcacc

SEQ ID NO: 180975 - DNA, 261 bp, Homo sapiens
agatctcagagcgcagaatgatggcttctcagctatactccccatagtacaatgttttggtgataagcttacctatagtctcactatcgtcmacctcaaactgacaccaagcagactgaagaattaggttaactggaatccaatctattgtttttgactgactgtttggaaagccagagaattgagtgcagaggactagctgcgtattaaaggcagaaactccacatttgtgcttagcaatcatttaccacttatctgggt

SEQ ID NO: 180976 - DNA, 261 bp, Homo sapiens
agatctcagagcgcagaatgatggcttctcagctatactccccatagtacaatgttttggtgataagcttacctatagtctcactatcgtcaacctcaaactgacaccaagcagaytgaagaattaggttaactggaatccaatctattgtttttgactgactgtttggaaagccagagaattgagtgcagaggactagctgcgtattaaaggcagaaactccacatttgtgcttagcaatcatttaccacttatctgggt

SEQ ID NO: 180977 - DNA, 568 bp, Homo sapiens
cgaactccagagcaagattggctttctataattattactttccttgtgcaactcttccagaatcttccatggcatacataactatctgcaggattttttggcagttgggcatccaagcccccttcctgatttggaggactctccctctgtgggctgtcctggtgggatgcagtgccctaccatgaaagctgaagcaggggytcctcctacccagggtcctctgctatccagggacggggcatgggactgggtttggccaatcagactcctacccagggtgggctgggactgggccctccggagctgtcttggtgctgatctggttccaagtctggctctccactgtcccagctctagccctttaaatctatgaagcccctaaaccctttctgcataagaggactggggttgggggtgatttctgttgctagcaacagataactacatctgtgttatctctgctcctcaacaatgtctccgcttttcagagacagaaactgagacctagagacagagatttgggccactcagccagtgtgcagcaggaatcctgacttagtcagctccc

SEQ ID NO: 180978 - DNA, 526 bp, Homo sapiens
tttcttctttatttccatcagttggaatgctttaggctgcgagtaacaaagaaagccaaccaagactgactcaagctctaggattttcatggtttttcaaacaagagttgcggaggaaggaggtcctaggtttggtcggtggctccacagtgccatcaaggacccaggcctcttctgtccttgtggtctgtcttctcatcattttggccttttggttgtaggcttgttacctcttggccacaaaatgggtgccagagcgccaggatttacatcctcaaatgsaagcaaaggcgggaagccgtgtgtgtgccagtatgccaagaaagaacttttcttatgtctctctcctcttactgagacaaaaatccttctcagaagccccctagtggacttcctcctaggtctcacttgccagaactgggtcttggaccctctcccaagggtgaggggtgttcccgtggtggtgcagggcggttgggggtagggggtgctgggaatggcaggtacgagtccagtcagcagatct

SEQ ID NO: 180979 - DNA, 479 bp, Homo sapiens
gtgtttcagcaaatgtctaggagtagggctacatccagacctggctgctagagaatggaagctcagcttttaagaaatgtgactgcctggatcccacctctcagagattctgattctattgttctgggggaaggaggacagggaggaccaactatttcatttgcaggtcccctttttcaaaagtttttaagaatttcaagacagtgacaacagaacattaaaccaaatgttgaacaggtcatacacccatggctacggtttgaatrtctctgccaaaactcatgttgaaatttaattgccaatgtaacagtattaagagatggggcctttaagaggggattaagtcatgagagctctgccctcacaaattaattaatgtgattatcctgggagtgggctcctgatgaaagaatgagtttggcccaatttcctctctctgtctcacacactcactatgacgtgatgcctctgccatggga

SEQ ID NO: 180980 - DNA, 536 bp, Homo sapiens
ctccccatggcccctgcctgcctgtccagccacatacagcccctccatttccagcccagcagcacccaactggttctctcctagaataagccaaacatgtttccccttccattcctttgttcacgctgcccgctcaacctggaatgcctttcctgcctcttcatctgcctctgcctactcatgctggaagactgagggaagatctctccttccagagagcttccttggcctgcccagccacgtctctcatagtttcacagttctgtgcacatgtccctgtcactgctgttccacgcctccacccatcagcctcccttccccaacatccctgcagccatgtgtccttctgagtcctgcagcctgtgtccccccacagaccaggatccccctggagacagagactgctttggttcatccctgcaccctcaatgccgcttagggcctggcayacagggctcagcaaattttttttaaataaatctcagtcctcgttttatttgcacaagggtagggatggggaaggcggccggccctgc

SEQ ID NO: 180981 - DNA, 606 bp, Homo sapiens
ctgttctgttctatgtctcctagaaccaacaatgtgtgcmcatgtttcctgtgtgggttcacttaccacatgtccctaacagctgcctctgctgaacgtctatcatggggatgaggggcagtgtggtggtgctaggagcacagctctatctaggggtggaccaacggggtttgagtcctcactctgccccctttccatctaggagtcctttggcaagttacaactctctgagcttccagttccttggctggttcgaggaggacaacaatggccctacctgaggtgatcagcagaatatgttccaagatactcattaactgcctggcaccgtgacgagcacagaccacattcatttctttccctgtattgtgaatatgagttaaggctctgcctctcctcctctgggctggaagcctgctcttccacataaaggaattccaggagctggaggtaaggggtgaaatggtttcccaaatgggattaagagccagcagattcggtctgagttcttcttctgctacttagcagataagacctgcctcaggtgagttgcttaacttttctgagtctacaagaagtgcctacatcacagcaaatgctcaatag

SEQ ID NO: 180982 - DNA, 514 bp, Homo sapiens
accctgttcttgtgggcattatcctggagggctcacagaacaagtccagcccttcttggtgctgggacagaacttcaatgtcaaatgttgaatcgcagctgttgtgtaccctgagtcttcccaaggaagagctcggggctggggatcaggttgtatctcaaatacaccctgtgtgccaatgccaacagacagagttattggcagatagggtgtctttgagatacaacctgatccccagccccaggagaggggcatggacrccctgctccaggatgagtgggagtgtgaagtagggcaccttctccggagatccatttgacagaacctctccaacacttttaaaaggttcatgacctttgaccaataattctgcttcaggaacttaccccagggaaatcaacagagaagcacactgaaacagtcactgccatgttatttatcatagggacagcaatggggacattgtcaaaataaattacagtacacccatataatggaatattctgaggtcatt

SEQ ID NO: 180983 - DNA, 514 bp, Homo sapiens
accctgttcttgtgggcattatcctggagggctcacagaacaagtccagcccttcttggtgctgggacagaacttcaatgtcaaatgttgaatcgcagctgttgtgtaccctgagtcttcccaaggaagagctcggggctggggatcaggttgtatctcaaatacaccctgtgtgccaatgccaacagacagagttattggcagatagggtgtctttgagatacaacctgatccccagccccaggagaggggcatggacgccctgctccaggatgagtgggagtgtgaagtagggcaccttctccggagatccatttgacagaacctctccaacacttttaaaaggttcatgacctttgaccaataattctgcttcaggaayttaccccagggaaatcaacagagaagcacactgaaacagtcactgccatgttatttatcatagggacagcaatggggacattgtcaaaataaattacagtacacccatataatggaatattctgaggtcatt

SEQ ID NO: 180984 - DNA, 561 bp, Homo sapiens
attctcctacattgttagaatgataatcactaaatactaaatgcttcaataaagtgtataatgtgcttcacatattgagaatatatttataggaawctttataatttagttgtataagttgggcaagttaacctctttgtgtctaggttttttattgtgtaaaatggggataagtattgtggacaagcctcacaagtccttttttttttttaagtaatttctgatagttctacctttaattccaccactttcctccattcaccaaagatttgttataatatttctgctatttacaggattctccaggtttttcctacagatggagacagttcctacagtagaaagtggtaatttatgtgtgacgtgaccactagctggccttaccaatgtgtctttttcatgctttaactgtagttgggtcaaaagttggaaaactgaggtgatgaaatctgtcagagaagcatagaactattattttgtggcaatgttaagtgatttttaaaaacagatgttaattgaggtccaagcagtaaattagtagttaaacctcccttaggtttt

SEQ ID NO: 180985 - DNA, 561 bp, Homo sapiens
attctcctacattgttagaatgataatcactaaatactaaatgcttcaataaagtgtataatgtgcttcacatattgagaatatatttataggaatctttataatttagttgtataagttgggcaagttaacctctttgtgtctaggttttttattgtgtaaaatggggataagtattgtggacaagcctcacaagtccttttttttttttaagtaatttctgatagttctacctttaattccaccactttcctccattcaccaaagatttgttataatatttmtgctatttacaggattctccaggtttttcctacagatggagacagttcctacagtagaaagtggtaatttatgtgtgacgtgaccactagctggccttaccaatgtgtctttttcatgctttaactgtagttgggtcaaaagttggaaaactgaggtgatgaaatctgtcagagaagcatagaactattattttgtggcaatgttaagtgatttttaaaaacagatgttaattgaggtccaagcagtaaattagtagttaaacctcccttaggtttt

SEQ ID NO: 180986 - DNA, 561 bp, Homo sapiens
attctcctacattgttagaatgataatcactaaatactaaatgcttcaataaagtgtataatgtgcttcacatattgagaatatatttataggaatctttataatttagttgtataagttgggcaagttaacctctttgtgtctaggttttttattgtgtaaaatggggataagtattgtggacaagcctcacaagtccttttttttttttaagtaatttctgatagttctacctttaattccaccactttcctccattcaccaaagatttgttataatatttctgctatttacaggattctccaggtttttcctacagatggagacagttyctacagtagaaagtggtaatttatgtgtgacgtgaccactagctggccttaccaatgtgtctttttcatgctttaactgtagttgggtcaaaagttggaaaactgaggtgatgaaatctgtcagagaagcatagaactattattttgtggcaatgttaagtgatttttaaaaacagatgttaattgaggtccaagcagtaaattagtagttaaacctcccttaggtttt

SEQ ID NO: 180987 - DNA, 561 bp, Homo sapiens
attctcctacattgttagaatgataatcactaaatactaaatgcttcaataaagtgtataatgtgcttcacatattgagaatatatttataggaatctttataatttagttgtataagttgggcaagttaacctctttgtgtctaggttttttattgtgtaaaatggggataagtattgtggacaagcctcacaagtccttttttttttttaagtaatttctgatagttctacctttaattccaccactttcctccattcaccaaagatttgttataatatttctgctatttacaggattctccaggtttttcctacagatggagacagttcctacagtagaaagtggtaatttatgtgtgacgtgaccactagctggccttaccaatgtgtctttttcatgctttaactgtagttgggtcaaaagttggaaaactgaggtgatgaaatctgtcagagaagcatagaactattattttgtggcaatgttaagtgatttttaaaaacagatgttaattgaggtccaagcagtaaattmgtagttaaacctcccttaggtttt

SEQ ID NO: 180988 - DNA, 507 bp, Homo sapiens
cagaattcaattcctgttcagatatctaccccatttttaccttcagagactattacacatcagtcaatgtrccaattatcacatgacccagggatgatttttgactaatagatgagcatataatctgtccaatcagatgaaaaggaatgaattatattccctgcttagggaaaaggcttccctctttctcttctactggacataaacaaggaagaaaacagctcctgttgccacctgcatccatcttgctaccacaggggatccacccttaggatggtacccacaccgaggcagcagagtggaggcagataagatcccaggtccttgacaatggcaatgagctcaagattgtactgttcttgggcccaccccatcttctacctctgtacttccaattcttgagacaataaattctcttcatatttaaaacagttcaaatcagggtagtctggcatttatagccaaaaacaatacttccccatttaaaaaaaaattgttcttcaaggc

SEQ ID NO: 180989 - DNA, 507 bp, Homo sapiens
cagaattcaattcctgttcagatatctaccccatttttaccttcagagactattacacatcagtcaatgtgccaattakcacatgacccagggatgatttttgactaatagatgagcatataatctgtccaatcagatgaaaaggaatgaattatattccctgcttagggaaaaggcttccctctttctcttctactggacataaacaaggaagaaaacagctcctgttgccacctgcatccatcttgctaccacaggggatccacccttaggatggtacccacaccgaggcagcagagtggaggcagataagatcccaggtccttgacaatggcaatgagctcaagattgtactgttcttgggcccaccccatcttctacctctgtacttccaattcttgagacaataaattctcttcatatttaaaacagttcaaatcagggtagtctggcatttatagccaaaaacaatacttccccatttaaaaaaaaattgttcttcaaggc

SEQ ID NO: 180990 - DNA, 516 bp, Homo sapiens
atctaccccatttttaccttcagagactattacacatcagtcaatgtgccaattatcacatgacccagggatgatttttgactaatagatgagcatataatctgtccaatcagatgaaaaggaatgaattatattccctgcttagggaaaaggcttccctctttctcttctactggacataaacaaggaagaaaacagctcctgttgccacctgmatccatcttgctaccacaggggatccacccttaggatggtacccacaccgaggcagcagagtggaggcagataagatcccaggtccttgacaatggcaatgagctcaagattgtactgttcttgggcccaccccatcttctacctctgtacttccaattcttgagacaataaattctcttcatatttaaaacagttcaaatcagggtagtctggcatttatagccaaaaacaatacttccccatttaaaaaaaaattgttcttcaaggcacctaaattttggtttattctcttctgaattc

SEQ ID NO: 180991 - DNA, 518 bp, Homo sapiens
gaattcaattcctgttcagatatctaccccatttttaccttcagagactattacacatcagtcaatgtgccaattatcacatgacccagggatgatttttgactaatagatgagcatataatctgtccaatcagatgaaaaggaatgaattatattccctgcttagggaaaaggcttccctctttctcttctactggacataaacaaggaagaaaacagctcctgttgccacctgcatccmtcttgctaccacaggggatccacccttaggatggtacccacaccgaggcagcagagtggaggcagataagatcccaggtccttgacaatggcaatgagctcaagattgtactgttcttgggcccaccccatcttctacctctgtacttccaattcttgagacaataaattctcttcatatttaaaacagttcaaatcagggtagtctggcatttatagccaaaaacaatacttccccatttaaaaaaaaattgttcttcaaggcacctaaattttgg

SEQ ID NO: 180992 - DNA, 507 bp, Homo sapiens
cagaattcaattcctgttcagatatctaccccatttttaccttcagagactattacacatcagtcaatgtgccaattatcacatgacccagggatgatttttgactaatagatgagcatataatctgtccaatcagatgaaaaggaatgaattatattccctgcttagggaaaaggcttccctctttctcttctactggacataaacaaggaagaaaacagctcctgttgccacctgcatccatcttgctaccacaggggatccacccttaggatggtacccacaccgaggcagcagagtggaggcagataagatcccaggtccttgacaatggcaatgagctcaagattgtactgttcttgggcccaccccrtcttctacctctgtacttccaattcttgagacaataaattctcttcatatttaaaacagttcaaatcagggtagtctggcatttatagccaaaaacaatacttccccatttaaaaaaaaattgttcttcaaggc

SEQ ID NO: 180993 - DNA, 645 bp, Homo sapiens
gcccatttatctacctacaggtctgcagggggaaaatgtcttgcttgcctctgatttcagttcttgaataagtgtgcataaggcaataygaataaatgatagattacaataatgctctgctgaggaaggcctggaaagtatcattttcaggatttcaacctcttccacacaggagataacttagatgttcagtgagagtctgagaatcagacacatctggtacagtggccaagaaaaatcacctggaagaggggtataacgtgggctttgaagaaaggtaagaattggatagataaagaggaaggatgaaggagtatattttaggcttagggtagccctacatgtggtcagggcagtgattatagtaatttaactggagtgatgtgagaagtcagtgaatgatatggttagaaaagtagattggaccagagtgtgaaaagctcaatactgagctgagaggtttggaattgattttagttcagtgacttcccaacttgtgggcctcagatctctgggtaccctggagttaatattgtaaggaactctgatccatgggaataccaagcatggcccagagattaaatagatatgttctacacatatgtgagctactgtctattgttacgtgttgataatgtgacttag

SEQ ID NO: 180994 - DNA, 645 bp, Homo sapiens
gcccatttatctacctacaggtctgcagggggaaaatgtcttgcttgcctctgatttcagttcttgaataagtgtgcataaggcaatacgaataaatgatagattacaataatgctctgctgaggaaggcctggaaagtatcattttcaggatttcaacctcttccacacaggagataacttagatgttcagtgagagtctgagaatcagacacatctggtacagtggccaagaaaaatcacctggaagaggggtataacgtgggctttgaagaaaggtaagaattggatagataaagaggaaggatgaaggagtatattttaggcttagggtagccctacatgtggtcagggcagtgattatagtaatttaactggagtratgtgagaagtcagtgaatgatatggttagaaaagtagattggaccagagtgtgaaaagctcaatactgagctgagaggtttggaattgattttagttcagtgacttcccaacttgtgggcctcagatctctgggtaccctggagttaatattgtaaggaactctgatccatgggaataccaagcatggcccagagattaaatagatatgttctacacatatgtgagctactgtctattgttacgtgttgataatgtgacttag

SEQ ID NO: 180995 - DNA, 645 bp, Homo sapiens
gcccatttatctacctacaggtctgcagggggaaaatgtcttgcttgcctctgatttcagttcttgaataagtgtgcataaggcaatacgaataaatgatagattacaataatgctctgctgaggaaggcctggaaagtatcattttcaggatttcaacctcttccacacaggagataacttagatgttcagtgagagtctgagaatcagacacatctggtacagtggccaagaaaaatcacctggaagaggggtataacgtgggctttgaagaaaggtaagaattggatagataaagaggaaggatgaaggagtatattttaggcttagggtagccctacatgtggtcagggcagtgattatagtaatttaactggagtgatgtgagaagtcagtgaatgatatggttagaaaagtagattggaccagagtgtgaaaarctcaatactgagctgagaggtttggaattgattttagttcagtgacttcccaacttgtgggcctcagatctctgggtaccctggagttaatattgtaaggaactctgatccatgggaataccaagcatggcccagagattaaatagatatgttctacacatatgtgagctactgtctattgttacgtgttgataatgtgacttag

SEQ ID NO: 180996 - DNA, 403 bp, Homo sapiens
acttggtctgtgaggaaatacttccacccatctggtgttagaagtgtattgagtgactatgtaagacagaggaaaaaacaccttgtttttttctttcatcaagttggtgtgacagtagagagtaggaaaaaatattggcttttccaatatatcttactcttttccatgaaccctgaaagttctgaggaatactrttgaaatcctgtaaaaatatataatctcaatagaatcattttgatggaaattattttattctaagtatatttagaacggggtggtagtcaaatcatttagcatagtaatattggcaccaacctgttagaacagacttcagctaaaaccaaccagtaacctatgcccccatccaccaggtgaaaattagtgaagacagaggcatgacacc

SEQ ID NO: 180997 - DNA, 584 bp, Homo sapiens
caggatgtttgtcttgagatcatttatatgaaaatgcgtagtaaactatatcctttgtcaacaccattattttttatgtatccttaatagggatttcttttaaaaattctaatgaggaattaaaaaaaacttttctaatgaagaaaatagtagctaaaaattaagactagatagcttttctaatatcatataagttgatagatattttacataaaaactcattcaaattattgtgactacactaatcaattagctgaagaattatcaaacctccatcatagtttatgacatataaacaacacctgagttgtaggggatgaagaagacacctaaaactaaaatacttggtactctcagctaacttgtacttagcctatttcccaggaaatattgggaatatttgaggcactgaaatktggtacattcaaggccaagaaaattatgaacaaaacacgaggaaatctcaggacactaacaatacctgtggtaattttaaaaatatgtttacacattctttgatattcttcccttcaagaaggagagtctaattttcttcccattgaatgtgggtagacttagtaacg

SEQ ID NO: 180998 - DNA, 543 bp, Homo sapiens
tggattcttcaatcccttcaagtggctacaactccagctaacatcttgactgcaaccacatgggagacaataagtcagaagttactacctatgacactctgattcctgaccttcagaactgtgtgagataataaatgtttattgttctaagatactaattttgaggataatttattgcatggcaatagataactaatacaattatatgagtcatcagctgctcctagatttgggcaaaatatttcaggtttaataaatttcccatcacatttaaaatacctttattctcacaaaatcaaatagtttaaaaatgractcttattttaggattttacctatttctaatttctttgaattaataggtacagaaaaatattcctagtcccgttaagactgaacacatgggcaggaagtattcttaaccacaatataacttaacacaggaacaggatattattggggggtttcaattctcagcccctggagtgaacaaactataaggtgggcctcatgacccccacttcctgatattcatgccttgtg

SEQ ID NO: 180999 - DNA, 415 bp, Homo sapiens
tcatggctgactgtgtttctttcctattaatctggggtatggaaaggcaagaagcaggaacaattacaagtgtctattgtagtcatttaaatgaacctatacattataaattatattcaataaattataatctataggttataaaatttttgaacaagcagttaccactattaattttyacaaaacattaatctcattagtaacaaatcactggggaagaaagaattctagttaagtaaagttaagtaaattctagttaagaattctagttaagtcaaattttttcttatattttctaactgaactttttgtatctcgtgcaatattacatagtattcatagtgtagccagtgcatggccataacatttaaaggcgtaagaggatattatggagaacatatgcatgtattgtctg

SEQ ID NO: 181000 - DNA, 437 bp, Homo sapiens
gcttcctcacgtcttcaaggtctcacttcttaatacagtcacaatggcaacacctgaattttggaggggaaacattcaagccatagcattgtgtctcagcctttatgaatgggacacatttttctgaaggtcatgtggagggaccctaattaattctacattaggagttttatgtccacaaattactactctctaaattaattttaaaatattggaaacacgtgattttattttgtgaaagtaaagtaaggcatccaaatttgtatattattatgaattttatttttcaacgtgctgagacttgtgcaaataaagcamattttaattgttttattttcttgaaatttaatttaaaaggcttagactcattttataaatctctatgaaataatttcctcaattttaatgccattattcagaaggaaactttaatagaa

SEQ ID NO: 181001 - DNA, 518 bp, Homo sapiens
gtatgtatgaaaacctaagtaataattcccaagacattgtttctgaactcaggttctggctctgttcctctcttacagcttttatctggtgcgtacctcaagtgataacaaattctggcattaattatattctatcacttaaacatayttacagtgatcatggagaaatcatgctccaataacattgaagcttataattaagttaaagtataaatgtgtattctattagagattggaaactaaaacagaaaaaaaggcttttaaaaccctcgctggcttgctggattgcctgcaaaacaaattcattctctctgtttaaataaagttggattttactttcaccatcattttctggtgcagcagctgagactttggaaattgacagttttcgttcacaactacatttacctttttactctgcgacctttgacatattacatttttgctcactataataagtccatttaatacctcattaggttgttttgagaagcattagatttatttaatccttgttg

SEQ ID NO: 181002 - DNA, 498 bp, Homo sapiens
aggaacttgccttgtctcagatgagactttggacttggacttctgagctaatgctggaatgagtcaagactttgggggactgtagaaaaggcatgattgattttgaaatctgaaaaggatatgagatttgggaggggctggggcgaaatgatacggtttggctctgtgtccctacccaaatctcatctcaaattgtaatcccagcatattctgagatctgatggtttaaaagtggcagtttcccctgtgctttttctctctcctgccaccctataagatgtaccttgcttcttcttacagcaygattgtaagtttcctgagtgccccccgcccagccatgtggaactgtgagtcaattaaacctctttccttcataaattacccagtatcaggtagtttttctttatagcagtgtgagaatggactaatacaccgtctattagaataaacatattttttctactttattctattaatgtcataaatcaattaattttc

SEQ ID NO: 181003 - DNA, 395 bp, Homo sapiens
gtttgggcactaaagggaaagataaaatgactattttaagtatagacctgagatcttgaacaaatttatatccacaatcrttggtttctttgctaaaagagtagaattatcaccagaaaaaaatccaaggtatgatgactcctttatctattaggctatgtgatttaaaaggatattgtacatgtttgggatcaatagaatttttgtgggtttagccagagacatgatcaggctctttctgttcttgtctttcccaactaatcgtttgcatctgaggtttccactgatatatgacctggttggtgtagtactgagagatctaggattttattcctgtaactattctcaatctctctcaatttctcgttcggctttggaaagttttataagcacta

SEQ ID NO: 181004 - DNA, 279 bp, Homo sapiens
ggatctccttaactttttctgcctgtaatatgtactcatataatatctgctattcattacatcactatgaaaatacagtctagatgtatatgggcaatctcaaatttagtacacggtgagaatttaaaaactgaccagtttttcttctttgatatattcttacaaatatttccagaattattgcctttataatcaaataaaaaacyttaaattttattttcgtaaatcaaatgtggttattaatagttaagtatttttatgtgacgtgtacaactacag

SEQ ID NO: 181005 - DNA, 279 bp, Homo sapiens
ggatctccttaactttttctgcctgtaatatgtactcatataatatctgctattcattacatcactatgaaaatacagtctagatgtatatgggcaatctcaaatttagtacacggtgagaatttaaaaactgaccagtttttcttctttgatatattcttacaaatatttccagaattattgcctttataatcaaataaaaaaccttaaawtttattttcgtaaatcaaatgtggttattaatagttaagtatttttatgtgacgtgtacaactacag

SEQ ID NO: 181006 - DNA, 500 bp, Homo sapiens
acagtcatgtatactatctttgtacaaataaatttcctgagagaaaatttcacttaggagacagagaatagaatcaaagtgtcttggagaagatgtgaagaaatgccaattgtaacagaagattgatagtctgaaagccgaacataatctgctatccaattttatatgacccgtatgactcttagatcactaggtccagtctagatattttttaaagaaaggaattccaatctttttgtttaatrtttctaaaaatagtaaagaaaacctgttttatccaagtaatattttatattttatttatttatattgtgatccctaaatgttccacaccacgcatattctggaatctatcccaacaccgccctcgcccaaagaaaactatcctcagccaggagaatttttattcttctttctcgatattcttcactccctccttcccagttgtcatatagatcaacttaaccttttaaaattatcccttactgacctttctccca

SEQ ID NO: 181007 - DNA, 500 bp, Homo sapiens
acagtcatgtatactatctttgtacaaataaatttcctgagagaaaatttcacttaggagacagagaatagaatcaaagtgtcttggagaagatgtgaagaaatgccaattgtaacagaagattgatagtctgaaagccgaacataatctgctatccaattttatatgacccgtatgactcttagatcactaggtccagtctagatattttttaaagaaaggaattccaatctttttgtttaatgtttctaaaaatagtaaagaaaacctgttttatccaagtaatattttatattttatttatttatattgtgatccctaaatgttycacaccacgcatattctggaatctatcccaacaccgccctcgcccaaagaaaactatcctcagccaggagaatttttattcttctttctcgatattcttcactccctccttcccagttgtcatatagatcaacttaaccttttaaaattatcccttactgacctttctccca

SEQ ID NO: 181008 - DNA, 500 bp, Homo sapiens
acagtcatgtatactatctttgtacaaataaatttcctgagagaaaatttcacttaggagacagagaatagaatcaaagtgtcttggagaagatgtgaagaaatgccaattgtaacagaagattgatagtctgaaagccgaacataatctgctatccaattttatatgacccgtatgactcttagatcactaggtccagtctagatattttttaaagaaaggaattccaatctttttgtttaatgtttctaaaaatagtaaagaaaacctgttttatccaagtaatattttatattttatttatttatattgtgatccctaaatgttccacaccacgcatattctggaatctatcccaacaccgccctcrcccaaagaaaactatcctcagccaggagaatttttattcttctttctcgatattcttcactccctccttcccagttgtcatatagatcaacttaaccttttaaaattatcccttactgacctttctccca

SEQ ID NO: 181009 - DNA, 545 bp, Homo sapiens
gcttggcagagcataggggaacagtcagataaggctagcttcagagacctaatgggtaaataagagttacccagaggaatgtggtgcatggtgctcgggtggggaacagacagaaggaacagaagtaggtgaagactagtgaaaaaatgaaggggctaaagagttgagcagtgagcatacccggcagggtcatctgagtgaaggttttgtacactatccaaagagcaaaaggcagatttcagtgtgctttaagcaggggaaggcaccatcagatctgtgttttagaagtatcagtgacggtaggctgcagaatggattcaaggtaatcagaccaaagacaacaagccactagcaagcggtcgcagtaagccaggtgagagatgaagctttactagagaactagcaataggaccttgaaatagaaaggattttctgggtaataacctcatattgcacataaatcttagcaaattttaccagttaaagtaaactggtaaaaatttcaactaatcrcaaactttgtgagtttagtttcaactggcaaa

SEQ ID NO: 181010 - DNA, 578 bp, Homo sapiens
gaattctgatatagcaagagctctttatttttcttaaataactactttgaaagaatgattttgcaatcctataactagtacttattacttcagatcattctaacatgactcatagattaagtccttgccactcactcaacttttggcaagcatgaacatcacctccccaaaatctacagaaatgtttatacatgctatgttaactgtgggctcytctgaggattgactggaaattcaataatatatgcgtttttttttagcttggattcctataaattaaagcaaaaatagaaattgtatttatagaataaatgagagtttactgtaagaaatatgacaacaaaaaaatatttttgtcatgtttctcagtttaacaaaatactgttaacaaatgtgccaatgtttctctgggcagcttatattttatctgaaagttgtcatgtaactaagtaatcaaagaaaatgtgtctttgcttagctcagactttagagttggaaggggccttaaaaattaattgcataaacttttttattgacaagaatgcccagagcttgaacagagaagtaagttagctaag

SEQ ID NO: 181011 - DNA, 552 bp, Homo sapiens
agtcacttcctgcatgaatctgattcgctgcctggaatttagatacataaaccagtgtcttgtttggcctccagtgcttctacatgtctctgtgctgaatggtcactgtaccaaagtacccacccacagggacagatggggctgaattttacttagcccaaccctgccactcatcgagccttgctctgtggcataccaacatgtcataccacccagtgaaacagataccactttctggccttacaggagaattacccactcattgaattatccatctccccaaagggggtgccctaatgcacctctgtaagtcatgtggactggtggcattctggatactttaccatttgaatgtcttttggaaatctgcttttcaaatgggtagcttagctagatgaccttcattaacaataactctgactttttagttctaagagcaacagagagggcacctattcctcctttatgstaattcttcataaaatttctacagaaagatttagccaattggcagcacatacagggtcctctgtggttattatgagcagtcac

SEQ ID NO: 181012 - DNA, 497 bp, Homo sapiens
acctgggaataaggtggggtgagaaaatgttatactggcatcctcatcaacatggtcagtctatgtcaggtgaacatggagtggcagctagagacttgttagtcatcattgctatatgtgctttaaaccatattacacattttttgagggcagaaagggacattatttctccagtgttttctttctgtgacttgaatgttttttccatggaaaagatcaccatgtgtcctggaggaaacatgggccttagagcttgatgaccttaaaggtggggttcagccctcttggtgctctggggggacatgtacctttatctcattgaacctcagctttctcatctgcaaaataaatgcataataattaccccatgtatgyatggtgagtattgactgggattacacatgagaagtgctcagcacacctagtactaacacatagttgcataaaagttgatccaactaaaattatcttatgatgacctaccacatagcagaaaa

SEQ ID NO: 181013 - DNA, 481 bp, Homo sapiens
ggtggtatttatcaatttctatcctgtcctagctacgtatctccactagatgataagcagtttgagagcacctattctttctgttatattcagtattgtatcttaaggcctagaacagtgtctaagctcaaaaaaggtttgttgaatgaataaatgaatcagacaattgagacagaacacagacatgaatttgaaagtggttgggggaaattgggcagatagtatatgtatatttcagagctcatagtccagagtcaccttaatagtgcccctaaagtcttcaccattttacatgtgcatctcccagggaactctagatcatttccatctttgtccataagaatcaaaatcaaccaagataaacatgaaatktatgattaaactaagtttgaattaaacaagcaggagagaatattttcaagtcagtcttcatattcaactgtgtagctaattttatatataagtaacagactacagagat

SEQ ID NO: 181014 - DNA, 387 bp, Homo sapiens
agatctcccttttccaggagtacagatagacttatgaagctatgtaggttttaattagcccacagtatcttcaccctttcatttggacctcctcagtaactaaagtttgatctctctcttttttcatttttatgatgtaaagccattataaatctacagcaaataaactagcaggagattaataccaattgcaacaatataacaacagcagacataaaaaatacagctggactctaccataaacagatgaaactgagctacaaagagtgcttcactattcagttcataaaaggctgaatgctgtcagmccagccacaggaggacaatcaaactggctttcctggacaggcacagcaactcattgatcaactccgccacttcagacag

SEQ ID NO: 181015 - DNA, 507 bp, Homo sapiens
aaaactgttctaatttctcatctttaattgattcaaaataaaaatagatgaacaagtagaatgtgtgtccaaaaatagagttgatgttccaccagcctgtaaactcattaagagctgagcacttgtcttattcatctctgtgtctcaggtgtctggtgcaacaaaactgcttattaaatgttttctgaattagttaatgagggaaaactgagaaaaaaatattcctgccgtgaagttccgggccacatttctggcagaccacaggctcagcacttctggggatctttggaaactttccccaaagggcttgcattcaagaaagagatttgtgcctcactggctgtcctggcytcatagtatcctttttcaaggggagaaaatccctcagcatggggtcaggcaggctcccacatttaaaaattggatagcttcgttttttctaaagtccaagtgtgaaacggaagaagctgacaggaagtgttcattaatatattgaacaaatgttag

SEQ ID NO: 181016 - DNA, 580 bp, Homo sapiens
catgcactgaatccagattgacagttactcaatctctatgaagataatattccatgattgtcaggcatctattttgctcctggaaatctgttctcagcttaattgtcaatcctttgttatttaattgcctttcttctttgattgctgaaatggtaatctctttgttttcatgttctatagtgtcactacctggttttttatatcccttcaggactttgtatgcttctttaacctaaggactgatatttctgttatttatactggaaagctcttagctaaaattgttctgaatattgtttcttcccccacgttttctagtctcctcttcaaggattcttattagatttacatacgcttaatcatcctgccctctctttctctaacacctacatcaawtctacgggcaaatgctggctataccttaaaaatatacacagagcctggttatttctctctacttccactgctacaccctggttcaaaccatcatcatttagttcctaagaatttgtagtaggctcctcattgatttattttgacatttttcttcctacagtttattctccaagcagtggccacg

SEQ ID NO: 181017 - DNA, 507 bp, Homo sapiens
ttctgggagttggtttccttatctgtaaagtaagaataattagtcctgccctatctctctcaaagagatgatgagtactaaatgagaacattaatgagtgtgaaagcactttgaaaatagtatgaagcgcaagagaaagacattgttatcactggtgctaataaaatctactgaatcactaacaccacaatgctttctatttcaaacaccaactcttcacccagacttcaagtccttctctcaactgcactctatctttgtgagaaaggattatgtataccttacctggtctttggttcagttaagctattctgaygattcttctttccacatcacattttcctcattcctacttttctgcactcttcatgttttccatagtttatttctggttttccaaacaactctatttttcagttttcttcacagccccctttatgtctcttaaagctagttccctcaagtggctccatttagtcctcttctcacccaaaacactccttggaa

SEQ ID NO: 181018 - DNA, 646 bp, Homo sapiens
  misc_feature (1)...(646): n = A,T,C or G
nnnnnnnnnnnnnnnnnnnnnnnnnnttctacacgtttagtgagaacttgatcatttttcatctcaccaagattttgtatcttcccccatccatcatcgagtacctggtatgcaggtaactattcaagggaatgagatgaagcattgatcttgagctagaaaaacatgtattactaagagaaaaaggaggactttgggattttaaagtacctagctttactttcaattattacaaaagtcatgtaagttttatatgccttgtgcttggttttgccggtttaaaggaagtttctgagagccacttgcaccagaaaagaaacctatctttgcccaaagacttttataaggaaaagtrcaaactaaccacctagctgttgtctcctccagctccatttcttacagatgctcacatcacactgtctgatttggacacactgcagttcccctcattttagtggttgtgacatccctaagcccttgcacaggctgtgctctgcatctgaaaggccttcctctcccttcttagctggccatttcctcgttgtctttccagtcctagctcctgtatcatttccttgggaaagacaccctggactattcctcagagtgaattaacttctctcctctgttcttcagcattccaagc

SEQ ID NO: 181019 - DNA, 597 bp, Homo sapiens
gacccattcctcataggtggtgtcttctagcatgtcctcacatgatgaaaagcacaaataggccccctcagggtttcttttataagggcactaatcctattcatgtgcactctgctcttttgacctaatcaccacccaaaggctccacctcttaaaaatcattgcattatggattatgtatcaatatatcaacttagtgaggatgcaaacattcttaccatagcagtaattttcagagtttgtatttctatttggctttaaagaagtaatttctagtttctatttcctagatgagattacctatcaggttcatttacttataccatatttttgtttaaatcatttaatctatgtcrtggcttctttaaagtcattacctgctaattctgatatctagggtattttagtgtcttaaattttactttgatatttttcctgattatggattaatttcttgctccatgcatagaatttatatcctatgtatagaattttttaaaaaaatatttaatgctggacattatgaataatacatcagggaatgcttggactatgttttcttccttaaaaaagccttacattttattctggcaagca

SEQ ID NO: 181020 - DNA, 433 bp, Homo sapiens
tatattcaacatatattccacacatacatgtacaagtttgcagcataattcacaatgtaagaaattggaatgagtcacattatccatcaattggcactggttcaattaattacagtatatccctataatgaaatattatacagctatgaaaaagaaggaggaagctctccatactattatccataatacctattatcctcttaatcttcacagcctgcgaggccactgtaggtttagccctactagttcaggcatagaatgatttccaagaacttaagttaaaaagraaaagatctagatacagaacaccatgtgtagtatgctacattttatgagtaagagtccgaaaagatcttttatgtgctgtatatgcattaagcaattcaagaatacataagaaactaaaaacagtggctctctccgtaacagtggg

SEQ ID NO: 181021 - DNA, 617 bp, Homo sapiens
tttttgtaatgcaatcgtccagtggatgaaagggaataatcagtaactaaaattcttttcaaaaagtttctaatatatgagtcaagaatatatgaatatttttaaaagtaccccataactgaaaataagaactcaaggataggtttgttttagtcattcatagtaattaaacttataaagacatatttatatacttattaattacaagaaataaagtgatacataaatgaataataaaataatgaaataattatgtaataatggtaatttaaatstataatcataaattatattggcatacattggcaagtgctgagagaatgtagtaaaaatgctaaatatttcaacttacataagaataaatcaaatgtaatgttcaccaattttataattataaaaatattgttacaaatataattgtaaaattttgtaaaacagaaaaaagtaaaagtaagaagtattaaattggccattttcttaagataataccaatatttttttaagaggatgaaatatcaaaagtattctgatacattgtttgtggaacataaattggtataggctcactggaaagaaatttaacaacatgattaaataggcataacaatcactgtgtt

SEQ ID NO: 181022 - DNA, 571 bp, Homo sapiens
gaagaatgattagaaaattggtgacaaagaaatttggggaggaggtatgtggatggacctttctgagtggtcaaaaactgggaagatatttgtatcccatttgagtgctcaccaacaggtgatgtcagcagaggagaattttaataatcaggtggataggattctgtggacaccactagcctctttccccagccacccctgtcaccgcccaatgggcccatgaacaaagaggccatggtggcagggatggaggttacacatgggttcagcaacatgggcttccactcaccaaggctgacctgattacggccactgctgagtgcccaatttgccagcagcacagaccaaccctgagccatcgatatggcaccattacttgcrgtgatcaaccaggtacctggtggcagattgattatattggtcctcttccatcattgaaagggcagaggtttgtcctcactggaatagacacttactccagatatgggttggtgtatcctacacgcagtgcttctgccaagactaccatccatgtgctcatggaatgccttatccaccatcatggtattcc

SEQ ID NO: 181023 - DNA, 571 bp, Homo sapiens
gaagaatgattagaaaattggtgacaaagaaatttggggaggaggtatgtggatggacctttctgagtggtcaaaaactgggaagatatttgtatcccatttgagtgctcaccaacaggtgatgtcagcagaggagaattttaataatcaggtggataggattctgtggacaccactagcctctttccccagccacccctgtcaccgcccaatgggcccatgaacaaagaggccatggtggcagggatggaggttacacatgggttcagcaacatgggcttccactcaccaaggctgacctgattacggccactgctgagtgcccaatttgccagcagcacagaccaaccctgagccatcgatatggcaccattacttgcggtgatcaaccaggtacctggtggcagattgattatattggwcctcttccatcattgaaagggcagaggtttgtcctcactggaatagacacttactccagatatgggttggtgtatcctacacgcagtgcttctgccaagactaccatccatgtgctcatggaatgccttatccaccatcatggtattcc

SEQ ID NO: 181024 - DNA, 625 bp, Homo sapiens
gtgattagtagctattagtaatttatctctaaccatcacttactaagggatatggcatagataagctgcagattatatgttttctcctgcatacaagtcctgtctaatgttttccattgcaattaattttaaaaattcacaaagttcagatttttaattctcagtagtaataaataacttgcaatataaagatttgatcaagttacacctattctttgaagtatcatcatttcctggactcaatgataaatctmatctcccaatttgagccactagtgaagttcataaagtatattaatttgttctctgagctataatctttgttctatttgtatatatctcaacacctctcattgatgggtgaattatttcataagctcagtaatctgaaatccagtttataatgaagaaaaaaaagtacctatgcagctaatatcatcacagagttcattagctgaagtttatgtacgcataattaatagctcatattcttactcagagccagtgaatcctaattttggtcacatttctaaacatctttttggtctggttgctcactgaatgctctgggacctatagtgtgggatcagaggaagctgagggggatggaagaaggaaagttatt

SEQ ID NO: 181025 - DNA, 616 bp, Homo sapiens
ccctttataaaactgtaccaagcgtaacatttaaaacttttctttctttaattatggaaaatggggtaagaatcatgaagtttcagaagtggggaaagtaaatggtgaccactaaataatgcacagttagtatttataaaatatagtaaaagtatttactagtatgaaatttataacaataagcagttggctagttctaagaatacgtcataggcaaatgcacrtagatattcagtcatctttaactacttatgagaaatataaaactatcaaatatcactgggggagaaattgtaaggcaaatttatgaaatcaggatataacaggataggattattagaagatctcaaaggatttttgatattctgtccccctatgtgcaaatgttctcagatgggtcagactccttcattcttgttttggcacttggagggaaagatttatttctaaattgaatttgttcaggacagtttttccgaatgacacatatcaaatctgtagttttatataaatattaaaggctttgaaagaaaatgaggaaagataaactggtgttgattgagttaaagagttccattatttcctcaaatgagaactaggtatatattgtagacca

SEQ ID NO: 181026 - DNA, 616 bp, Homo sapiens
ccctttataaaactgtaccaagcgtaacatttaaaacttttctttctttaattatggaaaatggggtaagaatcatgaagtttcagaagtggggaaagtaaatggtgaccactaaataatgcacagttagtatttataaaatatagtaaaagtatttactagtatgaaatttataacaataagcagttggctagttctaagaatacgtcataggcaaatgcacgtagatattcagtcatctttaactacttatgagaaatataaaactatcaaatatcactgggggagaaattgtaaggcaaatttatgaaatcaggatataacaggataggattattagaagatctcaaaggatttttgatattctgtccccctatgtgcaaatgttctcagatgggtcagactccttcattcttgttttggcacttggagggaaagatttatttctaaattgaatttgttcaggacagtttttccgaatgacacatatcaaatctgtagttttatataaatattaaaggctttgaaasaaaatgaggaaagataaactggtgttgattgagttaaagagttccattatttcctcaaatgagaactaggtatatattgtagacca

SEQ ID NO: 181027 - DNA, 500 bp, Homo sapiens
cccctggctctagtttcttcctttggaacaattgaattttggctcttaggtttcaagacacctgaataatctctggataaaacgtttcttggcttaaccagctttagtttatttctctcatatgcaagcaaacattgcaaacctcgggctagcaggctggataatttttaagaaactagcagcaggaaaaatgaattctttggtacaagaaaattcacaaaatcaggtgtgtaaagaatgggagacaaatagaaacttacactgacaaccattttttttatatatctactagtttttgagggtttggtgcttaactccattagctttcatccttctccttaygtttcctctttgcaagggtaaagtttcaaacatttcttctagaacgctgttggtgttggtcttgccttacactttgtagtactgtaattatctgacatttgtaaaatgctcatggtgttccaaaaactgttcagaagtttaaaaacaaaaatatcagt

SEQ ID NO: 181028 - DNA, 595 bp, Homo sapiens
ctgtgattcggcagatctgagagggwggcatcagtgtcacctgggagcttgtcagaaatgcagattcttagcacagtctgcagacctactactcaggatttgcatctcaatcggtccccaggtgcttcacctgcacacctggcatttaaagtggttgcctctgaaaagaggattaaagtgggaactcaataattgaaggactgggctattgcttttaatcaggtgggcatatggctttgataaaaatgtaaacaccactatagagaaaggaatagatactttagaatatggttgaaagctataaagtataaagatagaactaaaaatttaaaaagatatgatttgtgtaaaggcagggtgagggcatcattcatgtagaggagccaaaatatataagtcaagaaatagaggtataagcatgttatttagaaaaatgtagaaaaccgccagaaaaaaaatagaagcagaatcattttaaagctattggctccagggagcagctctagtggagaggtggtgggcaggaaagaaagcttttattttttattttaggcttcctgtactgtttgaatttttattggcatgtacatgcatt

SEQ ID NO: 181029 - DNA, 594 bp, Homo sapiens
cacttctgaagcctctggtcacatcacatccactcacatcctgttgaccaagcaggtctcatggccatgccccaagtcagggagtcaatgaagtaccttatacccaagatagaggggaggggagtgaggatgagctgaacaaaatccaacccctcacaggggccatggagtgtgtattttggaagccccagtatttcacatgagacctgccacatgataggtatttagtaaataatgaatgaatgagtgaatgaatgaagacaagcaagagttgtgttctttttgctacaggtaataaggatatggtacctcacagaatcctgtcacagagagatggtattaaatgaaaataagagcttagtctaragagtggattcccactcttcccatagtgactatggctttgccaagctatttgagcttcaatgggaataatactcgctttatccggttattgtgaaaattaaatgagaactctatgtaaaacacttagctccatgtctggaatttcataagcacttgtaaatattagctattattattattactgctactatcttgtgttctgccagtcaagggaaaaaataaactaag

SEQ ID NO: 181030 - DNA, 527 bp, Homo sapiens
gctcactctgtctttggcaggctctattgttatagcagcaaagtgctacaggttggatgagcccacggtgccctgataaaactgcatttatagaaacagacagcccgcccgtggccacagttggccaatatgttttttwaaaactattgcacaaaaatgttatttatcttgactactgagtttcttggtgtccccttccatttttcactccagatgatgcctctcttgccccaacacagtccccacctggctcctcaagcaacgtgatctgaatggtgtccatggggatagagttcaactagcaggaccagaaagcagcatggacatgctggaaagatggccctaccattctgtacaaccttgaatagctcttaaacttcattgggccttgtttcttcttctaaaactaagtgttgtaaaaaaaaaatatgaatatagcaagtcttcacacaggtagcatcctgggtggagtgatctccatgaaaaggcccagtgaatccctgagatgctgggtcgctgcgcagttt

SEQ ID NO: 181031 - DNA, 440 bp, Homo sapiens
agcatccctggcctccacactccaggccaggaacgtctcctcccccagctgtgacaaccacacgtgtcccccgacatcgcccagtgtcccctggggggtcagagtctacttctatggagagccagtggaactctgagtagcttatgcaagagactttttttcttttttctttttttttttttgagactgagtctcgctctattgcccaggctgragtgcaatggcacggtctcagctcactgcaacctccacctcccaggttcaagtgattctcctgcctcagcctcccgagtagctgggattacaggtgcccgccaccacgtccggctaatttttgtatttttagcagagacatggttttgccatgttggccaggctggtcttaaattcctgacctaaagtgatccacctgcctcagccttccaaagtgctgggattac

SEQ ID NO: 181032 - DNA, 567 bp, Homo sapiens
aatgagtgccatgaggccgccctgacctgatccctctgggacttcagggccctaggggtgggctggyggctggcagcttggtggaaacgttgctgcttcctaggtactcagagccagagtgtttgggtgaagattccccacccccattgacaggctgtagaaaattctagaaagttctggatcaaaactctcctccccaagagatacacgtaattcttgtacttcgggggcctctggtccctttacagatagggcaaggcacagagagggcgaattacgtgcccagggccacacagccattggcagccaccgtccccacctcctcccagacaccagggctcggtgacagccgttgacgcagcttcaccagctcagcacaaacgtgtggttttctccactgttgattcataacgaatgacagatgggaagtacgataggggcccccatctggtcactggggctggcaggtgccatctgcccacccagccacccaccttcccgcccccaaccggatagcagcaacgaggggcagtcccacccaggacaggcaaagaaacgcagaaatag

SEQ ID NO: 181033 - DNA, 567 bp, Homo sapiens
aatgagtgccatgaggccgccctgacctgatccctctgggacttcagggccctaggggtgggctggcggctggcagcttggtrgaaacgttgctgcttcctaggtactcagagccagagtgtttgggtgaagattccccacccccattgacaggctgtagaaaattctagaaagttctggatcaaaactctcctccccaagagatacacgtaattcttgtacttcgggggcctctggtccctttacagatagggcaaggcacagagagggcgaattacgtgcccagggccacacagccattggcagccaccgtccccacctcctcccagacaccagggctcggtgacagccgttgacgcagcttcaccagctcagcacaaacgtgtggttttctccactgttgattcataacgaatgacagatgggaagtacgataggggcccccatctggtcactggggctggcaggtgccatctgcccacccagccacccaccttcccgcccccaaccggatagcagcaacgaggggcagtcccacccaggacaggcaaagaaacgcagaaatag

SEQ ID NO: 181034 - DNA, 569 bp, Homo sapiens
ccaatgagtgccatgaggccgccctgacctgatccctctgggacttcagggccctaggggtgggctggcggctggcagcttggtggaaacgttgctgcttcctaggtactcagagccagagtgtttgggtgaagattccccacccccattgacaggctgtagaaaattctagaaagttctggatcaaaactctcctccccaagagatacacgtaattcttgtacttcgggggcctctggtccctttacagatagggcaaggcacagagagggcgaattacgtgcccagggccacacagccattggcagccaccgtccccacctcctcccagacaccagggctcggtgacagccgttgacgcagcttcaccagctcagcacaaacgtgtggttttctccactgttgattcataacgaatgacagatgggaagtacgataggggcccccatctggtcactggggctggcaggtgccatctgcccacccagccacccaccttcccgcccccaaccggatagcagcaacgaggggyagtcccacccaggacaggcaaagaaacgcagaaatag

SEQ ID NO: 181035 - DNA, 415 bp, Homo sapiens
tgtagtcctgaagcatgtttattaactttggtaagtatattttataaatgcaggaccaacggatccagcattgtaggatgtattttaaatatcaaagaatgggaaggagactttaataaatttattcttatctgttcaaactcattttacagatgagaatattaagcaccgagaaaagttaaagagcttacacttatacaagagcagscaatttctgatatatgtaagactagaatccaggtttactggtcccctgccttgtgcttcatccatcataatctcacatgtaacataatgataccgtaaagaacatttaaaggattctgatgcacttcaataggaagaactctgagtttaaagacagggctcatcaagtcttaaaaataacacagcaaggaccttaggaggaaaggga

SEQ ID NO: 181036 - DNA, 394 bp, Homo sapiens
ttgtagcttggacaagtttacttttacaaaaaattcctgagagaaatttatagagacaaagttctaaaaacatgatttttctgcttaattcaatataccacatataaaaacatatacaacattctaygtgctctctttgcccagggaaaatgaaagtgttctctctattctgctttaaaggaaagttcatatgttcggagtaaatacctctctgaaactactaaaaaccatgcaaccttctatatgtagagttaattgcatcagggaatttgaactcacctcatgttagatgtagagttatacaatagatgaaacaattttatggcatatataatttgagtcaaattaactaacatacctgtcactcctcaaaattctaagtcccatgaaggag

SEQ ID NO: 181037 - DNA, 473 bp, Homo sapiens
agacataatcttggagtgtttagttcatttatgtttaatgttcttattgctataattggttttgaatgtacattctgattattttttcatatgtttgctttctacttttttcttctgtattttttcctttttttgttcattttctgactcttttgtctcagttgaatattttattgttttattttaatatttgtgatttttaagctattaattttgttaaattgtaatggtttctctagggctaataatattttatctttaayatgtccaagtttattggtttttcatcctacacttttcactttcttttttttaatttaatttaattttattattattatactttaagttttagggtacatgtgcacaatgtgcaggttagttacgtatgtatacatgtgccatgctggtgtgctgcacccattaactcatcatttagcattaggtatatgtcctaaagctatccctcccct

SEQ ID NO: 181038 - DNA, 607 bp, Homo sapiens
taatcaaaaacagctcaaactggtttcaacaacaaaagaaatttattagtacacattactaaaaatacagagtaaacaggcrtcacgcacattttaaaatcagagttccaggtccattttctctgtgattttcttggttctgcctgttatcaaatatgaggtgtgtcaacccataaaccatctcttagtgctgtctcatcagggccttcactctgattggttcaacttaggttacctaccctttcctgaaacaatcactgtgggcaggagattattttaaactgtggcaaaaagaggattcattatgctaataggctggtaccaggcagggtttagacatgggaccaatcttatctgaatatcatggttgttgtacaatgaatggggtgctgaaatggaagctggtaagataaccaaagctgtctacaataccccatgtaatgaactatcatgatggtgacaggatttctcacaatagtgatacatcatcaaacttgctttcctccccatttttctctttaggacagactggagaaaaagaaactcttctcagttgactgggatgactagaggctggtaatgacaaggggctgaagttttcactacc

SEQ ID NO: 181039 - DNA, 643 bp, Homo sapiens
ataagacaaacatgagtatgatcagtaatattattttccaatcaaggagtaatatgtagtgttacttggcacctcagtccaatgtgtgccattcctgaaggaccccactggggatatgtcgatccttcctagccaatcagtcacattgttagaggctaggaagggggtgcctgcccaagtaacagggtggaagaaagggggatctagaagatgggcccaatagagggtagcaggtgtgagttgcaggcaaagtgagagaataagaaaggttaataccctatgaaagttgcaatgtacaacagaaagcatagaaaggaacaaattatctggagtgaatggtgtctgtgtccagagtaggattcactcagcctcctgagttgtcttcttcagcaccrtgtccagggcctgtgttgtccgaggaagctgcatcatctggggtggtgggtcctgcagggttatttcctttatttttggtactgggttgagtcccagccacatcgtggtatggtttgatgcattgagctggaatccaaagaggatctgagggggtgtgaatacaagcatatcctcttccccacattagcaaatcatttggaccacaccatagattactatttacatctttccgtaacaccaaaggttt

SEQ ID NO: 181040 - DNA, 471 bp, Homo sapiens
ttgagctggtataacccagactgttatcagttctaatttttgtgggccgccccataaacgcaaaagttaagagaagatgtttaatgacatattgggtggactgtccaggaagagcatgagtgctaattaggtgggaattggtatcaatggatacatgaacatatcttagttttccaaattcagggacgtatgtaacatctgtttgccataactgattaggttctagtcccttagggttaacacctgttgaggaaggggacgtgcctgtgagctagtaatctgggcattgtaaaataatttgtttagctagwctttgggttaactgaaattgtttagataaatttctccaattttggtggaaaaattgatgtgattgggtggcttggtcaagcagtgatgttataacttgcagatctgcttcatcattgccataagccaatgggccaggcagtgagctgtaggcccaaatgt

SEQ ID NO: 181041 - DNA, 550 bp, Homo sapiens
caattttagtgggatagaatgggtaataattgtattttaataaacaattatatgttaggtaattgtttattgctttctaatacaaaagtttcagtggaatctcttaattacacctatagaaactggaggcacccatttccttctcaattgtgtgtaccacaactttcctggtattcacagtcatctagtagatacaatcatataaatttttaaaaaaattttactgtatgtgtttgagggatayaacataatgttataagataaatatacactgttttttaattctaaggataaagaagtcactgttgccctaggaaattgttttatagtgagcagcccataccaaaacaatttgttttttcaagttttatgccattcttattgcaaagtcactgaataccacagataattagatctgtgattatgctgtattcatttttacccttctagtcaatcaacaatatttctaacttaaccacaaaaataaaaaatggaagagctatgggaaaaaaagccaaacaacaacagcaacaacagaaaacaaaccaat

SEQ ID NO: 181042 - DNA, 531 bp, Homo sapiens
agtaactccacttcattaattttcacagctttgtaacatttaattatgtggatatgacacattttatttatccacatttagattgtttacagaattaagccaaggtctgagctgttcttataccttcctctcttgctccccagaaaaagtaaagagctttgtggtttattcccattatggaggattaaattgttgtttacctttgtgagagctgcttcagtgaattactagggcagaggccaaaatgctatttaggtctgagtgagcaggaggcgaggaagacaggagtgcctaatagaaccatttaaagtccctctgggttaactggtttgggggtttaaaaacatatgaaaaaatgctcaacatcattaatgatcaaagaaatgcaaatcaaaaccacaatgcgataccatcttactcctgtaacartggccgttatcaaaaaatcaaaaaacagtagatgttggtatggatgtgacgatcagggaacacttctacacccctggtggaaatgtaaactagtacagctgc

SEQ ID NO: 181043 - DNA, 580 bp, Homo sapiens
cgttctgggatttctcattcccttcttatcttggcggtcaggattctagttataatctccagtgtcatggcattcttcccctgtttgctaattttaaactgcaatggtcttttgattctagaaacattgccttaggacctttgcatatactattgcctcattttatcctcctattctggttagaattagattcgatggcaattggcaaaaaactccaactaacagtagcttaaactcgatagaagtttatttttctcacatgaaatttctagtagattgtcaatggctctgtgatgtcagggtctgggttattctgctgtttgtggcctccttcataatccaagttggcatcatttctcttyccggtagtaagatgaatgaagggacagaggaaggtcacttaaggaaggttctaggtattgccaaaggatatttcagcttgcaacctatcagctgctggagctaatggcttagtagccctgctaagctgtgagggagataattttcctttattggagtccatgaagcacttggcttatcatttaacgaaaagaaaatatggaattatggttacacttac

SEQ ID NO: 181044 - DNA, 561 bp, Homo sapiens
tctagtagattgtcaatggctctgtgatgtcagggtctgggttattctgctgtttgtggcctccttcataatccaagttggcatcatttctcttcccggtagtaagatgaatgaagggacagaggaaggtcacttaaggaaggttctaggtattgccaaaggatatttcagcttgcaacctatcagctgctggagctaatggcttagtagccctgctaagctgtgagggagrtaattttcctttattggagtccatgaagcacttggcttatcatttaacgaaaagaaaatatggaattatggttacacttacaatgatgactattttctttactacttcaaatgtgttccttgcagctttatttccaggctttttggcctatacaataacttctcacttcaaagacaattcaagtgtgttagtgtattcttataaaaaaggcactttacatagcaattaaatagaacatgtattagcactacacatgattcaactggcataatggcagtgtgaacagatatgaccaagttggcatatgtgcaggcaatgacaactacctc

SEQ ID NO: 181045 - DNA, 319 bp, Homo sapiens
gtggagtctgtaagactagaggcaaaaggaactgcacataagcactacactccaggtaataaagttccttcccatgggaatatgtattaacaattctgatactactatacatgtatactggaattraacaattaagtaagtgagtgaagggcagatagtgggagccaggtttctcactgtgggagtaggaatttacaaataaacaaggggaggaagctggaatggtccatgtagtaatgaatatgagttaggaacatcagtaagaactcatgtttaatttaagatagatacaggtggttacacatagaaatatttacag

SEQ ID NO: 181046 - DNA, 584 bp, Homo sapiens
aattcagttatatttttcattgaaattattcttcagatggtgtgttcatctttgggcaatgtttaaaaattttttyacatgataaagactgagattatgggaagtatacaactttatgaattctacagctgggaaacttttcatcattagcttcaatttacttttctggctgattctttaatgttcacaagggacatctgcatttatcctgctttgtaaaattaaggttttcatttagtgctgtcagttaacagcctcacctaattcgtacattattattcataatagtaatgtgttttgccagtggaataaaatgtgtgttcccaagaattatcagttattaactgtaacatgaataaccttactcttgactttttattcttcttcttacatttacttttccttggtcttatttcatcattcaaattattttaactcgtcttacccatcaattcttaagtaagctatgcgtccttaggtaagactacaaagtctttcccagacagcatagggtataaaaaagcaacataaattgtgtcccttataagacctctgaataggccatgttccaagaaatcccttta

SEQ ID NO: 181047 - DNA, 420 bp, Homo sapiens
tgtttaaagcaacacttaaggctgtcttaactaggagaagaggagggaagttgctctgttagaaaaagggaacatcatggacaaaggtccatacaaagagttgagagaatcccattgcattattttcctgtggctgctgtaacaaactacagcaaactgggtggtttaaaacaacagaaatttattgcctcacagttttgaaggctagaggtccgagatcaaggtgtcagctgggtttgctcctcctgagggctatgaggaagaatgtttcatgcctctcycctagcttctggtgatttgctggcaatccttggtccctttggcttgtagaaacatcatccccatctctgcctgcatcctcacatggcatcctccttgtatgagcctaggtctaagttccccttttcataaggacactag

SEQ ID NO: 181048 - DNA, 628 bp, Homo sapiens
atgttcacacaataagatcacagttaataaatgttagcaactattttgggcagtgggtatttttttaaattattatgatttggtcccttgccatttggatgccctcagatcattcaccactcctctctcctaataattgtatacataagccagtggctatggactggttcagagactgcacagaacagccatgggcccagaaacacttcatggaatcctctccagtctaagatgctgtaaaaatttccagatccttgatctgtaagtccagaaggaacctaggtcttttgatttaatccatctttgctaaaatttctcaacagggccatctaagagccctctgagctgtatttgcagcctgtgttcacttagatgcccctcaaagagtggagagtcagcctgaaggcctccaggtaaacayagtgggcttccaatcttagcaaaaatctacacagaccagtaactcttaaagataccgaacctagattgcagaagccaaagtatttggttcctcctttaattggctctgtttaattacaacagctatcaattatattgcttcaattaaaaatattactacatattatctgaacacagtagccatgttctcttaagtattgttttaaat

SEQ ID NO: 181049 - DNA, 534 bp, Homo sapiens
tttcactcataaatgggagtcgaacagtgagaacacatggacacagggaggggaacatcacacactggggcctgtcgggggttgagggctaggggaggaatagcattaggagaaacacctactgtagatggtgggttgatgggtgcagcaaaccaccatggaacatgtatacctatgtaacaaacctgcaggttctgcacatgtattccagaacttaaagtttatatatatatawaaaaaaacaaaataaaacccacataggaattcagctgcatcagcagatatgaatgtgaaagacatgtataactacataacactccttgtatattccaataaatctttctaaatcagctttcaaaaaaaagttatgtaagtttcacttctctaagatgaaaaacacaatttgttaaatgtaaacatatttaaacaattcatatgtgatttcatttatagagaataaaaatgactggtaactaattattttgcctattttaaatgtaaagatacaattatttgttaatattattttcttta

SEQ ID NO: 181050 - DNA, 491 bp, Homo sapiens
gaatttcctggtggacaaattgtgaaggaggttatgtggctttttaaatttcagtagctgtcttttttaggagtagaatgggaggaagctttgccctaagcagttcccagcttgacttttccctttggcttatcccaagatttattttcctttcacatatgtatatatttataaatgttataagtacaacagaaggcaagaatggagcaaacataagagtgaggaggaggaggaggaggaggagaagaatggtaagtgcaaattaaaatggtagtactaaatccacacactggaaggtggtttttgcaacacataaaactgaaaaagcaattgtatgcagaatayatcaagaattcctacaaacctttaaagaaaatacaagaccttgaaaaaatttgcaaaggatgtgatcaaacaattcacagaagaggaaacaaacatggccacaaagcatatccaaaatccaaaagcaaagcatagtctccccagta

SEQ ID NO: 181051 - DNA, 547 bp, Homo sapiens
gtcacatcattatcatttcagacaaggagaccaaactccagaagttttagtaactcatataagttatatggaaaatgaggtgtgaagccaaaatatgaggtgcagctgtgggaaaccaagcctgtgtacctagtgatcccaagaattatcccaccctatagatggaagtgcttttgattggtgccctgattcaagtaaatttgtgcagggaatttttggagattttccttcatgaaaagataactgattatgttgatatttctctacgtcttgaaagttttgttctatcttgcacaggttatttgaaggattcttttttttttaatatttaagggaatgaaawgatataagccttatatggatctatgcatgttttaacttttcaagtcttatatgactctatgcatgttgtaacttttcagttcttctttttcttttcctgtaagcacattttctgtgactcctcttatttcttcaaataggtagtccacaatgggaagactactcgcacacgataaatctctgctagacaattgtcagataattt

SEQ ID NO: 181052 - DNA, 528 bp, Homo sapiens
agagaccaggcaccctgacacagggaaaacagggtcaaacgaagccctttggttttcttccagaaacctaaaaatatccacctcttgcctgattgacatttccactctgcttgccttatgcatgtgctgtaggggctgctaatgttgcttaactcacatgctccctgcacttttctgctgttagaaagaaaccagtcagttgggtaatcatgataattaaaaaagatgtaaactttcagagtggctgacacaaactcattacactaagctgtcttgcctgactgaactaacattaattccaataccccattacattctggcatgtaagaatttctaactaatgtggatatttcttccttcatttccttacccaactcttccctaccttccttcattcctcccttctttccttcccttctttctcatctctaacacattcccattgatgctgatgctgcctgtccaaagaacaaacttttgctgaactgtttgagkctaattctcccaaattgtaatgtgcatatagat

SEQ ID NO: 181053 - DNA, 434 bp, Homo sapiens
ctgtggtcgaacctgttactcagatgtgcatttggtgaaacmatttctatgcctaccttggaaagtctgtgcccctttcttcaggctaaaaggcatgctgcaggaaaccacatccaaatgtattcctccctttctttgtgccaaagagttggagtttcttagaactctagattttgacggaagtagatttcaatatctgcttcatcactatctatacaagttccggcactaactgattgcgccactggagctccagcttcatcactttcttaatccctctaagcccctgtttagaatgaggttgaaatggtgggtactcagtggggttgtggaggggcttctatgacagattatcagaacatgggggtttataaatgatagcttctaatattttgagatgactcttgttgcatttggtgtgtttgtgtccagaa

SEQ ID NO: 181054 - DNA, 570 bp, Homo sapiens
tcaatatctgcttcatcactatctatacaagttccggcactaactgattgcgccactggagctccagcttcatcactttcttaatccctctaagcccctgtttagaatgaggttgaaatggtgggtactcagtggggttgtggaggggcttctatgacagattatcagaacatgggggtttataaatgatagcttctaatattttgagatgactcttgttgcatttggtgtgtttgtgtccagaagaagacagagcatcctcaaacctcttatgttgcctacacttgaagttagaaaatatttggttttatgtggaccaaaaaccagaccattcttatgtaaaatgtgaagactcattgatgtttttatgcagcatcsattcccctgtcagggaaatcatttgggatttgcttattgttatgtgtaaagaatttatgaaaaggaccaggttatctgtggacccaggatgaaagtataacctgggtctaccaaaaggctcttccaaactcaagtacccttccttttggctggagctaccctcattaattagagctgatcctgtggatgaag

SEQ ID NO: 181055 - DNA, 570 bp, Homo sapiens
tcaatatctgcttcatcactatctatacaagttccggcactaactgattgcgccactggagctccagcttcatcactttcttaatccctctaagcccctgtttagaatgaggttgaaatggtgggtactcagtggggttgtggaggggcttctatgacagattatcagaacatgggggtttataaatgatagcttctaatattttgagatgactcttgttgcatttggtgtgtttgtgtccagaagaagacagagcatcctcaaacctcttatgttgcctacacttgaagttagaaaatatttggttttatgtggaccaaaaaccagaccattcttatgtaaaatgtgaagactcattgatgtttttatgcagcatcgattcccctgtcagggaaatcatttgggatttgcttattgttatgtgtaaagaatttatgaaaaggwccaggttatctgtggacccaggatgaaagtataacctgggtctaccaaaaggctcttccaaactcaagtacccttccttttggctggagctaccctcattaattagagctgatcctgtggatgaag

SEQ ID NO: 181056 - DNA, 585 bp, Homo sapiens
atgtgttgtcagagcttgcattgtcctctttgtgtcttgcaaaggacacatttaaaaaataaaatgttttatcttatttcatcctcataaccccatatgctttaggtaaatttgtcaaatcattgaagaaacaaggaagcttgggtttgacaagctaagcaggtaagattaccaaggtaagaaaaggccaagcaagagaacaacctgaaggcagatggatgcccacattttaagctcttgctactactctgcctccctaagactaatagaaattgtgatttgaaaccactcttgcttctgtaaataaacaagagaatataagaatggaagctagaagatcagttaggtatttctcagagaaatccagggtagagacaacrgtgagctaaactaggtggtaatagtataatgcacaggaagaaatattccagtcttatccctggctgtgtgactgacaccaaattcctttttaaatccctaggactcagtttcactgtccgtaacatgagcaggtacaacacaatctctaagggactcgtatgtcaacattttattctaatttctaaaaatctctaagccagacca

SEQ ID NO: 181057 - DNA, 448 bp, Homo sapiens
atttctgcaaacttagtatctgggccctgtctagtacctgttagactctcagtaaatattcattgaatgaaaacatctctacaattacaataccctgactgtatatctactgttaaaattctaagactagaaaaaaacaatttaaatgttgaaattcagtcagccaattggtaatttaataacccaactaaaaaaaaaaacccagaagacaaaatagtcaaaccatttctaagagtagctgcagactaaataacaagaaaagaaaaaaattatctaaagcaacgcttctcaacgtcagtgctattagcatttggggctgaataattcttggtcatgggagctgtcctgagcattatttagtggcatcgttagtcgctactcamtagttactggtagcattcccctcttgcgacaacccaaaatgtctgcagacattgccagatggccc

SEQ ID NO: 181058 - DNA, 590 bp, Homo sapiens
agttttctgtctagtgcagagatagtgccatcactttccccttctgcgcctgggtagatagtattacttgatcaatatatcttttagctgtaagcccaggtgtccccttgcaccttttcttagcacagtgctttatacctatggttctcaaacttcagcatacctaagaatcacctggaaagcttgttaaaatacacattcccacacccaccacccccatagattcgcattcagtaggtctgggatgggaactaarattccattctacatttctagcaagttgccagatgacacagattctgcctatccacacaccatggtttgttagcattgttctagaccagtgcttccaaattttaatgtatatatgaatcactggagattgtgttccaatgcagattttcattcagtaggtctgcttctggccctgatatttagcttctctaataagttccaggtgatactgctggatcatagactaaatttgagtatcaggtcctcagtggccactactatgcagagttggttgtgaagtaaaattaatcagccatgtctaacctagaaccaaggccttccttgacctcaaagtt

SEQ ID NO: 181059 - DNA, 579 bp, Homo sapiens
agagacagctgggcttttagaaaatgggccacagatcacaaagctgaggttttgagaaataatcctcatctcaggacaggtatatattaagtggatactggtcaagaatcagggtcctagttctgccctttgcatctgtgtataagcagctcccatccggccttgactttcttctgttcacgtaacttgtaactttcccctaagtcttcaaaagtggtaaaatggaaatagtatgttcataccaatgggcaatttgcatttagttcattgttctgtgtctacagtcctcctggaagcattttctaayggtctcagattttctagatttttctgaccaaatactgaccaaatgtagcaatcaatcaatcaatctatctatctataaattagtcaattttggtgatacttatgtgggatctatatttgttctgattcacctgctttccaatgtgcactcagcattcttttagttgaggaaatgcagttcaaattactataaggaaaaataaagggaaatttattgcctaaatattttcaaagccccagagtattgcatatagggagaaaaatgatgttgtc

SEQ ID NO: 181060 - DNA, 526 bp, Homo sapiens
tttagaacagtcctaggaagaattttaattggccctgtttagctcatttaccaacaactgaactaatcactttggccaaaggaattggattatttgatcagagccaaccacatccttctggccattgaaagtggagatagtctctgccaactgcatggaatggatttcacagaagaaagaggtattttgttaccaggataatgtgtgagaagacatcctggacaagaaaatatagtagaactccaatatattagatgacctatcacagcctcaacatgtgtcactttcttctagaaggcctagaatcatgctttagacatgctttaaaccccagcagtaattggtaaatatatataatcaccaactgaagtaaatgtgtagtaatttactatgttaagtattgccaatacaggtttatttagaaatatttgccagctttcttttatttagaatgatttgcccgtaaacagaacatttatactgtgctaaaayatatattccctgagtatataatattgctttttaa

SEQ ID NO: 181061 - DNA, 445 bp, Homo sapiens
tctcaatcagtatactttgcttttcttgtcttattccattagctaggacttccagtatgaacattgaaaaggagtggtgagaggcgacacccttgcattgtttttgatcttagtgggaaagcttctagtttctcatcactaaatataatgtgagctgtaggtgttttgtacattttaaaatcaagttgtacattttaaaatcaatttctagtttactaagtgtttaatcataaatggrtgttggattttattgaatgctttttctgcatctactcatatgatcatatgatttttctttagcttgtggatatgatgaattatattaattgattttcaaatattgaatcagcattgcataccttggataaatccctcttgattatagtgcataattctttttatacactgaatttgattggataatttcttgttgaggatttttgcc

SEQ ID NO: 181062 - DNA, 445 bp, Homo sapiens
tctcaatcagtatactttgcttttcttgtcttattccattagctaggacttccagtatgaacattgaaaaggagtggtgagaggcgacacccttgcattgtttttgatcttagtgggaaagcttctagtttctcatcactaaatataatgtgagctgtaggtgttttgtacattttaaaatcaagttgtacattttaaaatcaatttctagtttactaagtgtttaatcataaatggatgttggattttattgaatgctttttctgcatctactcatatgatcatatgatttttctttagcttgtggatatgatgaattatattaattgattttcaaatattgaatcagcattgcataccttggataaatccctcttgattatagtgcmtaattctttttatacactgaatttgattggataatttcttgttgaggatttttgcc

SEQ ID NO: 181063 - DNA, 507 bp, Homo sapiens
tcacaaatgttcaaatattcactatattgtatctaacaggcttcccatatagagctctaacttattttaatggtgaaatttttcaactccctttacggggaaactgaaattctcaaggctgaagtgatttgctcaaggtcatccagcgagttaatgactaatctatgagataacaaagatatacagttacctagtctacagcctgttctcactgtatcatttggcctcccagatgtcctataaacccacttcctttttttcccttttacwtcaagcataactattcccatttagtaaatcatatcctattatagaattataaagtagattggccaattgcagatctacatacagtgtaaaactgaccttgaatgtaatgtgttggaattccataacccaggtaagcccgagaaaatgaaccatgacttttaatagcactgcaccacaaggattatctgaggatgtcttttaatgtattctataagacaaaggtgatttttaggcatc

SEQ ID NO: 181064 - DNA, 571 bp, Homo sapiens
cacaggattctgatgcatactaagatttaagaactaccaaatgagcattgacacacagtttgttgtcaacaattttacagcaataaaaatttcattaaaatatctattctgatagtacttgcactagtaatagtagttgtagtaattactaatgtttattaatcccttactatatgtcaggcactgcatatctcagttgatgaccacaactctagaaattagatgcccttgttattcccattttttgaaagagaaaattgaggatgaaaacaaagtgcttagtcaaggccacacagtaaataaagaaygcttccttttattaatcaccagtctcattctataattttggcaattggaaaagtaccttctgcaggtagcaatggagtaacaatagactcagagacttagaaacaggaagacccttcactgttttgctttacattcatttgaatgtaaaccctgtctgtttatatttttcattgtatgaaaaaagagaagatgaggttattttttaaaaaccttacagtatttttcttgataagatgtaatcactgctgtatgaaggatatgg

SEQ ID NO: 181065 - DNA, 408 bp, Homo sapiens
aaacgtcaggcaaggtatttcacttctctaagcttgaatttccacatcttaaattcttctttgtctttattcttacttggaaaattgtgtaatcttgagcatgttttttgaagtctctgagcctcagataacctatctgtgaaaatgaagcaataacaatatctctatctcaggtttgctgtaagcataaaaaaaaaaaaatccatatgaaaacactttgaaaaccatcaatatggagagataagattttgttatacataaatttatagcctgtagttgagacatgatgttaaagagtcatatttcacaaaacagaatattcctgcagcaggcagtcattagcagaattgaaattcaggtccaattttcagagttcagtwtacttgttcaaagaaagaccgactgatt

SEQ ID NO: 181066 - DNA, 573 bp, Homo sapiens
cagcttcccaagtagctaggactgcaagtgcaagccaccatacctggcagacctctataaatatcaactgctatgtcaggcatgataatcaggctcaaaaatatttccgcagaaaatacattattactgtatattttctgttctagcagtaccatctggctgtgtacttttacttctttcatttactcctgctcgactgcttagttattgattttcttacttgtccatctctcctactatactatgaatgtttcaagaactaggtttattacctgttgtctctgtagtcttggtgcctagcacaaagtttagaatttactagttctcaatatatgcaagtttaatggacttaaaagaaacaattctttgcttcttagtaaaaccagctttgggaaatatgccaagactggaataaaaccacatctcatctggygttgaacttgcaagtgaaacagatgagaatggcacccttcctccacctatattgagcccttgctcaaatacttaaggttaagtgaaggctgaaggaagaaatttgggagaaagcaggagaaaaaagggacactgggggag

SEQ ID NO: 181067 - DNA, 617 bp, Homo sapiens
ctctgtgggatatttatatatgcacatacaaaaaataggctatagcaatggtctcaaacttggctgcatatgtgaatcacttgtgtatgtaaactatgtagcactgagcctgatacacagagaacattcaaaaagtattagttattactgttaaataaggatgttaagaatgaaaaagcagacttcacatctgttttaatgaattgaattgaacaaagaaaagaatgattcatagtagtccttggaaatcatctataagttaatctgatattgacttttcccaggcatgaaakttgattgggcttatttatatacaaaatgtatagatcacgacttccttaaggtcagggacaacatctgattcatctccattcttttttgcccactgacttgtgtggagtaagtatgccaatatgtattttctgaatgactccgaatatgctttattggataagccagcacttaatgattttaatcaacttcgtttgaatcaaaataggtttaaaacttagttgcatggtaataaaaagtcctgagagatattgtcaaatgataacaccactgtctggagtgggatacacaatagaaaacagtcctgctcctaacaaaagcaagct

SEQ ID NO: 181068 - DNA, 583 bp, Homo sapiens
tccccaaacactccagcatcatttttcccacctttatgtgctatttactactgttaatttttccatyaggttatttgatgaacaggtctccccagtgataacaagctcgttaagggtagcagccatgtctgtatcttttcaccattgtaacccaagcacctagcacagtgtctgcacatggtacactttcaataattattacgtatattaatataagggcacacaagtgggcagcttgtatgttgaaacaggaagtgtatccatagagactagtcacttcaagagagacctaaaagccagtttgttaagggcctatgcaggagatattatctttttttttttgagtaagtatctttttgagcccctaaaaatcacttgataccttgtattatttttaaggataatctaaatatattaagttgattctatctttctgtggctgcttagcatgaaaacacctagatgaatttgtgtcatattccaagggtatgtttaggattatgtgatctaaatagagatttcaagggatatgtgacagaaattcatttaaggggctcttgggaacaattcaaccaaacaggca

SEQ ID NO: 181069 - DNA, 583 bp, Homo sapiens
tccccaaacactccagcatcatttttcccacctttatgtgctatttactactgttaatttttccattaggttatttgatgaacaggtctccccagtgataacaagctcgttaagggtagcagccatgtctgtatcttttcaccattgtaacccaagcacctagcacagtgtctgcacatggtacactttcaataattattacgtatattaatataagggcacacaagtgggcagcttgtatgttgaaacaggaagtgtatccatagagactagtcacttcmagagagacctaaaagccagtttgttaagggcctatgcaggagatattatctttttttttttgagtaagtatctttttgagcccctaaaaatcacttgataccttgtattatttttaaggataatctaaatatattaagttgattctatctttctgtggctgcttagcatgaaaacacctagatgaatttgtgtcatattccaagggtatgtttaggattatgtgatctaaatagagatttcaagggatatgtgacagaaattcatttaaggggctcttgggaacaattcaaccaaacaggca

SEQ ID NO: 181070 - DNA, 583 bp, Homo sapiens
tccccaaacactccagcatcatttttcccacctttatgtgctatttactactgttaatttttccattaggttatttgatgaacaggtctccccagtgataacaagctcgttaagggtagcagccatgtctgtatcttttcaccattgtaacccaagcacctagcacagtgtctgcacatggtacactttcaataattattacgtatattaatataagggcacacaagtgggcagcttgtatgttgaaacaggaagtgtatccatagagactagtcacttcaagagagacctaaaagccagtttgttaagggcctatgcaggagatattatctttttttttttgagtaagtatctttttgagcccctaaaaatcacttgataccttgtattatttttaaggataatctaaatatattaagttgattctatctttctgtggctgcttagcatgaaaacacctagatgaatttgtrtcatattccaagggtatgtttaggattatgtgatctaaatagagatttcaagggatatgtgacagaaattcatttaaggggctcttgggaacaattcaaccaaacaggca

SEQ ID NO: 181071 - DNA, 599 bp, Homo sapiens
tactgtcaatttcacctacattaaattagctaaagcaagtcgcatggccaaaaccaatatcagtgtgatgagaagtgtggaaattagtgtggatgctgagagcagggtaggtatgtaaagaaccgcagcagtgcttacatccaccatagtcacccttccttttcttctcatgstcactgaaatgtcattggtttctgagtgtggcattaaaagaactgaatttttctacaaattaaaacaagattttacttttatgtctcattaaagttataatttcagaacatttttgctatgttaatcataaagatacagagacttgtatgattagagacatgggctcagtagagattgtgattactgtttataaatgattatggcaatatggatagtaatagccaacccaatttgagagagaaagacaaagttaaggttcatttattttttgaagacattatattaatatatactacatgagaaacagaggcaatctgtgtattgaaaaagtttattaaaagctcttttgatgctttatttggtagagctgtgacttacaatccttttgttctagatagaactacatttttgcagtgtgtacaact

SEQ ID NO: 181072 - DNA, 443 bp, Homo sapiens
acctctggagataccctacttcctgccaaattcccacagattggtcaccaaagcaggaggtcacaatggactggaatgaaagtgagcaaccagggccagatctaatccttacctcgttcaggcagagaggcctagaagaagaaatcagaatcaaggaccagtgagtggctgctgtgtatttctcatctgtctgtagctatcatccttgcagcccttccttccataacagaatgcaatttccaaagaaaaccaatgaatatagaaatagagctgcccttttacacaggaaaatcctctgactcgaggaaaatagaaaaggggattaacagcactcagggtgtaaraagtcaggggaaaacgtgagaaatcagcaatccgttgatatgaacagtagagtgacatttaagctggccaaggagacccaggagatcatgttcaagcat

SEQ ID NO: 181073 - DNA, 466 bp, Homo sapiens
gagactacagcaaagactaataaaggacgataaagtctacggcacccatatagacaagaggaagagttaacagtcacagatgtttagttcttcagcatgtgtgttttatttgggcatagagtgtttttaaattttcagctggcattttaaaatttcataggaaaaaaagtcwagataagcagcaagttgtacctggaaagagccagatagtaactattttaggctttgaggcttacaggtttctatcacaaacacttaactctgccatcgtggggagaaagcaaccataagcaatatgcaaatgaatgggggtgtggctgtgtttcaataaaactttatttgtaaaagcaagcaggggatcaggtgtggccattaggtcttagattatgaacatctgatctagattatcaccttccctagtggggatgcggaagggagcccagaagatcagcatctctgggtccgt

SEQ ID NO: 181074 - DNA, 466 bp, Homo sapiens
gagactacagcaaagactaataaaggacgataaagtctacggcacccatatagacaagaggaagagttaacagtcacagatgtttagttcttcagcatgtgtgttttatttgggcatagagtgtttttaaattttcagctggcattttaaaatttcataggaaaaaaagtcaagataagcagcaagttgtacctggaaagagccagatagtaactattttargctttgaggcttacaggtttctatcacaaacacttaactctgccatcgtggggagaaagcaaccataagcaatatgcaaatgaatgggggtgtggctgtgtttcaataaaactttatttgtaaaagcaagcaggggatcaggtgtggccattaggtcttagattatgaacatctgatctagattatcaccttccctagtggggatgcggaagggagcccagaagatcagcatctctgggtccgt

SEQ ID NO: 181075 - DNA, 442 bp, Homo sapiens
ttaattttccttttgccttgtagggtaacatattcataggtgctagggattgtgggggtatcattggcgggatcattattctgcctatcacagtggccaacccaagcattactgaagtctgttctgcaatttttgattaacatgattttaagaatattgaccttttgccatagggcatactggaagaacttcatgtwtttgcagtatgatatgtgaacaataaaaaaggaaatttctccatggagaagggtagcataaataatatgatatctggcccaagagtagacaacagtgctctgggtacaaagcttatgatgtcaaacaaattcatgcaaggaaaagacattttgttatagtggtgagacccaggacaaaaagtggcagattggccatagccttgacagaagatgatacctgattaattctaaatcaagttggatga

SEQ ID NO: 181076 - DNA, 469 bp, Homo sapiens
ataaggctactatggggttttaaaacactggggtgatgctataatggtggtagtaataatcattagtatgcactaagcactcactacatgccaggtattgtctaagcccttcacatatattagtgcatttatctatcrtaacaatcctactgactcagttctatttattagcccaattttatgaaaagggaactgaggtaaagggaggttaagtgactgaacagaagtcacatgcctctgaagtggggaagctaccatttgaaatggggtagcctgaattcaaagcccatattcttaattgtgctgcaacctggcttcccaagcccagacttagaggaaataaaagagcccaaaagtaggactatgttgactgagtgtctggggctcaaaacccttaccctcagtaagagagggttgaagaagagagcatgatagaccccatctgcaagaccctcacagttttttgcag

SEQ ID NO: 181077 - DNA, 469 bp, Homo sapiens
ataaggctactatggggttttaaaacactggggtgatgctataatggtggtagtaataatcattagtatgcactaagcactcactacatgccaggtattgtctaagcccttcacatatattagtgcatttatctatcgtaacaatcctactgactcagttctatttattagcccaattttatgaaaagggaactgaggtaaagggaggttaagtgactgaacagaagtcacatgcctctgaagtggggaagctaccatttgaaatggggtagcctgaattcaaagcccatattcttaattgtgctgcaacctggcttcccaagcccakacttagaggaaataaaagagcccaaaagtaggactatgttgactgagtgtctggggctcaaaacccttaccctcagtaagagagggttgaagaagagagcatgatagaccccatctgcaagaccctcacagttttttgcag

SEQ ID NO: 181078 - DNA, 596 bp, Homo sapiens
atatttatcaacaaggcatagaaaaatatcaaaaacaaacacaatccacaaactgtagtgaatattaatttagctttatgaaaaaaagtctatattatccttattttccttaattcattttggtctggcaaaagctttgtcatggcccagcactgccaggaagaaatctgggctttggaaaatcgaaagcatatactacaatttggagatggtggaggctctttaagaaaaatacaaaataaagtgggaaagttggtatttacggagaatgaagaaagaaatgcaacaattcctggagtcttggagacataggtgccyttcttctggtatttcctcaggcactttaccagagacacatagacagattattcctgattgctatctggcttgccctcccaacgtggaacacaacataaaactcgtgtacaagtgaggactccaaggctaaagttccatatgtttcatagtaaatctgtccattgctagcatttggtaacactgcctcatgtcatgctgcttcagagaattatttttcaagaaatgaattctaatgaatctcacaggttaaaggaatatacaatatttgtatcatttgg

SEQ ID NO: 181079 - DNA, 625 bp, Homo sapiens
aattctaatgaatctcacaggttaaaggaatatacaatatttgtatcatttggttcactatctgactgttggctattcttcctcctcccctttcagcttaaaactaccatgcacattttagccttgaaaaatcataattttgaaggctgaaattacagagttacacatacgaggacagtccgttcaaaaccttttgggcagagaattgtcaatcactgacctgtagttaactcagatgctgttgcttcctttcctcgaaaaactcaatgttttatttggtttggtttggtttctaattccccttcagctttyctttacatttgtgttggctcctctttcctgactcctcaacctgttctctagttctggccacgtgaatctattcatttcagtgaattgtttacagctgggtaggtctgcaggtggcagctaatgtattgtacaggtggctgcataaatcctgattcatttcagctggaggaggtagtgttctccctggaatatgtttagttcgcctgggtctagggcagacagccctggtcataccaaagccagtgtttgaggtaagatgatatatggcaaaatcacattagcattttatgtaagatttatttttcaaaacatc

SEQ ID NO: 181080 - DNA, 464 bp, Homo sapiens
gctatgattatccccattttatgggcatgaccaagaggggtaataataatagcagctaatgttacagagggtttcccatgtgccaggcaatgctctcattgcttttgtatattagactacatccacctcataataatcccaggaagcaggccatatttatcccctattcgagagaaaaagatactcaagtaaagacagagtaattgacttgacataacacagttggcaagaggtagatcggcgatttcaaccctgacagtccagccttgaagcccattctgtaatatagtctgtgtggcccccaatgtatatgaaaagtggaawcgtctactctgttctgctggaggagatattagggctagaccatgcccagcgcctccttagcaccttctctctttgtcccattgggaagagggagtctatctgactgcagaccaggggagaaggaggtaagcaggagcact

SEQ ID NO: 181081 - DNA, 434 bp, Homo sapiens
tatcaatatgtgtataaatatcttatgaccgaagaataactatggtaagtcaatctttagctaactttctcaaactatggacctgaaaattcctttaaacataatttatgatctttttcgtcctgaagctcctcctgtttcattaagatggggaagctgggctgagcatctctcaccacaggttatacatktaaaaagaatgtttaagatttcaaatataaaagcacttgctaaatgcacttacaaataaagcactagtatcagtgaaaaggcgacttattcattgactagtagccatcacaaatcatgatattgcgtatgtgtagacacacaaatatgtgtactatatagtgatactttgtcaaaaagcaatcccatcaaaagaaaaatttgtcaatcatttttatcttatctaatgatgtatatttgacaac

SEQ ID NO: 181082 - DNA, 443 bp, Homo sapiens
atgattactactctagaaaattatgtttcaaggaattctcccttaccctaagcctttataggttgaattgtgtctccccaaaagataaattgaagtcctaaccccttctacctatatatatatatatatatatatatatatatatatagtcatatagtcatatatagtcatatatatatagccatttatatatagtcatatattatatattactttacttggaaatagtgttattaaaaatataattgcattaagatgaggtcattagggtgagctgtaatccaatatgactggtggctatgtaasaagaaaacatcgggggaaaaaaaacctatgggaaaaacaccatgtgacaacagagtgagaaactagagttatgcacctgaaagacaaggaataatgaggattggtgaagctagaaagagacaaggaaggatgctacc

SEQ ID NO: 181083 - DNA, 354 bp, Homo sapiens
gcctttataggttgaattgtgtctccccaaaagataaattgaagtcctaaccccttctacctatatatatatatatatatatatatatatatatatagtcatatagtcatatatagtcatatatatatagccatttatatatagtcatatattatatattactttacttggaaatagtgttattaaaaatataattgcattaagatgaggtcattagggtgagctgtaatccaatatgactggtggctatgtaacaagaaaacatcgggggaaaaaaaacmtatgggaaaaacaccatgtgacaacagagtgagaaactagagttatgcacctgaaagacaaggaataatgagg

SEQ ID NO: 181084 - DNA, 564 bp, Homo sapiens
gctaagccacccaatctgtggtacttagttttggccatcctagggaactaatacattatttcatattctatttttactgcagtttgcaggaggagaggtaaaatggagctatcctgataaaaacagctactatgtggtctactggggtgaccttttgcctggcccactaaaacacacacgaaaaatgaaaacacccaactaaacaactatataaaccttccttggacaacattttccttgataacttcacttttacttcctcttaccaactgaccaaataattaactagcattaaaaakaattttatttgcttatttctccattttaaaactctgaccttgccaaatcactctttagcttctctaagtaattaagtatttttctattatatttcagtggctgtttgaacataatagtctgaaacaatggtaaagaatttatctcatttcctaggtaccataggaatggctatcacttattagtacaacttccaggaataaaataacatctgcaaactttttgagcatctcaatatcccaagatgggaggtgggcatagaacatg

SEQ ID NO: 181085 - DNA, 508 bp, Homo sapiens
aaatccatttcatctctgccaccaaaatctccaccaacttacttttatctaaacccaagggaaartgaggggcaacacatttgtggagcagttactattcagaagcaaggcagcatcacacaagaatgtattctgaattcgttgcttataccagtatttctttcctgctgttttctccgtgaattaacttgatagtaggttctggactagtggatagtgggagaattatgaaagcatctgatgaacataaaatttattatgtagaatatatcaaaaatatatgtaaatcactattttattgcttgatatgaccttacgatattgtcaaaatagatagcctatattttgctatagcaggcacttcacttctttaaaacacattttataatatcaacctttcatgcctagttagaagagagatgttctggaacacttgtctagcacacacttatgttggtgcaggcacacacacacacacccaaaataaatctaatgtgtcttggatata

SEQ ID NO: 181086 - DNA, 570 bp, Homo sapiens
taaacataaatacataaataaaataattttaaagtacattaaaggtttagggaaaagtttctggggttgattcacaatgtcttctgagagcatgggacaggcctggatcagcatcgctgccacgcccttgactttgaaggttgactttgaaggaactggcttctatttctgtgcccctccccccactcccggaagtcccacgagtgcctggcwtaacgtaggaaacacgatcgttaccctcctcttttcctgaatgtctcctgccatttcctcacctctcccaagcattcacacaggccaaccactttgtcaccacttgctaagaccagattttgggccatccaatgcctgcagctctgagtccagcatgctctccccaccggacactccttcttcctggtgggactgaggtgctgttgagagtggggatggttctgctgcttctgggtgctctcctggtggggaggctgagctgacccagaaggctccctagagaccccctgttccacccaggctcttccttggtcctgctgctgcccttgtgctctgagctcagggttctaggtgctc

SEQ ID NO: 181087 - DNA, 570 bp, Homo sapiens
taaacataaatacataaataaaataattttaaagtacattaaaggtttagggaaaagtttctggggttgattcacaatgtcttctgagagcatgggacaggcctggatcagcatcgctgccacgcccttgactttgaaggttgactttgaaggaactggcttctatttctgtgcccctccccccactcccggaagtcccacgagtgcctggcataaygtaggaaacacgatcgttaccctcctcttttcctgaatgtctcctgccatttcctcacctctcccaagcattcacacaggccaaccactttgtcaccacttgctaagaccagattttgggccatccaatgcctgcagctctgagtccagcatgctctccccaccggacactccttcttcctggtgggactgaggtgctgttgagagtggggatggttctgctgcttctgggtgctctcctggtggggaggctgagctgacccagaaggctccctagagaccccctgttccacccaggctcttccttggtcctgctgctgcccttgtgctctgagctcagggttctaggtgctc

SEQ ID NO: 181088 - DNA, 599 bp, Homo sapiens
taaaaaatgcaattgacattcccaagaaggcatgccttttagtagcagaatagattatgcagaagaaagagagtgaacttgaagacaggctatttgaaaatacaaagtcagaggagacaaagaaaaaagaatacaaaacagtaaagctcacctgtaagatctagaaaatagcctcaaaaggtcaaaccatagagttcttggccttaaggcctcttcttctttaaagaagaggtaaagaaagagatggggtgggaaatttattcaaagggataataacagaaaactccccaaacctagagaaagatatcaayattcaagtacgagaaggttatagaacaccaagcagattgatcccaaagaagactacatataggaatttaatcaaaccccaaaggtcaagtatcaaaaagggatcctaaaagcagcaagagaaaagaaacaaataacatacaatggtgcttcaatgcatctggtagcagacttttcaatagaaaccttacaggccaggagagagtggcatgacatatttaaagttataaaagaaaaaacactcttaccctagaataatgtattaagtgaaatatcctttaagcatgaat

SEQ ID NO: 181089 - DNA, 386 bp, Homo sapiens
aggaacaaaaaccatatgatcgtttcagttgatactaaaacagaatctgataaagtttaataycctttcatgataaatgtttcgggaagtcagggaccctgaatggggggactggctgaagctgcagcagaagaacataaattgtgaagatttcatggacatttattagttccccaaattaatacttttataatttcttacgactgtctttactgcaatctctgaacataaattgtgaagatttcatggacattgatcacttccccaatcaatactcttgtaatttcctatccctgtctttaatctcttaatcctgtcatcttaagctaaggatgtatgtcacctcaggaccctgtgatgattgtgttatctgtacaaattgtttg

SEQ ID NO: 181090 - DNA, 546 bp, Homo sapiens
ctggctcataccacaaccaactggccacccagttkttcacagcagctaagcccccacaccacctccccttgagagcagctccagctggggaatctctttgtagtgagccagtccccacccccttatccccagctagtgtcagccagttgctacagctaagcaatcagacccacctgtatcctgacataggccaaacccaaggacgctagtgaagtaggtgggttatctctcctttaagtgttcttagacagacactccagtgctggccatgacccattcttgctctcatataactataagatcattcctatgaaatctttcattaggcatttaggcaacagccgttaccagcttaacatgtgcctgcctttctccttcccaaaacttgccctttcatgcttatctcttaagaggagtggagaaagcattaaagttggaatcaagagattgggttccaaaggaacttgagcaagtaacctctaagtgtctctgtttattgtgaagactaaacaagataatgctcattggagtttagaacaatacaca

SEQ ID NO: 181091 - DNA, 444 bp, Homo sapiens
ggaggacaggctacagctgccccatacatgtaatgtgcgtaagagatgaactcttgtttgtaagtcagagattgtttgttactagagaaaaattagttratacatcactaaaattattttttaaaaaacaaagatattttaaagatgtaaaaggaaattttaaagttttttttaaatttgtggatatatagtagttatatataattatgaggtacatgagatattttgatacaggcatacaatgtataataatcacatcagggtaaatggaggtactcatcatcttaagcatttatcctttctttgtattacaaacaactgaattatactcttaattatttcaaaatgtacaaataaattatttttaatattatctctctattgcgctatcaaatattagatcttattcattctatctatgttttcaaatccattaaccatcct

SEQ ID NO: 181092 - DNA, 419 bp, Homo sapiens
cagcattttgtatacaacgatttaaccagtctctaagaagtttcaaacttctcctcatatgcctgtcttctaagccttccgaactcttccaacatctgcccattacccagttccaaagttgtttccatattttcaggtatctttatagcaacatcccactctgtgtaccaattttctgtattaggccatttttgcactgttataaagaaatacctcagccttggyaatttataaagaaaagtggtttaattggcacatagttctacaggacttacaggaggcatgaaattagcctctgctcgccttctgaagagacctcaggaagcttttattcatggcagaagacaaagcaggagtaagcacatcatatggcaagagcaggaacgagagagagtagaggtgaaggtgtcactgcttca

SEQ ID NO: 181093 - DNA, 599 bp, Homo sapiens
tattgttaatttcaattaggttgtatagcattaagagaaaatgtggagtcttaaattatagattctttttaacattatcctcattttatgctttactatataattaaattatatataacattatctaaataaaatgtgctttgtgtaacttctattttatagcccaattaactgtgctcactaggcatatattaaccattcttcaactcctgggtttgtactttcagaaaagaaagcgtatttctttgttttatttttcgtttcctttaaaaatgaaaaaatatgtgttgagtactaattcaaaattaaggtgattagagtaacaatcaccacacatataatacaacttctacatttttagctatataggctaaagtatatgaatgaataaaaatgactactgaatctaagctattcaactgaacggaattgtattcatgaaaaaaatcataagtacagtttggactcaattgtctatgacggragaatgatgagaatgcaatgcttcaatatactaaaaattagaaaatcaatgtaccatatagtttgccaatatttttctcttttacttgtcacagaattctttgtggtgaatatat

SEQ ID NO: 181094 - DNA, 558 bp, Homo sapiens
gggtttccccttatcaaaccatcagatcctgtgagactcattcactatctcgagaacagcacaggaaagacccgcccccataattcagtcacttccccgtggttccccccatgaaacgtggaaattgtgggagttacaattcaagatgagatttgggtggggacatagccaaaccatatcacccagcatccattagctattctgcctggtgctctcccttcctccatcccacaggccccagtgtgtgytgtttccccccatgtgtccatgtgtgctcattgttcgggagctacatgttttctaggtggatatggattctggttaactacaaaaggggcctagctcctcaaactggaaccagtgatagtcaagctcttggaggaacctcagtgggatggaacataacttgcaagtaaattatgtggacatgacttacacaaaagatgtttatgatctgagaatgtcacgtcatttgccctcttctgaacctaatattgcttccaaataactttaacacaaacctttttagatctgtgggttataacaaactcacagaaa

SEQ ID NO: 181095 - DNA, 571 bp, Homo sapiens
tcatagaagggtggaaataataaagatcagagcagamataaatgacatagacactaaaaatcaacaaaattaagagtttgttttttgaaaagataaattgacatttagctagactaaataagaaaaaaagaggaaataaaatagcaggtaaaaaagaagacattacaactacagaaatataaaggatcataggagtctataacaaacaattatatgccaacaaattgaataaccctagaagaaatggataaattgctggacacatacaatctatcaagactgaatcatgaagaaataggaagtctgaatggaccaataatgagtaataaaattgaatcagtaataaaaaatctccaatcaaagaaaagccccaaacttgattgctttactgctgaattctaataaacatttaaagaggagctaataccagttctaatcaaactactccaaaaaaatcgaagaggtagaaattcttcgagactcattctaccaggccagcattattctgttgtcaaacccagacaaggatgcaacaaaaatcaaaatcagggcagtcatgggatacatgtaa

SEQ ID NO: 181096 - DNA, 591 bp, Homo sapiens
gagagtgaatacccaggatccaatagagaagctgcacccagatgtcacctgtcaatcaggamatacttcttctcatggtttgaaatgagtaatgggtgggaaagaggccaggagtgttactctaacagatattcttctacattaaaacatgaagcaaatagaaagatggttcccccattcagtaagattattatctgaggcccaaagagaagagcccaataattattcatgtattaaaatattaagaagccttaaagtcatatacacctttaggacactgaagcttataatctatatttaatatcatagtaatgcctcaaagtactctcttaggcattatactacatgctgttgtttaaaataccacactgtatctccaggattcagaaagaagagaggacaagccactttcacacttattccaaactgctcacaaaataattgctttctttaaatagctaacttttaccttctcataaaaatggtatacactgtcactaacagaaaaatatgactttctcaaaatgtaatataacccaatattcatttcctaatgaaaacttaattcagcatttaggctataaagccact

SEQ ID NO: 181097 - DNA, 591 bp, Homo sapiens
gagagtgaatacccaggatccaatagagaagctgcacccagatgtcacctgtcaatcaggaaatacttcttctcatggtttgaaatgagtaatgggtgggaaagaggccaggagtgttactctaacagatattcttctacattaaaacatgaagcaaatagaaagatggttcccccattcagtaagattattatctgaggcccaaagagaagagcccaataattattcatgtattaaaatattaagaagccttaaagtcatatacacctttaggacaytgaagcttataatctatatttaatatcatagtaatgcctcaaagtactctcttaggcattatactacatgctgttgtttaaaataccacactgtatctccaggattcagaaagaagagaggacaagccactttcacacttattccaaactgctcacaaaataattgctttctttaaatagctaacttttaccttctcataaaaatggtatacactgtcactaacagaaaaatatgactttctcaaaatgtaatataacccaatattcatttcctaatgaaaacttaattcagcatttaggctataaagccact

SEQ ID NO: 181098 - DNA, 507 bp, Homo sapiens
tttttctatgagtgcactaatcccattcatgagagctgtgtccttatgaccttaacccctcaaaggaaagaagagataaacccaagaacatagttgcaaattttaacatccttgtgaaggttaattttatgtataagcttgactgggccactagatattcagatatctagttaaacattatttctgggtgtgtctgtgagtgtttctggaagagatcagcatttgaatcagtgaactgagtaaagaaggttgtcctctccartgtgggtgggcaaccaatctgttgatggcctaactagatgaggccctcaaaggcctcatcccaaatatatcacattggggattaggtttcaacatatgaattaaatcagatagttgataattgtcctggatttttctctcttattcactaactctatctaatcaatcattatgctttatcaactgtgcctcttagatatctctggagtctacttgaaatgctccaccttgaccaccaccaacatg

SEQ ID NO: 181099 - DNA, 420 bp, Homo sapiens
tttggtttggctatatttaaaattaaaatcaactataggtaacaatgacatctcatgagcagttttaggagatctgaatccttgtgacaaaggacttttcaaagtcctatatactgattattattmttctcagcagggaccacaggagagcctcaaacagctctgtaggagacaaaggtcttgtgaaatttaaatctgcactctgtctcttgttatgttaagcaaagaagctctgtctcttgttatgtttaccaataagaatcaagaagtttccaaaaatgtttaactgtttacatccaagttcttgtttaactcctcggaaatgggacattcaatcaacgagtttgacaaatactgtttagtccgtagtaccaatttatttttgaaaaccggaatgtgtttacgtggattgtaaataac

SEQ ID NO: 181100 - DNA, 463 bp, Homo sapiens
cctggcctccctggctcaaatgagtgactcataccacctcaccatctcccctacatcccccacatactggattaagggccttatcactttgttttgttacctcatgtttcctcagcatgtattcaacaaaagtttgctggatgaatgaatgaatgaatgaatgaaattaccaggcatgrgaattcactgattcaaagtgtggagcctgcccctgtgtgggcctcctgcctccatgaagaaacccacagttcccttacctgtgcttgcttcatttcagaattcttgtggaaaataccacgacagggtcactgcagactccttctcctcaggcccaaacagtgtcttggaggtgaggatgctcccaacaggatagtgcatgatgctttttgtggggaaaagaaagagagatcaaattgttactgtgtctgtgtagaaagaagtagacataggagactccattttg

SEQ ID NO: 181101 - DNA, 513 bp, Homo sapiens
ttattgtcataaagtgtttcataatatttgattttgtttcttttcttctatattctaatatatatagaatctgtagtcaatttcctttcccattctggtgttaataatttttgtcatctctcttttgtttctgatcggcatgtgaagaggtttattgattttattaatctcaaagaaacagctttttcttcatagaatttctctgctgtttatttgcttctattttattgatttgtgctcttatatgtattatttctccattttatcattattactatttgtgtttctctatttttaaaggtgaaaccttaaggcattaatttgagactatttttgtactgtaggcatttactgttacaagtttctctcctagcgctgctttaactgcatcccataaattttgatgtatcatgctttcattttgttaaaaagtttytaatttcccttttcatttcttctatgactcattagttatttaacagtgtgcttttagtttctaaattcttggcaatt

SEQ ID NO: 181102 - DNA, 417 bp, Homo sapiens
atagaaagactcaatgtagttataatgtcagctctccccaacttgatatagagtcaatgcaatctcagttcaaatctcagcaagtcattttctatatagggacaaactgattctaaagtgtaaatggaaaagcaaaataaccaggatagtcaacwcaacactggagaagaagaaattcagaggactgatactatctgacttcaagtattactgtaaagctacattagtcacagcagtgtggtattagtgaaagaataaataaataggttaatagaacaaaatagctcagaaatagacccacacaaatgtagttaattgatctttgacaaaggaagaaaggcaattcaatggaagaaataatgaccttttcaacaaatgatgctggaacaactggtcatctatgtgcaaaaaaacacc

SEQ ID NO: 181103 - DNA, 537 bp, Homo sapiens
gcatcctacccagaatccagagttcaggggctgtcccccaaacccactgacacgaccttaaatgcagctgcccctgctcttacaaccccatagctgctgggatttccctccctgactgctcactgaagacatctttcgagtgagttttatttagttgttaatccctcaaggaggtgggtgggagaatgaaaaggtcaataatgaagaggcttggaaggctggcctcttcattagtaacagagaaagaggtcaaaaaggatgatcctttcatcactccctcccttccctaytctcaggtaaatctgtaacttacgctgtggcttagagtctctgtgaatctcttcccctctccttccagagtcaaaaagacattgacaattctgtgcctggaacttgcaataacctgatatgtacagaaatcagcagttgccccctccccctacccagaaggagctcatggtcctgtggcagatagctagctaacacactgttatcagcactgtgacagttatagcatgatgggcctgggagcaagga

SEQ ID NO: 181104 - DNA, 612 bp, Homo sapiens
ctttctaaagagttctagtcactgcagtcagtaaaaaaggcagtttgacataatggttaagattttttctccctggagtcagactgcctgggatcaagttttagttctgctacttgccaactgttatcttggataacttcactacaaaacttcatcwcagcttctttgtttgtgaggcaggacaatgataatagtagcacctatatcctaggcctatgagaatgaggaatacatgagtgaatatgtgtaaagtgctcaggaaagggtctggcccatggtaagcactcaatgactgttatcagtgcctgttgctgaggactaggatgtaagggaaagcaagctggagggagagaacacatgcatgggataatgcctgtgaatgaaactgataactagaaattgggcaatttaaaattatttgttgggatgatttctcccgagcctttctctcttccgtggtatgtgatattttcaagaatatgatttgcttttattttggcctaaggccacctcaagtggtaaaatcccttcatgtcctgccccagcttctttccaattccactctgctcttaggtccaccagctccaatatcatgccagctaactgctactg

SEQ ID NO: 181105 - DNA, 609 bp, Homo sapiens
ctttaaggagcctctgatgggatttaaataaagaagaggaccctgggttttaaggcttggaagccattcagatggattggctgtacatgtgtggcactggggaaagagaaacccatatcccaaggtagaaatgggatggcagactgaaataaaaaggcaagctagcccttctgttagctttctgagcccatagactttccctgtgaactgttgagtaatgagcagagttagagaatagactagcagataacagaagtgtattgctaaggccgggcatggtggcttacacctgtaatcccagcactttaggaggctgaagtgggcagatcacttgaggccaggacttcgagaccagcctggccaacatgatgaaaccctgtctctactaaaaatacaaaaattagccaggtgtggtggcacacacgtgtaataccagctacttgggaggctgaggcacaagaattgcttgaacccaggaggcagaggttgcatacgtacccttctatacttctataccatacttctacactttcatgaaacaacacaaccactctatgtgtctgyctgataagaacagagtatcctctgtacaaaagtagacattctcat

SEQ ID NO: 181106 - DNA, 634 bp, Homo sapiens
tgggcacagggaggggaacgtcatatgctggggccagtcggtgggtgggggtcaaggagagggatagcattaggggaaatacccaatgtagatgacaggttgaagggtgcagcaaaccaccatggcacatatatacgtatgaaacaaaccagcacattctgcacaggtatcacagaacttaaagtataattaaaataaataaataaaaaagaaaaaaatggtgataaagacttgtactctgctgataaatcaattgaggaaaatatgagatttacagttatccaacttttaaagagaactaagaggaagtttaaartggacctataacatcaactgtaagaagtcaactagccttagaagttaaactacagaagattgtaaaagatggtaatgattaatttagcaaaataatggactacttaaaagtttgcaaaatgtagcaaatagtagtgttttctttccatgttactctgcttggagcacaaagaggttattccaaatttgcaccaacaagtaattgtgtgtactgttggctccataataaaggtatacaaaggatttctaaataggcattttacttgatgtggtttggctctgtgtccccgctcaaatctcatcttgaattgtactcctg

SEQ ID NO: 181107 - DNA, 554 bp, Homo sapiens
cctcaaaatttaagagctattagtatgagtagtaattaacctcctagacaggataaagttatgtgagaatgtatgaagtgataaaattttaaaaaaaagatacagttaagtctaacaattttagaatgggcagaggaaggagcctgctagactgagaacaggtcatatgaggggtaggagaagatatagaagagtatggtgtcaaaaaaaaatttacagaagagagagttttcagaagaatttgttttttatggtagcatgtaccataatcgcttttcagtgacttgaagcacagatcagagttcttgctgataccatttccctagagaagcgaccggtttttatcctttcttctaaatttaaatgtttattgttttaatgtctatggagaataattttccccycctgtctaataggtcatcaggtcagtggatatataagtcaccattattaacagcctcactaaaagactacaagatgagtaaaataggttcaagacagctcctatcacagggttattttagtaactgtatgtggaattctggctgttttat

SEQ ID NO: 181108 - DNA, 602 bp, Homo sapiens
ttctctttaagtcaactatgtcccgattttctgcctccttgctacatatttactaaaagaggagggctgaagatatcarctatcggagttgatttatctatttatcctttccactatatcagatttggctcacatattatgacacactgctgttaaggacatatacattaaagattgctatgtcttggaaaattttcacttttattatgatgtagtagtcctttttaaacctgatagttttccttgttctaaaatctactttgtatgaagttaatatagctgctctagcgttcttttgatttatgttgacatggtatatcatttactaactccttatatttaacctgatatttttgtatttaaagttgtttcctgtaaacaacataaagtatcattttttgttttttttttaaaatccaatctgactatctctgtattttaatatgtgtattttgcaccattcccctttaaagcgattattggtatagttggattatctaccaaatcagtaaatattttctatttttagcatttgatctttgtttattttttctcctccttttctgccttctctgttttagttaagcatttcaatatggttc

SEQ ID NO: 181109 - DNA, 522 bp, Homo sapiens
tacttttttgttttgataaattgtcttctgttgcagcaagccttgcctgcaccgttagaaatgctgccagcatatttttcacttttcaataatcctaacaagggcacttgatgttctacaatagatatatttattctttattgaggaaaggggcttgagaataaaatgttaaggagataaaccctaattattgcttatcaagtttagatgaaacagtctcatacttaaagtaaaattggggcttactttttaaagagttagagttgccttcagatgatattatagaaaactagcctcagggttaatatgcataacaaaatcaactctatgtttctgacatcttgtggtactctgggtctgaattgcccttattgtgagaatccrttcatcagagaactttaagtataatggtagcactgccattcgcatttttctcaatgcttttgtgaaggttgtgtccaaggaacctctttgggaatggatgtgcgaggtgaatgtcttaaatctaccacactatttctc

SEQ ID NO: 181110 - DNA, 466 bp, Homo sapiens
taccagggatgcagggatggtttaacatatgcaaatccataaatatgatacaccacataaacaggaataaaaaacaaaaaatcacatgatcatttcaaaagatgcagcaaaattattcaacaaaatccagcatctctttatgaataaaactctcagcaaaattgtcatacaaggggcatamcttaatgtaataaaagccatctatgacaaatccacagccaacataacactgaatgaggaaaggttgaaagcattccctcggagaatgggaataagacaaagatgccccttctcatcactcctcttcaacatagtactggaagttgtagccagagcaatcagacaagagaaagaaataaagaacatctaaatcggtaaagaggaagtcaaactgtcactatttggtgatgatatattcgtttaccttgaaaatcctaaagactcctccagaaagctcctacctacc

SEQ ID NO: 181111 - DNA, 635 bp, Homo sapiens
tagctttaagagttgtagttttctttgccacgaaggcttgccagcacagcctggtgcagtagaagggtccagcttttgcatctagataagtctggattcaaatccagatgcttactwtgtgaacacaagcaagtcatttaattgctttcagtggcctcatctataaactgccagtattaacacttgtctcaaacagctttgtgggattcagttgcagggtttctttacatcaatactattcagatttggggctgtgtaattctttgttgtggtaggggcactgtcctacgcattgtaggatgtttagcaaacactagattcatggcagtctgcagacattgccaaatgttccccaggaggtgggtgggaagtgattacacctggttgagaaccaaattatatatgttataatatttatgatatgcccagaatatagtagatgtttcatgaatctccttctcctttccttccctattggggctaatgaaattccatacttatattttcttggaaaaatacttatatataataataagcaccttcctgtcaatgcttagtctgagatgtgtgatatatttttcagccttacctggctcttcacagcagctttactcagaaaaatttaattatcagta

SEQ ID NO: 181112 - DNA, 440 bp, Homo sapiens
agattttggtgaaacatcaaacagtttttcaaaaagtaaagcatagcaacaatttattatctgaaccaggaaaagcttgaaaataaaagaggagttattaataattacactgcgacaataggcattaaatgggactgtcctaggcaaattgagaggtaaaggaagaagtttcagccagtatgsttaaaatgttgaagttctttttctatatcagttagaaattgtccacagacccaagtctcccaaatatccctcattgtttcttgaagcatttcagtccttcccttaggacccaccagacccaccagaccaaatcttgatccaacaaatgaagggacaatgattaggccctcttatagcactatacattggggtcctggtatccaaaaacagggcaaccatattcccagtttctgccctgatttaactattaatagtgc

SEQ ID NO: 181113 - DNA, 329 bp, Homo sapiens
ttaattggctaacagaatatttttattacatatcactagtttgacaatatttaggttctgcactttatttttaaattacctctatttgcaaatattttagaaggattaaatattcttacagttatttcctaactttaatgaattgaaggactttcacactcttttttttttaccagctgagtaaattagagctagattcgtgacgttggttgcattaattatcactaagyttgatggaaaaatcatcctcctgtggcagatatagcttatcatcctaagtaaacaactaacatttttctctaataaacactgtggcaaatgtagttttc

SEQ ID NO: 181114 - DNA, 598 bp, Homo sapiens
ttcgtgacgttggttgcattaattatcactaagtttgatggaaaaatcatcctcctgtggcagatatagcttatcatcctaagtaaacaactaacatttttctctaataaacactgtggcaaatgtagttttccataacaaatgtgttatgttctatggactgaatgattgtgtccccttaatatttgtataatcaaacccaaatcttcaatgtgatgatatttggaggtgggactttggaaggtaattagtccatgagggttgagctctcacgaatataagacctaagtggctgccacacaggagacatatataatcattacaatataaaaaacagtatgtctagtattgattaaaaatgtatactgcactaaatgcactacatggatcatctcatccrtgctccacagcaatcctatcaatgtggttaaatacctttctcacggtcccacaactaggcttgtcccttaatcatcaggataaactacctaatatgttccatatttacattattgcattactatggacagagagggataggtgaaagacatgaatgtttcaagtacaagcagcaaatccaaaggtggtacaaagtaaa

SEQ ID NO: 181115 - DNA, 573 bp, Homo sapiens
tctggttttagctgagtggaatattttacaccataatacctacactgttcacttatgtaatatatttgagatagcagaattttctggcttaatttaataatttattatattatattacgggtggtgcaattcctggttaatttggggatttccaaagggccttcaaaaaatcacattctccttctacctacctgcatctgaaaaaaatgaagataacatcgaaaattaaacatgagtgccaatatatcacctttataactgatagaggctgaatatgagcatatgactttaatctgatggcaattggccttggtaatactaaacccaagaatcaggcacttctgcacccagtatcagttactaccatactggagtaggcatgctgagtctgcccaggcaggattcacagcatgaaggagtgaagaacatacgttccttgtgaacatttgctttcaagaagggcaaagctaatcagacaacacaaatgtatctctgcaaactttaccagttggataagtcactccaacctctgagtggaggtragactgaagcaggaaacaggagggggatcct

SEQ ID NO: 181116 - DNA, 406 bp, Homo sapiens
ctgcaacatcattttcacatattttctatatattcattagctgatacgatcttctggactcaatgtaggcgcttcttcatcaattaaacactgccagttctctggatttattctcaggtaacctctactgtgcccttattttcatcataagatattatttttagcatccttggtctctgtgtcaacatttcatattttaagacattaattggactttttggaaaataaatcaattttatgatactcaggccacttttactgagatttgttttgtttttccttttaagaaataattccttttaaggagctcaaacaactctataggaaaaaatctaataatccagtcaaaaactcggcaaatgatytgaataaacatttatcagaagatgacatacaaatggcaaac

SEQ ID NO: 181117 - DNA, 475 bp, Homo sapiens
agtctaacgggggctgatgaattatgtgggccaaatttggcctgtcacctgtttttgtaaataaagtcttattttaacagtcatacccattcattatgtattgtttatggctgcttttgtaaaaaattgagtagttttgacaaagagtgactatataacctataaagtctaaaatatttactatctcattctccacaaaraaaacaaaaggttactgatgcctggtctttaattttaaatttacaaatataattatctcactcaaacatttaatgtagtttcccagataatagtaggcagtctcaaggttctagatgagtagtcttgggaagacaactattaaaacacatctctgagtagtacagggaaaaaaaatttcctttagtaaatagacttggcaaaaacaaccttacagtgccaatatgtagtttaaaaatgactttaatttaaaatttgttagctattctgtaagtac

SEQ ID NO: 181118 - DNA, 421 bp, Homo sapiens
tgataagaaactgtcaaactattttacaaaatgactgtatcaattggcattctgaccataatggatgagagtacctgatgttccacatactaacattggatattcccagttttgctttgctttagctatggtgtactagaataagctcacattggctcacaaaaaataactgttaaattatcacaaattttgtgagctaagtgaaattatgttatagcttggaatcaaccaagatttacaccacagaaacaaatgctgttaatccgggttttttaaatgttttctggagacctagctaaacatttaccataccactatgttagcaattgtaataagtatgtaatagtacctcattatcacttcaatttgcattttctgaatgactrtattttcatgggcttatttgtcatatatttttgat

SEQ ID NO: 181119 - DNA, 594 bp, Homo sapiens
tgaattctaccggccaaaactgagttttaagttctrtgtgtttccatcttttctgttacttcctagggagtttttaggggagttaagagatgtcgtttaacagttggccaaccagtttcaattcaaaccaaaatttaagtaaatattttgaagacagtgaaaatacaaaattgaacacacaatttcatgcacattaaaatgcacagaaaaaaagactagaatgaaatagaatgaagagttttctccttaaatgtttaatatatttatgactgtattatatttatagtaggtaaagaaaaatacactataattttaaatatatagggttttttctaaagatctccttttgaagcaaataattcttagtgggagataggggaaactataaatgttgcttgggattacttgtgttatttataagatttccttaacagcaggatttatagggtttaaaggttaggtaaactttgattaaagctgttaactaaatgaacaatatttataagtttcctcttctatgattattgtgaagatgtgaattatgatcaaatcccttataatattcacggcatttgtaaggtttctctcctgcat

SEQ ID NO: 181120 - DNA, 451 bp, Homo sapiens
agcgttgagagcagcgacagagggcgagggggtgggcggcgggacggctggggtcaggatccagctccgctaaagcaaggatttaaccacactcctgtcgcctcttccactctgcaataggggcagtctccagacgcgcagagtggttagtatgttatgatcagctggtttgggaatggctggtattgatgcctcatggaaaaaccaagcgtgactggatcaatcaactgggaaagacaatggagttttaattaattcatattgccttgttttcycagtcattcctggccacctccctaaaagattaaaacctccaagtatcgtacttattttaaaataattctttctccatttaacataaatgacttctattcagtcacttatttgcaaactgttttctgttcctctttatctaagctactctcgccaggtggttcttacctcaagcagc

SEQ ID NO: 181121 - DNA, 594 bp, Homo sapiens
atattttactctagttgataatgagacacagctgtggatatttgccattctcaggcaagttcctcttagccagctttgtttttgtttttttttaaacacagtcttgctctgttgcccagactggagtgcagtggcgccatcttggctcactgcaacctccgcctcccaggtttcaagcaattctcctgtctcagcctcctgagtagctgggattacaggtgcgcatcaccatgcccagttagtttttgtatttttagtagagatggggttttgccatgttggccaggctggtctcaaattactggcctcaagtgatccaaggttgtcagcctcacaaagtgctgggattacaggcrtgagccaccacacccggccttatctaactattctagttgccccccttctgaaatattagtcttctaattcaaagtctatgaagatatagagagtgctctgcatttatatgccattttggtacccttcaggtggctgttttgtggaagcaacaatcattcccttaccttgcttataaagccccaatagcagagcatatgcaaactaagaagagatcctgggcacaatcagaaattattg

SEQ ID NO: 181122 - DNA, 504 bp, Homo sapiens
gaattctacccagttacagtttggggtttagcaggggkgcccggcctagagcctatctgcctccgtccaccacacagtgagcatctgcattttttatgactctggaagctacattttgaaaattattggtcatggaccctccctggcttgaatgtgcagagacccaaagcaccagctttgatgggggtcctgggagcagtcaccagatgcctagagatgtacccagggtaggagtgaagaaactgccttgcatgggaagagagggatagcccaagttcctagtccaagatgttgcagattcttcatagcaaataattgaagaatctaagaatatgactgtggcttgaaggcatagaattttccataattttggttaatgtcacataactaagaacaaaaattggagtcaagtctgacaagacagcaagggatttaggggccaagatcctgatgaaaagggaatctttaagcagccaacctaaaacttggtggttttctcttcaa

SEQ ID NO: 181123 - DNA, 504 bp, Homo sapiens
gaattctacccagttacagtttggggtttagcaggggtgccyggcctagagcctatctgcctccgtccaccacacagtgagcatctgcattttttatgactctggaagctacattttgaaaattattggtcatggaccctccctggcttgaatgtgcagagacccaaagcaccagctttgatgggggtcctgggagcagtcaccagatgcctagagatgtacccagggtaggagtgaagaaactgccttgcatgggaagagagggatagcccaagttcctagtccaagatgttgcagattcttcatagcaaataattgaagaatctaagaatatgactgtggcttgaaggcatagaattttccataattttggttaatgtcacataactaagaacaaaaattggagtcaagtctgacaagacagcaagggatttaggggccaagatcctgatgaaaagggaatctttaagcagccaacctaaaacttggtggttttctcttcaa

SEQ ID NO: 181124 - DNA, 497 bp, Homo sapiens
ggggtttagcaggggtgcccggcctagagcctatctgcctccgtccaccacacagtgagcatctgcattttttatgactctggaagctacattttgaaaattattggtcatggaccctccctggcttgaatgtgcagagacccaaagcaccagctttgatgggggtcctgggagcagtcaccagatgcctagagatgtacccagggyaggagtgaagaaactgccttgcatgggaagagagggatagcccaagttcctagtccaagatgttgcagattcttcatagcaaataattgaagaatctaagaatatgactgtggcttgaaggcatagaattttccataattttggttaatgtcacataactaagaacaaaaattggagtcaagtctgacaagacagcaagggatttaggggccaagatcctgatgaaaagggaatctttaagcagccaacctaaaacttggtggttttctcttcaaacattagcagaattc

SEQ ID NO: 181125 - DNA, 497 bp, Homo sapiens
ggggtttagcaggggtgcccggcctagagcctatctgcctccgtccaccacacagtgagcatctgcattttttatgactctggaagctacattttgaaaattattggtcatggaccctccctggcttgaatgtgcagagacccaaagcaccagctttgatgggggtcctgggagcagtcaccagatgcctagagatgtacccagggtaggagtgaagaaactrccttgcatgggaagagagggatagcccaagttcctagtccaagatgttgcagattcttcatagcaaataattgaagaatctaagaatatgactgtggcttgaaggcatagaattttccataattttggttaatgtcacataactaagaacaaaaattggagtcaagtctgacaagacagcaagggatttaggggccaagatcctgatgaaaagggaatctttaagcagccaacctaaaacttggtggttttctcttcaaacattagcagaattc

SEQ ID NO: 181126 - DNA, 461 bp, Homo sapiens
ggggtttagcaggggtgcccggcctagagcctatctgcctccgtccaccacacagtgagcatctgcattttttatgactctggaagctacattttgaaaattattggtcatggaccctccctggcttgaatgtgcagagacccaaagcaccagctttgatgggggtcctgggagcagtcaccagatgcctagagatgtacccagggtaggagtgaagaaactgccttgcatgggaagagagggatagcccaagttcctagtccaagatgttgcagattcttcatagcaaataattgaagaatctaagaatatgactgtggcttgaaggcatagaattttccataattttggttaatgtcacataactaagaacaaaaattggagtcaagtctgacaagacagcaagggatttaggrgccaagatcctgatgaaaagggaatctttaagcagccaacctaaa

SEQ ID NO: 181127 - DNA, 406 bp, Homo sapiens
aaaatatctattggagttagctacatgaagtcattmaaaactttagcaacaactgtttcaggtgaatgtctggggtaagagctaaattgaaatagggtacggaataggaggtgaggaaatgagaaaaacaagcataaagtactttgagaagtttggctacaaagaagaggtgagaaaaagagtaatagctagaggaggatgtagggttgaatgaaaacttttaaaaatcagtaacgaccagaaaagtttaaaaagctgatggaaaaatgagacagaaatggtgaaaatacaagtgagaaaaggtagggacaaatgaggtccaaagcacaatgggagcggggaccgagggtatttaccttagaaaggaagaaaagagtaatttgcctatgaaattaataaagaattc

SEQ ID NO: 181128 - DNA, 406 bp, Homo sapiens
gaattcaagtgagataaggaatgtctcaaaaatatctattggagttagctacatgaagtcattaaaaactttagcaacaactgtttcaggtgaatgtctggggtaagagctaaattgaaatagggtacggaataggaggtgaggaaatgagaaaaacaagcataaagtactttgagaagtttggctacaaagaagaggtgagaaaaagagtaatagctagaggaggatgtagggttgaatgaaaacttttaaaaatcagtaacgaccagaaaagtttaaaaagctgatggaaaaatgagacagaaatggtgaaaatacaagtgagaaaaggtagggrcaaatgaggtccaaagcacaatgggagcggggaccgagggtatttaccttagaaaggaagaaaagagta

SEQ ID NO: 181129 - DNA, 373 bp, Homo sapiens
aattgcctactaaaatcttgctcctttttaaagaatgttrccatagctctaaaagtcagactcagaggtcactgcctatgagagaagcactttctcccaactagtttcctgagagcccctttgacatctttgttcctcaagctataaattatggggttcaacattggagtcaccgctgtatagaacacagatatcattttatccagttcttttgtagtcttggagtttggtcgcatgtaggtgaatattcctgacccatagaagaggacaacaacaataagatgggagccacaggtggaaaaagccttgagtctcccttccccagactgcatctggataacagtggagataatattccaataagaaccaagaa

SEQ ID NO: 181130 - DNA, 454 bp, Homo sapiens
atacaattgtaaataacacatgagtcaaagaggaaatcaagtgaaattttaaactgcattataataaaaatagcattttaacaaattcagaattattttgaacttttaaggaatggtgattactatttcatttacttcatttgtagagaaaaaaggaaaagtcaattttttaatgaagttgacattaaatgaatacatataaaatagacgtaaagtcaaaataaaatgaaagtgtatagataacagcagtattccattgtaataaaacattgtgatcaagtgascttttaccataagtgcttatttaggccaacattagtaaatttattgaaacaattcttcatattaatagattagaatgggaaaaaatatcttagtaaatgcctcaaaagatacttgataaagttcatatttcattcttgataagtagtttgagtcaaacaggaacttaagt

SEQ ID NO: 181131 - DNA, 459 bp, Homo sapiens
agtaggtttgtggttgaacaattaaatttgccttttaacaagtcartttggtgattttgatatgagtattccatgaatcatattttgagaaatattccccagtaattatctaaaaaataactgcggttataatcaaagccaataaacaatctctgatgggaaacttaacaaaataattttaaagtttacccagatgaatacatgtaaaaatattcagagaaaaaaatctgaaaaatatgaaaaagaattgtggttatggggagggtggggagatttaacctatccaaccttatgatttactattaggataatttatatgcattgtactagtgcagatatcaatgcctcaatggattaaaatagagaaatgactcaaactcaagtatatagaggaacaaatgataaagatgtcatctaaattgatagaagggtgtattatttaaaatggtgttagaatat

SEQ ID NO: 181132 - DNA, 596 bp, Homo sapiens
  misc_feature (1)...(596): n = A,T,C or G
ggtgaagttctagccactgggatggcacaaactgatttcattggtgtaggggaagagcagcaacaatatttggaatggaacactttagaacctggaggtgtggagagtgaggagaacaattcactctctctttttctcctagatccaacaccttggcntggcanaataattatgtggtctgtggagtctaagcagcaactgcagctgacagactgaccctcggcctggtttgtcatgcctgtctatatactatgaaaatagaaaatctcatgtagacatagcaggtcctgaactactttgctgtgcctgatgccatcaatagcaacctcctaatgtggaaycttatcatatgtatacaaacacaatcactagcacaaccttgtttcaattcgatacaaatctgcaagcttctcttgatgctagaacagccttggactataccacgtatgagaatgaggaagctacaactaccagtgagactgcttacctggcttaaccaaactagtgcaatggctaaccaaataaaatataacagcaaatccaaaattagagtgacctctacccctttcagttacatgtttgcatgtggggaagag

SEQ ID NO: 181133 - DNA, 449 bp, Homo sapiens
tctccactgagaagtcccagcctcaatccctgagactgttgtcatatccttataacaacgtatggaatatattgtaatttgctttatatttatttccytgttatcagcattttatgttatttggggacaaaagcatcaccttaatgacttttagttccctcagcatctagttcatattggttgaaaatattggttaagagaattgacatggtctgcatagaggctttggaaggtaattaagaaagtacagctttgtttacagcaatgctaaggacagaaagtgggctagcaaagaccttgggtatataggtcacttagaaattatacgtctgtagttaaatgaagacattggatttaacaacatccattaagtaaaactttgtcttccagttgaataatgatcaatgaaattccagagaatcacatagtaacccatgtcatctacattt

SEQ ID NO: 181134 - DNA, 539 bp, Homo sapiens
acagcattgtgctctcagacatcattccaagwaaataaacaattccgttaatgttattaggagctaagattttctgtacaagagaaaagagacccacatttttaatcatggacattcagaccaggtgcagtggttcatgcctatcatcccagcactttgggaggccaaggtaggagaatagcttgagcccaggagtttgagagcctgaaaaattagatgggcaacatagccagactccgtctcttcaaaaaaaataatttaaaagttagctgggtatggtggtatttgcctgtagtcccagatactcaagaggctgaagtggaaggatttcttgagctcaggagtttgaggctgcaatgagctatgattgtgccaccgcactccagcttgggtaacagagtgagaccctgtctttaacaaacaaaaggaaattcagttaaaatttaaaactctgtgatgttgaatttgcatcagaaatatcaataggaaccaatgtttctttattgttcaaaactacacacttgctagttttgtccatg

SEQ ID NO: 181135 - DNA, 317 bp, Homo sapiens
tgaacataactatgatatcaacttcttaatctgaaaactaataattaaaaacagacaaggattcagctgcctgctttgttggtayttcaggtacaccaaatagcctgtttatgaaggagagttccacctttcagaagactgtcaactcgtaagtgtagaagaggtgattaattcagaacatcaccgctttgtagcccctgtcgtaaaacttggtgcaggtaaggatcaatgatggatgctaacctcatttggagaaaagttaatgggatattatcccacagaaaatacgccattctcaatgggaaaaacatgtttat

SEQ ID NO: 181136 - DNA, 584 bp, Homo sapiens
acatataataaacagcaaaatcctaaggaacaccaaacccttcgtgaaggaaactcataagggaaaatttccagatagcaagatgtactacaaaggtacataatttcacagtgtagtatcaatgcaggaatgagtcaactcatcaggggacacataaaaaaagtcccatgtgacccaatgactgcagatattcttgctgaaatattattgatcacatcacatcttatagagcgaataatgaccttctcaaattgtactgcaacaaatagttgcagatataaacatacaaaattagattcctacctcacaccatacattcatgtsatttcccagtgaattaaggctttattttttaaaggaaaattcaaaagtgtttcagaaaatatataggagaacattactatgaccatgtaatgggaaaatatttattatatatgtcatatcaaacacaaagggtaaacatttttactatattaataatttctgcttatcaaaatattttatatataaaacgaaaaccacaactaagaaaatgcactttcaacacataaaactaatgaatatttcatatgggatgtacaaaa

SEQ ID NO: 181137 - DNA, 538 bp, Homo sapiens
tccgacttgcccatttatgtctgtgagtgtcaaagtgcctgatggcacagtggctgtggtgcactgtttctttctgagaagatctggcatgtgtcacaaacgtgggatgtcaaaggcagacgtctcctggtagcgtgtgtctgcctgtgtccctctgccttaggcagaatgtgagtctgaatttggctggctccagggggctgtctgtgccaccaaggacagagggacagagggacagactgcctcccagcctcctccagcataacaygctggaagtttaccaagtggcatcattagtatacattcactgtgtcttatgactctggctctgactagagactctttcccttctgactttgacccataaagactttgccagtattattagagaaagtctagtcaattagagaggtagaacccatcatctgaaagctgcaggataaccgggttatcactctaagctccgagtgggtggaggtatcatcacacactagtcattaatatattgtagtaagtggaagtaagaatgtcctcgcat

SEQ ID NO: 181138 - DNA, 569 bp, Homo sapiens
agaaaatgaagctcaggcaagagaagtgattcatctaagatcaaacaaataagtcgcaatcctgggatttaagcacaggtctctgtgttcagtgtttagtgctttctccatgataccttggctggcttgtagggaatttatatgttgatacatcaataaagtatgaaaaactcatagccattgatacatacggaaatgaagacggtgcttgttcataggccacygtgtgtttatttcccattccggaaaaagctccacatcatcagtgagcagtgctcttctttgggaagcccaaattaagatagtagttacttaagtcatgaaatcatgacaatgattgcttactgtggttagtctaaaaaactggtcaggaccataatgtacctataatcttaattgaattagatatgttggctgtttacaccacaggtagactcaatgtggaggagtcacatttagtacaacattccaacctctggatgtcacttggcctaatcagatgcttttatccaaaagaaatgactacaatgctatatcacatggtcttttccaaagtatgtctacataca

SEQ ID NO: 181139 - DNA, 569 bp, Homo sapiens
agaaaatgaagctcaggcaagagaagtgattcatctaagatcaaacaaataagtcgcaatcctgggatttaagcacaggtctctgtgttcagtgtttagtgctttctccatgataccttggctggcttgtagggaatttatatgttgatacatcaataaagtatgaaaaactcatagccattgatacatacggaaatgaagacggtgcttgttcataggccaccgtgtgtttatttcccattccggaaaaagctccacatcatcagtgagcagtgctcttctttgggaagcccaaattaagatagtagttacttaagtcatgaaatcatgacaatgattgcttactgtggttagtctaaaaaactggtcaggaccataatgtacctataatcttaattgaattagatrtgttggctgtttacaccacaggtagactcaatgtggaggagtcacatttagtacaacattccaacctctggatgtcacttggcctaatcagatgcttttatccaaaagaaatgactacaatgctatatcacatggtcttttccaaagtatgtctacataca

SEQ ID NO: 181140 - DNA, 569 bp, Homo sapiens
agaaaatgaagctcaggcaagagaagtgattcatctaagatcaaacaaataagtcgcaatcctgggatttaagcacaggtctctgtgttcagtgtttagtgctttctccatgataccttggctggcttgtagggaatttatatgttgatacatcaataaagtatgaaaaactcatagccattgatacatacggaaatgaagacggtgcttgttcataggccaccgtgtgtttatttcccattccggaaaaagctccacatcatcagtgagcagtgctcttctttgggaagcccaaattaagatagtagttacttaagtcatgaaatcatgacaatgattgcttactgtggttagtctaaaaaactggtcaggaccataatgtacctataatcttaattgaattagatatgttggctgtttacaccacaggtagactcaatgtggaggagtcacatttagtacaacattccaacctctggatgycacttggcctaatcagatgcttttatccaaaagaaatgactacaatgctatatcacatggtcttttccaaagtatgtctacataca

SEQ ID NO: 181141 - DNA, 578 bp, Homo sapiens
agtcaaaactatatgctagccgggtccggtagctcatgcttgtaatcccagcactttgggaggccaaggcaggtggatcacgaggtcaagagttcgagaccagcctggccaacatggtgaaaccccatctctactaagaatacaaaaattggccgggcrtggtgttagacaccagtaatcccagctactcgggaggctgaggcaggagaattgcttgaacccagcaggtagaggttgcagtgagccgagatcataccactgcactccagcctgggcgacagagcaagactccatcagagaaaaaaacgaacaaacaaaagctatgtgctaggcagggtcctatatgtgcattattcacttcatcctaacaataaacctgtaagataagtatttcctccattttacaaatgaaaacctttcattttgtaaatgaaggccccaaacaaacaagcaattatattaagtggtagtgccaagggtcagatgcaaatagcttaactccaaagctgacactcttaacagcatcgcaggtaatgcctctacacctagtgagtaatcgaagtctgtctgtttctaat

SEQ ID NO: 181142 - DNA, 500 bp, Homo sapiens
atcgtcgggatttctggtccagatgggctttgttttgttgagttcttcttggtcgatgtacttttccttagtcttcttcttcttcttgtcaccatccttcttttcttcttcctcatcagaaccaacatcttcaatttcaggtttgtctttggactctttctcttctttttctttttcttcttctttgtcttccttttcttcagyctcatcgtcgctgacttctttatcacattccttctccacaaaaagagtaatgggatatccaataagctgagaatgtttcttcacaatctcctttattctttgttcctccaagtactcagtttggtcttctttcaggtgtaggataacctttgttccacgacccatacgttcacctgtgtctgtcctcactgtgaatgatccccctgctgaggactcccaggcgtactgctcatcatcattatgtttggtgatcacagttactttctcagcaaccaaataagcagaataaaaactaa

SEQ ID NO: 181143 - DNA, 600 bp, Homo sapiens
ttgttgcccaaaacttagtcataaggccaaatctagctcctacatagggtgggaaatgtgaacttgacatgcatgtgcctagtacgttaattctattatcaaggaagaagagatgcttactggggaaaagaagtaatctttgtgacagttaacaatttcttgagcactatttcaagtcaggagtggtggtaggcaattcaggtactttgcagccctgtgagccttttattttattattttattttattttattttattttattttattttattttattttattttattttattttattttagatggagtttcgctcttgttgcacaggctggagtgcaaaggcacgatctcggctcattgcagccttcgcctcccaggttcaagtgattctcctccctcagcctcctgagtagctgggattacaggcaccaaccaccacgcccgactaatttttgtatttttagtagacacggggttttgccatattggccaggctggtctcaaactcctagcctcaggtgatccacctagcttggcctcccaaagtgttgggattacaggygtgaaccaccgcacctggcctgtgagcttattattatc

SEQ ID NO: 181144 - DNA, 564 bp, Homo sapiens
ccttcacccagctttcccacaaattacatgatagtgcaatgatcaaaaccaagacactaacaaatatgcatacaatactattaactggagttctatttcaaaattcacaatttcctccatattgagtgtgtttgtttctggtcctagatgcaatctgggatcctatgttgcgttaaattgtcactctttcatcctccagtctttgaaaatttctgtttttttcttgcctttaataatcttttgatgattactggttagttattttgtagaacgccatcaatttgggtttgtcwgttttcccatgatgaaattgaggttatgcttttttttttttatcctttttttagatggagtttcgctcttgttgcccaggctggagtgcaatggcacgatctcagctcactgcaacctccgcctcccgggttcaagcgattctcccaagtactgaggtagtgcttctttcagtgccttatccacatgatacgtaatgttgtcttattggtgatgttggccttgatcacttgatttaaagtggcacttaccaggtttcttcactataacatt

SEQ ID NO: 181145 - DNA, 564 bp, Homo sapiens
ccttcacccagctttcccacaaattacatgatagtgcaatgatcaaaaccaagacactaacaaatatgcatacaatactattaactggagttctatttcaaaattcacaatttcctccatattgagtgtgtttgtttctggtcctagatgcaatctgggatcctatgttgcgttaaattgtcactctttcatcctccagtctttgaaaatttctgtttttttcttgcctttaataatcttttgatgattactggttagttattttgtagaacgccatcaatttgggtttgtcagttttcccatgatgaaattgaggttatkcttttttttttttatcctttttttagatggagtttcgctcttgttgcccaggctggagtgcaatggcacgatctcagctcactgcaacctccgcctcccgggttcaagcgattctcccaagtactgaggtagtgcttctttcagtgccttatccacatgatacgtaatgttgtcttattggtgatgttggccttgatcacttgatttaaagtggcacttaccaggtttcttcactataacatt

SEQ ID NO: 181146 - DNA, 445 bp, Homo sapiens
attcactccccacagagagtcttgagataggctgtatgatggagtaaaaaacagacttggctccgagtcagactctaactctagtcctcttttgtaacttaccatagttttgtccttgaacatattattcagtttctgcatttgctgaggactttctatgtgccaacactgtactgaatgcttaacatggcttattttatttaatcttgcagtgatccatatagactagaaattactatcctcactatacagaaaatggaactgaagagcagaggaatctgttaacttgcagaaggtcacatcggcaataaagggtaaagctcccatttgaacccagttctgccagaccctggagactatgttacyaatcaccatggcacctggctcccacttgctatttctgagctcatcttccccatctgaaaaaaaaaaataacccatgcct

SEQ ID NO: 181147 - DNA, 582 bp, Homo sapiens
cccatcgaatttcccgggagaagcagttgaaggggggagaaaaccttttataacccacagccgtaaaactcaagtctttcctacaaaacaaaacacagtaaagtgttttaggaccgccaaggcttcagaactcatggtacagtggaacaaaaatagaggcagcagagaggaaaatatgaggttgctgaacccttggggcaggaatcctatctttgcttgcactgtgtgrgactgggctcgtgtgcagccaagttgggcagaaagaaacaacaacaagagtcataaaaggaacaaaaataatgggctgctcctgttgatgccaatgggtgttttgcctgaatggaaaacaaccctgggaacagaatattgaaactagtgctcaagatctacactcattagggcccaaagcttactccacctggagattcagcagcactgtgtctactgtgactgttcagggtcaagggccttgtaggactcaagctaggcctgaaagctcataaattgtgtgttttccatcaaaaagctagtcactttggttggtaaaactgttgatatggtttggctgtgttcccacccaac

SEQ ID NO: 181148 - DNA, 472 bp, Homo sapiens
gggtgatctttgtggtttattgaattgctggatgaagcaatcaccacattgcatttaagacaatctgatggcagctaataaaatacattgaggagatgaaaggggatgtctggagaaaaggagcttttctgataaggcaacaaataaaactctgagtccagttgaatatgatgagtatggaaagtaaaatataaatcccaaataatgcatttacttacctagtggtggtttgttgtgaatagtgaagataaaattgttttgaaatttttaattagaatgactgtaaaattgccagagaacttagattttagctggcttcagatagtagagtagatttgttttcaagtatytgaactttgaggtagaactctgggttgcagattaggagatagaagagtggagagtttgatcttatcacaaaggaaagaatgattaaaactttaataaatcatggtaattgatgatcaaggaa

SEQ ID NO: 181149 - DNA, 546 bp, Homo sapiens
atttccagtgacctgtctttgagttcactgatgccttttttgcttaatccatcctgcattagatttttctattcattttttaacttcagttattatattcttcagtactatgatttctgtttggtactttttatagtttgtctctttgttgaaattctcagtttgttgatattttgctcccctaacctcagtgagtatttttatgacagttcttttgaattctttgttgggtaaatcacatatctccatatccttatttttagcatctaaagatttatcttgttctttcatttggaacatatttccctttttatttttattgactctcagtgttggtttctgtttattagatgagacagtagcatccctcagtccttttagactggcctcttgtaaaagaagaacctcaccaatccatccagtcagagatcctaaagtgcctctcaaatctctgtgtttgtccaaactgctgactctgtttttagyggccatctggagacaagagtatgccaagtcttgtcagtacctcagaatgggtaagctaga

SEQ ID NO: 181150 - DNA, 441 bp, Homo sapiens
ttttagactggcctcttgtaaaagaagaacctcaccaatccatccagtcagagatcctaaagtgcctctcaaatctctgtgtttgtccaaactgctgactctgtttttagtggccatctggagacaagagtatgccaagtcttgtcagtacctcagaatgggtaagctagaagccagtgtctctagatgcagctggaaaggttggggtgttagatgtttgttctagtttcttctatcctcaggataaagctgacagcagaagacaatctctcaccttcyctacactaagcctggaagaagatctgtggaaaatgcctgcattctccttcctactataccctttgattctggcagaatattttctgtaaatgggtcctctgaatgtgtccacctctttgttttctgtgatatagggagactcaagcatgcagagcctcatca

SEQ ID NO: 181151 - DNA, 509 bp, Homo sapiens
gtcagtggagagtttagagtgaatctgtgggtacctcagtggctttaaaactaaatccctcttgtcaaaaataccttaatccatgggatccaaagacccttcaagaactttattaatgaggacttgagaatcgaccaaatgtttcagtagagtgggttttcacgtttctctgcccatctaaagagcttccaggcatgaagcttggaatcaggacaacaccaatcaatcgccyttacctcagaaaaataaaaacatcatgcctgaaaaatgcactagactaactactgagccacttgcaatttcagtatttattcaggttaggaaaaaattttccaccaaatttaaaagacttagctgacatacatttgctaaaataatcaagatttgaaaacctgatgttttaaagtagacgtgaaaagaagaatccgtttacatgagtgcttaagtatcatctttacataggtgtctactgtaacttcttccctcaacaatttaagatgatgttttct

SEQ ID NO: 181152 - DNA, 509 bp, Homo sapiens
gtcagtggagagtttagagtgaatctgtgggtacctcagtggctttaaaactaaatccctcttgtcaaaaataccttaatccatgggatccaaagacccttcaagaactttattaatgaggacttgagaatcgaccaaatgtttcagtagagtgggttttcacgtttctctgcccatctaaagagcttccaggcatgaagcttggaatcaggacaacaccaatcaatcgcctttacctcagaaaaataaaaacatcatgcctgaaaaatgcactagactaactactragccacttgcaatttcagtatttattcaggttaggaaaaaattttccaccaaatttaaaagacttagctgacatacatttgctaaaataatcaagatttgaaaacctgatgttttaaagtagacgtgaaaagaagaatccgtttacatgagtgcttaagtatcatctttacataggtgtctactgtaacttcttccctcaacaatttaagatgatgttttct

SEQ ID NO: 181153 - DNA, 609 bp, Homo sapiens
gccatgaaaaaatgcagatattaaattgttcaaaaatatataataagacactgtattcttgtttgactgaagtaaattccttttttatcattgaaggataaaaatgtagaagaaagtgaaaaatgctaatttcactgtgttcaaatttggatcatgtttctggcttttgttaccaatttttttcaccctaaaargaaaacatgtcagttatttaaagttccagccactggctatttgttttacctggacttaatatgaattccattgaagggcactgtcttttgcaacacagagatttctttgtgcaatctctgtccctgagaaaccctgtgtactaggacaatgatgaggttttacaacctgagcctgataatccagaccgactcctgtctggaatccatccaataggttactctgtccaagatgaagtatactctagtttttcatgaccattgttttgaagagctagatgaagtgaaaattaagtgaagccaaaaaagaaaagagaatgaattaaatttataacgtttagcttggaaatataatctatttgagatagaggagattttcatttgtgcttctctgcatgtatgtgcgtgggagtgagtg

SEQ ID NO: 181154 - DNA, 609 bp, Homo sapiens
gccatgaaaaaatgcagatattaaattgttcaaaaatatataataagacactgtattcttgtttgactgaagtaaattccttttttatcattgaaggataaaaatgtagaagaaagtgaaaaatgctaatttcactgtgttcaaatttggatcatgtttctggcttttgttaccaatttttttcaccctaaaaagaaaacatgtcagttatttaaagttccagccactggctrtttgttttacctggacttaatatgaattccattgaagggcactgtcttttgcaacacagagatttctttgtgcaatctctgtccctgagaaaccctgtgtactaggacaatgatgaggttttacaacctgagcctgataatccagaccgactcctgtctggaatccatccaataggttactctgtccaagatgaagtatactctagtttttcatgaccattgttttgaagagctagatgaagtgaaaattaagtgaagccaaaaaagaaaagagaatgaattaaatttataacgtttagcttggaaatataatctatttgagatagaggagattttcatttgtgcttctctgcatgtatgtgcgtgggagtgagtg

SEQ ID NO: 181155 - DNA, 524 bp, Homo sapiens
tagctacatctgggggtgttattaaaaaaaacaacaaaaagaaagaagaaaaggggaaacaaccttaaaatttaattcctgtcttataggaggaagacaacgggtctgctaagcagataataaaggtatcaaaaatataaatgatgagtaacatttttcatgcatttacattgttctagattttattctaaaaattctgtgtataattaatgtgattctcttattttatgatttagatacagtcattagtatacattatgtagaccataaactaatacaaaggaaagtaaagaaatttgccaaaggtcatgtaactggaaagaggtagggccagtccctgagcctggcaagctggttccagagtccacacgcatattcatgatgttacaatagctgtcaggcctggagrctaccttggattgctccttgattcagaagccaaaggaggagagagcttcagaaaaagaggaagtggttgtctaccttgtgctgaagagttttttcagagaggttaaaataggcga

SEQ ID NO: 181156 - DNA, 427 bp, Homo sapiens
ttgaattctgagagcatcatcaaatgcaaaagttttatacattagcacacacagtattgaagatttgagatctgccacaatgagaggaaaattaaatgataaaacatgttgaaatgatttatctcccttgaagtcaaagcaaacaaaaatttttaagatatattttaaagacaaaacaccatgttgccctgacgtcaataatggttccatgaacatgagtgtgaaatatcacttttccaagtgggccaggatttattgcattrgaagggaatagagatcatttgttcacctccttcttacaaatgggagaacagagtcagaggggtgaagggtttgctggaggccacacaacttgaacatgttacagtcagcacactttgataatccttgctttttgtaccactactgtaagtaaattaatgatcag

SEQ ID NO: 181157 - DNA, 395 bp, Homo sapiens
tgagaattcacccaaagaaataatcataaatttacaatgataaaggttcattttaaattgatctaggtagtaaaacacagtatatataaagattaagatgtataaaatttaagattctttatgttaagaataaaaaattgtagataaatgcattaattttttattatgtactaatctaaattttgagacgaaatttttttttcagtgtagaatcatagcccagctcactaatcaatcaggtataaggtaaatttaaaatagtttcagccatataaaatatttgtctgcwtgtaggtcttctcaggaagctgctagatatgtgcaccaccaaaaaaaaaaaaaaaaaagggagtaaaccaagacaggacaacatcaaattgaggaagcagggaacc

SEQ ID NO: 181158 - DNA, 566 bp, Homo sapiens
tactaaattataattgagctttatagtaattgctggtaaaaatcatttcctgttttgaaaaagaagtacaaaaatctaaaattcttgctaatcgctgttaaaacatctcagctaagacctagaacttaaatgtcaggatgaagagtagtttagtgagatttttttaaatttatttttagttgacacttaataattgtacacatttataggatacggaatgcttccttacatgtataccaagtgtaatgacaaaatcagggtaattagcatagcgatgaccacaaacatttatcatttctttgtgttgtgaacattcaaaatcctttattctagcttcttgaaactatacaacaaattatagttaactatattcaccctacaatgctgcmgaacaccagagctcattccttgtacctagctgtaattttgtatcactttaccaactaataccagttagagtagtttagttttgaagctgagtccaggtaacagaattgtggatcaaaataaatagtttgatttgagaaggaaatatctgtgatgactcaacacaattccaatgcttg

SEQ ID NO: 181159 - DNA, 618 bp, Homo sapiens
catacatgcatacccatatatacaggtacaaatgtgaatacacagttttgaaatcataagtcataccactacctccagttacaattcaatgccacaagactctttctacatttaatattcaaatgtcatttctttggttggctcccaactacactaaaatgttgactcatttgcttactcttgaaaacttctaaaattatttcagaattgttayacccctaccaatgcataaaacatatttacttacaaggacaccaggatttttgaattaaggcccactctaacctactgatactttaatctttgacttctagtgcctggaactgtgagaagtaaatttctattgtttaagcaaaaaaaaaaccccacaatttgatacacttccatgtcataccatactccccaagatactagagaaagatgagcaaattaaacagaaaggagaaaaccataaagataaaagtaaaatcaatgaaatggaaaatagacaatagagaaaagcaataaaatgaaaaactaattcttgggaaacattaaaaaaattgataaatctccagccagactagtcaagaataaaacagaaaatagaaaagttatgaatatcaggaataaaatagt

SEQ ID NO: 181160 - DNA, 618 bp, Homo sapiens
catacatgcatacccatatatacaggtacaaatgtgaatacacagttttgaaatcataagtcataccactacctccagttacaattcaatgccacaagactctttctacatttaatattcaaatgtcatttctttggttggctcccaactacactaaaatgttgactcatttgcttactcttgaaaacttctaaaattatttcagaattgttacrcccctaccaatgcataaaacatatttacttacaaggacaccaggatttttgaattaaggcccactctaacctactgatactttaatctttgacttctagtgcctggaactgtgagaagtaaatttctattgtttaagcaaaaaaaaaaccccacaatttgatacacttccatgtcataccatactccccaagatactagagaaagatgagcaaattaaacagaaaggagaaaaccataaagataaaagtaaaatcaatgaaatggaaaatagacaatagagaaaagcaataaaatgaaaaactaattcttgggaaacattaaaaaaattgataaatctccagccagactagtcaagaataaaacagaaaatagaaaagttatgaatatcaggaataaaatagt

SEQ ID NO: 181161 - DNA, 618 bp, Homo sapiens
catacatgcatacccatatatacaggtacaaatgtgaatacacagttttgaaatcataagtcataccactacctccagttacaattcaatgccacaagactctttctacatttaatattcaaatgtcatttctttggttggctcccaactacactaaaatgttgactcatttgcttactcttgaaaacttctaaaattatttcagaattgttacacccctaccaatgcataaaacatatttacttacaaggacaccaggatttttgaattaaggcccactctaacctactgatactttaatctttgacttctagtgcctggaactgtgagaagtaaatttctattgtttaagcaaaaaaaaaaccccacaatttgatacacttccatgtcataccatactccccaagatactagagaaagatgagcaaattaaacagaaaggagraaaccataaagataaaagtaaaatcaatgaaatggaaaatagacaatagagaaaagcaataaaatgaaaaactaattcttgggaaacattaaaaaaattgataaatctccagccagactagtcaagaataaaacagaaaatagaaaagttatgaatatcaggaataaaatagt

SEQ ID NO: 181162 - DNA, 618 bp, Homo sapiens
catacatgcatacccatatatacaggtacaaatgtgaatacacagttttgaaatcataagtcataccactacctccagttacaattcaatgccacaagactctttctacatttaatattcaaatgtcatttctttggttggctcccaactacactaaaatgttgactcatttgcttactcttgaaaacttctaaaattatttcagaattgttacacccctaccaatgcataaaacatatttacttacaaggacaccaggatttttgaattaaggcccactctaacctactgatactttaatctttgacttctagtgcctggaactgtgagaagtaaatttctattgtttaagcaaaaaaaaaaccccacaatttgatacacttccatgtcataccatactccccaagatactagagaaagatgagcaaattaaacagaaaggagaaaaccataaagataaaagtaaaatcaatgaaatggaaaatagacaatagagaaaagcaataaaatgaaaaactaattcttgggaaacattaaaaaaattgataaatctccagccagactagtcaagaataaaacagaaaatrgaaaagttatgaatatcaggaataaaatagt

SEQ ID NO: 181163 - DNA, 566 bp, Homo sapiens
gatccatctcttctgccccgaggcatctgtctcatttgcatcatgctgggatccctggagcagcaagtgatctggttcccagcacactgattaaacagaaaattaatgcacatggcaaaagctggggctcctacttccaggcacttgtaaaaattacaagacacttagtttttaaaggaaagccacttgccaccactctcccccacatctcccagaggaagggggcgatgttacagaygctttcccagtgatctgctctcgtgccatcttttactacctgtttcaaactaaaatggttttattatatataatatcattgttttcccaccccacagaattaaggcggcagcaggtgtgaagataacggcagtgagagtcagcagtgaggaccaatgggcagtccaggaggaaattgataatggcagcactcagacgtcggccaccctcacctgcatgggccatcgcccggacacgcagagcaggtaagcatggagatccccaaggcacctccgcagtggggaggaggagagtggctgccagagctgatagcaaaataatgtgcgtgt

SEQ ID NO: 181164 - DNA, 512 bp, Homo sapiens
ttttgggtaggtgcctagcagtggaattgctggttcatatggtaattctatgtgtaatttattgaggaactgccaaactgtttttcacagtggctgcaccattttgcattcctaccagcgatgtaagagggtttccatttctccacatgctcatatggataaagaaaaacgtagcgtctccatatattgggatgttattcagccaagaaaaggaatgaagcagcaacacaggctacaacatggaagaaccttgaaaacatgacgctgagtgaaagaagccagacatcaagggccacatggtgtgtgattccatatataygaaatgtccagaataagcaaatctatagagacggacagcagagtgccaggagcagggctaagggggagtggctgcttaatgaatatgggttttcctcttggggtgacgaaaacgttctggaggtgggtggtgatgactgcacagcattgtgaatgcacttaatgccgttgacttgcttgctttacaatggtca

SEQ ID NO: 181165 - DNA, 512 bp, Homo sapiens
ttttgggtaggtgcctagcagtggaattgctggttcatatggtaattctatgtgtaatttattgaggaactgccaaactgtttttcacagtggctgcaccattttgcattcctaccagcgatgtaagagggtttccatttctccacatgctcatatggataaagaaaaacgtagcgtctccatatattgggatgttattcagccaagaaaaggaatgaagcagcaacacaggctacaacatggaagaaccttgaaaacatgacgctgagtgaaagaagccagacatcaagggccacatggtgtgtgattccatatatatgaaatgtccagaataagcaaatctatagagacggacagcagagtgccaggagcagggctaagggggagtggctgcttaatgaatatgggttttcctcttggggtgacgaaaacgttctggargtgggtggtgatgactgcacagcattgtgaatgcacttaatgccgttgacttgcttgctttacaatggtca

SEQ ID NO: 181166 - DNA, 529 bp, Homo sapiens
ggacccttgaacacagtaactcaaatgggttgagttgtttgtcctctggttgtttattaatgaaagaatagttgggtctcttatctgtgtgcagtggacagactttgcccttgcaggaaggtgaatcaaggcagtgccaactggagcttggtcttcttggtcttttgtgtgtccctacatagaccagaagccccacttcacatgtcacaggtctgtagccaacaaagtcttccctccttctgtaggttgaaaagctrttgtggataccttttatgggaacagcattggaaacagcttttgagatgtgcaaccccagtttgtaaataccacctaccttgttggtagtcatttattgagctgctgtaccaggctccaagtaggatattggaggtttaaaataagaaatggtggtgaattttaagaagcttgttactgagatggataaacatctgtctccatcttccatcctcctgtttattaatttatccgttatccatccatccatccatccttaactaacagcaaaagg

SEQ ID NO: 181167 - DNA, 529 bp, Homo sapiens
ggacccttgaacacagtaactcaaatgggttgagttgtttgtcctctggttgtttattaatgaaagaatagttgggtctcttatctgtgtgcagtggacagactttgcccttgcaggaaggtgaatcaaggcagtgccaactggagcttggtcttcttggtcttttgtgtgtccctacatagaccagaagccccacttcacatgtcacaggtctgtagccaacaaagtcttccctccttctgtaggttgaaaagctattgtggataccttttatgggaacagcattggaaacagcttttgagatgtgcaaccccagtttgtaaataccacctaccttgttggtagtcatttattgagctgctgtaccaggctccaagtaggatattggaggtttaaaataagaaatggtggtgaattttaagaagcttgttactgagatggakaaacatctgtctccatcttccatcctcctgtttattaatttatccgttatccatccatccatccatccttaactaacagcaaaagg

SEQ ID NO: 181168 - DNA, 392 bp, Homo sapiens
tgagatgtttttataagtgatttcattttggagcgtattgattgctgaggaaatgaattacagctgtcagcactagttatttagctgacttcttcacacyttttagtaaactgatgccataaattttgttactatgaaagtaaaaaaaaaattttatcacaaaaaaatgagggtaatgataagaaaagagtgactcttaagaagatgaaataggaaaattgttattttttctctcctgggagcaattccaaaagtaataatggtttgcaaattgatcagttctatgttgctcgtgtggaagagtattgcataaaattaagcactagacaagtgttcttcatatcagtatcgttccacagcaaatgtcattagtacaaaatagaataaatggg

SEQ ID NO: 181169 - DNA, 625 bp, Homo sapiens
gtcagcactagttatttagctgacttcttcacaccttttagtaaactgatgccataaattttgttactatgaaagtaaaaaaaaaattttatcacaaaaaaatgagggtaatgataagaaaagagtgactcttaagaagatgaaataggaaaattgttattttttctctcctgggagcaattccaaaagtaataatggtttgcaaattgatcagttctatgttgctcktgtggaagagtattgcataaaattaagcactagacaagtgttcttcatatcagtatcgttccacagcaaatgtcattagtacaaaatagaataaatgggacacagcataaacaaaaccctctgattctatgacaccatgatttggccaatcatgaaaaaatatttatattcttttaaagtaaagcagagctagagaaagaaaagcaaaagtttctttgaaagaggagccagcctgaagttgttataaattaaaacttcaccatattttagaaataaagctattgtagcatgagaaaattgactattcttgaacttccctcaaaatcttgaaacagagtatggggacaaccaagcttatttactattttaaaaacatgttggtagaacagaagtgaat

SEQ ID NO: 181170 - DNA, 625 bp, Homo sapiens
gtcagcactagttatttagctgacttcttcacaccttttagtaaactgatgccataaattttgttactatgaaagtaaaaaaaaaattttatcacaaaaaaatgagggtaatgataagaaaagagtgactcttaagaagatgaaataggaaaattgttattttttctctcctgggagcaattccaaaagtaataatggtttgcaaattgatcagttctatgttgctcgtgtggaagagtattgcataaaattaagcactagacaagtgttcttcatatcagtatcgttccacagcaaatgtcattagtacaaaatagaataaatgggacacagcataaacaaaaccctctgattctatgacaccatgatttggccaatcatgaaaaaatatttatattcttttaaagtaaagcagagctagagaaagaaaagcaaaagtttctttgaaagaggagccagcctgaagttgttataaattaaaacttcaccatattttagaaataaagctattgtagcatgagaaaattgaytattcttgaacttccctcaaaatcttgaaacagagtatggggacaaccaagcttatttactattttaaaaacatgttggtagaacagaagtgaat

SEQ ID NO: 181171 - DNA, 588 bp, Homo sapiens
ttattaaaaacagtaatatttttgctgcaaatggtataaatgtccacattcatttggatagagactatacataggttcatatcagttcaggttatatatcaggctaacatgtaatgtcaaataattaaattttaaaaattgatattcagttctcaggattttagaattgcacataaagaatggtagacctgcatgatctttttccccacagagtttactaggtctactctcagtgtaatgtcatgctctatctagcacagttgtsgatctgatcttatcctctattactgtacaaggtctcaagggaaggaaatgtgtctttatctttgtatgctgtgcaggacctagaatgttcttaaatcttactgggtgtgtttggcatactttaaaaacatgaaaaaaatcacaccaacgtttcaaatatgtggatggtgctaaaaataactgtcaatatagcaacatgacaatattacttttcatcatgattaatatgcattcagtcactgtcgaagcatgtttcttcggaaagaagcagcctaaattatgctgtgtcaattccatgagacctggtaaagaatttaactcatt

SEQ ID NO: 181172 - DNA, 588 bp, Homo sapiens
ttattaaaaacagtaatatttttgctgcaaatggtataaatgtccacattcatttggatagagactatacataggttcatatcagttcaggttatatatcaggctaacatgtaatgtcaaataattaaattttaaaaattgatattcagttctcaggattttagaattgcacataaagaatggtagacctgcatgatctttttccccacagagtttactaggtctactctcagtgtaatgtcatgctctatctagcacagttgtcsatctgatcttatcctctattactgtacaaggtctcaagggaaggaaatgtgtctttatctttgtatgctgtgcaggacctagaatgttcttaaatcttactgggtgtgtttggcatactttaaaaacatgaaaaaaatcacaccaacgtttcaaatatgtggatggtgctaaaaataactgtcaatatagcaacatgacaatattacttttcatcatgattaatatgcattcagtcactgtcgaagcatgtttcttcggaaagaagcagcctaaattatgctgtgtcaattccatgagacctggtaaagaatttaactcatt

SEQ ID NO: 181173 - DNA, 617 bp, Homo sapiens
tttttttaattgtattatttaattaagtttagttttgctttaaaatcgacacagagcttttgatgtgaaaaactaatacaatgcaaggaagattcaattactggttttgggatgaaagtttatgttttctgcaagttttaattttgaaagccatcaaatataaaagatgccaggattactgacaagtttatttttgtcaccttgatttctcaagagaaaytgatctgcaaatcaaagctccacatttaggtttgtttcattcatatttgtagctcatttttgaaggtatccgaggtcctggaatagaaggtgacattgctattgatgatgtatcaattgcagaaggagaatgtgcaaaacaagacctagcaactaagagtaagtatctttgcttgagattggtttgttataacgttaaagtaacattactattaaattaacatttaatttaattaattttaaaaacggagttatttttagttggtttatttagaaatttcttatatgtaataccctaaagtttgttcagttatttttaaagtattaaattcaattgtagacatatttggcctaagataaaatagaagtgagattttgatttagatctacgtaaggca

SEQ ID NO: 181174 - DNA, 617 bp, Homo sapiens
tttttttaattgtattatttaattaagtttagttttgctttaaaatcgacacagagcttttgatgtgaaaaactaatacaatgcaaggaagattcaattactggttttgggatgaaagtttatgttttctgcaagttttaattttgaaagccatcaaatataaaagatgccaggattactgacaagtttatttttgtcaccttgatttctcaagagaaattgatctgcaaatcaaagctccacatttaggtttgtttcattcatatttgtagctcatttttgaaggtatccgaggtcctggaatagaaggtgacattgctattgatgatgtatcaattgcagaaggagaatgtgcaaaacaagacctagcaactaagagtaagtatctttgcttgagattggtttgttrtaacgttaaagtaacattactattaaattaacatttaatttaattaattttaaaaacggagttatttttagttggtttatttagaaatttcttatatgtaataccctaaagtttgttcagttatttttaaagtattaaattcaattgtagacatatttggcctaagataaaatagaagtgagattttgatttagatctacgtaaggca

SEQ ID NO: 181175 - DNA, 462 bp, Homo sapiens
agcatctctcctcctttctctcagtagtattgtcctgggaacccagtcactgctgtggaaaagtctagatcacatggagagatttccagcatcatttgccttacatatggatgaggatgactttgcaatgattscagtcctggccattatctgactgtaaccttatatgggattgtgagcaaaacccacccatctgagcctagtcagccccctgagccatatgacctaaaaataaaaataacttgtttgttattatagcaaccctgagtttaggatggtttgttaggcagcaataggtaactagaaaacttatctagtgtggtttattccaaaaatgtatgctgggttagcatttaacaatcaatcttattcaccacattaatagaataaagagctaaattcatcatcatctcagtagatacagtagtcgaaaatacaaacatatacctaaagcaagagaca

SEQ ID NO: 181176 - DNA, 597 bp, Homo sapiens
aatccaatgggattggtgtccttataagaggaggaggagacaccagagagctctctctgccatgtgaagaagacatggtgaaaaagtgaccatctataaattaggaagagagctctcaccagaagctaactatgccagtgctttgatcttggacttctcagcctctaaaagtgtgagaaataagtttgtgttgtttaagcctcccactatggtattttgttatggcagcccaaacagactaatacattgcctctaaaccattaaagtatacattgcccaaacctatatcacataaaaataattttaataaaaatgttggagatctgaatatgtatgcctaagtatgtaaaaacaattttgaaaacttattattaaaagtaatatctatttcctgcwtgtgtttttcattttagtttgttgcctcagagttttcaataaccactactaagctaattaactttttaaaatctcttaaggaaagtcataatgatcaattaactttagcaaagaagtaaagatcttctctaatggagtggtgaaccctaattctagtcaggtttgtcatttcacagtcatttaactttgcaggacactgaa

SEQ ID NO: 181177 - DNA, 457 bp, Homo sapiens
ttttttttcaatagaaggctgtttcatctacgttgaaaatctattgttttaatgacaccctcattaacgaccttaactagatcttctgggtcactttcttctacatcagcacttgctgctttgccttgcactttttatgttatagagatggcttctttccttaaacctcatgagccaacatgtgttaacctcacatttttctcctgcaatttccccacctctctcagctttcatagaattgaagagagytaggtccttgttctatattaggcttacaagaatgttgttgctgatttggtcttttatccaaactactaaactttctccatattagcaataagggtgttttgctttcttatcatttgtatgttcactggagtagtacttttaatttccttcaagaacttcaactttgcattaaaaatttggctgtttggtgcaagaggcccagcttttg

SEQ ID NO: 181178 - DNA, 586 bp, Homo sapiens
gatccaactgtctttctgacataaaaaccatgatatgaaaattgaagattagagtcttaaagcatttgagtttgtaactctatgatagtagtttataactataatatatacaagattcctaaataatggtagtggcaatggaaaaaaaagagaaatgcrtatgatataatgatacaggattctgtcagcccgttcttgtgctgctataaagaaatacctgaggctgagtaatttgaaaagaaaagaggtttacttgtctcatggttcagcaggctgtaaaaaaaagaaagcgcagcactgcatctgctcctggtgagcgcctcaggaagcttttaatcatggtggaaagcaaaggaagaacaggcatgtcacatggtgagagcaggagcaagagagagagaggagtgggaggtccagactcttaaacaatcagatctcatgtgaactaactgactgagaactcacttatcaccaagagtatggtgtcaaatcattctttaaacacctacccccataattcaattacctcccaccaggctccacctttaacattgggaatcacatttcaacatgaaatatggagggc

SEQ ID NO: 181179 - DNA, 603 bp, Homo sapiens
cctcattcactcttgcattttatgcaccttcagacttaacaccacgtgaaaatcttcaagacttatgacttggacctctggagcagcaatctgagctgtacatgggctcctttgagccaaggctggagctggaatggccaggatataaagaacagtgttctgaggctaagcrggtcagcaagcagtgtcgcaggcctggcccttaaattctgttctcctaggcctctgggcctgagatgagaggggctgcttcagagtttcctgaaatgcctttgaagccttttccccattgttttggatattagcatgtggctttcttttaatcgtactaatagctctagcaagtggttgctcacagtctgcttggattcatctcccagaaaaagtattttctttctgtgccacatggctaggctgtgaatttttcaattttttgactctgctttctttttaaatataagttccaactttaagtcatccctttgcttctttatttggtcataggctgttagaagcagccaggcttcctttggaacactttactgcttagaaatttcttctataagataccctaggtcatcatttttaagttcaaactcccac

SEQ ID NO: 181180 - DNA, 510 bp, Homo sapiens
taacctatttccaaaatacaggcttccctaattacatgtcaaaaacatccttgaaaaagttgaagttgaatagttaaattttgtttgtttgtttgtttgtgtttttttttttttgagacaaagtctcactctgtcgctcaagctggagtgcagtggtgcaatcttggcccatttcaacctccacctcctgggttcaagtgattctcctgcctcagcctccctggtagctgggattacaggtgtggccagcattcctggctattttttttttttttttttgkatttttggtagagacagggtttcatcatcttggccaggctggtctcaaagtcctgaccccaagtgatctgcccgccttgacctcccaaagtgctgggattacaggcgtgagccaccacacctggctgaatagttaaatttggcatagtgaggctttatattccattccattccattgacagagggaaagagtaatgcaatgccaactcatccaacgacccaatcctatt

SEQ ID NO: 181181 - DNA, 656 bp, Homo sapiens
gaattttgtgggaacacaagcatcccatctataaaaacctggaaaaacaaatttattatagcatttttcaatacaaaatataagttttggacaaccattatttcaaatgtgctattggaaatattcagagggtcaaagatcagatcaccaggtataccaatacctataggatttttgcaccatctctgtgtctcatctggattaatgcaacgtcctccaaactggtccctgcaatacttaaaacttcacaagagtttcccatttaacttccaaagatattgtaactatttcatattcagcatagtcttgctcstccctgcccgtctctgcagctccacttcttgtctgcccatggtggacttcttctattgtgtttatgccttcagtcacaaattgatgccataactcaatttttgcatgttcttttctctttattgaaagtaccattttctttgtgtaacagattctctctatctattcagttctccagatgcctgtttctgactattgtactgggacttgcatgccatattgaccaataacataagaaccctcccacctactcacacacatgacaatagtttacacttcttcaaatttcttctttctgtcttagctttttttgtgatttttatggtataattatttttcccaca

SEQ ID NO: 181182 - DNA, 603 bp, Homo sapiens
caatagcagttcataattttaaaaagtactttcaaattatctcatgggatcctcatagcaaccctgttagcagaatgggaattgtgactatgaaaaagaaccaattacgatttttaaaaattccaattcttctacctaccaatactgctgatttcgaagaataatgtatttgtaattaagttgtctttattgggacttagaactctatcatttcctgtttgcttgaaatgtaccaaattaaaaaggtgagtattcatttgacagaaagagtagtgctgggccttgctgcacatcagaatcaccatgggaacatgaacatattgagatccatcaaccctacgctatgcaatcctatcaggatttttgagatatggtaaaacttagaattaaaaaaaatgagatttctgctggatctaawctttggcactaatgacatatttgtgataggcttattttggccttatcctgtgttctttccttcagctcaatatcctacttgatatttggcatgctgtttaagaaacacaaaagatcatagaaacagccaaaggataatgcatatatataaaatccctttctcatattagaaattttatccccaat

SEQ ID NO: 181183 - DNA, 450 bp, Homo sapiens
agaaattttatccccaattctgatggctttatctttgtccactttactttcgccatgtaattgcaaatgtatcattaacagtaaatagaacagatattgatattttatttttattgatgggtatgtgagacaaataaagattaaaattttatacattaattcaataactawttgttgaacacttattgtaggttaaacactgtgaaagatgctagaaatacaaagtcaaataaaatgtgatgtagatcctgaagggccttaaatttcattaacacaaaattccattaaagtgtagcaggtaatgtgaaagtattctatgcagggcacagtttgcacaaaatgtaggttagaattaggaggtggtatagtatttaaggcaaaaaaaaactgtgagcttggacagtcaaagtcatacaactttttattgatctaataatgattagtagccac

SEQ ID NO: 181184 - DNA, 713 bp, Homo sapiens
attttctgttattgcttttggttcacaaagttgtcccaacagacttgccaaagtgccaagtcttcatgtgacagcatccatacgttcaaaggaattaagtggttttctttttgtttttctacttttacttaaatatgcaaatgttatctttcccagaagccccacatcacatgtcttctgacgtctgagtcactagaatttgtcatttcctaatccttatcaaataacagataactggaaatggaattactgcaattgactgagactcatcatagtgtatccttggacctattgaaggaaactattattcctgagctctctgttgctcttggtatgtctgaaaagcgctgaaataaatcagaattcttttggcaaggaagttaagagcttgaatcatrtttatcaaataatcgttttgttccctttgccctatttaccttcctataaaaaatattcaactttttggatgaatgtaatattattaatttatggatagagtaaaatgctgatgtctgtaaatattgtttcatgcaaatgcaaaatattaatacaattcaattttaggtaatgttgaattattccaacataaatgaaaattaaaacattatcaaaatggatttaactaactaaacaaacagaatatctttgaaaaataatgttgccggccctgcatggtagcttacgtctgtaatcccagcactttgggaggcagg

SEQ ID NO: 181185 - DNA, 631 bp, Homo sapiens
atatagtttgtaacctttgcagactggcttatttcacttaggaaatttaggaatatgtatttaaggttcctccatgtctttttgtggcttgataatttctctttctctctctctctctctcacctcttcttttttttttttttttttttttttttgagatagagtttcactctttcacccaggttggagtgcagtggctcgatctcagctcactgcaacctccactttccagtttcaagtgattctcctgcctcagcctcccaagtagctgggattacaggtgcccaccatcatgcctggctaatttttgtatttttagtagagacagggtttcatcatgttggccaggctggtctcaaactcctgacctcgtgatccayccacttcagtctcccaaagtgctgggattacaggcgtgagccatcaagcctggcctccactctctttttttgttttttttttgtttttgtttttgtttttgtttttgagacagggtttcactctgttgcccagactgagggtagaggtgacatcacacctcacagtagcctcaacctctcaggctcaggtgatcctcccactttagcttcccaggtagctgggactacaggcatgtgccaccaggcctggc

SEQ ID NO: 181186 - DNA, 496 bp, Homo sapiens
gcaggtcaatactcaaagaaaascttgttgttttagcacaggggacaaatttcaagttttccattcctgtacttttgataataatgctcaagttttcagaaatatttataaataatttccttttaactttagccaacttggtcacacataaaattcttttcacaagattaatcttccacaaactttctataaatttgtcatccagttatcttattcagtttttgtctatattttttctctttttctttttggaacaataagacattctacttttagacaaaaaatactctctttttcccttaacaaaaacacaacctcttacttataactttctttatgtgttttccttccctcacatacagatttgtttcccttcattatttctagtttaaattactctaatattaattttaattaactcttagtaaccttaatttctagtgaaaattagtaagcattttgaagtgcatcatgttagtattttgcagatgaacac

SEQ ID NO: 181187 - DNA, 496 bp, Homo sapiens
gcaggtcaatactcaaagaaaaccttgttgtttyagcacaggggacaaatttcaagttttccattcctgtacttttgataataatgctcaagttttcagaaatatttataaataatttccttttaactttagccaacttggtcacacataaaattcttttcacaagattaatcttccacaaactttctataaatttgtcatccagttatcttattcagtttttgtctatattttttctctttttctttttggaacaataagacattctacttttagacaaaaaatactctctttttcccttaacaaaaacacaacctcttacttataactttctttatgtgttttccttccctcacatacagatttgtttcccttcattatttctagtttaaattactctaatattaattttaattaactcttagtaaccttaatttctagtgaaaattagtaagcattttgaagtgcatcatgttagtattttgcagatgaacac

SEQ ID NO: 181188 - DNA, 484 bp, Homo sapiens
gtctgttcagtttttttatttctttctggttcaatcttggtaggtggtatttatctaggtattcatttattctagattgttcaatttattggcatatagttgctaatagtagccaccaatgattctttgaatttctgcagtatcagttataaagtctcctttttaatctctggatttatttggaagttgtgtatccattaaatatatagatttatatgtagcagtgtgggaggggtgtgtttggatagatagatagatgtatctctctatatatacacaccaatgataatcataatcatggcatttttacaggttaatttatcaaaataagtttctgtaaattctcaaataattgatgatgattagctcttatttattatttaatatgtaccaaaaatttaaactatttttatcatttttccccactaaacaatamctgggggtacattttatttttccatttaataactaacaaaaatattta

SEQ ID NO: 181189 - DNA, 503 bp, Homo sapiens
atactgagatatataactatttagcccttattttaaaacatcaggtaacaagcatcaatcaatttctatcaartgtttcaacttgggtattatagcataagcagaaatatactgttaccaatatcccagccaatttcttttcctaatgaaacaataaaactgagaatgtagagaccatttagtaaagttgatatatatatgtgtgcatatgtgtgtgtgtgtgtatatatatatataaatgtaattaatacaatagatgaggtcaaagaagcaagtgatacacaacttttaatttggatgggatgtccttgaagattcctgtattagtcctttctcacattcctatatgcaaatacctgagactgagtaatttataaaagaaagaggtttaattgactcacagttccctatgactggggaggcctcaggaaacttacaattgtagtggaaggtgaaagggaggcaggcactttcttcacaaaatggcaggaaaaagaaggatg

SEQ ID NO: 181190 - DNA, 503 bp, Homo sapiens
atactgagatatataactatttagcccttattttaaaacatcaggtaacaagcatcaatcaatttctatcaagtgtttcaacttgggtattatagcataagcagaaatatactgttaccaatatcccagccaatttcttttcctaatgaaacaataaaactgagaatgtagagaccatttagtaaagttgatatatatatgtgtgcatatgtgtgtgtgtgtgtatatatatayataaatgtaattaatacaatagatgaggtcaaagaagcaagtgatacacaacttttaatttggatgggatgtccttgaagattcctgtattagtcctttctcacattcctatatgcaaatacctgagactgagtaatttataaaagaaagaggtttaattgactcacagttccctatgactggggaggcctcaggaaacttacaattgtagtggaaggtgaaagggaggcaggcactttcttcacaaaatggcaggaaaaagaaggatg

SEQ ID NO: 181191 - DNA, 503 bp, Homo sapiens
atactgagatatataactatttagcccttattttaaaacatcaggtaacaagcatcaatcaatttctatcaagtgtttcaacttgggtattatagcataagcagaaatatactgttaccaatatcccagccaatttcttttcctaatgaaacaataaaactgagaatgtagagaccatttagtaaagttgatatatatatgtgtgcatatgtgtgtgtgtgtgtatatatatatataaatgtaattaatacaatagatgaggtcaaagaagcaagtgatacacaacttttaatttggatgggatgtccttgaagattcctgtattagtcctttctcacattcctatatgmaaatacctgagactgagtaatttataaaagaaagaggtttaattgactcacagttccctatgactggggaggcctcaggaaacttacaattgtagtggaaggtgaaagggaggcaggcactttcttcacaaaatggcaggaaaaagaaggatg

SEQ ID NO: 181192 - DNA, 503 bp, Homo sapiens
atactgagatatataactatttagcccttattttaaaacatcaggtaacaagcatcaatcaatttctatcaagtgtttcaacttgggtattatagcataagcagaaatatactgttaccaatatcccagccaatttcttttcctaatgaaacaataaaactgagaatgtagagaccatttagtaaagttgatatatatatgtgtgcatatgtgtgtgtgtgtgtatatatatatataaatgtaattaatacaatagatgaggtcaaagaagcaagtgatacacaacttttaatttggatgggatgtccttgaagattcctgtattagtcctttctcacattcctatatgcaaatacctgagactgagtaatttataaaagaaagaggtttaattgactcacagttccctatgactggggaggcctcaggaaacttacaatygtagtggaaggtgaaagggaggcaggcactttcttcacaaaatggcaggaaaaagaaggatg

SEQ ID NO: 181193 - DNA, 554 bp, Homo sapiens
gtgatggatatcacttccaacattagrttgcacaaagactgtggcttctgtcttgggaatcctctctctctctttcattgtaagggaagctgacttctatgttgggcgctgcctattaagaagtccacatagcacggagccagtgtcaccagtcacagccagcaaggaaggacctggggactgcccccagccacatgattaatcttagaagtgaatcttccctaagtaaggcttttaaatgatggcagccttatgagagtccttgagctagagggccttactaattctgatatagttcttgacccagagaagttggcataatgaatgtttgttgttttaatccactaagttttggaggtaatatgttaagcatcaacagataactaataaaaggagtgattctgagcaagaaaggcttaagtggagggaagctaaggtcgaatagtttatgaatatcatcctgtaagaatacagggcttggagctttgaaggtgggagcagaaaaaaatttatgtcagcttgtcattaacagtgtgactaaaaaagttcgttat

SEQ ID NO: 181194 - DNA, 618 bp, Homo sapiens
caacattaggttgcacaaagactgtggcttctgtcttgggaatcctctctctctctttcattgtaagggaagctgacttctatgttgggcgctgcctattaagaagtccacatagcacggagccagtgtcaccagtcacagccagcaaggaaggwcctggggactgcccccagccacatgattaatcttagaagtgaatcttccctaagtaaggcttttaaatgatggcagccttatgagagtccttgagctagagggccttactaattctgatatagttcttgacccagagaagttggcataatgaatgtttgttgttttaatccactaagttttggaggtaatatgttaagcatcaacagataactaataaaaggagtgattctgagcaagaaaggcttaagtggagggaagctaaggtcgaatagtttatgaatatcatcctgtaagaatacagggcttggagctttgaaggtgggagcagaaaaaaatttatgtcagcttgtcattaacagtgtgactaaaaaagttcgttatactgaaggataaatgcttacatgtgcctcagagaatagatgtttttattcctgggaagaaagataaactttttcaaaaaac

SEQ ID NO: 181195 - DNA, 618 bp, Homo sapiens
caacattaggttgcacaaagactgtggcttctgtcttgggaatcctctctctctctttcattgtaagggaagctgacttctatgttgggcgctgcctattaagaagtccacatagcacggagccagtgtcaccagtcacagccagcaaggaaggacctggggactgcccccagccacatgattaatcttagaagtgaatcttccctaagtaaggcttttaaatgatggcagccttatgagagtccttgagctagagggccttactaattctgatatagttcttgacccagagaagttggcataatgaatgtttgttgttttaatccactaagttttggaggtaatatgttaagcatcaacagataactaataaaaggagtgattctgagcaagaaaggcttaagtggagggaagctaaggtcgaatagtttatgaatatcatcctgtaagaatacagggcttggagctttgaaggtgggagcagaaaaaaatttatgtmagcttgtcattaacagtgtgactaaaaaagttcgttatactgaaggataaatgcttacatgtgcctcagagaatagatgtttttattcctgggaagaaagataaactttttcaaaaaac

SEQ ID NO: 181196 - DNA, 554 bp, Homo sapiens
gtgatggatatcacttccaacattaggttgcacaaagactgtggcttctgtcttgggaatcctctctctctctttcattgtaagggaagctgacttctatgttgggcgctgcctattaagaagtccacatagcacggagccagtgtcaccagtcacagccagcaaggaaggacctggggactgcccccagccacatgattaatcttagaagtgaatcttccctaagtaaggcttttaaatgatggcagccttatgagagtccttgagctagagggccttactaattctgatatagttcttgacccagagaagttggcataatgaatgtttgttgttttaatccactaagttttggaggtaatatgttaagcatcaacagataactaataaaaggagtgattctgagcaagaaaggcttaagtggagggaagctaaggtcgaatagtttatgaatatcatcctgtaagaatacagggcttggagctttgaaggtgggagcagaaaaaaatttatgtcagcttgtcattaacartgtgactaaaaaagttcgttat

SEQ ID NO: 181197 - DNA, 554 bp, Homo sapiens
gtgatggatatcacttccaacattaggttgcacaaagactgtggcttctgtcttgggaatcctctctctctctttcattgtaagggaagctgacttctatgttgggcgctgcctattaagaagtccacatagcacggagccagtgtcaccagtcacagccagcaaggaaggacctggggactgcccccagccacatgattaatcttagaagtgaatcttccctaagtaaggcttttaaatgatggcagccttatgagagtccttgagctagagggccttactaattctgatatagttcttgacccagagaagttggcataatgaatgtttgttgttttaatccactaagttttggaggtaatatgttaagcatcaacagataactaataaaaggagtgattctgagcaagaaaggcttaagtggagggaagctaaggtcgaatagtttatgaatatcatcctgtaagaatacagggcttggagctttgaaggtgggagcagaaaaaaatttatgtcagcttgtcattaacagtrtgactaaaaaagttcgttat

SEQ ID NO: 181198 - DNA, 618 bp, Homo sapiens
caacattaggttgcacaaagactgtggcttctgtcttgggaatcctctctctctctttcattgtaagggaagctgacttctatgttgggcgctgcctattaagaagtccacatagcacggagccagtgtcaccagtcacagccagcaaggaaggacctggggactgcccccagccacatgattaatcttagaagtgaatcttccctaagtaaggcttttaaatgatggcagccttatgagagtccttgagctagagggccttactaattctgatatagttcttgacccagagaagttggcataatgaatgtttgttgttttaatccactaagttttggaggtaatatgttaagcatcaacagataactaataaaaggagtgattctgagcaagaaaggcttaagtggagggaagctaaggtcgaatagtttatgaatatcatcctgtaagaatacagggcttggagctttgaaggtgggagcagaaaaaaatttatgtcagcttgtcattaacagtgtgactaaaaaagttcrttatactgaaggataaatgcttacatgtgcctcagagaatagatgtttttattcctgggaagaaagataaactttttcaaaaaac

SEQ ID NO: 181199 - DNA, 279 bp, Homo sapiens
ttccataaatttcagctctccttgatttctcaytattctagttcatcaattttgtaattaatcattaaacattattctttctctgtattaaaaatattagcaattacaaaatccctatttaatattacatttattgttttagtttgatgctttttttttagtgatatgtacagatgacaaaaaaatgatgtgcagcctttgtgttccatttattgttgtgtaaaataaaatttcatcaatcttggataaaaattcttaggcctatgattatatttgaag

SEQ ID NO: 181200 - DNA, 279 bp, Homo sapiens
ttccataaatttcagctctccttgatttctcattattctagttcatcaattttgtaattaatcattaaacattattctttctctrtattaaaaatattagcaattacaaaatccctatttaatattacatttattgttttagtttgatgctttttttttagtgatatgtacagatgacaaaaaaatgatgtgcagcctttgtgttccatttattgttgtgtaaaataaaatttcatcaatcttggataaaaattcttaggcctatgattatatttgaag

SEQ ID NO: 181201 - DNA, 279 bp, Homo sapiens
ttccataaatttcagctctccttgatttctcattattctagttcatcaattttgtaattaatcattaaacattattctttctctgtattaaaaatattagcaattacaaaatccctatttaatattayatttattgttttagtttgatgctttttttttagtgatatgtacagatgacaaaaaaatgatgtgcagcctttgtgttccatttattgttgtgtaaaataaaatttcatcaatcttggataaaaattcttaggcctatgattatatttgaag

SEQ ID NO: 181202 - DNA, 585 bp, Homo sapiens
tgtaaccattgactggcacctttatcttggactctcagcctccagaactccgagaagtaaatttctattgtttaaaccagtcagtgtatrttgtttttgttgttgttatagcagcttgaattaagacacaattttcctaaaacttaaaaatgtcagattggtggataaaattgtatttcattgtgcttttttcttcaagccttatacctctgactccaaactcatagtaaccagtgtaagacatggtagaatctttccactagtgcttgggacactatttatagtatctacccaatctaattttaatgaaaaagttgaaggttggtataaaaaaatgtttatcatctaggagttccaggatcaattcaacatacttgtgatggtctcatgtagtagcagtgacagtcaactacaaatggtgcctgaacagggacatttcagagactatcagggacatacagagacctgaaaggacctggagggacctgaagaggcctgcagggataaacagagataagtagagataagtagagaaaagtaagtagagataagtaagtagagaaaagtagagataggtagggaaag

SEQ ID NO: 181203 - DNA, 585 bp, Homo sapiens
tgtaaccattgactggcacctttatcttggactctcagcctccagaactccgagaagtaaatttctattgtttaaaccagtcagtgtatattgtttttgttgttgttatagcagcttgaattaagacacaattttcctaaaacttaaaaatgtcrgattggtggataaaattgtatttcattgtgcttttttcttcaagccttatacctctgactccaaactcatagtaaccagtgtaagacatggtagaatctttccactagtgcttgggacactatttatagtatctacccaatctaattttaatgaaaaagttgaaggttggtataaaaaaatgtttatcatctaggagttccaggatcaattcaacatacttgtgatggtctcatgtagtagcagtgacagtcaactacaaatggtgcctgaacagggacatttcagagactatcagggacatacagagacctgaaaggacctggagggacctgaagaggcctgcagggataaacagagataagtagagataagtagagaaaagtaagtagagataagtaagtagagaaaagtagagataggtagggaaag

SEQ ID NO: 181204 - DNA, 585 bp, Homo sapiens
tgtaaccattgactggcacctttatcttggactctcagcctccagaactccgagaagtaaatttctattgtttaaaccagtcagtgtatattgtttttgttgttgttatagcagcttgaattaagacacaattttcctaaaacttaaaaatgtcagattggtggataaaattgtatttcattgtgcttttttcttcaagccttatacctctgactccaaactcatagtaaccagtgtaagacatggtagaatctttccactagtgcttgggacactatttatagtatctacccaatctaattttaatgaaaaagttgaaggttggtataaaaaaatgtttatcatctaggagttccaggmtcaattcaacatacttgtgatggtctcatgtagtagcagtgacagtcaactacaaatggtgcctgaacagggacatttcagagactatcagggacatacagagacctgaaaggacctggagggacctgaagaggcctgcagggataaacagagataagtagagataagtagagaaaagtaagtagagataagtaagtagagaaaagtagagataggtagggaaag

SEQ ID NO: 181205 - DNA, 585 bp, Homo sapiens
tgtaaccattgactggcacctttatcttggactctcagcctccagaactccgagaagtaaatttctattgtttaaaccagtcagtgtatattgtttttgttgttgttatagcagcttgaattaagacacaattttcctaaaacttaaaaatgtcagattggtggataaaattgtatttcattgtgcttttttcttcaagccttatacctctgactccaaactcatagtaaccagtgtaagacatggtagaatctttccactagtgcttgggacactatttatagtatctacccaatctaattttaatgaaaaagttgaaggttggtataaaaaaatgtttatcatctaggagttccaggatcaattcaacatacttgtgatggtctcatgtagtagcagtgacagtcaactacaaatggtgcctgaacagggacatttcagagactatcagggacatacagagacctgaaaggacctggagggacctgaagaggcctgcagggataaacagagataagtagagrtaagtagagaaaagtaagtagagataagtaagtagagaaaagtagagataggtagggaaag

SEQ ID NO: 181206 - DNA, 443 bp, Homo sapiens
tgggaaagtaatttacttgaatcatgcaagacccaagattgctgttttgggaaataaacacttttctcgatgccatygaataaaaattttagaaaataaatcattaaaattttgtcttgggccaggtgaggtgtctcaagcctgtaatcccagaattttgggaggtgaatcccttcaggccaggagttcaagaccagcttggccaacatggcaaaaccctgtctctactaaaaattaaaaaaaaaaaaaaatagctgggcatggtggtgagcacgtgcaatgccagcgacccaggaggctgaggcacaagaattgcttgtactcaggatgcagagattgctgtgagccaacatagtaccaccgcactccagcctaggtgacagagtgagacactatttcaaaaaaaaaaaattgtgatatcaactttgaaatttttaattata

SEQ ID NO: 181207 - DNA, 443 bp, Homo sapiens
tgggaaagtaatttacttgaatcatgcaagacccaagattgctgttttgggaaataaacacttttctcgatgccattgaataaaaattttagaaaataaatcattaaaattttgtcttgggccaggtgaggtgtctcaagcctgtaatcccagaattttgggaggtgaatcccttcaggccaggagttcaagaccagcttggccaacatggcaaaaccctgtctctactaaaaattaaaaaaaaaaaaaaatagctgggcatggtggtgagcacstgcaatgccagcgacccaggaggctgaggcacaagaattgcttgtactcaggatgcagagattgctgtgagccaacatagtaccaccgcactccagcctaggtgacagagtgagacactatttcaaaaaaaaaaaattgtgatatcaactttgaaatttttaattata

SEQ ID NO: 181208 - DNA, 443 bp, Homo sapiens
tgggaaagtaatttacttgaatcatgcaagacccaagattgctgttttgggaaataaacacttttctcgatgccattgaataaaaattttagaaaataaatcattaaaattttgtcttgggccaggtgaggtgtctcaagcctgtaatcccagaattttgggaggtgaatcccttcaggccaggagttcaagaccagcttggccaacatggcaaaaccctgtctctactaaaaattaaaaaaaaaaaaaaatagctgggcatggtggtgagcacgtgcaatgccagygacccaggaggctgaggcacaagaattgcttgtactcaggatgcagagattgctgtgagccaacatagtaccaccgcactccagcctaggtgacagagtgagacactatttcaaaaaaaaaaaattgtgatatcaactttgaaatttttaattata

SEQ ID NO: 181209 - DNA, 414 bp, Homo sapiens
gtgaattctgagaactggagggaatctcagaggtacttaaggaaagcaggtattattagctagtggcggagctgagggggctctgcattccagatgatatttatgatattttcttatgttttgttttccttcccaaaaatgtgtgtctctgagttacagcaccatgayttgtcaaatataaattatgtttcaagtaattatccataaatgttaattactaatgcaacctgtacatttttaaaaaaattttatatttttataaaggatttctcaaattttttgttaattataatgtacttgtaatcttgtaaaaaatttagcaatagttcgaatgatgacattattttctttatagtaaatataccatgagttttcaggagaaaggaccattctaatgtatgcaatttccttgaa

SEQ ID NO: 181210 - DNA, 414 bp, Homo sapiens
gtgaattctgagaactggagggaatctcagaggtacttaaggaaagcaggtattattagctagtggcggagctgagggggctctgcattccagatgatatttatgatattttcttatgttttgttttccttcccaaaaatgtgtgtctctgagttacagcaccatgatttgtcaaatataaattatgtttcaagtaattatccataaatgttaattactaatgcaacctgtacatttttaaaaaaattttatatttttataaaggatttytcaaattttttgttaattataatgtacttgtaatcttgtaaaaaatttagcaatagttcgaatgatgacattattttctttatagtaaatataccatgagttttcaggagaaaggaccattctaatgtatgcaatttccttgaa

SEQ ID NO: 181211 - DNA, 562 bp, Homo sapiens
ctggtcagcaaaaacataatctattctttcatgtcctttcattatagtgagaaagtaaaatgtcaattaaacaactacaaactcatgaaatttcagaagtgccatgatacaaaggagaagaaccaattctatgactgtgaaatagaagtatttagctagcaacatcagcagttcttccytaaagaagtcatgcttctattaacagctgaaaaataaataacattggactagtaattaacaatgactgatagcattaaagagcatgggccgggcacggtggctcacgcctgtaattctagtactttgggtggccgaggtgggcagattaactgaggtcaggagttcaagaccagcctggccaacatggtgaaaccccgtctctactaaaaatacaaaaaattagctgagcgtagtggcacacacctgtaatcccagctactagggaggctgaggcaggagaatcgcttgagcctgtgagatggaggctgcagtgagctgagatcataccactgcactccagtgtggccgacagagagagactctgtctcaaaaaaaagcatgt

SEQ ID NO: 181212 - DNA, 562 bp, Homo sapiens
ctggtcagcaaaaacataatctattctttcatgtcctttcattatagtgagaaagtaaaatgtcaattaaacaactacaaactcatgaaatttcagaagtgccatgatacaaaggagaagaaccaattctatgactgtgaaatagaagtatttagctagcaacatcagcagttcttccctaaagaagtcatgcttctattaacagctgaaaaataaataacattggactagtaattaacaatgactgatarcattaaagagcatgggccgggcacggtggctcacgcctgtaattctagtactttgggtggccgaggtgggcagattaactgaggtcaggagttcaagaccagcctggccaacatggtgaaaccccgtctctactaaaaatacaaaaaattagctgagcgtagtggcacacacctgtaatcccagctactagggaggctgaggcaggagaatcgcttgagcctgtgagatggaggctgcagtgagctgagatcataccactgcactccagtgtggccgacagagagagactctgtctcaaaaaaaagcatgt

SEQ ID NO: 181213 - DNA, 465 bp, Homo sapiens
tcaatttaaaattttgttgatgaatatcatttttcctttgaaggttttatatataaacaagaatgcatatattcatttaatttaccctttagagtctaattataatccagtgagattaagttctccgttgtgatgtattagacactgtggaaaattttctagaaatttcaggcataaaatmattaaaattgcaaaagtgtaattgaagccattggatttctttagtatattgacttcacacatatagaaaattaaagtttaattgctattcttgatggataactctgcttctattagctctgaggaaggtaaaataggcttttagtaagcaatagaaatccatccaaacacatgtaatagcattttctgggcttgctcattatattagcagtcattggaaatacagtactgattccatatatattttatatgctccaaatggatgttttaaattttatattaatg

SEQ ID NO: 181214 - DNA, 465 bp, Homo sapiens
tcaatttaaaattttgttgatgaatatcatttttcctttgaaggttttatatataaacaagaatgcatatattcatttaatttaccctttagagtctaattataatccagtgagattaagttctccgttgtgatgtattagacactgtggaaaattttctagaaatttcaggcataaaataattaaaattgcaaaagtgtaattgaagccattggatttctttagtatattgacttcacacatatagaaaattaaagtttaattgctattcttgatggataactctgcttctattagctctgaggaaggtaaaataggcttttagtaagcaatagaaatccatccaaacacatgtaatagcattttctgggcttgctsattatattagcagtcattggaaatacagtactgattccatatatattttatatgctccaaatggatgttttaaattttatattaatg

SEQ ID NO: 181215 - DNA, 465 bp, Homo sapiens
tcaatttaaaattttgttgatgaatatcatttttcctttgaaggttttatatataaacaagaatgcatatattcatttaatttaccctttagagtctaattataatccagtgagattaagttctccgttgtgatgtattagacactgtggaaaattttctagaaatttcaggcataaaataattaaaattgcaaaagtgtaattgaagccattggatttctttagtatattgacttcacacatatagaaaattaaagtttaattgctattcttgatggataactctgcttctattagctctgaggaaggtaaaataggcttttagtaagcaatagaaatccatccaaacacatgtaatagcattttctgggcttgctcattatattwgcagtcattggaaatacagtactgattccatatatattttatatgctccaaatggatgttttaaattttatattaatg

SEQ ID NO: 181216 - DNA, 608 bp, Homo sapiens
tcatgagtcacctttgatgagaggaggtctctgatattgatattctaatatactctgaacatataaaaacataaatctgtaagttagamttaaatgattaaatagacatgtttctgaggactcaacatgggaaataatattccctctaacaaataatttttacttataaaaatgattaaacatgtaagtctttaaaattttggcgaatcctcagtatttggaaaaagtaaacctaaccaaaatgaaaggattaacacattccctaggagatgggtctctgcttttgaagaaagagtagcttgaattaactttaaattgctttatttcccagagctggaatgtggtccccaaactaggtttttaattggttcctgaagctcttttttctcaaataaaatcatcaaactcactctaaaatggaatttgaaaccacattagcccaaggcagtaaaaagcaaaacaaaacttaagttcaaagttttttttaatctatttttacttgttgtgaaatccctaaaaatgaaaaatcaacattgtttagtctaatgtttgtttttttttcttgagcggtgacaatcacaggaggaaactccttttaatataaggca

SEQ ID NO: 181217 - DNA, 608 bp, Homo sapiens
tcatgagtcacctttgatgagaggaggtctctgatattgatattctaatatactctgaacatataaaaacataaatctgtaagttagaattaaatgattaaatagacatgtttctgaggactcaacatgggaaataatattccctctaacaaataatttttacttataaaaatgattaaacatgtaagtctttaaaattttggcgaatcctcagtatttggaaaaaktaaacctaaccaaaatgaaaggattaacacattccctaggagatgggtctctgcttttgaagaaagagtagcttgaattaactttaaattgctttatttcccagagctggaatgtggtccccaaactaggtttttaattggttcctgaagctcttttttctcaaataaaatcatcaaactcactctaaaatggaatttgaaaccacattagcccaaggcagtaaaaagcaaaacaaaacttaagttcaaagttttttttaatctatttttacttgttgtgaaatccctaaaaatgaaaaatcaacattgtttagtctaatgtttgtttttttttcttgagcggtgacaatcacaggaggaaactccttttaatataaggca

SEQ ID NO: 181218 - DNA, 608 bp, Homo sapiens
tcatgagtcacctttgatgagaggaggtctctgatattgatattctaatatactctgaacatataaaaacataaatctgtaagttagaattaaatgattaaatagacatgtttctgaggactcaacatgggaaataatattccctctaacaaataatttttacttataaaaatgattaaacatgtaagtctttaaaattttggcgaatcctcagtatttggaaaaagtaaacctaaccaaaatgaaaggattaacacattccctaggagatgggtctctgcttttgaagaaagagtagcttgaattaactttaaattgctttatttcccagagctggaatgtggtccccaaactaggtttttaattggttcctgaagctcttttttctyaaataaaatcatcaaactcactctaaaatggaatttgaaaccacattagcccaaggcagtaaaaagcaaaacaaaacttaagttcaaagttttttttaatctatttttacttgttgtgaaatccctaaaaatgaaaaatcaacattgtttagtctaatgtttgtttttttttcttgagcggtgacaatcacaggaggaaactccttttaatataaggca

SEQ ID NO: 181219 - DNA, 577 bp, Homo sapiens
cagacatttctcagtgaaactatttctactcattcttcagtaacctagattgaggacaaaattttagtaactgaagtcaattaccataagaaaaatttaaaagttattactgtagaccttatattcttgtggaggaagataggcattaaatayagaacaggtaaggtactttctgggtgttccattatgaggaaaagaaaaggaaaagtctcactcaggattcttgtgatttcaggttattggaagacagatattatttatccagaatggctaggaaaacattttctggaaagaaacttttgagatgttaccaacatgatgaaaaaagatacacttttgtaaggaccacagcaaacggcattctgtgtcgaatagatgaaagagtttgaaggagagacagagaagacaagggtattaattttgtatggcttcaataacaaattaccacaagcttagtgttttaaaaaataaagttcctaaagcaggagtcatggtggaaaatatttttttttctctatgtcgtcaatatcaaacagattttaaatggcaaaataagaggctgaagaatgattaaata

SEQ ID NO: 181220 - DNA, 378 bp, Homo sapiens
caagaatagcacaggaaaaacctgcccccatgattcaactacttcccaccaagtccctcccatgacacaagggaaactgtgggagctacaattcaagrtgaggttggagtggagacacagccacacaacatcagccataatgaggtcaaaatgtgattcttgtttcacacagcctgatctggctaattccactgcttagaatccaatctattgccaatggtaaaccccaatataaaaccattatttgatgaataattgattacattgaacttttctaacatggaggaagctttatttatctttctactgatgtatttaccttttctcactacctttcttctgacagcattatatgtctgctaaaatacataattacaa

SEQ ID NO: 181221 - DNA, 611 bp, Homo sapiens
ttgacttttgagagaaagggatgtcttactttcctctgaggtactagaacyaaacacagtattggctgcagtagcaagcaataaaagtttgttgaatggatgaatagctgaatgaatttaatcaactaaaatgtttagatttaaatatatagccaaccatactataacatgagaatccagaattattgtcccactattcaaaatgctcctctataaatccagtctactaaatgtttatgtttcattttggttaattcttagacaagagggtttagtgcactacagaaaccatctcattagattttcatatagttttatttttcctcatttatgtaatgtattacatatatatgtatactctagtgaaaatttttttgatcttgacttacacattcagttggtagacatttgtgtgggcatgaatataaacatgtctagtcacgagaatatcctgattcaaatagggaagcaaaagatgacacgctctcagacaggaagtgactgtcagcatcctttaaaaagaaacaacaggctgtggttcgtttatttccttgcttatttgtgacttgccctcagtgcctgatgatgcttggtacaaagaactgagtaaa

SEQ ID NO: 181222 - DNA, 526 bp, Homo sapiens
acagtatctattgccataatgataaagcatgtattttaaagtaattttgctatcaatgtggtttttaacatatctcagtgggacattcataaacatatttatcaaacactgtcaaataagttttgttattagatgattcttgatgttgcatttggtaataaattatgaataattaaataaatgtaacaaattaattataactattatgcagataaatgattactgacacaattaattgttcaaatgaaagattactgatatgttcaattataaatatgttgacaaaatatattagttctagtgagtcacagttctgatttggagcactctattctgcttatttgaattaagacaaattaggaaaataataagaaaaaaawttcctttatttttcattctgtacgtgaccatttctatccctctctctttctgttaattcttttaactgtattatcagttcaagatcagggaggtgtcctttacagtaaaataacaaacatgaagaagcttcgatatggttgaacca

SEQ ID NO: 181223 - DNA, 526 bp, Homo sapiens
acagtatctattgccataatgataaagcatgtattttaaagtaattttgctatcaatgtggtttttaacatatctcagtgggacattcataaacatatttatcaaacactgtcaaataagttttgttattagatgattcttgatgttgcatttggtaataaattatgaataattaaataaatgtaacaaattaattataactattatgcagataaatgattactgacacaattaattgttcaaatgaaagattactgatatgttcaattataaatatgttgacaaaatatattagttctagtgagtcacagttctgatttggagcactctattctgcttatttgaattaagacaaattaggaaaataataagaaaaaaaattcctttatttttcattctgtacgtgaccatttctatccctctctctttctgttaattcttttaactgtattatcagttcaagatcagggaggtgtcctttasagtaaaataacaaacatgaagaagcttcgatatggttgaacca

SEQ ID NO: 181224 - DNA, 594 bp, Homo sapiens
ttggaaccacaaattacatgtattttcctacatatatccaatctgcaatttcaacattctgtcaaaaagtttagtaaacttaatggaacataattaatattcattctcatatcaaattctcagctgacattttagaaaacaacaataacaaaaacaaaggaaaagaaagtaaaagaagggaaaaaaaaacagtcatctcttctgatattttagacattrgaaataaacaaattgtattagagttacgttttaagtccaaaaaagtcctttaggcattttccaaaatggaaacaaaacattttatctcatctgtattacatttcagatcaccagtgaacaattgctttttggaaactataaactctagttatttaggtggtaactgccttcctaaagtaattctcactttttctcagtatgtggtagatttttcaaaatggcaggaacacggtcccctcaatatctttagatacttgttatcttcctaaatttatctttcactccatagccttttccatgtgaatttgaagtgtccttttattctgatgctggggtctgccagcattctggcaatgggagactaggtgatgggat

SEQ ID NO: 181225 - DNA, 594 bp, Homo sapiens
ttggaaccacaaattacatgtattttcctacatatatccaatctgcaatttcaacattctgtcaaaaagtttagtaaacttaatggaacataattaatattcattctcatatcaaattctcagctgacattttagaaaacaacaataacaaaaacaaaggaaaagaaagtaaaagaagggaaaaaaaaacagtcatctcttctgatattttagacattagaaataaacawattgtattagagttacgttttaagtccaaaaaagtcctttaggcattttccaaaatggaaacaaaacattttatctcatctgtattacatttcagatcaccagtgaacaattgctttttggaaactataaactctagttatttaggtggtaactgccttcctaaagtaattctcactttttctcagtatgtggtagatttttcaaaatggcaggaacacggtcccctcaatatctttagatacttgttatcttcctaaatttatctttcactccatagccttttccatgtgaatttgaagtgtccttttattctgatgctggggtctgccagcattctggcaatgggagactaggtgatgggat

SEQ ID NO: 181226 - DNA, 612 bp, Homo sapiens
tgctattccaaaaatatttatttacttgatagcacagtggaccctgaaaggcattgtaggtctttttgtttgattaattgcctgttcactttgttttcaaacatcatcaatatagaagaggaaaatgatattaacaaagaccatatagtgcttaaagtatgtgaagctggttaaaatattcccagttgatatttctttctctggccatatgaagaaatttacaggccagtcatggtggctcacatctgtaatcccagcattttgggaggccaaggcaggaggatacctggagccccggagtttgaaactagcctgggcaaaatagagagaccccccatctctacaaaaataaaaataaaaaggaaatttacaatttttggctaagaggatatagtatcatgtgagagaactttaaaacaaacttaatccaggcagtgccaccaccctctgcccccacccatcttcattagtactggatcaggaagtactttatactcagttatctttgcttttcggtgctgtgaccttgtataaaagttgctaccaagctgggcrtggtggctcatgcctgtagtctcaactactcaggaggctgagatgaaaggatcatcg

SEQ ID NO: 181227 - DNA, 633 bp, Homo sapiens
tggaggaagtctctctacaagaaaaaatatttggagtgttttctgtaggggatatctttgaagattaaccttcattcatcacttcaatttgttctgtttctcagcaagaatgactttttcgttacttctattcaactttgctcttaataaatrgaaaactagagaaaaaataaatatctgtatgacttccacaaagtggtataatgtccttccacaatatgtatgttaacacttttatttcaagtagctttttgatgattatataattgttctttttttttaatctacagaatttaatcaacctcatatagtggccaaggaacatattaaataagtttttcaaggtcgttgaaagaatgaatgggaaagcaagattaaaattctgatatcccacagtgatgttagctggttgccaacactgttgctctaaaaatgtagttcttaagtagaaacaattttttagttggaatttctcaaggtaattctatgattttgtgaggaaaaatgacatagaattgaccaaaattccttttgcaggcataggttcctaactgtgaatatcctgattttgaagaaaacagtagattaatttcaactgctggcagctttcacttgaccttgcaaaggttacaa

SEQ ID NO: 181228 - DNA, 633 bp, Homo sapiens
tggaggaagtctctctacaagaaaaaatatttggagtgttttctgtaggggatatctttgaagattaaccttcattcatcacttcaatttgttctgtttctcagcaagaatgactttttcgttacttctattcaactttgctcttaataaatggaaaactagagaaaaaataaatatctgtatgacttccacaaagtggtataatgtccttccacaatatgtatgttaacacttttatttcaagtagctttttgatgattatataattgttctttttttttaatctacagaatttaatcaacctcatatagtggccaaggaacatattaaataagtttttcaaggtcgttgaaagaatgaatgggaaagcaagattaaaattctgatatcccacagtgatgttagctggttgccaacactgttgctctaaaaatgtagttcttaagtagaaacaattttttagttggaatttctcaaggtaattctatgattttgtgaggaaaaatgacatagaattgaccaaaattcctyttgcaggcataggttcctaactgtgaatatcctgattttgaagaaaacagtagattaatttcaactgctggcagctttcacttgaccttgcaaaggttacaa

SEQ ID NO: 181229 - DNA, 555 bp, Homo sapiens
taaacaaaataagtgagcaaaataaactttaatctctgaaatttggccaataaaaaaaaagaagcaaacatggtttagtaggatgccttgtcagtgttgaaaagtgggcccagaaggtctctactggggtgcaatcaagcgctcagtccttcagctctgtgcttgtcaaatccagggagcccagagcaagctaaatggctgttatgcttgataacagagctaatattaaaaataactttaagatactggaatgctgttaaaaactaagaaaagttaaaattcataggaaatgtatttataatatgtatatctccatatattttacattttaaatatatttgcattattgccgttaatccactcttagagctgaccaacagtgagacagactccttacagagaacactaggagagagtttacaaagtctatacagggaggcggtcagtgtaaggtgcagggtgacctttgttgaggagmtgaagaagtcttccttgtattcagagcctgactgaagggcttctctagtcccgcttgattctaaaattctcaagctt

SEQ ID NO: 181230 - DNA, 489 bp, Homo sapiens
ctgtgacctggaagccatctccctgcttaaagttgtttcacttttacttcaagttgtcccrcctttctggtccaaatcaatgttcattttacatatgttgattatgtttcatgttttcctaaaatgtataaaaccaagctgtgctctgactacctttggcacatgtcatcaggacctgactgtcttagtccatttttgctgctatatcaaaattccttagactgggtaatttattgacaaaagaaatttatttctcatagttttggagaaatctatgtaccttgtacatagcaacaagatcaatgtaccttgttgctgtgttctaaaatggtagaagggcaagaagggccttgttagttcccttgagcccttttataagcctactattcccattcatgaggacggaatcctcatggcttaattacctcttaaaggccccatctgttaatactgtcacattgggtcttagagtccaaatgtatgaatttt

SEQ ID NO: 181231 - DNA, 489 bp, Homo sapiens
ctgtgacctggaagccatctccctgcttaaagttgtttcacttttacttcaagttgtcccacctttctggtccaaatcaatgttcattttacatatgttgattatgtttcatgttttcctaaaatgtataaaaccaagctgygctctgactacctttggcacatgtcatcaggacctgactgtcttagtccatttttgctgctatatcaaaattccttagactgggtaatttattgacaaaagaaatttatttctcatagttttggagaaatctatgtaccttgtacatagcaacaagatcaatgtaccttgttgctgtgttctaaaatggtagaagggcaagaagggccttgttagttcccttgagcccttttataagcctactattcccattcatgaggacggaatcctcatggcttaattacctcttaaaggccccatctgttaatactgtcacattgggtcttagagtccaaatgtatgaatttt

SEQ ID NO: 181232 - DNA, 506 bp, Homo sapiens
tccgggtttgagcagggtcaaggggaggaggacaaaatttgcaaatgtaaggagggggagaaagtttgcaaaaataaaagcacagtttattttcaagtgattaccgtgctcggagtacgtgaacaccagcagatcctccaggatttggaccagcgtttctatctgttttccttcctggacattgttcagcctgactatcaacttcttcagagtttcctcgtcctcttcgcacccctgacagctgccactagccatggtggcacctgcttccaacccgccgccctcccagcatgaacgtccgctgctcagggaaccggcaggggcgccggccacagctccccgggggcgagctcagctcaccgcccgcagccagcgctccccgcggsccccatcgcgcccacgcccgcctgtttatgaggaaggaggcagctccccgccccgcgttgccctccctctccggagccctcctgctcggcttcctcctcccccactcaggccccaaaaac

SEQ ID NO: 181233 - DNA, 600 bp, Homo sapiens
tgtgtgttgaggggcagagggagttcaaaaagaagctgaaacaagagctgtgagttgaacgccagagtagtctygtgggaaagcatgaatcctggcgctgcattcaacaaaccagtttcagactctctgcaaggtaaggtctcaaccagagtctcccatattaagcctggatcatatcctaaactgctcccaggtcagtcctgtgctctgactcctggcaaacacctctgaaagagcatctttaatttaagtcctcaggatgctcaataaaagagaaactcacaaccatacaagaaaacaaggctccgcaactgacaggcagtcagcctagaagcagttggtttagactccccagaactttatatatagttatcagatacaaaacacaaaatagccatgtattaatcattaaataaataaaaggatgtttttaacaaaaaagaaagggtaaaaaagaaaaaacaagaggctgccaaaactcacctggtatatgtgaaaataaacagagaagattttttagaagtgtttttaaaaatctaataaatgaccaagttaaatttatcaggaagtgcaaagtagcttagtattagaaaacctgta

SEQ ID NO: 181234 - DNA, 537 bp, Homo sapiens
tttttatgattttttgtgactgttagtgggagaggaaataaacattgttyccctgtgagttatctgaagctctggtcaccaaaaggccactaaattaacttttggaaatttgagttgcactaggcaggatcctgatacttgggacacccgaaaagtaatcagctctcagagctattagagctgagacaaaggacagggtacatgaaatgaaaggtgaaaagttgagagaagcaaacctaaatactcttctcttggtattcagaaatacttatgagtatgggtgtctataaccccaaagttttttggttttgtcttttgattgtttgtttgtttgttctgttaagtacctaagtaatgtgtttttaggaaaagaaacctagcaagaacattgtagacaaggctaggcaaagatgatctatccttcaggtgatgtgtctgtcctcaagatcacttacaaagaagaggattggactggaagttactacttcacaattttagttttgttttcacatctgttacttcaatactgatgacaat

SEQ ID NO: 181235 - DNA, 580 bp, Homo sapiens
accagaaaaaaaaataataaactaaggttttgaaaaggaaattcattttgaatgacyaataagtattttttaatgtcatcattataaaaaaaatgtgttcctaaacatgagtgatgcacaagcataaagtgcaattgtgtgtgtgtgtgtgtatgatgacaatgaaagggaaaccttgaaaataaattaacaaatatttacaaaacctttatgaataaattattgaactctgttaaaaggcattaaaaaggcatgaataaatattaatatcacattaattaatgggaaaactaaattcaaaaatatgtcaattctctacaaagtaataaaaaacaatgcaagattagtgaaattctcaacaagatttacatagatttcagcaagatcaaaaggcctagtatagactagacacttttgaagaaggacaagatgggagaattgccatcttgtccttttggatgtccaattgacatccattcagagtatgtagtagcctttctctatcaatttctgaagaaggaaaaagtacccctaggatgaaagcggggagccctgaaagcacatagtttacccagcaggc

SEQ ID NO: 181236 - DNA, 600 bp, Homo sapiens
tgtgtgttgaggggcagagggagttcaaaaagaagctgaaacaagagctgtgagttgaacgccagagtagtctcgtgggaaagcatgaatcctggcgctgcattcaacaaaccagtttcagactctctgcaaggtaaggtctcaaccagagtctcccatattaagcctggatcatatcctaaactgctcccaggtcagtcctgtgctctgactcctggcaaacacctctgaaagagcatctttaatttaagtcctcaggatgctcaataaaagagaaactcacaaccatacaagaaaacaaggctccgcaactgacaggcagtcagcctagaagcagttggtttagactccccagaactttatatatagttatcagatacaaaacacaaaatagccatgtattaatcattaaataaataaaaggatgtttttaacaaaaaagaaagggtaaaaaagaaaaaacaagaggctgccaaaactcacctggtatatgtgaaaataaacagagaagattttttagaagtgtttttaaaaatctartaaatgaccaagttaaatttatcaggaagtgcaaagtagcttagtattagaaaacctgta

SEQ ID NO: 181237 - DNA, 634 bp, Homo sapiens
aatacaagctgctgtgtttcaaaaaaaaaatctttaaagttgtcctattgcttttttggtaaacacaggtgaatttattgtttgaggtactcttcttccttgcataagggggtctaaaactcttcattgttaaggtcagagtctttcctctgctgggaagcctcagatgcagactgccaccactaaaataagtcataaaacagaaatcccaagccaagaccacataagccaaagtatcatgcacccagcatatgtacagagcacaaacctattatttcacacctggtgcaatgccagtggagattctagaagcacagaattaaactgttatttttgacaaagtagtagtatgtgttggcattcagtaaatttgcttgaaattctaacaacttccctatatagaatatctacccacctgacattttttctttatatgaaatcttataatagcacatctgtaataacatttcctgttttcattttttccccaggaacactgttgactccyactgtataagaactacagtgcatctatctccattagcattgtcacacgggttttataaaatcatattacaaaatgtgggtcagtgatcactgagtcatgtaatttatcaagacaatacccagatgc

SEQ ID NO: 181238 - DNA, 615 bp, Homo sapiens
cccattttattcttctagaagagattatctttaaaacataaatgaagattaaaattttatcttgctggcataggccctttgctccagcctgtcaagagctttctgaatcttgataatgtttcaacaatactttgcctccttctcagctttttgcagtccrtaaaaaagactttgccacagttcttgataaatacactgaataaaacagaatcaaagaacgggcatagaaaaatgccaacagaattctttttacttgctaacaattttatacattgacatttcatgcgacaattttccaaatagttacaaactgaccttcattgctacacgttcatagttctccatcatatccacaataatatgatgagagactgtcaaataacttggtgaaatcaatgtgcattttctggcttacaatcctccaaaggttctctattactctcagagtaaagtctaaagttcttaacatggcttttagtttggactcttgtctgtttcttctacctttctctctgcattccttactctccactttgaagtctatgcttcagtcttcctgaactacctacggcctcctaagccacctcgctctgtcagcttgaagcctttcacctc

SEQ ID NO: 181239 - DNA, 399 bp, Homo sapiens
tctttgtgagggagtcttcttgcagatcatcctggtagaccttgggggaaagtgcttggtttgggaggtgcaacatcccataattacccctgcaatgtctaaaccttcacagaacaaagaatcatcactaatgtttcacaatgcacaaggctcctttgtatgcactcaaggktcatgttttatcttattttacccctgctgtttggagagtgaggtcccatggggattttgaaagcaacacaagttgttcctgtctccaataagtgtttgaatgaagtaacaggtgtgcataaataaatatagttagaaaaagttaatatcttctcactgagacatgtgcttatgtttggttaaggtctctgttttcatcctcatcatctctttgtggctctaaacaat

SEQ ID NO: 181240 - DNA, 555 bp, Homo sapiens
gcgtggtttagagtgttacagagttcacatcctgtgttggccatgcagagctcttagataggcaagacagtgacaaaaggccaggccactcaccagagggtgaggatggatggaatcatgrccaagagaatgcactccctttctccaagcattggattgggaaataaaaaatgtcttctggtcttcacgtggaactttcatctgggttgaattcaagcattggtaattcctttataaggcatgatcatgaactctggcagtggagaacaagagcagtgtccaattcagtctgatggtgagccccctgcaggcagcatccaagttgagattgaattggacatccccaaggagctcactgtcagactgaattggacacctgtgggtgtgcccttgtttgtttcctcagaacttagctaagaacatggtggatgctcagcaaatgtttgctgaatggtaaatgaccaaatgaatgaacaaaacctgagtaccccttagtgaacagtgggaacatgcctggcctcacgaccaatggaggtaatgctgtgggcttgtcac

SEQ ID NO: 181241 - DNA, 484 bp, Homo sapiens
aaggccatagtcacccaaacagaatggtactggaataagaacaggcatatagaccaatggaacagaatagagaacccagaaataaacccaaatacttaaggcaaactgattttcaacaaagcaaacaaaaacataaagtggggaaaggacaccctattcaacaaatggtrctgggataattggctagccatgtgtagaagaatgaaactggatcctcatctctcaccatagacaaaaatcaacccaagatggatcaaagacttaaatctaagacccaaaaccataaaaattttagaagataacctcaaaagaactcttctagacattggcttaggcaaagaggtcatgaccaagaacccaaaagcaaatacaacaaaaacaaagataaatagatgggacttaattaaactaaaaagcttctgcacagcaaaagaaataatcagcagagtaaacagaccaccaacagattgggagaaaatcgttg

SEQ ID NO: 181242 - DNA, 541 bp, Homo sapiens
ctggtcctcaacgccttttgaaatgtaagatgaagtctttttctaagatggagttacttatgtcaagggcactctatacactgacctgcagtcaagattcagtttctccacaaagatatctctttctgcttagaaagaatggactccaatcccagtgagttattagcaatgtgaaagtttcaattttcttgtctataaatgaagatcattatagtacctgcagggatgtgagaattgggtgagctagcctatgagaagtgcttgtaggaagtgcgcctccaatgctawccatgatagcatgtgttgttatgtcttaatgtagcaggccttggtactcacctccctttccacactcctgtggcatttattgcctacttagtcttctggtgctcagtatcctctggagagaaagaagcccttccctgtcccctgccccctttattgtctgggatctgagcaagttaagatatgggggtaggtgggggagtgagggaaaaaagaagcctgttaattaaaccacagaactgtacagatgtatcta

SEQ ID NO: 181243 - DNA, 603 bp, Homo sapiens
aaactaaatgaaaaaagggggaatggaaatcaatagatgccacaccaagagatattagaattatctgacaatgattttaagcaattatcataaaaatgcttcaatgagcaattacaagcaccctggaaaagaagaaaaaaatggaaagctgcagcaaagaaacaaaaggctcaggaaaagctgggtgcaggggctcacgcctataatcccagcactttgggaggctgaggaagcactttctcaaggctaggaagccaagccaagaactgtccacctacagttcctagagatttggrtgaattcctctcttctagaggttcccaaaatttcctgggccaggaagtgacctttgtttctcatctgtgagactggaaacctataaatcaggtaccagaccagtttgcccaataggactttgtaaacattggctccataaaaatcagtcttagttcttaaaactgtctgatcatttctaattctgtgacgcattcccaaatatgacaattgttgcagctcaggaaacaattccccaaagtatgacactttggtatgctgattgataaacagcaggaaacagtggatgcaagcagaggttctctgagg

SEQ ID NO: 181244 - DNA, 438 bp, Homo sapiens
ttttacacctgggccgaaatgatgtctattatgaatatcctgttcacaggagaagaaaggggaataattaggagagtgaccrtaaccaactgggagaggcaacaccctcccaggcaagaagtcttgccagccaaacaaaaatttccaaatgtcaatcccgaatgggataataatgatcccaggcaccaggcctgaatgcaagacttcagggaactaataattaaagggatcaaagagtccactcctaggacacaaaatgtttcaaaggcattcaagattcaacaagaaaaaggaagaaactccctctgcattcctacagaggctcaaagatcagatgagaaaacactctggattctatccagaggacccattagggcaaggccttttgaaggtctttgtaactaagagctggcctaacattataaaacaattacaaaa

SEQ ID NO: 181245 - DNA, 438 bp, Homo sapiens
ttttacacctgggccgaaatgatgtctattatgaatatcctgttcacaggagaagaaaggggaataattaggagagtgaccataaccaactgggagaggcaacaccctcccaggcaagaagtcttgccagccaaacaaaaatttccaaatgtcaatcccgaatgggataataatgatcccaggcaccaggcctgaatgcaagacttcagggaactaataattaaagggatcaaagagtccactcctaggacacaaaatgtytcaaaggcattcaagattcaacaagaaaaaggaagaaactccctctgcattcctacagaggctcaaagatcagatgagaaaacactctggattctatccagaggacccattagggcaaggccttttgaaggtctttgtaactaagagctggcctaacattataaaacaattacaaaa

SEQ ID NO: 181246 - DNA, 487 bp, Homo sapiens
tccctgcttcctcttggcagagattcttcctcttttccttcactctgcaggatctgaaaggacacagactcctttccaaagaatgctgtgtattgaaatgcagagaaacagaaagtagatcacaaaattaactctgtggaagtggttacaggacatctcaaaaggtcttggcatcagctgtccctggtctccactcagttctgccctcctargtctccttttgttctttctcaatgagccccacagaagtcctcttcctttttcccttttgcacacccatgtacacatccatgatcacaccccaggctccatgacccatgacccacctctgtgcccactactgcctgcagtgctgcccaggccagggaacgttgcactactttgatctctatggtattgatctttggcttccacaaaagaagggaagcgggcacagctcaacaatgccaattaaatttttagttctcttacagagattattttataa

SEQ ID NO: 181247 - DNA, 258 bp, Homo sapiens
cacaatagggtttgcacttctatgagaatctaatactgctgctgatctgacaggaggaggacctccggtggtaatactagmaatgggtagcagcagataaagttttgctcacttgcctgcccactgcttacctcctgctgtgcagcctagttcctaactggtctgcgtcccagaggttgaggacccctgagctagaggatatgagttgtggcatccatgattatggtatatggcattttatagctacgtggcatcagt

SEQ ID NO: 181248 - DNA, 366 bp, Homo sapiens
tcttaacagggccttttgcagggcaaatgtttttcattttaatagtttatctattctttcttttatgtattatatttttggtgttatgtccaagaactcttcaccaagatttaggtctcaaagattttctcttatgttttcttcttaaagttttatagtttatccattacatttatatcaatgatccaatttgagttaatttgtgtataaggtcaaaggtttagattgaggtttcttggttttgatttttgttgttttttttttttttttttttttggtctatgagcatctagttgctctagcactatttgttgaaaaractatccttccctcattgacttgctttggcaccactgtcaaaaacca

SEQ ID NO: 181249 - DNA, 573 bp, Homo sapiens
aatgaggttatgtagcatgcagtagcaatagtttggtcttttatattactatatatagtattctctcatatgactaatttatctgttttactactgataagaattttggactatcagtttgagactattatgaataaagttactaacaacattcttgaacacatcttttgggtttatgtgcacttctcttgggtatttacctggaagtagaattgctgggtcacagggaaagcacatgtttagctttacatactgctaaacaatttttcaagtggttgtaccaatttatacttgcaccagcatggtgtgagagttctcattgcctcataacctttttaatacttggtattgtctattgtcagggtttgttttttgttgttgatggcttttttttttttttttttttkgacagagtcttgctctgttgcccaggctggagtgcagtggcatgatctcggctcactgcaacctccgtctcccaggctcaagcaattctgctgcctcagtctcccaagtagctgggattacaggtgtgtgccacgatgcctggctaatttttgtatttttagtaga

SEQ ID NO: 181250 - DNA, 573 bp, Homo sapiens
aatgaggttatgtagcatgcagtagcaatagtttggtcttttatattactatatatagtattctctcatatgactaatttatctgttttactactgataagaattttggactatcagtttgagactattatgaataaagttactaacaacattcttgaacacatcttttgggtttatgtgcacttctcttgggtatttacctggaagtagaattgctgggtcacagggaaagcacatgtttagctttacatactgctaaacaatttttcaagtggttgtaccaatttatacttgcaccagcatggtgtgagagttctcattgcctcataacctttttaatacttggtattgtctattgtcagggtttgttttttgttgttgatggctttttttttttttttttttttgacagagtcttgctctgttgcccaggctggagtgcagtggcatgatctcggctcactgcaacctccgtctcccaggctcaagcaattctgctgcytcagtctcccaagtagctgggattacaggtgtgtgccacgatgcctggctaatttttgtatttttagtaga

SEQ ID NO: 181251 - DNA, 375 bp, Homo sapiens
tgaagaatagaggcaagaggatggtagctgcagataaggaaagctagccattttatttgtcgtctataagagattgaattaactgccctttgctgttccatctcttattataagaggctacaggattagtgggtagagataacccrttcctgttaataaaaccccattgagtggcttctgtttactttttaaattttttaattataatttttttttttgagacggagtctcactctgtctcccaggctggagtgcagtggtgtgatctcagctcaccacagcctccacttcctgggttcaagtgattctcttgcctcagcctcccaagtagctgggatgacaggtgaacaccatgacgcctggctaatttttttg

SEQ ID NO: 181252 - DNA, 549 bp, Homo sapiens
aaataagtgctattgtacaggcataaagttctgaagaagtgcaaaggagaaaggcatctatgtattttcattggagatttcagcaaaaattctcatccatcatgtttaaacatctcggaagtaaaaaaatgttggtgaataactatcgtagtttcagaactttactgcttggagaatgagaaaaacaattcactggtacctttgactctttgtctagaagtgttgctgtaagccagctttttgttcttgtcarataaattctagagaccgtgaaaagcaacatcatacagtatttgcagtcactagaaataacatcagtccttttcttgtgatagcgttggatgacaccattaccttggctacctgagctaacttcaacctcattgtccttcccagggagtagtttcccagagtagtattaaaagattgacagcctcttccttggcccccacaaacataatgcagaaggcttccaaaagaccagtgctagcatactctttcaaaaggaaggcactccaaagctccatgagtcagaagaattaacaggca

SEQ ID NO: 181253 - DNA, 549 bp, Homo sapiens
aaataagtgctattgtacaggcataaagttctgaagaagtgcaaaggagaaaggcatctatgtattttcattggagatttcagcaaaaattctcatccatcatgtttaaacatctcggaagtaaaaaaatgttggtgaataactatcgtagtttcagaactttactgcttggagaatgagaaaaacaattcactggtacctttgactctttgtctagaagtgttgctgtaagccagctttttgttcttgtcaaataaattctagagaccgtgaaaagcaacatcatacagtatttgcagtcactagaaataacatcagtccttttcttgtgatarcgttggatgacaccattaccttggctacctgagctaacttcaacctcattgtccttcccagggagtagtttcccagagtagtattaaaagattgacagcctcttccttggcccccacaaacataatgcagaaggcttccaaaagaccagtgctagcatactctttcaaaaggaaggcactccaaagctccatgagtcagaagaattaacaggca

SEQ ID NO: 181254 - DNA, 549 bp, Homo sapiens
aaataagtgctattgtacaggcataaagttctgaagaagtgcaaaggagaaaggcatctatgtattttcattggagatttcagcaaaaattctcatccatcatgtttaaacatctcggaagtaaaaaaatgttggtgaataactatcgtagtttcagaactttactgcttggagaatgagaaaaacaattcactggtacctttgactctttgtctagaagtgttgctgtaagccagctttttgttcttgtcaaataaattctagagaccgtgaaaagcaacatcatacagtatttgcagtcactagaaataacatcagtccttttcttgtgatagcgttggatgacaccattaccttggctacctgagctaacttcaacctcattgtccttcccagggagtagtttcccagagtagtattaaaagattgacagcctcttccttggcccccacaaacataaygcagaaggcttccaaaagaccagtgctagcatactctttcaaaaggaaggcactccaaagctccatgagtcagaagaattaacaggca

SEQ ID NO: 181255 - DNA, 562 bp, Homo sapiens
ccatctttacattccaaaagaatccaacatgtgttatttctttgaggcagtgattgtgaaagttgggttttctttttaattccattgaccatttgtgcaataggaattagacataattagtcactgaaaacattcgtcacattgacccatttggaaaaagtgtgcttwttttttttttttaaatttgttcagggggaggggttttgtaacctgaaatttttccctttttcttctgtttaaactatatcaaatcattctattatagtgttatttaatatgtaaattgtattgctatacataaaataaagtatggtttttgatgtattcagtagtgttgagcatttctatgaaaatgtctatatccaataaaataggttactagtctcccttaacagatcacattaatacccaccaaccctctggtctaagttttcatggtagtaaaatgaacattggtagtcgtctttacacaggcagcaaaccaaaaagaatggtctttgctgggttgatttatcaacgttctttctcctttaaagagtaaacaatgacagttttacctgct

SEQ ID NO: 181256 - DNA, 581 bp, Homo sapiens
ccttgtgtgtcttgtttatcattgtgctcccagctcctcactgcagatagatcaaggaatagtgaataaatgaggraaagtatacagggatagacctcaaaatattaatagtgatcatcactaggaggaagattttgggtgtttttaattgatttttttctttttgttcatttgtcttgcctaatttttctgcaaagatgatctgttgcttatataatactttatcaattactccagtgcttagccaggcttaaggaagtagttttaaggattgcagacagcggcgggaatgtgttgtctgcatacttgatgctgtgcagtgggtgctgaataaacatttgccaaatccattgaaatctttattctacgggaagacattccccacaaagttctgtagttagttgcccacccatatatttgtgtgggaggcaagtgcatgatgtgcagcaaggtacagatgcggagctttgtcccccaggtttctgatccttatccccagtcgtgtgcttttcgctggcaatcatggagttattttgctccagggaaaatccattataaacagcagcacatggggcactaga

SEQ ID NO: 181257 - DNA, 552 bp, Homo sapiens
taaaaaaaacaaacaagcagatgacacgtaagggcttcaagaccttgtctcagatgttgtctggcaagggcctctgattctgagtgcttgccttcctgaagccctctgacccctttaaagagctgtctgaggcttagggggcctttgcatgaacaatgtggtgctattgtgtacttgggctgtttgatgacgatgttggaaggggatataaggtgtggttttgawcttggtgctggggatttagaatagcaaattattcctctgtaacgtaccaaatttagaaatattgtgagataaccctagcactctgtgtggtaggtttactctctaccatgttttcacgtatttgagtagttaaatactaagcctttccctttgaactatcagtttggatgcggtgatgataaaaaaaatggatatgctgtagcaattttgggcccctccaacaggctgaatgttgtccttgtatcttgttacttttacatgagtttaccctcagtgctgtgtgatgtttaaagctgggaagatctataaaataagaattaaaagaag

SEQ ID NO: 181258 - DNA, 584 bp, Homo sapiens
aaagggcttggttccaggacctggatcccgggcgggaatcctgccctgccacctactgttccttcagctgagagctgatgaaaccacacaagaatgtgatgtttgtggtaggcctaggtttcacagtcattcctgaggttagatggtatcgctgcttagagacctgttttttttccagccacccatwggtattttcctttggctattttactaaccatgtttctttgttgttggttgtaaaatgaggttggtggaaaaggattaacacattctcagtttctccttgcttttggaccccgaacttggtggttgataccttaagcaatcttcagagctaccctaggacctagatatatttccacccccgccaggtaggaagatacgagattcagacagtttaattaagttgccctgactcacactgtgagtaatgggtagagctgggattcatatcaaatacaatagaaactgaaattgcagttctattatactgttgtggagtaaaagtgaagaatgattctggggggttattttagaggacaggaagtgggaggggggcagtattgggcagaggtaggagtctg

SEQ ID NO: 181259 - DNA, 543 bp, Homo sapiens
ataacatatcatgatgattatcctctaggcctatttctattttataaaacaatgaatgargtttacccacattccaatgctgtaagaaaatactgagctttgacttgcatacatgcaaatgaaaaacacaacaacaaaaatggaaaatcaggaaatcactacaagatgtaacatcattaaaacattttggcagactgcaacaagatataccatttaagagtcagacaattagaaggcagggaaaaaccaggaggctccccctagttgaaaaacaagcctcactaaggttttggagttcctttcagtggtaactactaaggattctttaatgattaaactcgttttaaaaacaactctgaaagtttccaattgactcttaaatttaaaaagaagaaaaaggacagagggggaaattaattcagtcacagtgaaatctttacctttctagatctcacgtgaccttggcagaaaataataagaaaaacaactacaatagcaatcttcatactgattcgcaccatatgccaaggactatggttaact

SEQ ID NO: 181260 - DNA, 441 bp, Homo sapiens
gcagagggaaatgataacatatcatgatgattatcctctaggcctatttctattttataaaacaatgaatgaggtttacccacattccaatgctgtaagaaaatactgagctttgacttgcatacatgcaaatgaaaaacamaacaacaaaaatggaaaatcaggaaatcactacaagatgtaacatcattaaaacattttggcagactgcaacaagatataccatttaagagtcagacaattagaaggcagggaaaaaccaggaggctccccctagttgaaaaacaagcctcactaaggttttggagttcctttcagtggtaactactaaggattctttaatgattaaactcgttttaaaaacaactctgaaagtttccaattgactcttaaatttaaaaagaagaaaaaggacagagggggaaattaattcagtcacag

SEQ ID NO: 181261 - DNA, 543 bp, Homo sapiens
ataacatatcatgatgattatcctctaggcctatttctattttataaaacaatgaatgaggtttacccacattccaatgctgtaagaaaatactgagctttgacttgcatacatgcaaatgaaaaacacaacaacaaaaatggaaaatcaggaaatcactacaagatgtaacatcattaaaacattttggcagactgcaacaagatataccatttaagagtcagacaattagaaggcagggaaaaaccaggaggctccccctagttgaaaaacaagcctcactaargttttggagttcctttcagtggtaactactaaggattctttaatgattaaactcgttttaaaaacaactctgaaagtttccaattgactcttaaatttaaaaagaagaaaaaggacagagggggaaattaattcagtcacagtgaaatctttacctttctagatctcacgtgaccttggcagaaaataataagaaaaacaactacaatagcaatcttcatactgattcgcaccatatgccaaggactatggttaact

SEQ ID NO: 181262 - DNA, 543 bp, Homo sapiens
ataacatatcatgatgattatcctctaggcctatttctattttataaaacaatgaatgaggtttacccacattccaatgctgtaagaaaatactgagctttgacttgcatacatgcaaatgaaaaacacaacaacaaaaatggaaaatcaggaaatcactacaagatgtaacatcattaaaacattttggcagactgcaacaagatataccatttaagagtcagacaattagaaggcagggaaaaaccaggaggctccccctagttgaaaaacaagcctcactaaggttttggagttcctttcagtggtaactactaargattctttaatgattaaactcgttttaaaaacaactctgaaagtttccaattgactcttaaatttaaaaagaagaaaaaggacagagggggaaattaattcagtcacagtgaaatctttacctttctagatctcacgtgaccttggcagaaaataataagaaaaacaactacaatagcaatcttcatactgattcgcaccatatgccaaggactatggttaact

SEQ ID NO: 181263 - DNA, 586 bp, Homo sapiens
gtgaccttggcagaaaataataagaaaaacaactacaatagcaatcttcatactgattcgcaccatatgccaaggactatggttaacttgcaaaaatcaccttatttattagcacaccaccataaggttcacactattattaattccaattttttagatgaggaattgcagaaggtaaagtgtaatttaaaaaaacaactaagagattaagaaactatattaaagataaaaatttaagtctcttctgtccagaaaagcaggccacatctatgaattttatatacataaattcttaagtcttcatataatgaagatatagagataggattatccaaccagtcctgattagcagaattcagaagtcaaccttcaactgagaggcaggtgtaaagatgtataaagaactatgcataagagatactagtgtacgacaaagrctactccaataagtggcaacaggagaagtaaagaatcaagacagatttttaaagaaatacacacatcatggatgcaacatgatatccaaggaagtcagtgatatatacaaggggtatcttttcatcatcttccaggcattaattgccaa

SEQ ID NO: 181264 - DNA, 586 bp, Homo sapiens
gtgaccttggcagaaaataataagaaaaacaactacaatagcaatcttcatactgattcgcaccatatgccaaggactatggttaacttgcaaaaatcaccttatttattagcacaccaccataaggttcacactattattaattccaattttttagatgaggaattgcagaaggtaaagtgtaatttaaaaaaacaactaagagattaagaaactatattaaagataaaaatttaagtctcttctgtccagaaaagcaggccacatctatgaattttatatacataaattcttaagtcttcatataatgaagatatagagataggattatccaaccagtcctgattagcagaattcagaagtcaaccttcaactgagaggcaggtgtaaagatgtataaagaactatgcataagagatactagtgtacgacaaagactactccaataagtggcaacaggagaagtaaagaatcaagacagatttttaaagaaatacacacatcatggatgcaacatgmtatccaaggaagtcagtgatatatacaaggggtatcttttcatcatcttccaggcattaattgccaa

SEQ ID NO: 181265 - DNA, 567 bp, Homo sapiens
tattctaaactattgccactgtcaatagctttaagaaaacagagattgttcagttcaatgtttaccaaaatgtagtttcagctctattccttgagaatcacttttggggtgtttgttaaaaatatagaatcctgggcctccactgtgggtgtatagagtccgtatgtgtaacaagatctcccacataaatcaagtgccaagtaatgcttgggaagcactactctaacaaagaggactaaagtcatctactaaatggcagcaattacaatcttctacactctctttctgtgtagacaacttatrttttaaaaaatgtgttggttgtcattgaaggatacaagtttgcaattcagagtcatgacattttcagtttcttgaggttgatgtgagaaataaagctcttgatggaaataacccagcacagtgcttggcacacagcagtagctcaatcagtggtagaggtgaccagtgttgtatctcccccaaatactcctctcacacaactgtgtgaatggtgtttcagaaaaaaatactcctctcacacaactttatgaatggtggttcaga

SEQ ID NO: 181266 - DNA, 546 bp, Homo sapiens
taactatcattcaacagatttttttttcagtgcctactaagagccacatactcttcaagacactgggatgtagcagtgaaaaaaatagaaaaagcttctgctgtcatgaagcatrcattctaaggaggagccaggccataaataaatatagaatctacagtgggggtagcaagtgctgaggctcagaatgatgacatgggggtgctatttaaaatggtgtgctcagggagacagtcgtgagtgaagtgtgggagtggggcacacaagtaactgaggacaagtatcacaagcaacgtaagataaagtgcaaaagccctactgtgggttgttcttagagtgtttgatcagtaaagaggtctgtgtggccacaataaacagagggaaaggggtggaagagaagatgggaccctgcagatcttgaaggctaggtagggatggtgaattttattctgagtgggtggaaaatcactgaaagcctgtgaatcattcgtatattaaaaggatcactttagtggatgttgaaaatgtgttttagagttaagggtg

SEQ ID NO: 181267 - DNA, 448 bp, Homo sapiens
ttttatttaataagtttcccaagagtaattttycatcaatttcttccccctttttattactttaggattctaacaggcaattatccatcatttctctctcaactgttttgacggtactacagtaaaagaagctcagaaataaggacgttggggggaaaagtgactgtgaatagaaaccaaaaagctaaaaggcatggaggggaagctagagaagagtaaagcacagccccattatttctcttccagcttttgcatataaatatgagtgagctctaagacaaaatgtgctttaagaggcaaacattcaacaaataaaaaaatactaagcatctataacttcacatattgtacttcagatcatttctcttcagcagagatgcaatatttgctgcaatgaaatattttgggattcagttttctgtgttcatactaactactacaatgaaga

SEQ ID NO: 181268 - DNA, 377 bp, Homo sapiens
tggaaaagactaaggagaaacgtatatccctacaaacctcccctccaaacaccttctcacattcttttccacaattcacataacactactgcttttgtgccccttaaatgtagatatgtgctgaaagaaaaaaaaaacgcccaactcttgaagtccattgctgaaaactgcagccaggggttgaaagggatgcagactygaagagtctgaggaactgaagtgggtcagcaagacctctgaaatcctgggtaaaggattttctccttacaattacaaacagcctctttcacattacaataatataccataggaggcacaagcaccattattaagccactttgcttacaccttaagtgtgtacaattcaagtgtgagaa

SEQ ID NO: 181269 - DNA, 377 bp, Homo sapiens
tggaaaagactaaggagaaacgtatatccctacaaacctcccctccaaacaccttctcacattcttttccacaattcacataacactactgcttttgtgccccttaaatgtagatatgtgctgaaagaaaaaaaaaacgcccaactcttgaagtccattgctgaaaactgcagccaggggttgaaagggatgcagacttgaagagtctgaggaactgaagtgggtcagcaagacctctgaaatcctgsgtaaaggattttctccttacaattacaaacagcctctttcacattacaataatataccataggaggcacaagcaccattattaagccactttgcttacaccttaagtgtgtacaattcaagtgtgagaa

SEQ ID NO: 181270 - DNA, 594 bp, Homo sapiens
ctggttgctggcttgtgtctgtagatgtttaagattcaaagactgaaaaatgaggcaaactaacatatttatggctccttccttaggttataatcaccaacagatgagtgaaggacacaggcagaaatctgaattttataaccgcacagcatctgaatcaaatgtctacttgaatagtttccattatccagatcacagctacaaggaccaggcctttgatactctgagcctcgatagctctgatagcatggagaccagcatctctgcttgctcacctgacaacatctctaggtaagatttatttatgggtaaggtttctggtttggaaaagagcctactgctcacaaaaagtaaagccatcaatttgggaactgtatatgcacaagcccaaatttttgagacataaagggtctgtaacgcagaagagggttggtatcatgatggcctttgaaagtagtttctcttaycttgtgtaacttagctagtcaggcatcatataatctgtttccacctttatcctgtttttctccacttgagctcaaatttacactgtgctttaaaattgatttccttctgttggttagctctaagctt

SEQ ID NO: 181271 - DNA, 594 bp, Homo sapiens
aaaatggtgtcttattttatgctgttaaataaccccacctctttgcctcggggaaatgacctaattatatacttggaggcaacacttataatcaggattaaaatagaattgtgctttttggtttggcttcagatagtaaacacgcatggatgactttcactgcaagtcaaaatttggcagagsgttgggcatgatgaaataaaataaacaaattttactttctacttttccttcaatacttaacgtttgattatgtggtactttggttgtaacagatgctgcaggcttactgatacctcaaagcatacaaagtcttaaagatagtctctaactgctatactatcaaatggccagcaaccacaaagaataaaagtaatggtatcttttgcctttgagtctagtgaatcttgataaaatagagttcagctttaaattacatagtacttaacaaaactttatgttagttgctcagaaaacatattatgtaagcagctatagtgacaagaacagagattcaaattctatgatgaccaagataagacattaaataaaatgtgtggtttctccaaactttgcttgaatacaacaagcttg

SEQ ID NO: 181272 - DNA, 569 bp, Homo sapiens
cggttgtgccttcacggtccttacttcagatgaagtctttacattctatcaaaacctttcactctaagagttcttagtcrttgagttttgtttaatttataaaacttgccgggcgtggtggctcatgcctgtaatcccagaactttgggaggccgaggcagtcagatcacctgaggtcaggagttcaagaccagcctgaccaacgtggcaaaaccccatctccactaaaaatacaaaaattagccaggcctggtggcacacacctgtaatcctagctacctgggaggctgaggcaggagaatcgcttgaacccaggaggcagaggttgcagccagccgagattgtgccactgcactccagcctgggcaacagagcgagactctgtctaaaaatatatagtaagaattataataataatttataaaacttgttcttagtgtctttcagttaagagtagcatgaaaaaaatacctcccttgaataagtcaaactgaggcacaacagtttcaggatggaagtttctgggtgaagttgggctggcagctgaacaagtaaatgatagcagctct

SEQ ID NO: 181273 - DNA, 462 bp, Homo sapiens
taaggagcagcattaggaatggggtcctctgggtctttggggcttagtataggagcctggctacacagcccagagcccgtgccttcctrgggcccatgacttgctcctgcccaaactggatgagcagtgtcccacgtgagcaggattcacttctcattcttgacctgtaaatacaaagggaaacattgattctgtctctcccctccctcttcaggtcctgtgcaagctgataaatagtttatacccaccaggacaagagcccatacccaagatctcagagtcaaagatggcttttaagcagatggagcaaatctcccagttcctaaaagctgcggagacctatggtgtcagaaccaccgacatctttcagacggtggatctatgggaaggtaaacagccccctggcctttgggattgttcttttcttctctcctttgccccatctccttgtaaaaactgctc

SEQ ID NO: 181274 - DNA, 539 bp, Homo sapiens
tggtaatgtagaaattattattgtcattggcttgtcttttctaagattaacagaaaataagggagggaaaagtaagtctggaaagacactcactctgtcttagaacaaatggacttagtggccacatacaggagctggtgttgcgggggcgggggaggttgcctgaatgacctttgccctctctgacagctgtggagcttgtacctcatcagmtattctctaatacaaatgaccaggctttaggcatcactttattgacatttttttccactttgtgatcattaccctcttgatgtctttccccataatttactgctttactaattccagacacagaagaccccactacactggaaagagcatgagttttggagtcaggtggatgggttgaaatctcttttgctacatactaactgtgtgcccttgtttaaattgcctagtttctcagagcctcagttcccttctcggtaaacagttctaatgcctctcttttgtagaatttttgtaaggattaactatgtaaagaagctagcacagtg

SEQ ID NO: 181275 - DNA, 539 bp, Homo sapiens
tggtaatgtagaaattattattgtcattggcttgtcttttctaagattaacagaaaataagggagggaaaagtaagtctggaaagacactcactctgtcttagaacaaatggacttagtggccacatacaggagctggtgttgcgggggcgggggaggttgcctgaatgacctttgccctctctgacagctgtggagcttgtacctcatcagctattctctaatacaaatgaccaggctttaggcatcactttattgacatttttttccactttgtgatcattaccctcttgatgtctttccccataatttactgctttactaattccagacacagaagaccccactacactggaaagagcatgagttttggagtcaggtggatgggttsaaatctcttttgctacatactaactgtgtgcccttgtttaaattgcctagtttctcagagcctcagttcccttctcggtaaacagttctaatgcctctcttttgtagaatttttgtaaggattaactatgtaaagaagctagcacagtg

SEQ ID NO: 181276 - DNA, 539 bp, Homo sapiens
tggtaatgtagaaattattattgtcattggcttgtcttttctaagattaacagaaaataagggagggaaaagtaagtctggaaagacactcactctgtcttagaacaaatggacttagtggccacatacaggagctggtgttgcgggggcgggggaggttgcctgaatgacctttgccctctctgacagctgtggagcttgtacctcatcagctattctctaatacaaatgaccaggctttaggcatcactttattgacatttttttccactttgtgatcattaccctcttgatgtctttccccataatttactgctttactaattccagacacagaagaccccactacactggaaagagcatgagttttggagtcaggtggatgggttgaaatctcttttgctacatactaactgtgtgmccttgtttaaattgcctagtttctcagagcctcagttcccttctcggtaaacagttctaatgcctctcttttgtagaatttttgtaaggattaactatgtaaagaagctagcacagtg

SEQ ID NO: 181277 - DNA, 212 bp, Homo sapiens
tgatataatgtgaaatacatagttattctgtgccctagatttctggctcagagcttctaacattctgtaacttcctgaatgataggagtgataggagcatcttttgstttatatacatacattttgttataatatttgattgtagtccttagatcctaacacagagcttctaagaatgtctttttgtatattaacaaagtgactggtggctg

SEQ ID NO: 181278 - DNA, 590 bp, Homo sapiens
ttctaggacagactagcaaacctttgagtgtctaatgtacatcttcctatgatcatctcttttcccccaggaaaaaatttctgcattgaaaaagcaagccaatcacattgttcagcaggctcagagagagcaagatcattttgtgaaagaaaagaataatttaataatgatgttgcaaagagtaagtatttccttttcagcactggctacagtaaaacataggttccaaattcagggaaattgccccctttaaagtaaacaccttttaatagtgaatgtctatacaatttaaggaagatttttatatacttttttatttaatcctccacattcataagctgatactctgaactattaactagcattcagaaaataagcaaggatgttttcttcatgcttttttcacattgtaaaaatcttaacgatggaaartctgtatttttaaatgattgttttcctcttttttaaaaaagtcataccattcatcaaatagttaaaatgcattctaacaccaatttagggtggacttaaggaaaaatgtcctttttactactgtcaaatattttggcccagctgatctggtgttttga

SEQ ID NO: 181279 - DNA, 575 bp, Homo sapiens
agaagatgacctctagtatacagatttgaaattttgactgagtatgatgagaggaaatagaaatgggggaaatatgtgagaatctgatgttagtctctaatgcaaagtcaccatgcttctcagttgcatcraaggttgacttttaagtttaataggttttgtattccttcaggaaaaggagaatctttgtaatttggaaaagaaatactccagcctctctggggggaaagggtttcccgttaaccccaatactttaaaagaggtaagctatgattttacatgtcgctttatgttgccttagaaatcaggagatgtatttcagctttatttgattagctgaataataaaaatattaactcaaaggacctgtgaaagcactcaatgcttggatggtttccctgcctttcattatgtatgctttgaggatttcagagattatccttgtgtctaatgcagatgcacattgtgtgtgtgtatgtgtatgtgtgtgtttgtgtgtgtgtgtctactttgctgggtggtgacattgtgggttaatctggggtttcaaaaacttgaagatccagaccaagatg

SEQ ID NO: 181280 - DNA, 595 bp, Homo sapiens
atgagcaaatatgcaaaatatatgtatatacatacatacacacaacgaaatatcattcagccttaaagaggaaggacaatctgacacatgatacaacayggacgaaccttaaggacattatgctaagtgaaataagccagtcacaaaaagacaaatatgaggtggtcagagtagtcaaagtcacagagacagaaagtagaatggtagttgtcaagagctggaggaagaggggagccgggtgcagtggctcatgcctgtaatcccagcactttgggaggccgaggcaggcggatcacaaggtcaggagatcgagaccatcttggccaacatggtgaaaccccatctctactaaaatacaaaaaaaaattagcggggtgtgttggcccatgcctgtagtcccagctacttgggaggctgaggcaggggaattgcttgaacccaggaggcggaggttgcagtgagctgagatagtgccactgcactccagcctgatgacagagcaagactctgcctttaaaaaaaaaaaaaaagagctggaggaagggggaatggggagtttcacgggtacagtttcagatttgcaagatggaaagaa

SEQ ID NO: 181281 - DNA, 595 bp, Homo sapiens
atgagcaaatatgcaaaatatatgtatatacatacatacacacaacgaaatatcattcagccttaaagaggaaggacaatctgacacatgatacaacatggacgaaccttaaggacattatgctaagtgaaataagccagtcacaaaaagacaaatatgaggtggtcagagtagtcaaagtcacagagacagaaagtagaatggtagttgtcaagagctggaggaagaggggagccgggtgcagtggctcatgcctgtaatcccagcactttgggaggccgaggcaggcggatcacaaggtcaggagatcgagaccatcttggccaacatggtgaaaccccatctctactaaaatacaaaaaaaaattagcggggtgtgttggcccatgcctgtagtcccagctacttgggaggctgaggcaggggaattgcttgaacccaggaggcggaggttgcagtgagctgagatagtgccactgcactccagcctgatgacagagcaagactctgcctttaaaaaaaaaaaaamagagctggaggaagggggaatggggagtttcacgggtacagtttcagatttgcaagatggaaagaa

SEQ ID NO: 181282 - DNA, 656 bp, Homo sapiens
tgcacctgtgccctatacattgtcttcccccttgtccactggattgagtattaaygtccctctgcaaagcctatctttcaggcttcttcaaggatgtgactggtggaaaagaagagataggtgaccgctgcacaaatggttcccctcatctactagcccttcctggaggttggcaaacatgctgtcacatctcccagctcaggaaaaacaaaactgtctcttaaccctccctcctgcaaccaccccatttctctgtttttccttatagcacaactcctaaaaataattatctataatccttctctctctccctccaactctctctcttcacacatctccctccttcagaaattgtattccaacaaggctgtagtcctcatcactccaactgaatcagttattgccaaggacaccaatgacttcaccactttccttctgcctcttcttccttgcttgtttactgtctgcccctcataaaagactgtagtttccaaggcaacagggctgcacctgactgcctgaggttgtgagttatctctagcacctagggttgtgcctgggatagagcaacttctcagtaagtatttgttgagtcagtgacagaacttgaaatgataaaggcagaagaataaaaaattaaactgtgaagataacca

SEQ ID NO: 181283 - DNA, 656 bp, Homo sapiens
tgcacctgtgccctatacattgtcttcccccttgtccactggattgagtattaatgtccctctgcaaagcctatctttcaggcttcttcaaggatgtgactggtggaaaagaagagataggtgaccgctgcacaaatggttcccctcatctactagcccttcctggaggttggcaaacatgctgtcacatctcccagctcaggaaaaacaaaactgtctcttaaccctccctcctgcaaccaccccatttctctgtttttccttatagcacaactcctaaaaataattatctataatccttctctctctccctccaactctctctcttcacacatctccctccttcagaaattgtattccaacaaggctgtagtcctcatcactccaactgaatcagttattgccaaggacaccaatgacttcaccactttccttctgcctcttcttccttgcttgtttactgtctgcccctcataaaagactgtagtttycaaggcaacagggctgcacctgactgcctgaggttgtgagttatctctagcacctagggttgtgcctgggatagagcaacttctcagtaagtatttgttgagtcagtgacagaacttgaaatgataaaggcagaagaataaaaaattaaactgtgaagataacca

SEQ ID NO: 181284 - DNA, 646 bp, Homo sapiens
caccaatgaagtcttctgtgcygggagttttgtttgtggagaggtttttaataatgaattccatttctttagtagataccaaagcattcagatttctgtttcttcttttgtcagcttacataatttgcatatctcacagaatgtgtccatttcaaccaaatttccaaatgtattggcctaaggctgtttgttgtaacatactatttgctttttaatatctgtagggtctgtggtgaaaattttctctttcttgatagtttccctttctttttcaaagttcttcttggtagcagtttattcaattttatcagtcttctcaaggaaatattttaggatttttaaattctattgtacttgttgtttttctatgtaattcttttatcatatagtacaagaaaattctggtctctgcctgtggtaggcagaataagggtccctcaaaaatatccacatcctaatccctggaatctgtgaatatgctaccatacatggcaaaaagaactttgcagatgcaattaaggttttggtcctttagatgaggagattatcctggattttccaggtaggctgaatctaatcacagtgtccttaagagtagagaacctgtctcagcttcacacagaaaaatggaacatgaataggattc

SEQ ID NO: 181285 - DNA, 646 bp, Homo sapiens
caccaatgaagtcttctgtgccgggagttttgtttgtggagaggtttttaataatgaattccatttctttagtagataccaaagcattcagatttctgtttcttcttttgtcakcttacataatttgcatatctcacagaatgtgtccatttcaaccaaatttccaaatgtattggcctaaggctgtttgttgtaacatactatttgctttttaatatctgtagggtctgtggtgaaaattttctctttcttgatagtttccctttctttttcaaagttcttcttggtagcagtttattcaattttatcagtcttctcaaggaaatattttaggatttttaaattctattgtacttgttgtttttctatgtaattcttttatcatatagtacaagaaaattctggtctctgcctgtggtaggcagaataagggtccctcaaaaatatccacatcctaatccctggaatctgtgaatatgctaccatacatggcaaaaagaactttgcagatgcaattaaggttttggtcctttagatgaggagattatcctggattttccaggtaggctgaatctaatcacagtgtccttaagagtagagaacctgtctcagcttcacacagaaaaatggaacatgaataggattc

SEQ ID NO: 181286 - DNA, 616 bp, Homo sapiens
agacttctgctgaccgctgcacctcaaaaggcaatatccccctcaatcactcttttgcacactcttctgtttatctccttagcagcatttaataaaataaatagagatcttgtttacttttttatttctctgagtccggggtatgtttcagaaaagcaagaactttgttgaatcctccttcacacacgcaaagcctatcttaaactttgttaagtggaaagatgcagtttayaatttgcaaagaggtatatgggaagagcttaggagcagagcacccagactccctgatttgaagaatttaatcgaatcttttccttggggccattggaagaatctttgcttcttcctcctgtatagaagccaactgagatattttagactgtggggagagcttcacagaaagatatcaaagatgagggattaaatacaaaggaagttattaatttatgtacattcctttgacctaaggttttttgccttattatcaaattaattatcttattttgccactgaaggggaagagggatattagaagtggtttggggctcattggtcatgatttttgtcaacttctgctccaaggtctgtaaggtttacttcaagggcaatttttcct

SEQ ID NO: 181287 - DNA, 616 bp, Homo sapiens
agacttctgctgaccgctgcacctcaaaaggcaatatccccctcaatcactcttttgcacactcttctgtttatctccttagcagcatttaataaaataaatagagatcttgtttacttttttatttctctgagtccggggtatgtttcagaaaagcaagaactttgttgaatcctccttcacacacgcaaagcctatcttaaactttgttaagtggaaagatgcagtttataatttgcaaagaggtatatgggaagagcttaggagcagagcacccagactccctgatttgaagaatttaatcgaatcttttccttggggccattggaagaatctttgcttcttcctcctgtatagaagccaactgagatattttagactgtggggagagcttcacagaaagatatcaaagatkagggattaaatacaaaggaagttattaatttatgtacattcctttgacctaaggttttttgccttattatcaaattaattatcttattttgccactgaaggggaagagggatattagaagtggtttggggctcattggtcatgatttttgtcaacttctgctccaaggtctgtaaggtttacttcaagggcaatttttcct

SEQ ID NO: 181288 - DNA, 399 bp, Homo sapiens
tgagcacctctgtcactcacccatggctgctcttccaaccgctgatacctgagacctgactgcatgtgaagttagcaaaacagcaaaacttggcatcacagtcctgatacaagctttttacagttcacaaagtgtttccacattcatgatctcatctgtccccactccgtgaggtaggctggccatgtattgctctctctctctcccttcagagactaagaaattgaggctcagagaggctaagtgatgagccccagaacacacggctaggtaatgggagagctatgatttgaatccaggtctatgaccagagtccatgccctctctattatgccacaagtgtcttacttcaattagtgaggtttaygctgtcatttttttttttttaagaattgaatc

SEQ ID NO: 181289 - DNA, 609 bp, Homo sapiens
ggtggtgggaccttagtgttaccaaatacataacccatagttactttcatggcagcagggtacagcagccaagagcactgattttacaatcagatagactgcagagctattgctgaccagctctgtgatctccctaggcccccagttcatcatctgtaaaatggacatatgtagaagtaccttcctcacatagttggctgtacatccatttctattttatgcttcattgatacttattatatctagcatgtgtcatgcactgatctaggagaaggggtacagggtaggccacatggtccagcctctgcctccttataccttgaagcttttaaataatgctattaatgcatcaagatgatactgaacatgcatattaatcaatgaatgacccatatacatctaaaatttctaacagtgatgagtgttrtaaaaaggagaaagaaggtaatatgacagtggatcattgggaaatgcgacccagtgataagatgactaggaattaatcaggcacagaggtagattgatggtatctttcccatccctttgtatctatcctatccttgtcctttataatgtgcctgcagctcttctcatcaagcagtagagcct

SEQ ID NO: 181290 - DNA, 557 bp, Homo sapiens
accacatacaccaaagctagccctggttccataattctcttcctcattccwcttcaaccagccatgtcattttgcaggttctggtacattccatgcaaactgcctccacagggccttcagacttactgttatgttccccccaccccgccccactgcctttttgttttctaaaacatttgaaagtaagttgcagacatcatgctattttatcctaaatgcttcagcacatgccttataagaacagcatcatgcttccacaggaacattagttttcatatctgagaaactgaacattaataatattattcaacatacagttctattcaaagttctccaattgttttatgtgtttcccctataagttgtgtgaatgtggtttttaatatttttactttttagaatctaaccagggatcacaatttgcctttggttatcatgtgttcttagcttcctttaatctataatcatctcttttgttttgtttgttaatttgtttggcctttcgtatcttgacagttttgacaaattcaggtaaactgttctggaaaatgttccac

SEQ ID NO: 181291 - DNA, 600 bp, Homo sapiens
cctctagctttaatcagtgtctttcttgggcaataatgcccaagcaytgatttttttaaatcagaattgtagactggttttggaatcaactttttgtcagtgatgaccttggcaaactcgttaatgaatttctttttgtttgttcatttgagacggagtcttgctctgtcacccaggctggagtgcagtggctcgatctcggctcactgtcacgatctcctgacctcgtgatccacccacccttggcctcccaaagtgctgggattacaggcatgagccaacgtgcctggccattaatgaatttcttaattgaatttccctatgatcagcagatgcattattaccacaaatcttaaaaaatttaatgtcgtgtcctttttaaaatttccacaaccagactgttgaatagtcgcagcttctttcaattttcagttcatcatgatgtttgctgtttcatagtcagcataccattaagtggcttgtgttcattgcaaagctgatagatcaactctttcaatacacaatcaggatctccatttttagcttcatgtgatgtttttctactttttattaacttttgttcatcaacttcagcacaga

SEQ ID NO: 181292 - DNA, 383 bp, Homo sapiens
atatctgtattgaaaagtagtatgtcctaggaaattctaggaatatagtgacagctggaaaacaaaaatcaaaaatccatgaagttaatatttataatgaaactaggtagcaaagtatttttttaagcctcaaaatataagcagatagaaatatgtcaccaatagccacaaactctgcattataccaatatcttcattagaaaaaacaagaaggaagcaacgaatgactaaaggacttgagaatacaaacttccaaattagccaacatgaaactgtcagagaacaacagctacaaaggaggagagttcttacctatttatatgatgagtgaatgyaaggcttacactaaggtgtaaggagctggagctgtctagactttataa

SEQ ID NO: 181293 - DNA, 578 bp, Homo sapiens
tttatggccataatattacatcttgtaaataataaattttaaaagcaaaaatacagcacttgagtagtsactggtaaagaggactgacactttccgcctccatgtctctgtgtctgggctgaagaggaaggttgtctttctgtttgcagccttctgtaactgtctccttgctcaaagctccatcaagtctcctttggtcttcataaatgatactcttttgggattcatgggtgttatttagcacactactgcagtttgcttgccttccttatttactagaaaactatgaattacaaacatggttggtattgtagctttaatgaagagaaaatgaaaataatccagggatatttatctctgcaaaatcacttttttggcttatttcagtttactctatgattctgtctatggatttttgctaggaagaaagtcagtaatgtttttacctttggaagaataccagttaactagtaatcttcagaactctgatactggtaaggcttaagtcctccagacagcacctaatcccaggtccagcagctctgactgtaactgtcagtttgccatttcattcatcc

SEQ ID NO: 181294 - DNA, 620 bp, Homo sapiens
tggttttttgaaaaaaattaataaaatagaccactagatagactaataaagaagaaaagagagaggattcaaataaacacaatcagaaacaacaagggggatattaccactgactccacagaaatgcaaacaaccatcagagaatattatgattacttayatgtgcataaactagaaaatctgaaggaaataaatgaatgcttgaacacatacaccatctcaagactgaaccagaaagaaattgaatccctgaacaaaccaataatgagttctgaaattgaggcagtaatgaattgcctaccaacaacaacaacaaaaggccaggaccacagattcacagatgaatactaccagatgtacaaataagaagagctggagccatttctactgaaaccattccaaaacatttaaggataaggcactccttcctaactcattctataaggccagcatcatcctgataccaaaacctggcagagatacaacaaagaaaaaaaattaggccaatatccttgatgaatatcaaagcaaatattctcaacaaaatactggtaaactgaatcaagcagcacatcaaaaagcttatctaccacagtcaagtaggctctatttctgggatg

SEQ ID NO: 181295 - DNA, 620 bp, Homo sapiens
tggttttttgaaaaaaattaataaaatagaccactagatagactaataaagaagaaaagagagaggattcaaataaacacaatcagaaacaacaagggggatattaccactgactccacagaaatgcaaacaaccatcagagaatattatgattacttacatgtgcataaactagaaaatctgaaggaaataaatgaatgcytgaacacatacaccatctcaagactgaaccagaaagaaattgaatccctgaacaaaccaataatgagttctgaaattgaggcagtaatgaattgcctaccaacaacaacaacaaaaggccaggaccacagattcacagatgaatactaccagatgtacaaataagaagagctggagccatttctactgaaaccattccaaaacatttaaggataaggcactccttcctaactcattctataaggccagcatcatcctgataccaaaacctggcagagatacaacaaagaaaaaaaattaggccaatatccttgatgaatatcaaagcaaatattctcaacaaaatactggtaaactgaatcaagcagcacatcaaaaagcttatctaccacagtcaagtaggctctatttctgggatg

SEQ ID NO: 181296 - DNA, 638 bp, Homo sapiens
ctgtaggttttgctaatgcgcaggccaactaggtattcctggttccatggctcttctgggcatttctcctacaagtggcaactcggagccaggctcctgccctcttggggttcttccaaatcctagggcccaggcgtctctctggacatgctgcacycagccagcagatgatgggagagaaagaactggaggacagagaagtgacatatatatatctgctcacatacctttggctagactttggttccttggctgcatccaacagcaaggcaagataggacatgtaaccactgtgtgcccagtgaaaagggacctggtggtggaatgttagcttttttttttatttgccaaaggtctactcttatttttcctcattctataaactgtcaagttcctttttatttaaaaactaattatttttaaattaaagaaataaagttatctgaagaaaatatgttgtttgaacagtctggaatttttacttaaagagaaagctatagcaggtgcaaaaccagagtaaagaagctgatcagagttgcagggtaagtgtggaagtgatttggacataatttaagatgccagtacttgcgtttatttcccaaacagcaaagaagcagtgcaaagggcataaacgagac

SEQ ID NO: 181297 - DNA, 638 bp, Homo sapiens
ctgtaggttttgctaatgcgcaggccaactaggtattcctggttccatggctcttctgggcatttctcctacaagtggcaactcggagccaggctcctgccctcttggggttcttccaaatcctagggcccaggcgtctctctggacatgctgcactcagccagcagrtgatgggagagaaagaactggaggacagagaagtgacatatatatatctgctcacatacctttggctagactttggttccttggctgcatccaacagcaaggcaagataggacatgtaaccactgtgtgcccagtgaaaagggacctggtggtggaatgttagcttttttttttatttgccaaaggtctactcttatttttcctcattctataaactgtcaagttcctttttatttaaaaactaattatttttaaattaaagaaataaagttatctgaagaaaatatgttgtttgaacagtctggaatttttacttaaagagaaagctatagcaggtgcaaaaccagagtaaagaagctgatcagagttgcagggtaagtgtggaagtgatttggacataatttaagatgccagtacttgcgtttatttcccaaacagcaaagaagcagtgcaaagggcataaacgagac

SEQ ID NO: 181298 - DNA, 541 bp, Homo sapiens
tttacaaatttacgtacaccaaaattcactattcttactgcactgttcaatgcgttttaaaaygtgtagattgatataaccttcaccacaaacaaaatacagaacagttccctccctagcataaactcttttgttctttttttagtcacagcctctccctacctgcaacctctagccaccattcatctgttctccctttttatgattttgtctttttcagaatatcatataaacagaatgatacagtatgtatactttcaagacattgttttgttaagcaataatgcttttgcaattcatccaagttatgtgtatcagtagttcaatttgttgatccactcacccatgaaagatatttgggttatttctaattgctggtgattataaacaatgctgctttataaatatttatatacaagtttttgtgtgaatttgtatgaaacaattttgttttcatttctgtatgataaaaacccaagactgagattgctgcattatgtaacaactgtatgtttaactttacaggaagctgcctaagtgt

SEQ ID NO: 181299 - DNA, 598 bp, Homo sapiens
aaaactccttcatccacaagtgtatctccagatggttctgccttgcttttcttggggctgatttaagtcaaagtagataagcagtctatcacaatgataaattggaaattctggtagacagtgttagtggcctacacaatagccacctcctccccgtgtttcttgctaacacaacattaattttgtggaagaatgaggtagctttgtgctcaaacatagagtcccttgcctagcccaggcccatgactcatgattggtctatgcctatcttggtaaccttggctttttctcatgtgaataatgttgagaggaccaaattcatacattcagtaaatatttatttaatatcaaacactgttctttgtgtagatgaataagagttactagtagtctggaatggtaggcccacattaaataattaataactcaaataatttctcctgtgaagaaaaagcagtctgtgcagtaatactaagtaatwggaatcgtaacctgctctgggatagaagagtggaaatggatctcaaggaaacatttaagtggtacttaagcaaagaataaggatggataggaacaaaaatattttaagctttaagct

SEQ ID NO: 181300 - DNA, 488 bp, Homo sapiens
ctaattagtggtactgggaattagctggagataaataagtgggcatattactgggtgcacacttcaaggtttaggttccattattatcattaggaatgttcccagttgtgacaaagtaataaaaatggtttcttcttggcaggtttttgagctctttcaagcactggagtaaattgaattcttcgtattcacttaatgttgcccttggggcccaaagagtgaaagtaaaaccagagaataaacaattyataaaattgtcacatagaacttaataaaatatatatgtatgtataattttttaaaagacataatatctattaagcatgtgggagaaaatgtggaatttgaaagtctaaaattaaacaactttgtataggtaaagtcattacagaaggagcctaaaaatctgcacagtaactataaattaaccaagagaaaagagtatattaagaaaaaattgttaaaagatgaagaaagattagttcaaa

SEQ ID NO: 181301 - DNA, 488 bp, Homo sapiens
ctaattagtggtactgggaattagctggagataaataagtgggcatattactgggtgcacacttcaaggtttaggttccattattatcattaggaatgttcccagttgtgacaaagtaataaaaatggtttcttcttggcaggtttttgagctctttcaagcactggagtaaattgaattcttcgtattcacttaatgttgcccttggggcccaaagagtgaaagtaaaaccagagaataaacaatttataaaattgtcacatagaacttaataaaatatatatgtatgtataattttttaaaagacataatatctattaagcatgtgggagaaaatgtggaatttgaaagtctaaaattaaacaactttgtataggtaaagtcattacagaaggagcctaaaaatctgcacagtaactataaattaaccaagagaaaagagtatattaagaaaaaattgtwaaaagatgaagaaagattagttcaaa

SEQ ID NO: 181302 - DNA, 660 bp, Homo sapiens
tgatttcttaacaactcctctatatcacaaaaatatcctcagtaataatcacaaaataaaataaaacaaataatgatcaggaaaataatgcaaacaatgaaaattttcatttattggacttcatattatgatactaaatctttttaattacagtataaacatgaaaaagcaacagattaattcctttaattacatttttttacagaaaactaatacatttacattttgatctgtcacagtgataattaatattaatttctgttttcacrtctcacttttgcaaatttgtgaatgattttcccaaaatgtgtcttctttatgtattgatatacaatagatgccataactaggttcatcaatagttttacttatagttgattgaagaactaaaatatacactttccaaacaaaaacattacaccttgcaatttgcattctagtttgcagttgtaaattttaaatgcaaataacatttcaagttatcctatacaatgacaaaatcaaagaaactcgaattctatttagctctataatcaatgtgctatcattacttttattccaacacctaaatgtaggaatgtgtaataccaatggtattggagacacagaaatgcaaccaaaataattccaaactgttatggatttactcttaaaaggagt

SEQ ID NO: 181303 - DNA, 660 bp, Homo sapiens
tgatttcttaacaactcctctatatcacaaaaatatcctcagtaataatcacaaaataaaataaaacaaataatgatcaggaaaataatgcaaacaatgaaaattttcatttattggacttcatattatgatactaaatctttttaattacagtataaacatgaaaaagcaacagattaattcctttaattacatttttttacagaaaactaatacatttacattttgatctgtcacagtgataattaatattaatttctgttttcacatctcacttttgcaaatttgtgaatgattttcccaaaatgtgtcttctttatgtattgatatacaatagatgccataactaggttcatcaatagtttyacttatagttgattgaagaactaaaatatacactttccaaacaaaaacattacaccttgcaatttgcattctagtttgcagttgtaaattttaaatgcaaataacatttcaagttatcctatacaatgacaaaatcaaagaaactcgaattctatttagctctataatcaatgtgctatcattacttttattccaacacctaaatgtaggaatgtgtaataccaatggtattggagacacagaaatgcaaccaaaataattccaaactgttatggatttactcttaaaaggagt

SEQ ID NO: 181304 - DNA, 469 bp, Homo sapiens
gcaaccagggagagcctttcagagttctgttagactgttccaaagcagtgtttccacccataacttatacattaggtggtggaggttctgtgcatgttcagaagttacatcgaatgtactcagaagttacatkagagcaaaatctcatcaaagtttgggtgcaagagtacatctggttacaaatcacagaggtataattattaatcctgtcagatgttatcttatggacaggaaaaggcaaaagctaggatcattggacttatcttttctaaaaatgcagtgatttaggcaagagatgtgggaatctgtgctcggttctgcttctcatcctcaaggcattcttccggagggctgtgcttgtcactgagtcaggggcttctgaaggtaggctgacaggcagaatgagcaacattgctttttcacagcaagggctatgtggctggccagaagcagacatttgttactttat

SEQ ID NO: 181305 - DNA, 429 bp, Homo sapiens
gccattgggtgctgctaaattaagaaaaaatatatataaaattgtaaaggaaaggagactttatttcccataaaggattataccctgcaaggtgcccatccctcaggcttcctttctggccaagaccaggaagaggcactttggaaggagtgggggtgggggtaggactttaatgcttaaccagttggctaaacctacatgcccagcagttatgggaagagctatgaatattcatgaaggtggtcctgacacttgcatattgaacaaatawgcatgtatttaataacatatgacccatgttcactttgaggtggaaactttacattcaaatatattgcaattaggctctatatgtcaagagatgtttttgggatgcaaagccaggcaagtacacaacctctgtaaaccagccagaactagtctattgtt

SEQ ID NO: 181306 - DNA, 621 bp, Homo sapiens
tatatcatagctcaatagcagttaaggtactcaactattcttactatttagtattttcttggggaaaatggcaacttttttctttcatatgaactttaagataagtatatgcagttgtagaaaaaaccctgttagattgaaaaggatttgcactaagtttacatgtctctttggatagattatgattttaagactttttataacagataattttgaatgtatattattatagagaagtaagccaggtgtggtgacttatgcctgtaatcctagaactttgggaagctgaagcaagaggattttcgagcccaggaggtcgaggctgcagtcagccatgattgcagcattgcattctagcctgggtgagagaggaagactctgtctcaaaataacgaaaccaaacaaaataaaagtggacaaataagggtaaaaatttaaaactaataaaacaagaagcatctcttgggaatcagtcacacctaaaatgtcatcattgttatgactcttttgtgactatattctctcttctttcattttagtgattggccaggtcacacatggcagaagaaaataagaytctggtgactcactttgtcctcacaggactcacagatcatccag

SEQ ID NO: 181307 - DNA, 574 bp, Homo sapiens
tttctgctttgattaaaaagatagtagaaacaggaatattaatccccatcaactaattatataaaagtcttgtctggtctctaaggaaaaagacagttcatgaagactaaccatagactactgaggactaaataagatccttcttctgatgatctctgtgccatgaatggcaaaagtcattcaagaagtatagcaaactaaaggtgactggctgctatagagctggccaaggatttttattttcattccaatttcagaagaaagtaaaacaatttgcttcttttggtaaagcctgcaatacatatttaagataattactttttccagtatagacatgtaccttggttaggtaagatctagacttgattcctataagagaaaattmgtttattacattgataatattatgataatttatctctcagaggaactaagaaattaaagacttaagaactgtggtgacacatatgactaacccaaagtggctaatcaacctcattaaactatagggccttgaacaatctgtaaaactttagggaataattttgactggaatcacaatagacattctaaa

SEQ ID NO: 181308 - DNA, 551 bp, Homo sapiens
gatttttattatattgttttataatagctgttttcatatgcttgcctrtcaattcactatttctgccagtttagggtcttcctattgattgcattttcttctgattatgtatcatggttttctgcctctaagttgtctagaaatttttaattggagttttgacattatagatttggaaattatcctggcaggcagttacatttttgcatgtaaacttacccctttcaagattgtttttcaggttttatttggtgagttttgtattatctttagagctaatttagctccgttacttaggcttagtcctcctggggtgtctaatgaatgccccatgtattcaagggtttctctaaactctgattattggcaacatgaaaaattcatacctgtgttatctacttgaattttttaacttatagatactgggttactgtttttgcccccacttgtttgcttttccactgaagttttattcatatgaagttagatgtttagacaaaaccttatgtgtacctttatgcagacttatgtagtgctttgtttgcatagct

SEQ ID NO: 181309 - DNA, 551 bp, Homo sapiens
gatttttattatattgttttataatagctgttttcatatgcttgcctatcaattcaytatttctgccagtttagggtcttcctattgattgcattttcttctgattatgtatcatggttttctgcctctaagttgtctagaaatttttaattggagttttgacattatagatttggaaattatcctggcaggcagttacatttttgcatgtaaacttacccctttcaagattgtttttcaggttttatttggtgagttttgtattatctttagagctaatttagctccgttacttaggcttagtcctcctggggtgtctaatgaatgccccatgtattcaagggtttctctaaactctgattattggcaacatgaaaaattcatacctgtgttatctacttgaattttttaacttatagatactgggttactgtttttgcccccacttgtttgcttttccactgaagttttattcatatgaagttagatgtttagacaaaaccttatgtgtacctttatgcagacttatgtagtgctttgtttgcatagct

SEQ ID NO: 181310 - DNA, 551 bp, Homo sapiens
gatttttattatattgttttataatagctgttttcatatgcttgcctatcaattcactatttctgccagtttagggtcttcctattgattgcattttcttctgattatgtatcatggttttctgcctctaagttgtctagaaatttttaattggagttttgacattatasatttggaaattatcctggcaggcagttacatttttgcatgtaaacttacccctttcaagattgtttttcaggttttatttggtgagttttgtattatctttagagctaatttagctccgttacttaggcttagtcctcctggggtgtctaatgaatgccccatgtattcaagggtttctctaaactctgattattggcaacatgaaaaattcatacctgtgttatctacttgaattttttaacttatagatactgggttactgtttttgcccccacttgtttgcttttccactgaagttttattcatatgaagttagatgtttagacaaaaccttatgtgtacctttatgcagacttatgtagtgctttgtttgcatagct

SEQ ID NO: 181311 - DNA, 551 bp, Homo sapiens
gatttttattatattgttttataatagctgttttcatatgcttgcctatcaattcactatttctgccagtttagggtcttcctattgattgcattttcttctgattatgtatcatggttttctgcctctaagttgtctagaaatttttaattggagttttgacattatagatttggaaattatcctggcaggcagttacatttttgcatgtaaacttacccctttcaagattgtttttcaggttttatttggtgagttttgtattatctttagagctaatttagctccgttacttaggcttagtcctcctggggtgtctaatgaatgccccatgtattcaagggtttctctaaactctgattattggcaacatgaaaaattcatacctgtgttatctacttgaattttttaacttatagatactgggttactgtttttgcccccacttgtttgcttttccactgaagttttattcatatgaagttagatgtttagacaaaaccttatgtgtacctttatgcagacttatrtagtgctttgtttgcatagct

SEQ ID NO: 181312 - DNA, 550 bp, Homo sapiens
ttaaaatcagtatagctgcaatttgctctgtcaagtttaagaagaaatcatgacaggtttattagtctttctgcaactttcaacaaaagaacagagagaaaaaaaataacataataaaaatatattacacatattctagaccattgcacattaaaaaaatccctatgatgttgctttrcttgatcttgatacattttgttcactccctaatattttacacacgtctcatatttttcataaatcttctctaagatatataggagggaaaggcataatatttattctaaactcttctcatctcatgctcagatgagtggttacctaattttttttgcaaaacatcccacatccagcatcccacatccaataaattgagaaaaatttatttaacaaaacagagaaacttggtaagaacaatggaatacaatgtcatttgagctggctacttcatgcatcccctcatacacatttgtgttgcagaagacctattccaacgggctcaagagctgagtggcaactctcatttctcccagctctctggagtagaaga

SEQ ID NO: 181313 - DNA, 544 bp, Homo sapiens
tattttctgcaaagctagaacaaaagtcctgggtccaactttcattggtcagaattgggttatatgcccacttttttaaacaatcactgtggctgagttaggaggacatacttatgattgagctaatgagaacaaaagccttcatctgagagtgatatcaatcccttcaaaccatgtgagcagacagtgggggagagcttgttcaccaggagaaaatacaggctgttggacacatgagatagatgttgggtcgccaagaaattataaatgtccactgtagtcagccctcatctctaacccaggtgtttccatactagaatctacaatactccagggacctcaaagagactttgccttagaatagaggcatataaagaagctgaaagtgtgggactattggcctctctcccttattccaaaccaagtatctcaccttttagkgttttatatatttggcttatttacaagcttttctctaaaaaaatcatcatttagcttaaaaaaattaaaaccattttatctgactgtaagcccattgaagaca

SEQ ID NO: 181314 - DNA, 425 bp, Homo sapiens
tttagatggaatcctgcaccagggtgcctcagtcaactgattttccagtgaagacatgaattttaaagcatcctcatatatagcctctagtaaaattggatttgatctttagttaggctttttagttagtcatccttacccagcagtcagttttatctgcctcattgagtgattatttaaagaaggtttcactgttcatctttgtgtgtgtgtgtgtgtgtgtgtgagagagagagagacagagagagagagagagaaagagagagagagaccaccagaagtctcaacaataaactttaaaarttgaaagcgaaagtctatctctgcatttgttatccctgcttcgttctgaggatctctttattagtattatttaggtgggcagaagaatgaccactcaaagacttccctttcttggatagaat

SEQ ID NO: 181315 - DNA, 434 bp, Homo sapiens
attgcactggggtcttgagttggtgattaggtcataagagtcaaccctcatgaatggtgttagtgctttcataaaagggcttgagggagtctgtttggccactttttggacctccactatgtatgaagacacatagaaggtgtcatccataagaaacagccctcctcagacaccaaattggctggcatcttgatcttggatttcccagcttccagaactgtgagtaataaatttctattatttataaattacccagtctaaggtattttgttatagtaaaccaaatggactaatacagagggttagaaactgagtcagaaccactggggattagagtcttgggtaatgaggtttgattgtggttttcttgggawgactgacctgatttgggataaaggtcatgaggagattagtcctgaagatcccaaggaaga

SEQ ID NO: 181316 - DNA, 545 bp, Homo sapiens
atgtgagaacatgcagtatttgacttttgtttctgagtcgttttacttaagataatgacctccagttctacccacgttactgcaaaagatgtaatttcaatctttttatggctgagtagtgttctattgtgtgtgtatatataccacactttatccattcatctgctgatgaacacttacggtgattccaaatctttgctattgtgaacagcactgtgataaacatactagtgcaggcatctttttgatataattatttcattttttagaagatatccagtagtaggattactagattgagcaktagttttatttttaattctttgagaaacatccatactgttttccaaagaggttgtactaatttacattcccccaacagtatataagcgttcctttttctctgaatccttgccaacatctgttattgtttgactttttaaaaatagccattctgactggtataagatgatatctcattgtggtctccatttgtacttctctgatatgcttaataatgttaaacactttttcatatacttgtt

SEQ ID NO: 181317 - DNA, 552 bp, Homo sapiens
actgcctgactgctgttgatcttttacagataagatatccccaatctatgatgtctcttaatgaaatacaatgggtttagcactggaatttatagctcctttctgatgttctccatgtaatatacgtttctggsgtataagttgtttaagcttctcatccataaaaaaaggtaagtatgctatttcatttatgagaaagaatatttttcccatgatcatcttgaagattttgtgcttgtggcaggagaaatgaggtttttaaaaatgtcaattttatgattcttcaaatagcatatttctctgaggtttccatttttagagtggaatgtgccatttaaacagaatagtctattttatggtgaaaaaattctgatgtcacagtgaaaaaaaaaagagcaataattcaatagtgtagtgtgacatacaccagagaagatagaatagggtggcttggggagcctgaagctatacctatagtcatttatcacttcatattcctcaaactaggcaccaaaatactgatgatttgctctcttgagaactgcacagctt

SEQ ID NO: 181318 - DNA, 646 bp, Homo sapiens
aaattcttgtgtttaagttcctctccccacccctccatttgtaatattgtgttctggcagcgcctaccaaactaatacaaggatgaaggtctaaacctgggcaggcagaggggaatggaatggaagagggaaggttataagaaacattcaacaattgcactgctggttcctggaaaaagaagtgttaactctaagtaagagaaagggatgttttagtacaaatcaagttaaacaaaactaattttctttggttattcatttacttctttatttgatatgggaaacagaacagatagagcagattcaatataacttaatttcagctacacattcaacaatattttctgtcacaggatggccccacagaagccccagaagcagatgctgacacagaatttgaggtgcaagatgaaagggttggctgggcacagtggctcaagcctgtaatctaagcattttsgaaggccaagttgggaggattgcctcagtccaggagtttgacatgagcctgggcaacatggtgagacccccatctctacaaaaactataaaaattagctgaacatggtagccaggcacctgtagtgccagctactcagaagctgaggtgagagaggttgtatccctggacggaggttgaggctaca

SEQ ID NO: 181319 - DNA, 646 bp, Homo sapiens
aaattcttgtgtttaagttcctctccccacccctccatttgtaatattgtgttctggcagcgcctaccaaactaatacaaggatgaaggtctaaacctgggcaggcagaggggaatggaatggaagagggaaggttataagaaacattcaacaattgcactgctggttcctggaaaaagaagtgttaactctaagtaagagaaagggatgttttagtacaaatcaagttaaacaaaactaattttctttggttattcatttacttctttatttgatatgggaaacagaacagatagagcagattcaatataacttaatttcagctacacattcaacaatattttctgtcacaggatggccccacagaagccccagaagcagatgctgacacagaatttgaggtgcaagatgaaagggttggctgggcacagtggctcaagcctgtaatctaagcattttggaaggccaagttgggaggattgcctcagtccaggagtttgacatgagcctgggcaacatggtgagacccccatctctacaaaaactataaaaattagctgaacrtggtagccaggcacctgtagtgccagctactcagaagctgaggtgagagaggttgtatccctggacggaggttgaggctaca

SEQ ID NO: 181320 - DNA, 558 bp, Homo sapiens
agatttttacagaatgttcttctaaatagagaaagaataaggaaacaactagcattaagtgtcaattatgtattaatcacttctctacaatattctacaaatattttgtctcatcattgtcctcaatttgaagttagaagaactgaggctttgtttaaataaatattttataaatagataaattattcaggtggtaactagaggagatggattggaatgtaggcttctgtctccaaagctctgctttgaacatccttccatgcgcatcatgaagacaacactgagaaaagtgcttttaactcattgtgctctgtgttcacgtcacctgtgccwcactgtcagggaaagtagacagtttcccagaaactcacagaaggattggcaaagatagtgatgacagttcttgttttgagcaataacttcttctatggaataagatgaggttttaaaggcatatgatcatccctactcctgtccttcttataactgtgacctccgtgagattccagagaccagtcaagctttaacattaagtagattttatggaggccataaatc

SEQ ID NO: 181321 - DNA, 558 bp, Homo sapiens
agatttttacagaatgttcttctaaatagagaaagaataaggaaacaactagcattaagtgtcaattatgtattaatcacttctctacaatattctacaaatattttgtctcatcattgtcctcaatttgaagttagaagaactgaggctttgtttaaataaatattttataaatagataaattattcaggtggtaactagaggagatggattggaatgtaggcttctgtctccaaagctctgctttgaacatccttccatgcgcatcatgaagacaacactgagaaaagtgcttttaactcattgtgctctgtgttcacgtcacctgtgcctcactgtcagggaaagtagacagtttcccagaaactcacagaaggattggcaaagatagtgatgacakttcttgttttgagcaataacttcttctatggaataagatgaggttttaaaggcatatgatcatccctactcctgtccttcttataactgtgacctccgtgagattccagagaccagtcaagctttaacattaagtagattttatggaggccataaatc

SEQ ID NO: 181322 - DNA, 589 bp, Homo sapiens
tactgatatatctaatgcatatgtctaactgcctacttaacttattccaaatcaaatttctgatataactcccacctcaaacttgctacttatgcttcttccccatgacagtaagtgacatttctccttacctgcaacttaggccaacattttggagccatcctcaatttaattatttctgttatgtctcacatcaattccaacacagctttatcttcaaagtatatccagaatgcatttgcttcctacctcctctaccrttactccttatgcaaacgtttcttactgggaaaatagctctagcatccaactcatctccttgatttgactataaacctcccttacaatctattctccacacagcaattacagtgattctttacaaacccattggataatatgacttctctttttaaacattcctatggcttcctgtcatacagataaaaacctaaagtctttaacatggtttacagttccctgtgtggtctgtttcctactattctcccccttgttttttctaatctgtcttcactgtgctgggcctctgagctgtttcttaaacataccaacagtactgccttctcag

SEQ ID NO: 181323 - DNA, 658 bp, Homo sapiens
ggaattgcattgaaatctgtagatttctttggacagcatggtcattttcatatggattcttcaaattcgtgattatggaatgtgcttccatttgtgtcatccacgttttctttcagaagtgttttgtagttcttgtagagatctttcactttcttggttaaaaagtatattcctagttgtttttttctccagctattgtaaaaggatttgagttcctgatttgattctcagcttggttgktgttggtgtatagtgctgctactgatttgtgtacattgattttgtaacatgagactttattgaattcatttatcaaatgtaggattcctttggaggagtctttagggttttctaggcataccatcatgttattgccaaacagagatagtttaaccttctcttttccaatctgtatgctctttatttctttctcttgcctgattggttgggctagaacttcagtaatatgtagaatagaaatggtggaaatgggcatccttgtcttgttccagttctaagggggaatgctttcaactttttcccattctgtattatgttggctgtgggtttgttagggcttttattattttaaagtatgttccttctatgcctagtttgttgagagtttttatcacaaagcaaagatgaaatttatcaa

SEQ ID NO: 181324 - DNA, 602 bp, Homo sapiens
ttgctagtattttgttgagaatttttgcacctattttcatcagggatattggtctgcagttttctttttctgttatgtccttgactggttttggtatcagggtgacactggatccatagaataagttagggaggattccctctttctcartcttttggaataatttgagtagaattgataccaattcttctttgaacatctggtagaattcagcggtgaatctgcctggctctgggcttttctgtagttgttggcaaattttttatttctgattcaatcttactgcttgttattggtttgttcagaatttctatttatttctcattcaagttaggaaaattacatgtttccagaaatttatcaatttcttttacattttctagtttgtgtgcatagaggtgttcacagcagtctcaagtgatcttttgtattcctgtggtgttggttgtaatgttttcattttcaattattattgagcttatttgaatcttctacctccttttttggtgaatctagctaatggtctattgattttgtttagcttttcaaatgatgaacatttcattttatgcatcctttgtatttttttggtttcaatttta

SEQ ID NO: 181325 - DNA, 507 bp, Homo sapiens
ttgttatgttttagcaaaaagactggcagcattttgcccctgacctagagatttgcrgaactttgaacttgagagagactatttagggtttctggtggaagaaatttctaagcagcaaagcattcaagaagttacttgggtgtgttaaaggcattcaattttaaaagggaaacagagtatcaaagttcagaaaatgtgcagcctgacaatgcagtagaaaagaaaaacccattctctgcagagaaattcgagctggctgcagaaatttggataagtaaggcggagccaaatgggaaaaagtctccaggacatgtcggagatcttcatggcaacccctctcatcacaggcccagaggcctagcagaaaaaaatggtttcatgggccaggcccagggcccctctgctgtgttcagcctagggacttgttgccctgcatctcagctgctctagccatggctaaaaggagccaaggtacatcttgggccatggcctcagaggctgtaagcc

SEQ ID NO: 181326 - DNA, 507 bp, Homo sapiens
ttgttatgttttagcaaaaagactggcagcattttgcccctgacctagagatttgcagaactttgaacttgagagagacyatttagggtttctggtggaagaaatttctaagcagcaaagcattcaagaagttacttgggtgtgttaaaggcattcaattttaaaagggaaacagagtatcaaagttcagaaaatgtgcagcctgacaatgcagtagaaaagaaaaacccattctctgcagagaaattcgagctggctgcagaaatttggataagtaaggcggagccaaatgggaaaaagtctccaggacatgtcggagatcttcatggcaacccctctcatcacaggcccagaggcctagcagaaaaaaatggtttcatgggccaggcccagggcccctctgctgtgttcagcctagggacttgttgccctgcatctcagctgctctagccatggctaaaaggagccaaggtacatcttgggccatggcctcagaggctgtaagcc

SEQ ID NO: 181327 - DNA, 451 bp, Homo sapiens
tctctaagcctctaactccttatccataaaatggggtttaagtgacaagctctacctcgcaaggatgttgcaataatcatttacaagtatagatttttataaagtagagtttaggaagtgctttcctacataaatgttatcagtaatagtaactaatatttaactgagttcttattatgtacccaacattatgtcaagcacatggatgacctcatttaactttcactttgcctccatgcaattcttactattatttgacaaaattaaagcttaaagaggtgacttgctatttaatgtcatagagtgtcaaagtatgtaattgtactacctatagcaggactatgtatgtaggaaagaactttaggtgagagggtttcactttytcttgaaatgcaaatagttgcttagggatttgagatatctgcccattatgggggtctagtgaaaggaa

SEQ ID NO: 181328 - DNA, 504 bp, Homo sapiens
taccaaatgcaaccctgaatgagtggcaggtctgttagctatgtcagcaggaagtacttgctgcttgcttttgcctctgccctccttttcaaggggccagttttaataatctgctttgtacaaagagtagtggatgtagacagtttctcaggttacagtcctagcaaattcagtggtctttgaggagatactaaccttattttttgatgttgtacagcacaaagggcagtgtctctgaaaaagagttgatttacttcctcactcttctccactttgtaatgcttcaatattttccctagtgctsgtgggattaaccatgatgggcacaaaaggacaaaacaatagacaggaccaggtagagaagactctacatggtacacaataggatatataataggtacataataggatacataataggtaggtacataacaggaacataatatgatacataataggtacttggtaaataataggtacataataggatacataataggtacg

SEQ ID NO: 181329 - DNA, 284 bp, Homo sapiens
gaactacacttgtggcacctgagctggattcagatagcagagtgggcaggcaggtgggcaggcagagcagtggttggatgagcttagagctcagtactatagctccatcattctgttcagagcactgccaacatggaaccattgaatcagggtcttgtagaagttcgtggttcaggaggatggtttcctgaatcctcttggaattcytgatgatacatttgaggggcttgacagggcaaagcctttccagccttggatgatgagattacacgcagggtagatct

SEQ ID NO: 181330 - DNA, 532 bp, Homo sapiens
taacatacacttatatagagaacatttggtaytgtagaaattatgcaaaatataattatcactacattttcaagttgtaaataaaaataaatatattatttgggaataggaaatagttatgttattgaaaagggaagaaaatgtggcacaacatttcaaagcttttatctataaagtgctttatatgatgggcagtggctaattaagattttcagattaatgggtaaataaaacctatcttagtctcttctttttagctgaattgggatcacaattatagagcactaaaagagaaaaatctaagtttctcaaacctcacatatagggccaaggacttacagaggcatatatctttcaaatagcacataaactagaaacttcagggaaaaatgcattgcagtcatttcatttattaaaataagaataacaaataatttttactttattggtttatcttcagtatatgatacttagatatgtagcccttgacctagtaggaatcaaaatagaggtggttccacttcaagaattt

SEQ ID NO: 181331 - DNA, 532 bp, Homo sapiens
taacatacacttatatagagaacatttggtactgtagaaattatgcaaaatataattatcactacattttcaagttgtaaataaaaataaatatattatttgggaataggaaatagttatgttattgaaaagggaagaaaatgtggcacaacatttcaaagcttttatctataaagtgctttatatgatgggcagtggctaattaagattttcagattaatgggtaaataaaacctatcttagtctcttctttttagctgaattgggatcacaattatagagcactaaaagagaaaaatctaagtttctcaaacctcacatatagggccaaggacttacagaggcatatatctttcaaatagcacrtaaactagaaacttcagggaaaaatgcattgcagtcatttcatttattaaaataagaataacaaataatttttactttattggtttatcttcagtatatgatacttagatatgtagcccttgacctagtaggaatcaaaatagaggtggttccacttcaagaattt

SEQ ID NO: 181332 - DNA, 340 bp, Homo sapiens
acaacatttgaaggaaaagagagaggatgggtgaaataaggrtttatatttgttgaacgcctgctatgtcctaggccagtggttcttaagctcctggagccatagactgctcaagtctatggactcaaatataaatataaaatttcatggggcccttcaaaaactcagactctcaggcccccagttaggaacccctgtgtttggtttccatatggttaattctcattaaagctcaacaaattagtagtgatgcctatttctacatctgaggaagcagaacttggataaagagatgtcagcatcaccagtgataaaacagacctagctggcagcatcttgg

SEQ ID NO: 181333 - DNA, 435 bp, Homo sapiens
tacctggggatagaaggaaggataaaactaaaaggagcaggaggaaacttttggggttgatgaaatgtttgttgtcttgattttgataatggtttcatagatayatgtcaaaacttaccaaatgtggaaggctgaggttgcagtgagctatgactgtgccattgcactccagcctgtgtggcaaagcgagaccctgtctcaaaaacaaaaacaaacaaaaacttagcaaattgtgcactgcacacacatacatacaaacacatatgtagtttattgtcatcaattaaacttcaataaatctgtaaacaaaaaaagtggaatatgatcattgctaaatgctatcaatgaatactttgggggggaaatgaaaggctaagggtattaatcatcgactgaaggcaaagtgtgaaagctagaaggcctctttggcagcag

SEQ ID NO: 181334 - DNA, 595 bp, Homo sapiens
gagatcttgactggttaaaaatgcakgtgaaagacagtgtggtgaatatggcccaggaaagacagtacagtaggagggaggagataaaaaatagggcccttttaggaatatatgctcaaggtcacaccccaaggcctctcacttcgtcagcctccctgaggacacctgcccaacccacaactcagttgaacacactctcccacctttgcctgctctttgacttcaccaagatttggagtcctatcaccacacctgttccccgacttatatccgcttctgtctagatccaacccatacacctccttcccaaacttggcatttctaccacatctagtgacatctgccatgttgcccttctcccaaacctttctaaaatctatactcaccaagttccccaaggggaccctcttgctcctcactgcagccaacacacaaaaccatagggaattccctctgcattccctgactgcctgggaaactcatccttaaagatcctgctctagggtttctatgggactatattgatccctcaggtaaaggatcatgaccctcctttagctgtcccctagtccctgccctgccaccttcttgccat

SEQ ID NO: 181335 - DNA, 610 bp, Homo sapiens
atgagatcttgactggttaaaaatgcaggtgaaagacagtgtggtgaatatggcccaggaaagacagtacagtaggagggaggagataaaaaatagggcccttttaggaatatatgctcaaggtcacaccccaaggcctctcacttcgtcmgcctccctgaggacacctgcccaacccacaactcagttgaacacactctcccacctttgcctgctctttgacttcaccaagatttggagtcctatcaccacacctgttccccgacttatatccgcttctgtctagatccaacccatacacctccttcccaaacttggcatttctaccacatctagtgacatctgccatgttgcccttctcccaaacctttctaaaatctatactcaccaagttccccaaggggaccctcttgctcctcactgcagccaacacacaaaaccatagggaattccctctgcattccctgactgcctgggaaactcatccttaaagatcctgctctagggtttctatgggactatattgatccctcaggtaaaggatcatgaccctcctttagctgtcccctagtccctgccctgccaccttcttgccatgacctgtactttt

SEQ ID NO: 181336 - DNA, 422 bp, Homo sapiens
aacttcatatagagagagccatactgttatgtatttgcttccatattacttcttttggtcaatgtaatgttggtaatgattttccatrttgttgtgtatagttctaggctgttcatttttattatgataggttattttactgaatgagcatacctacctcatgcatttattccactgtggagaaacatttgggttggaaggcagctatgctcaccactatacaaccaatgctgcatgacatttgggttgacattttggatattacaaatgttattggaatgaatatccttgtatatgtgtccactttatacacacttttaaagtgatattaggagcataggctttaaattgaccaactcagtagcagtcactcttttaaggaataaatgctttatctttccattctgttgccactcaatgaa

SEQ ID NO: 181337 - DNA, 422 bp, Homo sapiens
aacttcatatagagagagccatactgttatgtatttgcttccatattacttcttttggtcaatgtaatgttggtaatgattttccatattgttgtgtatagttctaggctgttcatttttattatgatargttattttactgaatgagcatacctacctcatgcatttattccactgtggagaaacatttgggttggaaggcagctatgctcaccactatacaaccaatgctgcatgacatttgggttgacattttggatattacaaatgttattggaatgaatatccttgtatatgtgtccactttatacacacttttaaagtgatattaggagcataggctttaaattgaccaactcagtagcagtcactcttttaaggaataaatgctttatctttccattctgttgccactcaatgaa

SEQ ID NO: 181338 - DNA, 573 bp, Homo sapiens
ggaaaaggaatttctttaagaaacaagcataaattgaagtttcttagagacttatagaaaaattggggaatttatgtactaattttatcttacagcaaaaaaaaagagacaacttagaaagatcattcccaaaaacgactttctgattccttagccaagccaagctgtgcctcatttctatgtaatcccatccatctatttatgtaycttcaaacaaaaattacttattgaactcatactatgtccaaggaatattacttgccaaaaagcctagtatcttgtgtgggaaccagaaaaatagctggatatttaaagtacaatatgaaatgttccacaagaaaggcataaagatcctggccaatcttaaacaatcaaagaaaatcaacaagggattcctgagctgggtattaaaattgattaggaggtgagagcatgtgataaattgttaataattatagatatggctgggccttaggatgttttcatgggagtggagagagctgcagctgagaagttcacagaggattaagttatgttatctccctattccctgctgaggatattagagttaac

SEQ ID NO: 181339 - DNA, 405 bp, Homo sapiens
ggaggcaggtgagctagtgtctgggggagactgggaggccctgggggagccaggacacctaatttcttctccatgttctacctttgactcaaggtgataatactgctattccaacaccatcctaagtttcaagataaatttttattagccatagaatgaatgtaagatgcccagagactgtttccacatattcaggatgttgcctttacaggcccctaagaagctaaagagggagacggtgataagggaatgtggaaraaggggaaatgggaggcatgcctgaagggaaagcaagggacagggaagggaaaagtagggaaggaagaggaagagtgagtcaaaagagcatgtggaagggaaggtagaggaagaaaagaaacagagggagaaggccaatgtctctgt

SEQ ID NO: 181340 - DNA, 493 bp, Homo sapiens
atcacactactgcactccagactgggcaacagaacgagactctgtctcaaaaaacaaaacaaaacaaaacagaacagaacagaacagaacaaaacaacaacaaaaacaaacacacacaaaaaatcctcaactactgaaaaaaaaaaaaaacagttataaagctgacctggaggcctggagggattttatataggatatttatgctatcacttgggataaggtaaaatttatttttttgaggtgatcctttgtgaaaatagtagaagacctttggggtgagtggctggcattacattaatgaaattaaaaataatataaaaataatataaatawtataaggcatatggaaccatatttgttcacaaaaactttatatttgggaatgtgaaggtaatatagtctgctttgtggaaattctgcccagtggccaaggcctctctctgagatgacacccccttgcccacagcaaccatcaattattttacgcataact

SEQ ID NO: 181341 - DNA, 539 bp, Homo sapiens
cttaatgggaaaggggagagtataatttccactgatttmgctggtctttcaaactttatgatgcttttctccttgaactagcctataagaaatttgtagggaaaataccacaggaatcaaattttgggcatagatgtctattaatattgctccttacaaagctttttcccagaattgtttctccttgcctacaaaaactactccatgcctttattagtcagaaaagcagttttgtagagaaggcaagtaacagagaatcaagctaagtaagtgaaactctgtaattgtcaaacttccagaaagtaacatttgtaactaagtatggtatctttgtcctctctctttctctcttctctccacttggtttctaatgaaagccttgattacatgttatatttaatgtactgttccacaaagaagaaaaggcctaatgtgaatgcaagctgaatttacacttaaatattgcagtcagttcagaccggaaggatacagatcgatgccctctgatcctgtcagattccccgaagtgtctatggcag

SEQ ID NO: 181342 - DNA, 514 bp, Homo sapiens
agggccacagaatcagatgagccagtttattgatctgggtggcactagctgatccattgattacacggtctgaaaaatatcttaagcaacaatcttaggttttacaatagtcatattatccccagtagcaattgaagtggtttagaatcttgtggcctctagctgtttggttcctaagccataatttctaatcttgtgacaaatttgttagtcctacaaaggcagtctggtccccaggcaaggagggggtttatttcgggaaagggatattatcatatttgtttcaaatttcaattataaactaaagttaattcaccccacactcaggaatcaggaataaacaagaacagcttggaggtcagatgcaaaatggagttggttaggtcagattttttttcactgtcataattttcttgctggtataatttttgcaaaggcagtttcaatatcaccaactaaacctgtgatgtcaacactattgctaaacgttktagttatattaataacaagttct

SEQ ID NO: 181343 - DNA, 572 bp, Homo sapiens
aaaattagaattagataccactttatactcattagaaacaccaaaattaaatactaaaaataacaaggtgttggagagaacataaagccactagatactgatggaagcttaaaatggtacaaaccactatggaaaaattgtttagcagaatcttattgtgttaaacctagatttacactattacttaacaattccactcacatgtccacccccttaaatgaaaacatatgccaagaaaagaacttgtacaaaaatatttattgcagccttattaacaataacacaaaattggaaacaatataaatatatatcaacagtaaatagctaaacaaattatgacatatccatacaatggaatatcacttattaataaaaaggaataaaccaataataccaacaaagccgagcacagtggctcatgcctgtaatcccagcactctgggaggccaaggcaggcagatcgcttgatgccaggagttcaaggccagcctggccaacacrgcgaaactgcacctctactaaaaatacaaaaattagccaagcatgatggtgcatttcagtaatcccagcta

SEQ ID NO: 181344 - DNA, 641 bp, Homo sapiens
cgctttcattctaaaacttcagccatgttccaggtactataatacaaaactcactagtttataaaagaataagcagaatccaaattgtttctgacaaatgggacaagccagggttacctactcagatggccaaacctttctaccactatttttggaaaagacttagatttttttatttgcccaacttccaaatagcttttttttccttctgatwatcatctccctgaagttcgcatttcaaaagggatggttctcaggtaagacagggtagaacatttatatctcaaaggtacagaaaaagaatgtaagtttcaatccaagaaggagccttggggcacatttttctatcatcagagctcaatcctgtggaggctgttgactaaattttaagtgccagtatatttccaattaacctttgtagtctcggatatatgctttgggggaatcctgagatccatgagagcaggactccaaagctcaagtgactgagaggctagagtgggagggaaaaggtccgtcaaagaaggacagagggacggaggaggcagaggctggaaggaggcatatcaacaatgtaagggaactgatggaagatttaaggcaacaaaagaaaaaaggagaaacagaagcaatgagaagga

SEQ ID NO: 181345 - DNA, 641 bp, Homo sapiens
cgctttcattctaaaacttcagccatgttccaggtactataatacaaaactcactagtttataaaagaataagcagaatccaaattgtttctgacaaatgggacaagccagggttacctactcagatggccaaacctttctaccactatttttggaaaagacttagatttttttatttgcccaacttccaaatagcttttttttccttctgataatcatctccctgaagttcgcatttcaaaagggatggttctcaggtaagacagggtagaacatttatatctcaaaggtacagaaaaagaatgtaagtttcaatccaagaaggagccttggggcacatttttctatcatcagagctcaatcctgtggaggctgttgactaaattttaagtgccagtatatttccaattaacctttgtagtctcggatatatgctttgggggaatcctgagatccatgagagcaggactccaaagctcaagtgactgaraggctagagtgggagggaaaaggtccgtcaaagaaggacagagggacggaggaggcagaggctggaaggaggcatatcaacaatgtaagggaactgatggaagatttaaggcaacaaaagaaaaaaggagaaacagaagcaatgagaagga

SEQ ID NO: 181346 - DNA, 427 bp, Homo sapiens
tccaggaggatgtgcataagttatataaaaataactacagcattttataaagggagttaagcaccagtggattttggaatctgcaaggatccstagaacaaatcacccaccagatactgagggatgcctctacttctaaataatccatgagtcaaagaggaaggctcaaggaaaagcaaaaatatatattgaactgcatgataacagaaatacaatatatcaaaatctatgggactcaactagagcagtgttgagatgaaaatttatagcacattttagtgcctacattagtaaaaaggaaacagaaaaatatcatatcaataatctaagttaccacaatctaagaaactagaaaaagaaggatgcagcaaacccaaagaaggaaggaaataatgaagaaaataataaagagcagaaataaaaaaag

SEQ ID NO: 181347 - DNA, 426 bp, Homo sapiens
gaggatgtgcataagttatataaaaataactacagcattttataaagggagttaagcaccagtggattttggaatctgcaaggatccctagaacaaatcacccaccagatactgagggatgcctctacttctaaataatccatgagtcaaagaggaagkctcaaggaaaagcaaaaatatatattgaactgcatgataacagaaatacaatatatcaaaatctatgggactcaactagagcagtgttgagatgaaaatttatagcacattttagtgcctacattagtaaaaaggaaacagaaaaatatcatatcaataatctaagttaccacaatctaagaaactagaaaaagaaggatgcagcaaacccaaagaaggaaggaaataatgaagaaaataataaagagcagaaataaaaaaagatag

SEQ ID NO: 181348 - DNA, 588 bp, Homo sapiens
gaggtctgtattacctattttaaaaaaccattactagctggctgagacttccagctttcaacttcaatacctaattgcatgttttaagatttaaaatctcaagacataacaccagggaataaaaaaatcacaacactttaagaaatgaaggagaaaaccgaataggagcccttccatttgaaacaagactgagtctcccctgttatttctagtagacagctgagcacaccttcataatcttaaacacggaaatcaatggccaatcacaaatcacgagaacaaaatttattttcttcaaaatgcctatgcaaaatagtttttatctcaatatatttaaaacccatgtttcaacttcaaattttaaagcatttattttcctattggaacaaaagaaaaattaaagtggttgaattcccatttggtttatttaaaacaccaattttactacttttatgagggctttaaaataaaatttcatttaattaggtcataatatataggttwaaaaactaatgtcctttcagtcttagaaggctctgttgcaattttataaactaatgcatgagactgagcttgcctggttaaagt

SEQ ID NO: 181349 - DNA, 450 bp, Homo sapiens
aaatttaggctcagtttctgtaaagaaaattgagccaataagataatttagcctatttttttttgttggattaaataagaaaatacagtgcytgacacagtgcatgacacagtgcctgacaccagtaagtgtccaattaatagatgttcactattattttgtctgatcttttttgtcttcctttataaaatggcaacaacaatacaaaggcaataattccagttatgtctaagtgtgtgagcaatagataagaaaaaccacgtgtgtgaaacagtactgggcaccagttgctcccccaacagtttccccaaagtttttgcccttaaaactagatcacttgggagagtctcaaagatgattcattgttggacttgagatttatttttatttttattttttgaataaggagactgtgccattgagattaattcatctctctcttttattttt

SEQ ID NO: 181350 - DNA, 450 bp, Homo sapiens
aaatttaggctcagtttctgtaaagaaaattgagccaataagataatttagcctatttttttttgttggattaaataagaaaatacagtgcctgacacagtgcatgacacagtgcytgacaccagtaagtgtccaattaatagatgttcactattattttgtctgatcttttttgtcttcctttataaaatggcaacaacaatacaaaggcaataattccagttatgtctaagtgtgtgagcaatagataagaaaaaccacgtgtgtgaaacagtactgggcaccagttgctcccccaacagtttccccaaagtttttgcccttaaaactagatcacttgggagagtctcaaagatgattcattgttggacttgagatttatttttatttttattttttgaataaggagactgtgccattgagattaattcatctctctcttttattttt

SEQ ID NO: 181351 - DNA, 450 bp, Homo sapiens
aaatttaggctcagtttctgtaaagaaaattgagccaataagataatttagcctatttttttttgttggattaaataagaaaatacagtgcctgacacagtgcatgacacagtgcctgacaccagtaagtgtccaattaatagatgttcactattattttgtctgatcttttttgtcttcctttataaaatggcaacaacaatacaaaggcaataattccagttatgtctaagtgtgtgagcaatagataagaaaaaccacgtgtgtgaaacagtactgggcaccagttgctcccccaacagtttccccaaagtttttgccyttaaaactagatcacttgggagagtctcaaagatgattcattgttggacttgagatttatttttatttttattttttgaataaggagactgtgccattgagattaattcatctctctcttttattttt

SEQ ID NO: 181352 - DNA, 404 bp, Homo sapiens
attctcaaaaggagaaaaagcacaagccacaaaataatcttatcttggatgtttgtttctacacatacaaaactaaaaagttcaaataaaaatacatgccacttttatctttaccagagtacaagacaggtractaaaatgcaaaaatttaatttgatgtatcatactcattgatttaaaagttatttttaatttccaataattttctctattgattaagcttttctctagtatcttaaaagaaatatttaaatgccactagtaagtggcatgctacttaaggtgactgttatttgattatctgattcatttggtgtctgaatttagtttagcacgccaaagcaactttaatattttgagtagctggagatccttccaactttttcttatattgtagaattcta

SEQ ID NO: 181353 - DNA, 502 bp, Homo sapiens
tttaaggcttctttgagtccatagattccttgggccattttttgcacattctcaatagtgcctagaaattctgcctagaatttccactcctttcttaaggacatgaaatgttttgagtgtactgattactgattgtgtgccttgggaatgcaatgtattatagcatgagggatttcactaagaactgaaccaaaaagtattgaaaagttcaagtctgcctgaagtttcataaatatttttaccctgtttgaaaaagcaggcatttttctctcccatgcagtctattaagtcatcagggtacctgatttaggatttaatttgaagtaagctgtcagacttgactacctactttcatgatgaatttgtttttmgcctttattcaagcctcattcttagctttccatacttgtgttgggtactgaggaaatatttttactgtgtgctctttactccatttaattccttcagttgctaaattctcctctggttttatttatacttc

SEQ ID NO: 181354 - DNA, 333 bp, Homo sapiens
cagatcaccaaaccacagggataaaaagagcatggcaattacasacagttaagaggtcactgtagattgtgggcagagaggggagtgcaaacaatttattcctgaagactgatttcattaacagtgagtcacttttgcagactggagtcatttgcatctacagttggaccaattagcataccccagggttgtatttcagccacagaaagcagagaatgctctagaactcaggccagatgaagacctcagtttgatttcattcctctcccctgacaactatgcctgcaccctacagaagaatttctcctatgctgagctaccttggctgttctc

SEQ ID NO: 181355 - DNA, 505 bp, Homo sapiens
aaaagtaataggaattggaattctaagtaataggaattgaaaactgtacattgttattcatgaatctgttacatttatgctgagaggaagagctgtcargttaattaatctatctcttatctatctgactgagcacttctgtccacattctccctgcaccccaaagctgtgtcactctctgatggtggtaatggcccaacccagagcattaggcacagttatgttttgtttttgaggacagaaagtaagtggagtagcattttcctggggcctaaagcattcttcccagaaacaaatgttcagagtcacaagttaccagtttctaaaccagaggtaccaggtggttgttgtcctcctcctcattcttctgctgctcctccttctctttctcctcttccttccttttcttctttttcttataatatctttaaggagatacaattcacataccataaaatccacctaattaaaatgctttttagtgtagtcacaagttgtgcaacca

SEQ ID NO: 181356 - DNA, 505 bp, Homo sapiens
aaaagtaataggaattggaattctaagtaataggaattgaaaactgtacattgttattcatgaatctgttacatttatgctgagaggaagagctgtcaggttaattaatctatctcttatctatctgactgagcacttctgtccacattctccctgcaccccaaagctgtgtcactctctgatggtggtaatggcccaacccagagcattaggcacagttatgttttgtttttgaggacagaaagtaagtggagtagcattttcctggggcctaaagcattcttcccagaaacaaatgttcagagtcacaagttaccagtttcyaaaccagaggtaccaggtggttgttgtcctcctcctcattcttctgctgctcctccttctctttctcctcttccttccttttcttctttttcttataatatctttaaggagatacaattcacataccataaaatccacctaattaaaatgctttttagtgtagtcacaagttgtgcaacca

SEQ ID NO: 181357 - DNA, 584 bp, Homo sapiens
aagcttcttttagcattagcgctaaagtcaacttctaaacgttgactttaatactggttgttttaatacaggctgtatattcttacatagacagtgccttcaataacattcttaaggcaaaagctattgtagcttttggaaagtagttccttgtagctactttgatacaaaaagccaagggcataaaaacaaaataaaaggtattgagagctactttttgaattactatgacagtaagatgtaagttatcaacattactgtttcccattaaattaataagaattttattttcattactaatgacttatgaacttgaatcagattgggcaaatgcctcaataactagttccctaaataaatagcccaccagtactcattttctttcaacaaacattgatcaagtgcctactatgaacagagcattattccgagttctttatatgtgttatttaatatgcacaggtcttaggaaacaggcagtaattcccatccccttttacccgagaggacactgaggcctgcacaggtgagtaacttcatcaaagtcccacagccagrttattaagcagctcaccttttgggcc

SEQ ID NO: 181358 - DNA, 636 bp, Homo sapiens
taatggtgaacactctggactctgaatacttaagatcatatctagaagtgatatgctcactatcagtggttcrcatgtaactctgaagaatatttaccatgatgtctacttatccttaaatgttaggaaaaaattatttccaagtaatatcaaacctaaaattttggcactatttaattgcagttggtatttaccataaaatatccaccgacttggccattcagttataaatgagttcgagagagacacagaattatgaaccttctaaatcatgaaacatgtttaatcaagcaagagtctgcctagttaagattcagaatttacattaaagtttataatctaaatacttacgtcattccaatggtctccagtggcatttcagtagttcctattcacctcttcctctatattaattcttaattaatatattcttaaacttcatatttcctcttttgatttttgactgtcttaaaatattcttaaacttcatatttcctcttttgatttttgactgtcttgatagtgaaatacacacacatgcttttcagatgaatcacttacctcagagcattattttcaaatacattcaaccatatatgaaagtggcactgtatttagaaatcttttaaaatttca

SEQ ID NO: 181359 - DNA, 587 bp, Homo sapiens
aacagcaattaactctggctggcagaatgttgagtgatttttaaatgagtgtagactgggcacagtggctcacacctgtaatcccagcaatttgggatgccaaggggggtggatcacctgaggtcaggagttcaagactagcgtggccaacatgaaaaaacccagcctctactaaaatacaaaatacaaaaattagccaatcatggtagcaggcacctgtaatcccagctctttgggaggctgaggcatgagaatcrcttgaacccggaaggtggaggttgcagtgatccaagattgtgccactgcactccagcctgggcgacagagggagattctgtctcaaaataaataaataaattaaataaataaaaatgatgagtgcattttattatttttctataactaacttgtattacttgtctaatgcctggaaaaataaaatgcttggacgtcagggacgctcaggcaggagctaaccagataaagcttaagcttgagggcctctcactagcacaaggcaatgcatttcatgttctgttgtcttttgctctccccctacctattgtgtaagcttaggtcccacaaaa

SEQ ID NO: 181360 - DNA, 587 bp, Homo sapiens
aacagcaattaactctggctggcagaatgttgagtgatttttaaatgagtgtagactgggcacagtggctcacacctgtaatcccagcaatttgggatgccaaggggggtggatcacctgaggtcaggagttcaagactagcgtggccaacatgaaaaaacccagcctctactaaaatacaaaatacaaaaattagccaatcatggtagcaggcacctgtaatcccagctctttgggaggctgaggcatgagaatcgcttgaacccggaagktggaggttgcagtgatccaagattgtgccactgcactccagcctgggcgacagagggagattctgtctcaaaataaataaataaattaaataaataaaaatgatgagtgcattttattatttttctataactaacttgtattacttgtctaatgcctggaaaaataaaatgcttggacgtcagggacgctcaggcaggagctaaccagataaagcttaagcttgagggcctctcactagcacaaggcaatgcatttcatgttctgttgtcttttgctctccccctacctattgtgtaagcttaggtcccacaaaa

SEQ ID NO: 181361 - DNA, 611 bp, Homo sapiens
agggtccctctcacaacacgtgggaattatgggaactacaatccagatgagattttggtagtgacacagccaaaccatatcagtcatgtagtcaccaaatggtaaagttgggattcaaacctaagcagtctgactccaaggctacactcttagccactattttatatttcatctttagrgagttgaacccatacattaagactacagagtctttgttctttaacccttggttgataggttatcattcattctgcagatatttatttgcatctactacgtgtcagctactcttgtaaacaatgaagatacctagtatatctagtaataaaggcaggacaaatgattactctaaaatgcttatgttataatagggatgaaacaaaataatcaaacaaagtttgtataatatgtcaggtgatagtaagtgctaagaataaaaatagaaaaaaagggattgagataataggggcagttcctatttagtttagtatagaaggctttcctgacatggtaatgcttgaatagagataagaataaaatgagtgaattttctggagtgattataaggattatatgaaataagtacatacagctacctaagagagtagctg

SEQ ID NO: 181362 - DNA, 611 bp, Homo sapiens
agggtccctctcacaacacgtgggaattatgggaactacaatccagatgagattttggtagtgacacagccaaaccatatcagtcatgtagtcaccaaatggtaaagttgggattcaaacctaagcagtctgactccaaggctacactcttagccactattttatatttcatctttagggagttgaacccatacattaagactacagagtctttgttctttaacccttggttgataggttatcattcattctrcagatatttatttgcatctactacgtgtcagctactcttgtaaacaatgaagatacctagtatatctagtaataaaggcaggacaaatgattactctaaaatgcttatgttataatagggatgaaacaaaataatcaaacaaagtttgtataatatgtcaggtgatagtaagtgctaagaataaaaatagaaaaaaagggattgagataataggggcagttcctatttagtttagtatagaaggctttcctgacatggtaatgcttgaatagagataagaataaaatgagtgaattttctggagtgattataaggattatatgaaataagtacatacagctacctaagagagtagctg

SEQ ID NO: 181363 - DNA, 638 bp, Homo sapiens
cttttcagttatgtgcagtattcaccatcagttcctttgctggaattttccagtcggctttaggtkgtataaagcttaccctgcagtagattcctcaaaaagggcacaggtggagagcatcggatgagttcttccatgttcaaaatatgtttcttcagctttgatatatgaagacctgtggtttgcattttctttccttaggtttcttgaaaggcagctctactgctgttttactttgtttgttatggatacgagttgaatatttttgtctttgtgatttttgatgagacaacaataaatgtcctattagatgagttttatgttgcttgcattgaaacacatcttaactctaatgcacccccctgcaccaatctctagagccagcaggatacaactggtttaagtcaatcagggccaacttttagtaatgaggatggggtttaaattaacctattcatctggcttagaggaggaaaactgagatgttatgcccttgaatgtggggaaagggttgctgggcagtaaataacagctgctttagcaatggagtctgtaaatggaagtctggaaaaaactgctcagagaggtagaaaaagaaaatgaccaggtaaaatataagtacatagagaatgagtggc

SEQ ID NO: 181364 - DNA, 638 bp, Homo sapiens
cttttcagttatgtgcagtattcaccatcagttcctttgctggaattttccagtcggctttaggttgtataaagcttaccctgcagtagattcctcaaaaagggcacaggtggagagcatcsgatgagttcttccatgttcaaaatatgtttcttcagctttgatatatgaagacctgtggtttgcattttctttccttaggtttcttgaaaggcagctctactgctgttttactttgtttgttatggatacgagttgaatatttttgtctttgtgatttttgatgagacaacaataaatgtcctattagatgagttttatgttgcttgcattgaaacacatcttaactctaatgcacccccctgcaccaatctctagagccagcaggatacaactggtttaagtcaatcagggccaacttttagtaatgaggatggggtttaaattaacctattcatctggcttagaggaggaaaactgagatgttatgcccttgaatgtggggaaagggttgctgggcagtaaataacagctgctttagcaatggagtctgtaaatggaagtctggaaaaaactgctcagagaggtagaaaaagaaaatgaccaggtaaaatataagtacatagagaatgagtggc

SEQ ID NO: 181365 - DNA, 594 bp, Homo sapiens
actggaatcatcataaaagagcccagggagatctcacgtcrgtagctgagttgcaggcctagaaaacagcagtatatttggaagaccagcaggaatgtctttattgaaaacaacaacaaactggaatgaaaagtttatttaacgtgtgaccatgtagaatgtagtgttcagaagggttcagagttctgcctgagtatttgaaagaactggtaacaaaggaataaatgataactaataaataatgaccattattaattccagaagaaaatatgttgcacaagaaagaaaatatgtatctcttgatttgtcaatgaatgacattagcataatgataaaaaggtaatttctgaatattaagaactaaaatgtttagaaaaatgaaagaacaaaaaattaagagaaatgggaaaatattaagttcatgtattccatattagaaggtcagtagataatatcttagagaatattagataaatatcttaaattttagaggaaatgcaagaaaaaatagctagagatgaaaaagattgcttctagggtatgagtttggatgatggagttacaggggttcctgttattagctgtaagcttaac

SEQ ID NO: 181366 - DNA, 594 bp, Homo sapiens
actggaatcatcataaaagagcccagggagatctcacgtcggtagctgagttgcaggcctagaaaacagcagtatatttggaagaccagcaggaatgtctttatygaaaacaacaacaaactggaatgaaaagtttatttaacgtgtgaccatgtagaatgtagtgttcagaagggttcagagttctgcctgagtatttgaaagaactggtaacaaaggaataaatgataactaataaataatgaccattattaattccagaagaaaatatgttgcacaagaaagaaaatatgtatctcttgatttgtcaatgaatgacattagcataatgataaaaaggtaatttctgaatattaagaactaaaatgtttagaaaaatgaaagaacaaaaaattaagagaaatgggaaaatattaagttcatgtattccatattagaaggtcagtagataatatcttagagaatattagataaatatcttaaattttagaggaaatgcaagaaaaaatagctagagatgaaaaagattgcttctagggtatgagtttggatgatggagttacaggggttcctgttattagctgtaagcttaac

SEQ ID NO: 181367 - DNA, 527 bp, Homo sapiens
atttcctatctttgatttcattgatttccgtgctaatttttattctttcttttcttttgtgtacttgggagttaatttgctcttctttktctggttttctaaaaccttctaattgtctacttacaaggtctagacacttggaaggttttagatcttttttttcttccaatatatgcattgaatactataaatttccctctaagcactgcttttgctggattacagacattttgaaaagttgtattttcatttttattctagaattatttttaaattaaaatttccatttgtttgctgctataatatagaagcacaatttacttttgcttattgacctcataccctgcaatctagctctatttctgactttgttcgtgtgtgtgtgtgtttattccttagctttctctatgtaaataatcatgttatctccttatcgagacagttttactttctttttgatctttatgcctttatttatatattttttgccttttatttagattggaactccttataagagcttcagt

SEQ ID NO: 181368 - DNA, 576 bp, Homo sapiens
cctaatgcatgtgaggcttaaaacctagatgatacgttgataggggcaccaaaccaccatggcacatgtataccaatgtagcaaacctgcaygttctgcacgtgtaccccagaacttaaagtaaaattaaaataaaaaagcaaatgccactgaatgaaacaacttcaaattgtttgaatcatctgtacatattgattgtctttcaatgaattcttattaagcacctaccctcacataaagcactgtacaaaatgctgtacacccttaggctgtctcagtggaacctcaacatccaaaagcaggcttggataagaggcagtgtattgctttacagtaatggaattattgtaaccaaaggattttgttgttgtttgttcttgttgttgttatgctcaagtttaatttttatacttattttttaaagaaagaattcttcaagcccagaaagcacgttaacttttcattatgaaattactcactgactcagtcaagagagcattgttatcagttatccttttgtattcatcaaggttctccacagaaacagaaccaatattatatatatagatatatcaa

SEQ ID NO: 181369 - DNA, 576 bp, Homo sapiens
cctaatgcatgtgaggcttaaaacctagatgatacgttgataggggcaccaaaccaccatggcacatgtataccaatgtagcaaacctgcacgttctgcacgtgtaccccagaacttaaagtaaaattaaaataaaaaagcaaatgccactgaatgaaacaacttcaaattgtttgaatcatctgtacataytgattgtctttcaatgaattcttattaagcacctaccctcacataaagcactgtacaaaatgctgtacacccttaggctgtctcagtggaacctcaacatccaaaagcaggcttggataagaggcagtgtattgctttacagtaatggaattattgtaaccaaaggattttgttgttgtttgttcttgttgttgttatgctcaagtttaatttttatacttattttttaaagaaagaattcttcaagcccagaaagcacgttaacttttcattatgaaattactcactgactcagtcaagagagcattgttatcagttatccttttgtattcatcaaggttctccacagaaacagaaccaatattatatatatagatatatcaa

SEQ ID NO: 181370 - DNA, 576 bp, Homo sapiens
cctaatgcatgtgaggcttaaaacctagatgatacgttgataggggcaccaaaccaccatggcacatgtataccaatgtagcaaacctgcacgttctgcacgtgtaccccagaacttaaagtaaaattaaaataaaaaagcaaatgccactgaatgaaacaacttcaaattgtttgaatcatctgtacatattgattktctttcaatgaattcttattaagcacctaccctcacataaagcactgtacaaaatgctgtacacccttaggctgtctcagtggaacctcaacatccaaaagcaggcttggataagaggcagtgtattgctttacagtaatggaattattgtaaccaaaggattttgttgttgtttgttcttgttgttgttatgctcaagtttaatttttatacttattttttaaagaaagaattcttcaagcccagaaagcacgttaacttttcattatgaaattactcactgactcagtcaagagagcattgttatcagttatccttttgtattcatcaaggttctccacagaaacagaaccaatattatatatatagatatatcaa

SEQ ID NO: 181371 - DNA, 618 bp, Homo sapiens
ttcatgtggttaatttaataggctggatttgggtagtccctcattcccactctacctcctaaacattttctttcacagaccrtagctttctctctctctctctctctttcttggtctctctctctctcatttctctatcatacaagtttttttttaaaatcatttccccgaggttacaaataatgagctcagtaagataagaaatactcgtgtgcagcacttttaaaaccaaaatgatttcatgtaatgaaataactcaaatgcttctagctacattaagtgactctctaggggccaggcattttgggagagacattagcttctaggccactaagtaccgtttaaagaaagcagtgtagcaatttgccataccatagagaattgtatcttgtagttttgcactatcttccaaaggacttacagtgtttatacacaaaccatctcttttgtgctaaaaacattcctaagtattattctgtattagtgtattgtttcctaggcacctggtataattccttcaatgggagattatttgggctcctactatgtgccaggctgtgactgagtttacagagcaatatgtagcccagtacatatctctgggtagcaatctactgg

SEQ ID NO: 181372 - DNA, 618 bp, Homo sapiens
ttcatgtggttaatttaataggctggatttgggtagtccctcattcccactctacctcctaaacattttctttcacagaccgtagctttctctctctctctctctctttcttggtctctctctctctcatttctctatcatacaagtttttttttaaaatcatttccccgaggttacaaataatgagctcagtaagataagaaatactcgtgtgcagcacttttaaaaccaaaatratttcatgtaatgaaataactcaaatgcttctagctacattaagtgactctctaggggccaggcattttgggagagacattagcttctaggccactaagtaccgtttaaagaaagcagtgtagcaatttgccataccatagagaattgtatcttgtagttttgcactatcttccaaaggacttacagtgtttatacacaaaccatctcttttgtgctaaaaacattcctaagtattattctgtattagtgtattgtttcctaggcacctggtataattccttcaatgggagattatttgggctcctactatgtgccaggctgtgactgagtttacagagcaatatgtagcccagtacatatctctgggtagcaatctactgg

SEQ ID NO: 181373 - DNA, 618 bp, Homo sapiens
ttcatgtggttaatttaataggctggatttgggtagtccctcattcccactctacctcctaaacattttctttcacagaccgtagctttctctctctctctctctctttcttggtctctctctctctcatttctctatcatacaagtttttttttaaaatcatttccccgaggttacaaataatgagctcagtaagataagaaatactcgtgtgcagcacttttaaaaccaaaatgatttcatgtaatgaaataactcaaatgcttctagctacmttaagtgactctctaggggccaggcattttgggagagacattagcttctaggccactaagtaccgtttaaagaaagcagtgtagcaatttgccataccatagagaattgtatcttgtagttttgcactatcttccaaaggacttacagtgtttatacacaaaccatctcttttgtgctaaaaacattcctaagtattattctgtattagtgtattgtttcctaggcacctggtataattccttcaatgggagattatttgggctcctactatgtgccaggctgtgactgagtttacagagcaatatgtagcccagtacatatctctgggtagcaatctactgg

SEQ ID NO: 181374 - DNA, 497 bp, Homo sapiens
ggtaggagttatgagggatttgagaattatgagattagagaaaggaagatgagtttggaggccatggcagtactgtaggtgagagaccacgagaatgtgaaccagtgtagtcaaaagkaaggagaaagtagaagggggagataagaaaaccgtactgaaggtagaatcacaggacttgatgagagatgagatgtgcagatgattgagacaaagggtttcagaaatgactagtgcattctgtagagaatgtagtggtttttgtgtaattatctttattgaggtccatttgcccaacaccattacctctcacctgacttggggtctgaagcagcacagctaaataacaagaacaaaacaaatcctccaaatccaactccaaaagcactggtaaataatggaggctttggagcttttctaattattgttccctgtgcttgtgtattttaaaatttcttttatatatgtaacatttattgagtgctcactgtgtcatgtga

SEQ ID NO: 181375 - DNA, 508 bp, Homo sapiens
ttctgtagttttaaaatgctacagaaaatgtgctttttattttactttttgtgttgttggttacattttcaagtgctcaagaagtagtatgttaaagacaaacaatactgtcatcagctaagaccactgaaaaattctgagttgatttgttttggttggagaattacatggagttaatgcgatcatagttactctgatcaaatgaccctcatccaactaggtaatttaggtggcccactcatcctggcaaattataactgctcaaatctgttcctggtttgaaggaaatgtagctatttaacttcctttcatagtaaaaaagtarcttgtttctctctctcctttgctaatttatggtttcctgacagttggggttgattttttgtctcccaaatggggtttccccccccatcccaattccattttgagttttaaaattaattttcctttcattgttatgattcactcataagacatatgttgaattttatcagctgttaagatgctg

SEQ ID NO: 181376 - DNA, 522 bp, Homo sapiens
tccccttcctccccttcctaccagaagagtggagaaacagtgaaaaatctgaaggtagaattctactttcagactcatccaaaggagcttctaatttgagaaaggccatcacagagaaatgactggcactgaataaataactgagacctctgtcattctgcttgcttccgattaataacagcccctgctaaaacaaggatgcctccagagcccaggcttcagcatctatgccctccttctcactaactattttaccagcccctgtcttgcatgaggtctgccccatgctctttgtatcctctcccttggctttcctttattctttatggtcctgctaaaagactggagagaatgtaatccaaagatttaccgaacmcttactatatgtcaactactgttgtaagtgcttgggttctatgaagaggtagtattttcatgtcacttttacaggagagaaatatttaggagtttgaataagctcccccgggccacatatcgtcatggcagaacatagatttgaac

SEQ ID NO: 181377 - DNA, 541 bp, Homo sapiens
atcactgaaagtttccccttcctccccttcctaccagaagagtggagaaacagtgaaaaatctgaaggtagaattctactttcagactcatccaaaggagcttctaatttgagaaaggccatcacagagaaatgactggcactgaataaataactgagacctctgtcattctgcttgcttccgattaataacagcccctgctaaaacaaggatgcctccagagcccaggcttcagcatctatgccctccttctcactaactattttaccagcccctgtcttgcatgaggtctgccccatgctctttgtatcctctcccttggctttcctttattctttatggtcctgctaaaagactggagagaatgtaatccaaagatttaccgaacccttactatatgtcaactactgttgtaagtgcttgggttctatgaagaggtagtattttcatgtcacttttacaggagagaaatatttaggagtttgaataagctcccccgggccacatatcgtcrtggcagaacatagatttgaaccaaact

SEQ ID NO: 181378 - DNA, 526 bp, Homo sapiens
atttactatattactgtattgagcattacaataagtgctgaggtataaatcaatgatcctagcttaatgtgctatttttttcctatcagatttgaattttatgataatgctgatgggatgagctagatgggatttccagatcctagaatgagattaggtatccaagaggtgctcaggcttttcacaataattctctaatcatatctgtagattgtatcttccttttctctttctattagtttttgaattaataattgatttacttttatttgatttatagcagcatttattttatctattgcataacaagttttcctagcttccaaatttttgacttatagcaagtctaggatttcagaattagacagtatyttattgacagagaaagataatttgccaaaagtcatttgatgtatttctgtggttcttgtcagctccatgggcctcataaaagaaatcagaaatccaccccttcatttattggagaagcacacctgaggtttgaggggtttcttctgggaaataa

SEQ ID NO: 181379 - DNA, 633 bp, Homo sapiens
ccatgggatcagggccaaggttattttgttccttcctttatgtatcacttcctcaacaaacacagtctgtgctcaaaaattattttttgatttttcgatggctttgctgccactcatggtaacttcatgctatcacacaagccaatggagagtcaccaaattgtcataagaagaccgacaggattatatgtaagaaagcccaccctggcagcagtaccaaaaatgaagaggaagagggctggactgcaataggggagagacagtgaaatgttatccatacaagcattttcattgtagtcagataattaatttctttaagtgtcataggtttgcgtgtaatgtcaaattttggaatattttttaaaaagaaaccctgtcctcattaattcctatcattgctaacatataaactatccaaaaaatcatcccattccttcatttagcatggccaaactacatgtagagatactaaaacaattcattgagtagacacttactattccaattaatcatatacatgaaagaggtcagagaccctgtgctaggcacctayaacttttaaaattatttagaatttcatgaaaaaagtagaatattacagagatgcaggtagacatacaaattagtagaaca

SEQ ID NO: 181380 - DNA, 586 bp, Homo sapiens
aaggtagttattttaatagataaatggcaaagaaagtaaagtctcaaatttcttgcttatgtgtcattatgccataaagttggggacatatttccaatttktccagtgttttcattttgaaacattaaaactggtttattgtactattgaaattttattagaatactttcttgtactttcataattaagaaattagggtaatattaagaatttaaacactaaaaccctgatgaaagttatttttctccattaataatatttttatttgtatttcaattagaagtgatctattgtttatattattttctaagaatctaagagtgtgttttttaaacatataacaatagaatccagtaagcattttaattaaggactgcatattatcacttaacctatttagcagattgtagaggcaaaatgcttgcatgcctattttttaaggattctatctttgtaagctatattttaacttttattgattgaaatatagatttttggtcatataatgactgcctacctccaattacagaaaaaataaaaaattgctaacaagacatcttctcttataacctaggccaagttaagc

SEQ ID NO: 181381 - DNA, 542 bp, Homo sapiens
ttagccaaaatttttattttaaaccaactttcttgtgccccttcttgcccacctctttcaactccagtccaggggtagggcaggtgtttctgagggcagaagtggatggacaccagccckcctgggcagtgcttagcaaataaaatagaaccatgctttgtccatcatttgatggatgccacagtccctaaggtcctgatcctatctctgaaatttgttttctgaacaggagcaatgccgaatttttatttttccatgcatttgttgtgtgtctgagtaattttgatagtgtatggtcctagataacgtgacaggactttcacatccacaggtctgcaacactttgcatcctctgtcattggatgttatcgtcattgacagaatatatgtcaaactccttgaggtctttctcatgttgcaagctgcattctaacccgttaagaatagcattttttggaggacttgctttgaaatgtacagaaaagaactcgtactgaaaacccttgggtttttgctaactgtgcggttttaactctgttcac

SEQ ID NO: 181382 - DNA, 500 bp, Homo sapiens
ttttgagcatttcattttgccrtgagagaaactaaacccgtggtttggggttcattgtatttaagacttgtgcaagagcctttaacacttcactacttctgctctaaataaagattcctctcttctaggaatttagaaaatatgacttccgcttcagtgatttgctaataataaaaaaggacagaaaaaatgaaagttttgttttctttttggtcaaacttattttttctttgaaatattgcaaatagcatatcaaggtataaacacttgtctggatctaaaacattgttttgttttctattttggggataatctttccttttgtcttctttgcttgaacttttcccagagagaggggaacactatcttatctcacatgatgttcattagcatttcagagtttaagtaaatgaatggattgtgcaagtattgaaatgtttttgcttcagattatttagataacaaaattgagctgactttcttaaagcattagtgtttct

SEQ ID NO: 181383 - DNA, 569 bp, Homo sapiens
tttatagactgagaacaggctggaggaaaaagagaaagctttgatacccaggaatatttattgaagagaattactttgtaaaaagatcactgaaacatgactgtttattatgtgcaaggcactgcatgcagtaacrcaatgaacattctctgaaagaagaaaccatctttgtaattcaaactctactgcagtcaagtttaatgaagtgactcttatttaagtccctattacatgatccatgtaggaaatttctgttaggatttggtactagcattaactgtgtcttctttgagaagcatcacctgtcttttccttttatagaataatactagataacatccttagacatctcccatgtgccaggcactatgcccaacacttcacctacattttctcagggtgttcttacaatgtctctttgaagaaagtactgtcatcattccaccagtgaggttaagtaacagtcccttaaattttccactccttagtgccagaaagcttagagcaaaattttaagcccaatcacagcaactcactgacctctccttttgtaaacaaaacaacaaaca

SEQ ID NO: 181384 - DNA, 559 bp, Homo sapiens
gggcaatggacaaaaatgtcacttaacatcatgttaaatagagaaagaattaaatgtcacctgcttccatacctagctgtggctattttgtcatttaaaattcttttttttaatagcaatataagaatggcaaaaaattttttttaaactaaacagtttctttttaaagtcattatagttttacatacacagtttattcamttttctctcatggtttttaagattagaagtgttataaaaatcatttcctcatgctattgcgaatgacttataaaaatagtgtccagtgcagaaaactttgcattgtgtatttgacattgatcatttcactcgacaattaatcattacttaatcatttcataattttggatcatttagatggtttcagataaaaaatattgtaaataatgctgagaagaatagcatttgacatacattttcccccctctatcttggattattccatttgtatgagcaataactactttatgaatgacagctggagttactgagcttagtttctcagaaccttggaaaacattttgtattaaatacagat

SEQ ID NO: 181385 - DNA, 509 bp, Homo sapiens
acagataaattcaacttttgctaatgattcagggaaatctcaagagcatttattattttgtggtgctagaagatagcccaaagtgcgaatgatattataacaataacaatcatcagaatatttgtgattatataggatattgtatgcaggtatgcttccaacggcttgcttgtattaactcatttaattctaataagaacatygtgaagtaagtactagtatcattctcatggtacagatgatgtgaccaaggcctaggcacagaaaggttccgtaaccaaagtggcccagccaagaggctgtagtgccaagattcactttcaggcagttcattcccagagcctaacctctcagcattcatgtgttacagcttctaagataagtacgggttcagagtcaagcctgaattttggctttgctacttggaagctgaatgagagtaagttgcttaacttttctaagttccaatttccttatcttaaaatgaggatgataatggcactaacatc

SEQ ID NO: 181386 - DNA, 509 bp, Homo sapiens
acagataaattcaacttttgctaatgattcagggaaatctcaagagcatttattattttgtggtgctagaagatagcccaaagtgcgaatgatattataacaataacaatcatcagaatatttgtgattatataggatattgtatgcaggtatgcttccaacggcttgcttgtattaactcatttaattctaataagaacatcgtgaagtaagtactagtatcattctcatggtacagatgaygtgaccaaggcctaggcacagaaaggttccgtaaccaaagtggcccagccaagaggctgtagtgccaagattcactttcaggcagttcattcccagagcctaacctctcagcattcatgtgttacagcttctaagataagtacgggttcagagtcaagcctgaattttggctttgctacttggaagctgaatgagagtaagttgcttaacttttctaagttccaatttccttatcttaaaatgaggatgataatggcactaacatc

SEQ ID NO: 181387 - DNA, 416 bp, Homo sapiens
aatatgcagacattgtagaatggctaaatcaagctaattatgcattgcgtgacatacctatcatttatttgtggtgagaacatttaaaatctactcttttagcaattttcaagtaaataatagttattaactgtagtcaccatgttgtacaatcaatctcttgarcttattcctcctgtacaactgaattttgaatcctttgaccgatctctcccctttcctacttcccctttccctcagcccttgataaccaccattctactctctgcttcagtgagtgtgactttttaaaattccacatgtatgtgagataatgcagtattcatctttctgtgcctgttgtatttcacttgttaaacacaatttacaggaagccattggtttggaccgagctcctgcactaggcccaacagact

SEQ ID NO: 181388 - DNA, 416 bp, Homo sapiens
aatatgcagacattgtagaatggctaaatcaagctaattatgcattgcgtgacatacctatcatttatttgtggtgagaacatttaaaatctactcttttagcaattttcaagtaaataatagttattaactgtagtcaccatgttgtacaatcaatctcttgaacttattcctcctgtacaactgaattttgaatcctttgaccratctctcccctttcctacttcccctttccctcagcccttgataaccaccattctactctctgcttcagtgagtgtgactttttaaaattccacatgtatgtgagataatgcagtattcatctttctgtgcctgttgtatttcacttgttaaacacaatttacaggaagccattggtttggaccgagctcctgcactaggcccaacagact

SEQ ID NO: 181389 - DNA, 609 bp, Homo sapiens
gcaagttgctgaagaaacaatcagaaagaaactgctaaattgttaaaaagtagatattttggcagtctggggaaaaattaatttgggttatagggtctgtctataaagaagggcactgataaaaacctcaggctttctgctgataccactgaaggactaaactcttggataaaggtgaaactgaaactgggactcaattggatcaaggtgattttcccgtgcttcaactaccttctagaagaaaattaaaatctctctgaaagaataaagcataagccagagcttctagaaatatttatacaaatgtccagcattcatttaacaattaccaagaagccagaaaacagaatcatgagactaaaaattggggtgagtrggttgacaatataaaggtaacccagatagtgacattattaagaaaaagcttaaaatatcaataattaatatgctcacgaaaatacgaacaaagatagagaatttgaccaaagaactagagtttatttttttaaagataaattttaattctagaaaatagcccaaactaagaatgggatagatgaatgtaacagcgaattagacaaagcagagaaaaagaatagtgaacataga

SEQ ID NO: 181390 - DNA, 612 bp, Homo sapiens
attttgaaacagagctgacagaaatgctcctttccatgacattgcaaagcttcatctgctggcccctgtaagatgcacaaacggaaaagaatgaagttgggagggaagagtggattttcactgcaatgagacttggaagaaggtttcatgctagtgttgtttgatggctatgtctgttctaactgtaaataatatgacaacattcgagattgagagattgaaagagtacctcctgttatttgaggtttcaagttaacatttatgatataaaaggcaaaatcatacaaaattcctcttttcctgtgctgagggagagagacactgcygcactgaatcaaatacccattccccatgcctcagcctcacggaacatcgctttttacccagaaggaaagtgggaatggcgagagctctgttagagaaaaatgaccctgggctttcactatttacattctgtttcctgcatttagcaatcggaacacctgcacttgatcaaatatgtcttcacaaaagtacaatttaaattggtcatgaattttttaaggacataagagtaaaataagtacaatgaagcaacttcaaaatgtatgtggaagaaaaaaacaaacaacc

SEQ ID NO: 181391 - DNA, 258 bp, Homo sapiens
tcatatttagaattctatctttatttactgattagctacagaagagttgcatgataatagttttgccagtttaggctgttactttctctgagctcatattatggtgatcaataggaagataatcttatttaaatgttttgtgatttttttttaaatccaaagtgttcatgttttaccatgaagttaaagggcgatatttttatgcrttttctccatattatgctcttataatattatgtaatatttaaaatctataca

SEQ ID NO: 181392 - DNA, 596 bp, Homo sapiens
ctttccactcagtgagtgccaaaactgttgcacccagattagctccagagaagagcagagcttccagtggaaattttaaacaagtgggatcaagatcctgaagcatttctttgaagaattgtagcagaagatgaaatatggctttaccagtatggtcctgaaaacaaagtacaatcaaagcagtggctaccaagaggtggaagtggtttagtcaaagcaaaagtgaactggccaagaccaaagatcacagcaacgattttgaaagatgctcaaggcattttccttgttgactttctcaagggccaaggaacaataacatctgcttatgagagttttgagaaagttagtcaaagctttagtagaaatgtctgggaagtcatcttcacagagttcytctccaccacaacaatgctcctgctcattcctctcatcaaacaaaggaattttgtgagagtttctgtgggaagtcatggggcatacatctcatcatcctgttttggcttcttctgacttcttgtttcctaatgttaaaaaaatctttaacggatgtccatttgtattcagttaataacgtgaaaaagactacattgacatgg

SEQ ID NO: 181393 - DNA, 344 bp, Homo sapiens
ctccagggctcaccatgtgcccaaaaaaaaaaaraactcttaaacaagaggggatggtctcctttgggaaaaaaaaaaaatcctgtcattaaaagtattcaaatccaggtctcaggtagccaaaaagggaaaaaactgtatggggtatgcgtaaatctaacaaggtgatggtacagtacccagtaaaacagttaaaacaatataaagatattatacttttgtacctgaacttcaccaaggtgatccagctgctcttgcatctggttcctggtaacagttacatcgtattctaacttatcatattctctccatgctcgttccaattcctaaaaccaaaaagtgtt

SEQ ID NO: 181394 - DNA, 533 bp, Homo sapiens
taggactaggcacacagttggcattgttgaagtcacagagtctatccggtgctgtgtgtgtgtgtgtgtgtgtgtgtgtgtgtgtgtgtgtgtgtgtgtgtgtgtgtgtktaagtcgcctcgttcacttccaaggctctttttacaccgtatgccagtcagccataaatcttcatctccacctctttcctcatctccacattcactgacctcttcatatagtgtctaatatacagtcagagaaaacaactttgctgccttgcagccattctcaatttttctctttccttcagttaacatcaccccacctcccctccagtctgtcatcagtgagccctgttgacacttcctcccctccaaaacgtatcccaaatctgctcacttctctccatctctgccacacctctcgtctttgccaccatcatctttcactcagacaactgtggcagcctctttgcttttcccctgcttctccgctcttgaccctttacaatccattctccacactagctagattcattttcttaaaatata

SEQ ID NO: 181395 - DNA, 603 bp, Homo sapiens
aatttttaaagaacttttacaactcaataataacaagacaaacagctcaattttttaaatgagggaaaaatttaaatatatttcacatgagaatatactcaaatagccagtgagcacatgaaaagatgttcagcatcattagacattagcaaattgcaaattaaaaccacactgaggaacccactaggaatggctataatcaaagacgatcagtatcaagtattgcggagaatgtggagaaactcaaactctgttacactagtaatagaaatataaaatgttagaaccactttggaaagagattggcagtttctggaaaaaattaattgtaaatttgaccaagcaattttactacgtaagtatgttaagaatgaaaacgtgtgcacacaaagatctgtactaaaatgttgatagcattattcataacagcctaacagtgcaaatgtctgtcaactactgtgaatggagagacaaaatgtgtttattaatacaayaaaactacccagcaataaaaagaaataattgactgataaatggtatacgatgactgaactttaaaaccttgatgctgcctaaaagagccagacacagactacacattgt

SEQ ID NO: 181396 - DNA, 446 bp, Homo sapiens
tgagttagtaccacttgccttgggttcattactttttgttcgttcttaattattcccttcacagttactccccactcttcccctacctttttccatatttctttactcttgaaaattattttcagtagttttgcctgctgagttcactgccttttaggtcacatttagaccttgggtttctattaccacaaaaaaattccaaaatctgggtccaaatttcaactctattcacttatctgtgtgacactggagaagcctctgagtctctgtgtccagatttgtttaccaggtagaatattaataagatctattatgtgaggatttgtgaatattaaatgaaatcatatatatgagacattcygtaagtgctagctgtcattcatcaccttaaaacaagactcataagttgaaaggctgtgaactggtgagcatctagagcagtggtt

SEQ ID NO: 181397 - DNA, 514 bp, Homo sapiens
ttggctatggttgtggttaccttgtttgtctactaagaggattcaaggagaaaaaatacatagtagcgctccgaagatatgcaaattaaaagtactaacttttttttttyttgagacggagtttcgctcttgttgcccaggctggagggcaatggtgcagtctcagcttactgcaacctccacctcccaggttgaagtgattctcctgcctcagccctgtagctgggattacaggcgcctgccaccatgcccggctaattttctttgtatttttagtagagacagggtttcaacatgttagccaggctggtcttgaactcctgacctcaggtgatccacctgccttggcctcccaagtgctgggattataggagtgagccaccggccaaaagtactaacattttaatgctattcttatgctaattctgcaacacagtcttaggaagaatgtgacgcggtgccaatctcaactctgtgggtgaattcagagtgacacacacacagcctgcagagg

SEQ ID NO: 181398 - DNA, 514 bp, Homo sapiens
ttggctatggttgtggttaccttgtttgtctactaagaggattcaaggagaaaaaatacatagtagcgctccgaagatatgcaaattaaaagtactaactttttttttttttgagacggagtttcgctcttgttgcccaggctggagggcaatggtgcagtctcagcttactgcaacctccacctcccaggttgaagtgattctcctgcctcagccctgtagctgggattacaggcgcctgccaccatgcccggctaattttctttgtatttttagtagagacaggktttcaacatgttagccaggctggtcttgaactcctgacctcaggtgatccacctgccttggcctcccaagtgctgggattataggagtgagccaccggccaaaagtactaacattttaatgctattcttatgctaattctgcaacacagtcttaggaagaatgtgacgcggtgccaatctcaactctgtgggtgaattcagagtgacacacacacagcctgcagagg

SEQ ID NO: 181399 - DNA, 630 bp, Homo sapiens
gtgagggtcaactgaacggatgaacatggttccataatcttcaacaattaacttatgccattcctggctgccagtgtagtctagttcccaaaacaaatgcaagtcttttcaaaatggagtttctaaaatggattccctcattcagaattttcacatggggattcggggagagaaagatagaaggaagtgggagaaggaatatgaaggaatgtgaatagtctgttatttttaaacataaaaccaaatggctatttgtaaatctgacacaagcaacaggtggtcactacattgaggtttggagtgaaggaaaaatactgtggaaggaggaagctttgtttataaaactgtgtttgataaaaccaaagaggtgagggcacagcttgatcttgtattcttgcaagaaggaaacagttacttacaaagctaagcaagcatttgatccatgattttaaatattcattttttcagagcatttcctgtagctagtttcccacttaagttctctttagtgtatacaaaaatggcatgttaagctgcytgagcttttcaacatggatgagttctaaagaacctcaacatctagaaggatccttgtttgtgaggtttaatatcatatggttaaatttgcta

SEQ ID NO: 181400 - DNA, 532 bp, Homo sapiens
gcttcttatccagattagattctagaagtcaccagtgtaaacactcccttacatacactcttgactcttagcccattttcccctccatcgtagtcctctggaaaaactctaaacctagctagatagcattctctatgtagttctcacatgcaccaatggaggagcacagagctgaaaaaagaaatgcactcaaccatgctcactgggctcatttttatgaccattaacctcaagtgggccctcagtgctgctaggcaatttgattcattttcctaattcgttcactcacccactttcagagtggtgattcttcactctgagttgatgacctagattattattctgctgaaaactacgaatcagttgggagagaacattcatatgggtctaccccaaacctaytatgccatcttcatctgagcttacatactccattttccctcatgctctgtggataaatcctctgtgttcttatttaacacgcacttcttccactgcacactggattctacccctctcacttacttatagg

SEQ ID NO: 181401 - DNA, 522 bp, Homo sapiens
gaattcttaatccatatctctgcgttgggctgacattctcaaatgtccaacaggtatttacacatgtctaatgggcatttccacttgaatggccagaatacaaattaacacattcatttctgccacatactcactcttctctcttccctgtcttcctcaaattagttaaaactagtgaggtcacccattggatttataccacagaaaacaaagtccaaatttcttgttatctaaagcatattgtgtggaaaatattattcataaaaatgatcatttccctattttttatcagtaacttaaatcagggaacaattattattgggaggaaatttttagtctgaggttgccttttttgcctctgtcagccatcccaagatgtcattagcagtgtgcagtagtgaaaatgatccttagtaactctaaaccaaatatcattaggtagcataattaggtaaattttctccacaaaaacatacaacattttgcaaagtcaaatrgaatcaatttttggagtttctgtag

SEQ ID NO: 181402 - DNA, 554 bp, Homo sapiens
ttttacatgtcaaaacattcttgcattccatgaataaattccacttggtcatggtgtaaaattcttttaatgtgctgttgaattcagttttctagtattttgttgaggattttctcatcaacattaatcagagatattggtctgtagttttcttgagctttgtctggccttggtatcagagtaatgctgatcttatagaatgaatttgaatgtgttcacttctctttaattttttagaagagtttcaacaggatttgtgttgattcttgtaatatttcatagaattttccagtaaaaccatctggtcatatacttttctttgttgggaggtttttgatttttgattcgatctcctttctaattattggtctgtttagatattctgtttcttcatgattcagtcttgataagttgtgtgttrctaggaattcatccatttctcctaagttatacaatttgttgacataaaattgctcataatattctgttattattcttatttttgtgacattggttgtaatgtacagtcttttattttcaatttatttgaatca

SEQ ID NO: 181403 - DNA, 458 bp, Homo sapiens
ttttcaccacgtcaatatctattttttttttttatttttaaactatggccattcttgcaggggtaaggtggtgtctcattgtggttttactttgcatttctctgatgattagggacgtaaagcatttttattaactatcataaatatcagcatttttaaacccaaaagaagtcttgaaaatgggatggccctgctgccatggataaaattctagaatccttacatttggtacttgtggtcaggaattgattgtgtctttttccatccatctgttcctttctttcaagctayctggagtccccagagtcttgaactctttggaaagttaatatttactgatgaggctgcttttcctcccccgcattgagggttcgtggtgtactcacatgaagcaatgaactccctcaagtagtttaccacgaaagcatcacagttaaattagactgagattttagtga

SEQ ID NO: 181404 - DNA, 470 bp, Homo sapiens
tagctctcctaaactccttcccacctcagtaaaactctttcaaaaagtagtttttccttgccatgtccatgttctgatttccaattaattttttaaccctctgaattttgccttcgattctctccactttatcattactgttcttgctaargttatcaatagcttcatggttgccatatccaatggacacttttaattcctttttattcttcttttatgttgttattactattgaccattcaatttctttttaaaatgctcacttgattaactccaatgatgccactatcctgattttttgcctattacttagatggcttattttcccaactggtctgaattcctctcccttagtaggaagatgggttctgccctattaagtattaacatttggcacttatatgtcattgaggtcttggaaggaaatggacaagactgaattaaggtgcattacagtggtgttgcctagg

SEQ ID NO: 181405 - DNA, 522 bp, Homo sapiens
cttaacagtttaaagtgtattattacttagccttcatagtctctataaggtatttgagtaggaagataattatggctgagtgcattggttcatacctatagtcccagcacttcgggaagctgagatgggcagatagcttgtatccaggtgtttgagaccacctgggcaacataggcagaacctgtctctacaaatagcaaataagttagccaggcatggtggcaaatgcacctgtagtctcagcttctcaggaggctgaggtgggaggatcacttgarcctcggtggtcaaggctgcagtgagctgtgttcatgccactgcactccagcctgggggacagagtgagactctgtttcaaaaaaaaaaaaaagttaattatttatgttgaaatactgactcaatatgtttctggaagaaattttgagctttaaaatttttccagattagaggtttatgagctaaatattctactttctctttagccatttatctctgtgtgaaactgaaccaaaaaattagaga

SEQ ID NO: 181406 - DNA, 522 bp, Homo sapiens
cttaacagtttaaagtgtattattacttagccttcatagtctctataaggtatttgagtaggaagataattatggctgagtgcattggttcatacctatagtcccagcacttcgggaagctgagatgggcagatagcttgtatccaggtgtttgagaccacctgggcaacataggcagaacctgtctctacaaatagcaaataagttagccaggcatggtggcaaatgcacctgtagtctcagcttctcaggaggctgaggtgggaggatcacttgagcctcggtggtcaaggctgcagtgagctgtgttcatgccactgcactccagcctgggggacagagtgagactctgtttcaaaaaaaaaaaaaagttaattatttatgttgaaatactgactcartatgtttctggaagaaattttgagctttaaaatttttccagattagaggtttatgagctaaatattctactttctctttagccatttatctctgtgtgaaactgaaccaaaaaattagaga

SEQ ID NO: 181407 - DNA, 566 bp, Homo sapiens
  misc_feature (1)...(566): n = A,T,C or G
atgttttgtctttacagggtgtttaaatgcctatcaaatgattgttcaatgagtgaatgaatatggtatgaatagctaaatgaaagacagatgtttggngattcatcatatctctcctaaagctcccttccacacctttctgtatttgtgtgctggagtaaaaaggatagctggctcagacagaaataatgagtaacctacctaaaggagcagaaaaacaagtgatraacaccgcttgcgtgacatgcaactcgcttgtcatagtagaaacacgaacttgagaaacaatcctgtcagtggcagcatcttcacattttatgcctgatttacagacagccttgctcatatttaatcaaactttatttgtaaacatgctgtcaacaattttattatttgcaaagatttctctaaaagcagcaaattcgtgctcaaatgaaatgatttcatggcaaattgaagccagaaaaggtcaataattgggctttttcttgcttgccaagttgaccagaaatatattcagcaagagcagctgccactgaaacatgtcaatgtgactccatagatcc

SEQ ID NO: 181408 - DNA, 434 bp, Homo sapiens
ggagaattccataccatgttcaattcttggttccaaaacaattctatgctttcttttaataaggtttggcttattagccaaagtgggcttcatggcattcaatggctgagacctgtatatacctcataaaatggaagaatgaggcaggtgtgattcagattgtctcctcacaccccccagcacccaacaccatttgatttttctggacattttatgatgaagtgttcttrtctactttcacaaaacagaataatgaaaagtaactattatctaaaataataaaatgctcgaagaagagtgatttcttttttagaatgcttgcctcacttctccactttgtatgttacaaatctccatttcaccgtcttaccaccattttactcatctctaccccaagcctcagagcatcttctgtggatgtgcattcatttatt

SEQ ID NO: 181409 - DNA, 459 bp, Homo sapiens
ggtctgagccctgaaatcaacaagggggtatatccacagttatttgaaatgaagtttgtttttttgtgatggttttgtgtccagttggtgctgtcactggctgagagtctaatgtatgaaaaatcaaacttaaaatctgagtttctttctttttctttcatttttcatagtaccagtaggaaggatagtgaacagaaattttttgactgcttgcttyaactattaatagtgaataagcacattttattttgtgggaggaggtaaaaagagcatggatgttgctggcctttaaagctttacaatttcctcttctcagatagctagttttaacattttgaaacaattaactatgcaatgagatcttttgtgagacttttcctgcagttcaggaagtttagctaaagctcacatttgagaaaaaatatctcttatactctgaactctaagaaaagtacaact

SEQ ID NO: 181410 - DNA, 403 bp, Homo sapiens
actggcagccagacaaacccccaggcaggagactggaggttgggagaaactaaatctcaaagaagagatgtacagagagtgatattttggtgtacctgaccaatcacatggcaatgaagaagtttcaatagttagtgtatcatttaaaaaaattgaaaatagatatatatgtaattattaaatatttcaagcaaagaaagcaacacacacccatgagtatacgatcaaaattttaaaagatgctaatattttccatattagcttcaaagttttctctttaagaaaaataaattagctactgctaaagtagcatcctgrtcctttcattctctattcatcccattcactttgaggtgaacacattcctgtattattcccttgcaagcttatctatttttactct

SEQ ID NO: 181411 - DNA, 403 bp, Homo sapiens
actggcagccagacaaacccccaggcaggagactggaggttgggagaaactaaatctcaaagaagagatgtacagagagtgatattttggtgtacctgaccaatcacatggcaatgaagaagtttcaatagttagtgtatcatttaaaaaaattgaaaatagatatatatgtaattattaaatatttcaagcaaagaaagcaacacacacccatgagtatacgatcaaaattttaaaagatgctaatattttccatattagcttcaaagttttctctttaagaaaaataaattagctactgctaaagtagcatcctgatcctttcattctctattcatcccattcactttgagrtgaacacattcctgtattattcccttgcaagcttatctatttttactct

SEQ ID NO: 181412 - DNA, 523 bp, Homo sapiens
gaacatactactttgcttaaattacagatacatattttttcctttcaagcatagctagatatttaaaagtatttaaaatattttaattatttatcatttctgggtttatacaaaaagaggaagctttcaaaatatattaccttgacccagaaactaggccactttacctttacactaaaactaactacattaatccaaatgacaagaagataaggtacagatatttgaaaagtctattgtgtgtaaagttcaactccagggtgccattgaaatctcctgaagtttagggtacatcagaaaatgtatagatttgtattttagcctgagacatgcatgtgtatgaagcaattggtggtacacgtgatgtagygtacacagatagtaatacgaaaagaaccagtaaaacatttcctgttttcttctcagccagggacaagctcttagattctgccttttgtaaactctttgaagaacaaaagagtattttctgtaggatttgggggctgaaaatgtaattatggat

SEQ ID NO: 181413 - DNA, 586 bp, Homo sapiens
tagaattctaacttttaaaataygacttggattatctaattaaaatttagcaaaaattagcataacatatcagcattattataatactaagaggttgaaacacaggaccaaagtggcaaaatattttgagactatgcatgaggtcagtgtttggtctgacaaactcgtacaatcctttaaaaataactgtgtaaatacattggggaaaatttgtctaaataaagcttgctagttgtacatcactaaattcacttcaaaatattaaccatgcatgattattaaaagtctgggcttagctgcctactttaactttgaagcatcattcacagttaggtttgaagtctcaaagtgcacccatccttacaagattgcagggaatagaggttagaacagtcttaaacttcccaccagcatttttctgttttaggaatcagaactttaatttgcattacttcagtgacttaaaactctcccacttggctggacttcttgtcttcttgagcacattttaacagtgtcaatggaaaattatgtaagtagagatttaactcgtattgcagaattgcagatttccctcagtaaatag

SEQ ID NO: 181414 - DNA, 588 bp, Homo sapiens
ttataatactaagaggttgaaacacaggaccaaagtggcaaaatattttgagactatgcatgaggtcagtgtttggtctgacaaactcgtacaatcctttaaaaataactgtgtaaatacattggggaaaatttgtctaaataaagcttgctagttgtacatcactaaattcacttcaaaatattaaccatgcatgattattaaaagtctgggcttagcwgcctactttaactttgaagcatcattcacagttaggtttgaagtctcaaagtgcacccatccttacaagattgcagggaatagaggttagaacagtcttaaacttcccaccagcatttttctgttttaggaatcagaactttaatttgcattacttcagtgacttaaaactctcccacttggctggacttcttgtcttcttgagcacattttaacagtgtcaatggaaaattatgtaagtagagatttaactcgtattgcagaattgcagatttccctcagtaaatagtttctagctgaaatctcaaatgggtttgttttgcaaactgatagagtaaatcagaacatgtttctgttgtgctatttcta

SEQ ID NO: 181415 - DNA, 588 bp, Homo sapiens
ttataatactaagaggttgaaacacaggaccaaagtggcaaaatattttgagactatgcatgaggtcagtgtttggtctgacaaactcgtacaatcctttaaaaataactgtgtaaatacattggggaaaatttgtctaaataaagcttgctagttgtacatcactaaattcacttcaaaatattaaccatgcatgattattaaaagtctgggcttagctgcctactttaactttgaagcatcattcacagttaggtttgaagtctcaaagtgcacccatccttasaagattgcagggaatagaggttagaacagtcttaaacttcccaccagcatttttctgttttaggaatcagaactttaatttgcattacttcagtgacttaaaactctcccacttggctggacttcttgtcttcttgagcacattttaacagtgtcaatggaaaattatgtaagtagagatttaactcgtattgcagaattgcagatttccctcagtaaatagtttctagctgaaatctcaaatgggtttgttttgcaaactgatagagtaaatcagaacatgtttctgttgtgctatttcta

SEQ ID NO: 181416 - DNA, 515 bp, Homo sapiens
accaaactatctttgaaaaacccctaacttccacgccttcagagacactgatttgagtaataataaagcttttgtctcacatrcagttggctttgcatgaatgaaactctttattgcaattcctctatcttgataaatcagctctgtctagacagcaggcaaagagaacccattgggcggttacaagttcaacataagtgagagatctaatgaggaactagccaataaacagaagatggagttacatctgtgtatatcagtgtgtgagtagtgtggatacttgtgaggagttactgaagaaaataatatagaggtagaggctctaggtaccatccactactccagttctggtcagaagaagagtagatagctgtttctgtagagtgaactaagagcagatagacaggcatcctgttcccaagaatctttcaaaaatatgtataaagagtagtcttaaacttcaccattaatggtttatttaattagttcaaatattgaaaatgccttttggagag

SEQ ID NO: 181417 - DNA, 526 bp, Homo sapiens
atacaaggtcatatgttttaatcctacttagctccagggcaaatatattctttcagtcctggtttcctcctgcgaaactagtctctcagaagcaagcaaaagaatttttgcacattcatggataaaatggaatattgcaagtacaacagagcatctggatttctataaacactraaactggagtaaggccaacagataactaaatgaaaaaaaaaatcctgagtgcttactatgagcctggcaaagttttagagatgtgactcatagtcaagcaggagatacagatgtagatgtgaaaaaattgaaaaatgtagagtactgcaagatgaaaaatagcttggagactttgcctattaaagaatagccactagaagtaggtattgaaggttctcatgaattgaactaagaaacacattttttaaaaaatgtacaaccagtttggtgggtttttatggactgctagccattcctttattttcagtattagactgaaaacaaaagtgtagctactttaatatccttttcc

SEQ ID NO: 181418 - DNA, 550 bp, Homo sapiens
actcagcatcacaagaaaagcatgaggaaaactgcccccatgattcaattacctcccattgggtctctcttataacacatgcagattatggggattgcaattcaagatgagatttgagtggggacacagccaaactatatcaatatatgtacacttaaaattcttaaaaataaatgcatactcataatggaaatatatatttatgtaaattttagtattgccttrtaacatttaatgaatgtgttttctgaaacaacacaacatacaaacccaacaaacaaaccttcccaatgtcagtataactttgctgacaagtaaaaaatatcatagtttatactatgtaatgtatacccacttatttactgattcctgctaaaaaaattttcattgccatctcatctagaaaatcataatgactttgataataataaactacattttttcaagcaggaaaacatgtcttacaaacactttattaacactttgtcaaacaggtagagaaagaaaaattaggagcaaaaatgaattgaaacaatttttggatggaaaa

SEQ ID NO: 181419 - DNA, 550 bp, Homo sapiens
actcagcatcacaagaaaagcatgaggaaaactgcccccatgattcaattacctcccattgggtctctcttataacacatgcagattatggggattgcaattcaagatgagatttgagtggggacacagccaaactatatcaatatatgtacacttaaaattcttaaaaataaatgcatactcataatggaaatatatatttatgtaaattttagtattgccttgtaacatttaatgaatgtgttttctgaaacaacacaacatacaaacccaacaaacaaaccttcccaatgtcagtataactttgctgacaagtaaaaaatatcatagtttatactatgtaatgtatacccacttatttactgattcctgctaaaaaaattttcattgccatctcatctagaaaatcataatgacttygataataataaactacattttttcaagcaggaaaacatgtcttacaaacactttattaacactttgtcaaacaggtagagaaagaaaaattaggagcaaaaatgaattgaaacaatttttggatggaaaa

SEQ ID NO: 181420 - DNA, 631 bp, Homo sapiens
ggtgtttaccacgtaaattttttttcatcttaaaaatttgtctttctgagtcaacttaagataaaaagccaataggtccaggcayggtggctcaatcctgtaatcccagcactttgggaggccgaggtgggtggatcatgaggtcaggaaatcgagaccatcctggctaacacggtgaaaccccatctgtactaaaaatacaaaaaaaagaaaaaagaaaaaaaaaccaaccgggcatggtggccggtgactgtagtcccagctactcaggaggctgaggcaggagagtggtgtgaacccgggaggtggagctagcagtgagctgagattgcaccactgcactccagtctgggtgacagagtgagactctgtctcacaaaaataaacaaataaataaaataaaaataaaaagccaaacaaattaaatcagaacatgaaatcattttaaaatactaagaatatttttacaaatgtaataaaccaaaatttactaacatgaaatctcaaattcagatctaacttgagtttgctattgcattttatctcaggaagcaaaagtaactgatataatatttctcagaagtattctatgttcctctctgataaatctttttttgatacaaatccaatg

SEQ ID NO: 181421 - DNA, 470 bp, Homo sapiens
tgtttccaggcagagggtgagtcaggtttgaaaacttgcatgaggcttcctgcttcccagctgccaaagaaaagggctttagttcttccccgtcctgtgaagtctgcaagcyggatttgcatccttccccatgttctggccaggaggcttctctccccactcaaattattacaaagttcaccttgggaagttcttatcccaatggagttttaccccctgctcctctggcccccttcctgatggatccctgtggttccaggcaggaatggggtgcttggggattcagtgagttcccatggcctccctgctgcctcctctgcccctgtattttcctcagctcggctctgtaacttgactcagctccaggtaaagtcaggaacttctcccacagaccttcaacttctccagtgtgggtgtgtgttcaggagaggagagtctccctttcccacttctgcagttagagcacttac

SEQ ID NO: 181422 - DNA, 470 bp, Homo sapiens
tgtttccaggcagagggtgagtcaggtttgaaaacttgcatgaggcttcctgcttcccagctgccaaagaaaagggctttagttcttccccgtcctgtgaagtctgcaagctggatttgcatccttccccatgttctggccaggaggyttctctccccactcaaattattacaaagttcaccttgggaagttcttatcccaatggagttttaccccctgctcctctggcccccttcctgatggatccctgtggttccaggcaggaatggggtgcttggggattcagtgagttcccatggcctccctgctgcctcctctgcccctgtattttcctcagctcggctctgtaacttgactcagctccaggtaaagtcaggaacttctcccacagaccttcaacttctccagtgtgggtgtgtgttcaggagaggagagtctccctttcccacttctgcagttagagcacttac

SEQ ID NO: 181423 - DNA, 607 bp, Homo sapiens
tcatgagctacataaacctacaaaatccctaggaaaaaaaaaggtggaggggggtttccccttttgggatgctggtatacacaactcccaaagtccctggaaaataataggtgatgttatttctcacatgcttatatcttttatttcattgcttacaattaactttgagtatacactcctcaatgtattccccaagtgttttccttctgcataaaacgtgaaatggtcaagggtggaggattacacagttcactgcagcctccagaagtcattgatttctgcatttatttcttctagatttcaatttttatttcttctagtttttcatgctggttgtcatatggggttgacaggtgtcacaagatgcagctacatactgaaatgatgcataaccattaygtaaaatttttaaataatacattttaaattcttctctactcagataattgccaaaaatcaactttgatgagagtaatataaataagatgaagttatttctcaatcagaaccagaaatgctaataaacaacacaaatcaaagagagagagcttccaactgtatttttgctgaatttaaatgcatagagttaacaatgtttatgaacatt

SEQ ID NO: 181424 - DNA, 623 bp, Homo sapiens
tgtaaaatttttaaataatacattttaaattcttctctactcagataattgccaaaaatcaactttgatgagagtaatataaataagatgaagttatttctcaatyagaaccagaaatgctaataaacaacacaaatcaaagagagagagcttccaactgtatttttgctgaatttaaatgcatagagttaacaatgtttatgaacattgtttcactgataacttttcaactctcttgttgatatttcagagtcttggattgtagcctctaggactgccctcgaattgtagcactgattttcgctatctggagatcccttcattaatgaaggaacaatttttctcatcttttaaaccttgcttcttctctcgaaattatcactggctaaaggaaatgaggactagaagaagaaaatctaacagtacaacatttatttcagtattcctgtaatgaggtgaatacacacacacacacacgcacacactccatttatagttggagcaatattactgagtaatgccaatagaatgacattagtataacgtataagtggcagggcttgccataggaaggtgacccatggtctatgtgggaaatctagatagattacgggtcaagagga

SEQ ID NO: 181425 - DNA, 623 bp, Homo sapiens
tgtaaaatttttaaataatacattttaaattcttctctactcagataattgccaaaaatcaactttgatgagagtaatataaataagatgaagttatttctcaatcagaaccagaaatgctaataaacaacacaaatcaaagagagagagcttccaactgtatttttgctgaatttaaatgcatagagttaacaatgtttatgaacattgtttcactgataacytttcaactctcttgttgatatttcagagtcttggattgtagcctctaggactgccctcgaattgtagcactgattttcgctatctggagatcccttcattaatgaaggaacaatttttctcatcttttaaaccttgcttcttctctcgaaattatcactggctaaaggaaatgaggactagaagaagaaaatctaacagtacaacatttatttcagtattcctgtaatgaggtgaatacacacacacacacacgcacacactccatttatagttggagcaatattactgagtaatgccaatagaatgacattagtataacgtataagtggcagggcttgccataggaaggtgacccatggtctatgtgggaaatctagatagattacgggtcaagagga

SEQ ID NO: 181426 - DNA, 623 bp, Homo sapiens
tgtaaaatttttaaataatacattttaaattcttctctactcagataattgccaaaaatcaactttgatgagagtaatataaataagatgaagttatttctcaatcagaaccagaaatgctaataaacaacacaaatcaaagagagagagcttccaactgtatttttgctgaatttaaatgcatagagttaacaatgtttatgaacattgtttcactgataacttttcaactctcttgttgatatttcagagtcttggattgtagcctctaggactgccctcgaattgtagcactgattttcgctatctggagatcccttcattaatgaaggaacaatttttctcatcttttaaaccttgcttcttctctcgaaattatcactggctaaaggaaatgaggactagaagaagaaaatctaacagtacaacatttatttcagtattcctgtaatgaggtgaatacacacacacacacacgcacacactccatttatagttggagcaatattactgagtaatgccaatagaatgacattagyataacgtataagtggcagggcttgccataggaaggtgacccatggtctatgtgggaaatctagatagattacgggtcaagagga

SEQ ID NO: 181427 - DNA, 470 bp, Homo sapiens
tgtttccaggcagagggtgagtcaggtttgaaaacttgcatgaggcttcctgcttcccagctgccaaagaaaagggctttagttcttccccgtcctgtgaagtctgcaagctggatttgcatccttccccatgttctggccaggaggcttctctccccactcaaattattacaaagttcaccttgggaagttcttatcccaatggagttttaccccctgctcctctggcccccttcctgatggatccctgtggttccaggcaggaatggggtgcttggggattcagtgagttcccrtggcctccctgctgcctcctctgcccctgtattttcctcagctcggctctgtaacttgactcagctccaggtaaagtcaggaacttctcccacagaccttcaacttctccagtgtgggtgtgtgttcaggagaggagagtctccctttcccacttctgcagttagagcacttac

SEQ ID NO: 181428 - DNA, 556 bp, Homo sapiens
tacaaagttcaccttgggaagttcttatcccaatggagttttaccccctgctcctctggcccccttcctgatggatccctgtggttccaggcaggaatggggtgcttggggattcagtgagttcccatggcctccctgctgcctcctctgcccctgtattttcctcagctcrgctctgtaacttgactcagctccaggtaaagtcaggaacttctcccacagaccttcaacttctccagtgtgggtgtgtgttcaggagaggagagtctccctttcccacttctgcagttagagcacttacagtatttggagtgtctcccggctcctgcaggagcagtctgctttcttctgagggtctgtgggtcctctcagggttgctggtttgttcttgcagtcagtctggagctaaaattcacaagcaagcctccacatgctgctctgtccagagctgcaatctagtcctgcctcccatccaccatgatccctccaatcacattccctttttggggatatttttgacccctggttggttgaattcaaggatgcagagcatgtg

SEQ ID NO: 181429 - DNA, 630 bp, Homo sapiens
agaattcatcatacttaataatggtgtcagtgtctacctgtaagactaagtagtggagaaaattctatatcgattttttggaataaaatttgtgctgtgggtgtagggattgtagcaagacaagccacagacaaaacccctcagacaccgagttaaagaaggaagggctttattcagctgagagctttggtaagactcacgtctccaacaaccaagctcaccggctggataaaaaatgaaaaggatccagtccaccttcagaaagaaaaaatggcccttcctgtactaagggacaatgtaaccccttagagctagtaattaccagtccccttgatccttgctggaagaaaggggagcatgtgtgaccttaggaatcgatggggctggactgaatccttgagtaaatatcttggtttgagaagaagtttacaaatgctctcctgaaccggtgtttcaractttctatgatgaactaaatgtgccagtaccagaaattccaggaaaaacaagaaatttgtttttgcaattagccgagcatgtagcccagtctctcaacatcacttcttgctgtgtatgtgaaggaactgtaatgggagatcaatggccacgggaagcctgagaattagtacc

SEQ ID NO: 181430 - DNA, 511 bp, Homo sapiens
tgaaatgctagctttcctgagactttgaatttaatttgtggctactgtacctgatggtaaacacagccatatggtagagggtgactgaagagaatgacctgggtttggactgggaagcaggaaggctgttttagattttatctttatatatctgctacattaccaagaagaaaatggtagattatatttacgagaacatgtctgtaggtattaaagaaaaaaacagcttcaaagcatctgaatatcaagttatgtaaagggaggcattactattctattatataatcgatctcagtgaagaaacacttatttttaacaaactgtattcttcaataatgggaatatattaattacagtgtttcaacatctgcagatctcatatttgaatattttgaaagtacacattctttattagctaggygatttatttggttgccttagtaaacaacaaacaacagtgccttaattaagagaaaaccctcattttctcaattatacaaaagtttaagct

SEQ ID NO: 181431 - DNA, 394 bp, Homo sapiens
aaacaaactttttgtttctaattaaatcatgttttactctgttgtacataaaacttgaaatgtggcaagtattttttggtttcaacttatgtgaataattttttgtcatgaatcttgcctgaggtaagcacacagaacagttagtaggaaatcaatcataatgaataacggggcttagatttctcaaagtgttrcaaaaagtaggaaggaaggaaggaaggaaggaaggaaggaaggtaaaggaaggaaggaaggaaggatttattgtagtgtattgtaaccatttttttattagtcagtggcaaattttctactaaaatgtgaaaaatgactaattcaagatttctgtaaattactaatgctgtcataccacctttttgggcctctaatctca

SEQ ID NO: 181432 - DNA, 486 bp, Homo sapiens
tttcatctagtaattaaaacattcagcatcaaaactgatgacctgggaaagttctataatgacatttacatttgaaggggaaaagttgtccttccataaacattctcaaggcttcttgcaccaaaggcctggtagcctaagaaagcatggatcagtgttccttagtccaggcctgctataggaaaaccaccagaatggaaactgttccttagagcacccacaagggtctcttgaagctctgggctcagaaaggtgagactggcagaaatgaagccaggatcaaagaccaggccaggagccctaccccgctatggccggcaaaaaaactgccctggagccctcccttacctctggtgtttgctggaagcacaagtccattttcccaatcatrcgtaggaatgagtggccctgcctggcacgctgcatctaccctgtcctcataggcgccgctgctctcagcttatgggaaaccaactggctgccact

SEQ ID NO: 181433 - DNA, 555 bp, Homo sapiens
caagatctcataacacatacactcaagtattagagttagcaatatcgaggcaaagtaggaataattagcasaataggcagcaaatctagcatggctaccggaaaagtctaacatcaaaatatgttttgaatcaactaatttatcataagatgtccaagacctgaaaagatgagcagctgacaaatgtccatcttaatttctataaatgaaaaattctagttccaatgaatacagtcactattataaagtcactaacttttaagagctctgtcataaatctccccatgctgaacaacttgaatgaagaagagttgttgaaataacaccacagttacattcagtgaatattttctccaagtctccctgacagtggccagtggatattaaataaggtaatcatagtagaaaagtaaatacccaatatttaaatgactggacagtaaaaactgacagaaagtaatttttgacaacccataaaacaattttggtttattactcagaatggaagcttatggatagtcactaattttaaccaatatgcacctttcaatagac

SEQ ID NO: 181434 - DNA, 592 bp, Homo sapiens
tgaagctagaccctttggatcttccatttattagctatgtaaccttgggtaaattacttaacctctctgtttttcaggtaccatatttctgaagtcggcattataatacaatttactttctcataggttttatttaatatatgtatatatatcaatgtaggcacttaaacaaaaattgccatgtagaaaactctttaaagtagcaaatctaaaataatatattggaacatttaaaaataaactattattaactcataaatgtcttaattaggcaattgtcaaagtgtgattacctttaaaatattttgtaaggctacatcttgagtatgttattggtaaaacatttactggcaataaggacattaatttagatgcttactgcaatttagctagtactcactcatgtcatttgttttatatcaatttctgtagataatgtgacaattactaatagttatatatctcaattttattgtattaagtagttgcttacaataattatttrgtggccacttatattttcataaccttatagaacaagggccagttgaaaaatcagagatgaatcagagtatccgaatgggaatatact

SEQ ID NO: 181435 - DNA, 565 bp, Homo sapiens
tattgtgggtcttctctctctgcttctttaatttgagcagaccttattagtaaactattttgctgcctgatcatcctttgtccattatctctaatggtctactgtattccacctttggattcttgtttaagcagtttccaatctctttatcgaggtgacattatcccttgctagctgtagaacatgaatggaggtcatcttggcttcagtttggttacacttaccaatcctaaaaggcatgtggagatttctgggtctcactaggctaaacggaaactgaaggatattcaagaccgccagctaatacctcttgcaaaacagcacatctgatgttccttgwtttatttcctagagcccactatgttggagagcagcatggtacagagtatttccttaaaaaaatcttagaagcaatgtatctaaaaatataaaaaatacctttacactcactcagctttaaaatctatgcaagtcagatcaaggcatctgcctgctgattatttctatctgtgctctctgccatacaaacccctgggaccagggcaggtgctctttctcccttgcc

SEQ ID NO: 181436 - DNA, 578 bp, Homo sapiens
actttttcaaaacagctattttgaattctctgccaaaaggttcacatgtctctgtcactccaggattggtcctctggtgccttatttagtctgtttggtaaggccatggtttccaggataatcttaatgcttgtggatgtttgtctatgtctgggcattgaagagttaggtatatattgtagacctcacagtctaggctcctttgaacccatccttcctgggaaggytttccaaatattcaaagagaattcagtgtagtgatataactctttgatcacttgagccatatttgcataacgggtcaccccaaatccagtaacatgttagtcttgcagagtgatagatgtaccatcaacatggccttcggtaatatcaaagatatttatctggattaccagacagagactcttctcttcccttacttttccccaaacaaatgaagattctctgtccctgctgaactgcctggaactgtgggagagttgatataagcaatcctatggtcataaccactgcgactgcaataagttagagccaaagccaacacagcactgggtctcacccaagacatggcaacc

SEQ ID NO: 181437 - DNA, 581 bp, Homo sapiens
ctttctaatacaggtacattttctttcaatatctgtctgagttgtcctaggatactatttaaatgctattttaatactctcttgatcatatttcagaatatgttatcatgtatttgcatagtgtaattttcagcatatagtaaaaaaatcagcttacagtggaaaaatattragtgacaatagaaaattaaaataaaagcagtattaatcacaagaacctttacacgtgaaactttttttttattattatactttaagttctgggatacatgtacagaacgtgcaggttttttatgtaggtatacatgtgccatcgtagtttgctgcagccatcaacccattatctaggttttaagcctagcatgcattaggtatttggcctaatgttctccctctccttgcttccaacccctcaagaggccttgatgtgtgatgttccactcccagtgtccatgtgttctcattgttcaagtcccgtgtatgagtgagaacatgtggtgtttgctgttctgtttctgtgttagttttctgagaatgatggtttccagcttcatccatgttcccgcaaagaacatgaactc

SEQ ID NO: 181438 - DNA, 581 bp, Homo sapiens
ctttctaatacaggtacattttctttcaatatctgtctgagttgtcctaggatactatttaaatgctattttaatactctcttgatcatatttcagaatatgttatcatgtatttgcatagtgtaattttcagcatatagtaaaaaaatcagcttacagtggaaaaatattaagtgacaatagaaaattaaaataaaagcagtattaatcacaagaacctttacacgtgaaactttttttttattattatactttaagttctgggatacatgtacagaacgtgcaggttttttatgtaggtatacatgtgccatcgtrgtttgctgcagccatcaacccattatctaggttttaagcctagcatgcattaggtatttggcctaatgttctccctctccttgcttccaacccctcaagaggccttgatgtgtgatgttccactcccagtgtccatgtgttctcattgttcaagtcccgtgtatgagtgagaacatgtggtgtttgctgttctgtttctgtgttagttttctgagaatgatggtttccagcttcatccatgttcccgcaaagaacatgaactc

SEQ ID NO: 181439 - DNA, 581 bp, Homo sapiens
ctttctaatacaggtacattttctttcaatatctgtctgagttgtcctaggatactatttaaatgctattttaatactctcttgatcatatttcagaatatgttatcatgtatttgcatagtgtaattttcagcatatagtaaaaaaatcagcttacagtggaaaaatattaagtgacaatagaaaattaaaataaaagcagtattaatcacaagaacctttacacgtgaaactttttttttattattatactttaagttctgggatacatgtacagaacgtgcaggttttttatgtaggtatacatgtgccatcgtagtttgctgcagccatcaacccattatctaggttttaagcctagcatgcattaggtatttggcctaatgttctccctctccttgcttccaacccctcaagaggccttgatgtgtgatgttccactcccagtgtccatgtgttctcattgttcaagtcccrtgtatgagtgagaacatgtggtgtttgctgttctgtttctgtgttagttttctgagaatgatggtttccagcttcatccatgttcccgcaaagaacatgaactc

SEQ ID NO: 181440 - DNA, 551 bp, Homo sapiens
tattaactaaataattagaatgtgccatggagtaaatctaatgctttgtcattcttttcttttattgcctttattttcagaagataaattattccccaaatgtacaaatatttcttgtaaatagtcacctattcatttcccatgaaagacagaataattttactcttattatattcatttttaaatacaaacattataagctccccattatgtccacagaattgtaatcatttttttctttttttagtttttagattgatgctttgttggtttttaaaagagctgggactatgtgaagacatctgtattttatatattattttatttttcttctgtaaagaataagctgaattggaaacaaaattagcatagacctttcattaactacagtacattgcctrttggataccactctcagcaactttccatgagggactattacaaattataactctaattttttatgcccttggagaaataagcctaataggttgtacaaacttatttttatttagaacgctagtttaaaaataagaagtatgtaatacatg

SEQ ID NO: 181441 - DNA, 445 bp, Homo sapiens
catcagatggccactgctctgctggttaaaacgatgcacttctggctcccctacttttatttttgatggttccatcatgtaatctatttaccatgcagaatcagagcacatcttttaagaatacattaaacagcaacattcccatacctgagaactttccattctagctggcctgagactccatccttgtcagtctctctaaatgggtcggggatcctgcactctttgttcaggaaactccacacacactgcctacctcctcctctcttcctcctcctcctcccatcttcctcctcctcctcccatccccctccttctttccattgtccctgcccctgcctccttccttatcctgcttcttgtattctggtaagaacactaaacttgaagtctgccctattaacggatctttaagtgtrcagtattattagctgcgggcatggtg

SEQ ID NO: 181442 - DNA, 672 bp, Homo sapiens
ccagcacatatgacacagatgaaattgaaataaagtttgatattatttgagctggttaaatgctctgaatgagcaaaagaagtgtaaagagtttctatccttttcttgtcataatactatcattttataactayagaattcacacatgagagattcagaattaaatgttcttatatgtgatgattgggttaaaaggaaatcattacatacaagaaatatcatgttcaaataaaaattacaattcagaaaaatctttggaaagacacttgtattaagggctaccattcattggggaatatccacgttacaggcaatgaatacatggcaagagatatggagatgagacatatggatagaaatatagatgtagatatagatatgtcctcatttatatctattttgcaaaactttttcttacctaacatgttcaaatacagaatatgattattgtccattttgccattgaggaaattgaaaagacataaggaagaggagttgagtaagacattgaaattccttggcttaactcacagcagaacacactgaaattcctcggcttaattcacagcagactcacatgtgaacccaggcttatgacctcagcaccaattcactgtagctttccaacttttaagtaatattatccacttcttcagtgactaatgttaactg

SEQ ID NO: 181443 - DNA, 672 bp, Homo sapiens
ccagcacatatgacacagatgaaattgaaataaagtttgatattatttgagctggttaaatgctctgaatgagcaaaagaagtgtaaagagtttctatccttttcttgtcataatactatcattttataactatagaattcacacatgagagattcagaattaaatgttcttatatgtgatgattgggttaaaaggaaatcattacatacaagaaatatcatgttcaaataaaaattacaattcagaaaaatctttggaaagacacttgtattaagggctaccattcattggggaatatccacgttacaggcaatgaatacatggcaagagatatggagatgagacatatggatagaaatatagatgtagatatagatatgtcctcatttatatctattttgcaaaactttttcttacctaacatgttcaaatacagaatatgattattgtccattttgccattgaggaaattgaaaagacataaggaagaggagttgagtaasacattgaaattccttggcttaactcacagcagaacacactgaaattcctcggcttaattcacagcagactcacatgtgaacccaggcttatgacctcagcaccaattcactgtagctttccaacttttaagtaatattatccacttcttcagtgactaatgttaactg

SEQ ID NO: 181444 - DNA, 596 bp, Homo sapiens
ctgtagaaactatttcctagataaatttgtcacttgatattattagagagttaatatgtttcctagtctgtgttcggatttggtaaactcttttgtgtatttgagaaaattatgtattgtggagttgttaggtgtagcatttttatgcatcaataagatgttaattatgatcagatattttacaatgatgctgaattttgtctctgttatattagtcacctatctctcaycaggatagcagattaattagtctattgcctacaaatttcaattacaatattaaaatgatttttactggagaaaagaagtttttgctgggaaattaaaacttttgtctttgtttttcctcttgatccctcatattgcctatttccttaaagaattatttgtctgatatcagtgtaattttttctttttctttttttttggacggaatgcacagtgcaggttttttcatcctggtattttaatgtttttttttttaatccttgtataaggctatacctcttataagcagttgtactttgtggatgtccaatgttccagcctttgctgccattgttaatagttattttacttacctctcctatttggct

SEQ ID NO: 181445 - DNA, 603 bp, Homo sapiens
tgtcttggtacattgcttggctggcattagccgctcagtcactgtgactgtggcttaccttatgcagaagctcaatctgtcgatgaacgaygcctatgacattgtcaaaatgaaaaaatccaacatatcccctaacttcaacttcatgggtcagctgctggacttcgagaggacgctgggactcagcagcccatgtgacaacagggttccagcacagcagctgtattttaccaccccttccaaccagaatgtataccaggtggactctctgcaatctacgtgaaagaccccacacccctccttgctggaatgtgtctggcccttcagcagtttctcttggcagcatcagctgggctgctttctttgtgtgtggccccaggtgtcaaaatgacaccagctgtctgtactagacaaggttaccaagtgcggaattggttaatactaacagagagatttgctccattctctttggaataacaggacatgctgtatagatacaggcagtaggtttgctctgtacccatgtgtacagcctacccatgcagggactgggattcgaggacttccaggcgcatagggtagaaccaaatgatagggtaggag

SEQ ID NO: 181446 - DNA, 585 bp, Homo sapiens
cctagtatgcattattattattattattatttgagacagggtcttgttcttgtcacccaggctggagtgcaatggcatgatctcagctcactgcaacctccacctcccaggttcaagtgattctcctgcctcagcctcctaagtagctgggattacaggcgcacgccaccacacccagctaattttttgtatatttagtagagatggggtttcaccatgttggccaggctggtctcgaactcctgacctcaggtgatccacctgcctcagcctcccgaagtgctgggattacaggtgtgagccactgtggcaggcctagtctgcattattttatcttaatttaggttctgttgttaaactggaaaacaccattkctggagttggggttttcagtcttctggaaatctctgctaataatttaataaatgtaaaacataaggtttcttgcaactcacatttcagtttatgatattaaaactgtgccttgtcccaacatgctacaacatgctagttggtcttgaagcggcagaagcaaactattcacaaattaatcaagaataccttgcattgtgattgagaacttgc

SEQ ID NO: 181447 - DNA, 562 bp, Homo sapiens
atagtggacgcaattcatgaatagttgttaaatgaatgagtaaattaattcatgaaaaatgaatattaatttcatactttgtgacaagcaagatatctactaagtctctcatccagcaccaagcacatcaaattcaggtatttaacatgaattctcgacaaataaataaagaaaaacacacttttctaccaccttgaacacgacggagcatttacacttgatcttagccaaaaggccgagaaacgatatgactgagcattaaaaaatatctgagaccaatgtgatcatattttagtayttgttaagttcatagccaatggtatggatgggggcttttggtgtgtgtaactggcgatggatggatgctatgaatgaatgctatgagggaattagtgtgccctccagaaataaccatagtgtataaagcatctcttgtgtgctgtgtgctaggtactctctcattttataaatgaagaaacaggcagagaatgtttaaaaaaaaaggaataaaaacactctcaaggtttcaagacaaaaggtgtagcaggtatagctacccact

SEQ ID NO: 181448 - DNA, 537 bp, Homo sapiens
taaagcttgtaattggattgtttgtaactcaaaggacaaatgcttgaagagatggataccccattccccataatgwggttattttacattgcatgcctatatcaaaacatcttatgtaccccataaacatatatacctactatgtacccataaaaatttttaaaaattgaaaaaaaaattaaagaacaaaaaacatcagacaatttaaaaagaaaaatttttaaaaaaagaaaagaaaagaaaattccctggcaaattccagccaaagaaagatctagaaaaagctatggtttactacatatttaagctcctaaataaagatgtagaaatgtaaccccagcctactgagggttaggtcttcctgtattttgaaatgagagaggccaggcatggtggctgtaatctcaacactttgggaggccgaggcaggaggatcttttgagcccaggagtccaagaccatcctgcacaacatgatgagacctcatctctacaaaaaatatttttaaaacttagctgggcgtgtcagcacatgcct

SEQ ID NO: 181449 - DNA, 610 bp, Homo sapiens
ttttgctaccatatctatttccttacttaggtatgccactggttgtgaggttgtcccacaagtctgagtaagggctccaagagctattcctgttctctctgtcacatataaagakaagttttttcctgtgggaaggcttaagcgtggagcttgtactagggcctgccttaaggttttgaaggctgttcctgcctctggttcccattctactagatgagtatttgccctctgggtctccttgattagagtatagaggggcctggctatctcgctgtatccagggatccatagtcagcaaaagccagtgatttcaaggaacccctgcaactgttttaatgtcttagagctaggataaaccagtacaggctgtattcattccttgctgagggtcctggttcctctggctaatattaggtctagatatttaacttgttgtagccagagctgggcctttgatttagatactttgtacccttgattagctagaaagctcaagagatctagagtagcctactggcatgaggcttctgaactggtagctaaaagtaaatcatccacatactgaaggaccagagtgtctggacttcagaagtggcctagatcttgggcc

SEQ ID NO: 181450 - DNA, 590 bp, Homo sapiens
ggattacaggtgtgagccaccttgcccagctctttctgtgtacttttaattttatattattcaattccatggatttaaatattctgtatatgatgttaactcccaaatataaatcccattttttatatccttcctctgaattccagaattatacttatagaagtttatttggcatactcactcagatatcaacattgtgctattgtcatcacaaacttatcatggcaaaggtaactatttttctaccttccaattctttttcagtttttttctggtcctaatctttatcatcccctcatcccctgacaaaccaaaaccccaatgcacaagtgtgttkctagtgttaattccaaagtgcatgacaaatgtgactgcatcttactgtcttctacaactttagtctgacccaccatcatctcatgtttgcacaactgcacttgcctcttaattgattttccaactttcattccttttttttttttcctgtggtcaatttgctacgcagtagcaagaacaatttttttcaaagtataaatctaatcacattattatgttgcttttcctcttccaatgactttccatggcaattg

SEQ ID NO: 181451 - DNA, 590 bp, Homo sapiens
ggattacaggtgtgagccaccttgcccagctctttctgtgtacttttaattttatattattcaattccatggatttaaatattctgtatatgatgttaactcccaaatataaatcccattttttatatccttcctctgaattccagaattatacttatagaagtttatttggcatactcactcagatatcaacattgtgctattgtcatcacaaacttatcatggcaaaggtaactatttttctaccttccaattctttttcagtttttttctggtcctaatctttatcatcccctcatcccctgacaaaccaaaaccccaatgcacaagtgtgtttctagtrttaattccaaagtgcatgacaaatgtgactgcatcttactgtcttctacaactttagtctgacccaccatcatctcatgtttgcacaactgcacttgcctcttaattgattttccaactttcattccttttttttttttcctgtggtcaatttgctacgcagtagcaagaacaatttttttcaaagtataaatctaatcacattattatgttgcttttcctcttccaatgactttccatggcaattg

SEQ ID NO: 181452 - DNA, 668 bp, Homo sapiens
agtcggagcactgagcacaatcttaaccgaaaaatacaagtgcagtatttagaatgtaccatgtgagggtgggggagaaaagaaagagaaaaatttccagttggcacttgcatccattataaaactaacagaggtgactggtgaaagcaaagagtactaactccagccttttctctcttcagatattgtatttgctcccttcctttctatcacagatgcatacagaaagagggtaaagagagaagcatatgccttttgggcactcttatatgtagaaataccacaaaacaacagtttttatttcgatgtattgctatctttaggcttgatgactgttgaktgcaagaatttcatctacagattttttttttagtccagaggacttgcagcctgacatcatagggaggagaaagcccccaaccctctaccttgctaccgagtaccatttgccgtcattctacaactgctccagcatgacacttggattaaggtgttagactcaaacttgatcaaaactgcccaatagcctagggaatgtgttttatggagatacacaaagttggaagtatttgattgaggctctagagtggtgagtagaacccaggtgttacagccaggagaccagagtttcaatcacactattatcacttatataggctgctgcaaaa

SEQ ID NO: 181453 - DNA, 370 bp, Homo sapiens
gggcactatcctggagaggactggcagttagacttcacccatatgcctaagtcaaaggagttcaatactttttggtctgtgttgatacctttataaattggatagaagcccttcccctgcaatacagagaaggctcaggaagtggttaaagtcctaattcatgaaataattcctagatttggtcttccccaaagcttacaaagtgacagtgatccagtttttagagccatgtaactcagggaatttccrgggcaccagggatacaatatcaccttcactgcacctggaggccacaattctcagggaaggtcgagaaggcaaattgaacactcaagaggcacttaaggaaactaacacaggaaactcatct

SEQ ID NO: 181454 - DNA, 370 bp, Homo sapiens
gggcactatcctggagaggactggcagttagacttcacccatatgcctaagtcaaaggagttcaatactttttggtctgtgttgatacctttataaattggatagaagcccttcccctgcaatacagagaaggctcaggaagtggttaaagtcctaattcatgaaataattcctagatttggtcttccccaaagcttacaaagtgacagtgatccagtttttagagccatgtaactcagggaatttccggggcaccagggatacaatatcaccttcaytgcacctggaggccacaattctcagggaaggtcgagaaggcaaattgaacactcaagaggcacttaaggaaactaacacaggaaactcatct

SEQ ID NO: 181455 - DNA, 350 bp, Homo sapiens
tcaattggacaattctttaaagttgagttttataatctggtgtggtatgattgctagtaccacatcaaaaagaaatggaaamcaatacgattctgggcccctttcttgagtgtaaatctgtaatacatgtacctttcaatttctacaatttgttggaactaacatgcatattttaatattacagtctgtccacttattatggcaaagaacaaccacaaatttcagggactggagttattccagacagtggttttctgatttccttagagaattaattctgaatgttttcaaatgagtctctgatgagaaaacaagcaaaaaacaaaaacaaaacaaaaaggaaaacaact

SEQ ID NO: 181456 - DNA, 350 bp, Homo sapiens
tcaattggacaattctttaaagttgagttttataatctggtgtggtatgattgctagtaccacatcaaaaagaaatggaaaacaatacgattctgggcccctttcttgagtgtaaatctgtaatacatgtacctttcaatttctacaatttgttggaactaacaygcatattttaatattacagtctgtccacttattatggcaaagaacaaccacaaatttcagggactggagttattccagacagtggttttctgatttccttagagaattaattctgaatgttttcaaatgagtctctgatgagaaaacaagcaaaaaacaaaaacaaaacaaaaaggaaaacaact

SEQ ID NO: 181457 - DNA, 630 bp, Homo sapiens
tgctcatgggtaggaagaatcaatatcgtgaaaatggctatactgcccaaggtaatttacagatattgttttttaaccagtcactttaaaatgtgatacctggaccattcacatcagcaacactttggaatttttggaaatgtcaaatattggtccccaatacagatgtaatgggccagaaattctgggttttaaatagtcctccagtgattctgatgcacaycgacatttgagaataaatgctaaaggagtagtgttcaaccctagttactcattagaactacctaaagaaatttaaaaacataccaatatctgaatctcatcccagaacagtaagttcaaaatatctgtggttgagtctttgtattcgtattttaaaaagctctaagataatataattaggtgtagccgaagcagcaaatcactattctcatcccaagttgtgtgtgtgtgtgtgtgtgtgtgtgtgtgtgtgagagagagagagagagagagagagagagagagagaaatagttaggcatcaaagtctatgaaaaaattaaattaactggttcaaatgtagctatagtcaccgtagtatcatcaaaattgtcctcccaatttcacttctctctatttcaatcacttt

SEQ ID NO: 181458 - DNA, 567 bp, Homo sapiens
ataaaccaatgtctggctcatagacactaaagcaaatgttcatgctattatcctctttttataacacttaagtacatttgggagaatgaaggtctttagaggctcatgcccatctacactgacagcagaatgsttttcaatttttttgtatatgtggaccattgtccaaagaaacacagcacaaatggcagtcaaataaattaccccctccaccgcaacacaaggctatgcactagtttatatgatttttcctttggtaaattgaacccagagtcaaaaattaagtcaaacatgtcagaaataatcccttgtttatttttactttttatgtgtcatttgaagaatgggaacaggcattttaaacattatcaaagtgacaccacatacttgctcacattactgatttgagaaacaagaattgctgaaagaaaatcaatttcaaacatggagcaatactatgttttgctataaaactataaatcgttggctgaacatttttatagatcaccttctatatcattgatttatatcatactgtatacagcaatttgaaatcttcacttatca

SEQ ID NO: 181459 - DNA, 552 bp, Homo sapiens
tattgcaacctgagcgttggatgcccttggtctccacctattcactgctgagttgtcagcccagggcagggattgtcatcactatgctctactcttgcctctggataccacagggcacttgtgcctatccctaatctcccatctactatcaggttcccacctgtggcagaaagtggcaagaccagattgggaaaaggggggccaggcaggctagagcacaggataagaggagcaggcagctgagaattcatcctggagagagagatggaggcaataccatgtgagccaaggcaagctccaggctcaagtgccattgtcccatcagattttgcttacaaaacaaaattcaaagataaatctattaagattattaagacagtaastgcagtgcattaaactctaatcacaggagcttctgagtgtgaaacccactagccacgtaaccatgaagctgtccctgtccctccttctttggaagtggtcttcttgccatcatttagtagtgctggagtggtgaccagccactgagcttgtgctattgtgcatgtcagg

SEQ ID NO: 181460 - DNA, 387 bp, Homo sapiens
aatgatagtatccctatattatttcttcatgaatatctcccataattttccaagctcaaaatggagtttattctccatcctctcaggatacttagcatatctgttccgaagaagggatttcacaatggagttatttgtagggtacattacttatgatttaaaagagatctaggtttttgtccatttttagtttcagttttttgcatgacttagcattagattggcagtggaaacaaaaatactttttgaacaatcaggtttttcatggttagaaatccaggtgttttaaaaattttatttattattctctagccrgccaatgcaatagggagaaagttcagcctactaccaatgatcacagagctattacccatggctgaagtttcc

SEQ ID NO: 181461 - DNA, 557 bp, Homo sapiens
ggagcttctgcagagggtggtgacccactggaacacttattagaaagtcagactatgtaacaaagtgaaaccatttatataaaggctttcattgttctgttttttcccctgcgcattcacattaagtatgtttctttctccttccctgtattttatctttagtgtggccctaagttaaaacctgtgtagyccaaagacaacaaattttccagttaaaaggaagaaatgtgtgtatgtatgtgtgtttctgtgtgtttccttaccacttactaaatgggcaatgttggctgataactttactgaacttcaaattgttcatctgaaaagcagggttaataatgcctatttaatatattattaagaacattacatgagctaaagtaaggcaccctgtctagtacagtgctgatatggtttggctttgtgtccgcacctgatctcatctctaattgtcattctcatgtgttgagggaggcacctaatgggagatgattggattatgggggcagtttcctccatgctgttcttgtgacagtgagttcttatcagatctgatg

SEQ ID NO: 181462 - DNA, 583 bp, Homo sapiens
tcctcaaacagtatatactcatgaaagagcaaacttcaaattccccatcttttcccctctactaacatagatgcttgaaaaattattttgattttatcaaagtgcacctttgtaaaggaaaaattacccttttcagaagtgttatgatttgaacaacatattgttctaaatcatactacaattcttcattagtttcattcatttctataaaattaatagtcaagtgtgctggctgtaatgtgtattctatatattaccagttttgtgagatgcttgagagcagagtttatatcttatttcatgttctcggcatttagcatagaattcaaaatttgcctctgcatttttgtatccttgaatacaatagcagtaaaataccagaattgccttgytggggttatattatcaaatgcatatacatgaatgttggcctttctgataagctaattaaacagcaactttcaaggattaatttgaattcagagacacccttattatccacagtgtatgtttcacaagtagaaaaaaaatggaatcatctccaaaaggatatggattctcattttttcttcatggttatttg

SEQ ID NO: 181463 - DNA, 635 bp, Homo sapiens
atatgtttaagttactcatgagattccttttaaggatgcataacccaagagaatatgaaaaacagcactaagaactgaactgagtttcaacaaatcaattaatactggctcatggcccaaatagttttacttacatgagcattgcttatctatattttatcagtatttatagaaaaacttacaagagctagaaaataaagtatatatatatatataatatatatatatattatatatatatagtgtgaattcccataagagaaaggcaaagccagaacatatattccattggcaaaataaaaacatgatatattttcattggattccagattattggtattgaagacttaattctatatagtattttggttgctgttgacaaaatagttaatgttgataactcacaggtcacatttggcaggcttccaaattaacccatctaggggaggtcttacaatttatgacttatatcctgtccttgattaaagaatcttatcctragtctaatcttatcatggattctccaaactgttgaggtaccgattaatacatcatctactgacattgaaaatgacgctgatttgtttctggatcacaaagttttactgatagtcttgcacctagaatatttcagc

SEQ ID NO: 181464 - DNA, 465 bp, Homo sapiens
tgtgcactgccaacaatgtccctgaatgaagagccactgattacatctaagttttggctgttgaaaggaagttctacgtataaggaagtgcattggactgacagtcaggtcagcatctggattgtgctgtgagctctcgtatgtatcacctcatgtgatcttcgtgatcactttgcaaaatgtggattttgcaaaatgaggccacaaatagtcgcctttctccaattttctcatttctttgactttactttgtgactttttggattgttgtttacggtatgctacctaaagtttttctcacttcagagaagaggaagctagctaatgctgtcagtgtcacaggacacgtcatgcttacaatgataaggttaatatgtggcacacctctgacttgaacaargcctgtttgtttacaaagtcaatggttacactcttaccctagagttctagtctccattctgctgc

SEQ ID NO: 181465 - DNA, 620 bp, Homo sapiens
ttgaaaattgcaatttgaagtattagtattttatgttattagaaggttttgctttgaaataatatttttaattttgcactggacattaggatatcaatacttcatagaaatgacaatatatgggaaaatgttgatgttgaggctggaggatgcctcatcagatttttttcccacatattttcttggaatacatttgataaatcatggarataattcttcctttattattgtcagtaaattcactggtcccacaaatcgtatttgtaagagtgatattttaaaagggtcagaattttttttaaatgccacagtccaaattcatctttccattttggtcatttttatcttatacaagaaaaaaatactagataatgtgtttttgtttctctcttacataaaagactaagtcagttatcataatttacatgtaaattgtgagtcagaggaacatttctcagcaggtggtttttcagtgttagactatcttagcagagaagaaaggacacattgaacattctcttctcttccacattttcgatcatccaaggtagtgcctatctcagatagaagtcagagtcagcaagttagttggcaaatgggattatgggagctaagaaaag

SEQ ID NO: 181466 - DNA, 654 bp, Homo sapiens
aatcaccaaaacaatggggaaaatgtcttcagggcttgtcagagacttcatggtagcccctcccatcacagacctggaggcctaggagggaaaaatgatttcaggggccaggtccagggaccctctgctatgtgcagcctgggacttggtgtcctgtgtcccagccactccagctgtggctaaaaggggtgaaggtacagctcaggccattgcttcagaaggtgcaagcctcaagtcttggtagctcccatgtggtgttgggcctgtgggtgcaaagaaggcaagaattgaggcttgggagcttctacctagatttcagaggatatatggaaatgtctggatttccaggcagaagacttctgtagtgggsagaaccctcatggagaacctctactagggtattatggaggggaaatgtgaggctggagccaccacagagtccccactgtggcactgcctagtggagctgtgagaagagggccaccatcttccagagcctagaatggtagatctaccaacagcttgcactgtccatctggaaaagctgcagttactcaacaccaacctgtgagagcagccacagggactgtatactgcaaagccacagggacagagctgtccaagaccatgggggccataccttgcatcactgtg

SEQ ID NO: 181467 - DNA, 606 bp, Homo sapiens
tgtcagccttgacaaaataaaaacttaatttttaggtttttattttaaaactaaaccattttaaaagttaaaggacaagtaacasattgggagaatgttttttgaaaaacacgtagtaggaaaattatgtatctctagataaacagaaaagactcctaatattaacaatgacaacttagataacagatataaaaatgtaattcacaaaaagagcacaaatgatgatacaagtatagatatgttctcaatctcctgtgtaaacagagaagtgaatatttacatcccagtgacttaaatttgttcacctatcactgtcacacaatggctgctccaagcagttgatgaggtgtcctgaggtaatccaactctgtatggggccgcaatgaccctcagatgagtgagcagaagagctatataaaagcaatgtgtagcccattggttctcaaccttgagtgtgcaatacagtcacctgcaggcttaataaaaattcacagttctggacctcacccccagagttctgattcagttggtctggtacaaggcctatacatttgcagatttaaccagttcccaggtgatactggtgttgctcatcatgggatcacc

SEQ ID NO: 181468 - DNA, 382 bp, Homo sapiens
gtacatggattatccattactaattaactgaatctactacttaccactttgtattttgaaaactttgtattaccaagtgctacccagcttcttccatggcatgcattatcaatataacaaattactgctgaaaatcgtgtaatactttgcattccaacatagatcatgagtaaaatatgacttttaataactagtaatttgcctacctgttctttgtcattaatcacatacctaggcccatttccatgtttggatcactctgaaattcaccacattttgtttttgttcaccatcttggagtttaaaatatawaatcatcctttctattatcttaatatctcctaagcactcactgtatatcttatttatctccacaccacct

SEQ ID NO: 181469 - DNA, 566 bp, Homo sapiens
tcttaagggacacaatttcttttagtttttataataagtaaatgattaatttgtgtcatgaatagcagttactgtgacataaccattacatctactataaaatgccaagaccttggcttttacccagaattaaatgggctgtcattgaaggctttgggataaaagaatgacatgatttgaygtgtgttttaggaggatacactggctgttctgttgaggacaggctgaggggcagcaagggctgatgggaggagaccagttaggtagctaatggaatagtacagccttaagatgatggtgacttgcaacaggggtgttgtagtgaatggtgtaagaagtgtacagcttttgaatatattctgaagctagaaccaacaggatttcccagtggattggatatcacctatgtgataaacagaggagtcaacttaccgttttttgaactgggcaattgaaagatgcccttgccaccaactgagaagggaaagactgcaggtggcacaggtttgcatatgagagagcatgttttccagagtttagttttgacatgttaaatactatattta

SEQ ID NO: 181470 - DNA, 560 bp, Homo sapiens
ataaatagccatctattttgaaacaaaatgttttgtataatatatcatataatgcctggatgataaaagttatcacctaagttgaaatcagaagcaacttataaaaagcatggctttctgaatgaaatgaagaaaagcaaagtgctttgaaaagaccatagaactggtgtcaggcatttctgggtccaaatccattttttttctacttattagctgaataattctagacaaagttcaccttactggcctatctgatttttcatttataaaatggatccgttaatacctacttcatagtgttctgtgagggttataaaaatacagtgtctggcatacagcaggtatgtatagcaataattatcctaaataattcttttggcaaactctatataataactgctatggaaattagctttcttatctgaaaatctgaatttaagttgctctcaaaagtcaacagaattactttgtaaaacttcctttccttcttgwcattcttgtagttttgacaattttgagacacatgtaccagagagaatggccacctgtcatttgtcatt

SEQ ID NO: 181471 - DNA, 607 bp, Homo sapiens
ccattattgcttcaggctaaattgctaaaagaatcgtagatttgcactaaaatttgcatctgagtttgcactaaaatttgcactaaaatatgcatctctaatacataagatatgcacttggaaagccaatacaaagtagctaaccccaggtcttgcctgatttagctccaactgggcttgggaaggataatggggtctcaatgaacagtggctgaaaaccgttatttgagcacttgggaggctacagaaatcctctccaataaagtgttcaggacagaggagaaataggcaaatagctaattaaacaaggtccatcagagagacagccatatgaggggagagattagagggccaagctggcaytgacatttgtgaaatgaagaacccacagagtctcctgcttgagaaggggatggtttgcctggattgttgttattaagttggttctggactggaagactgacagactggcaactgttcaccaggttatattttgggactgttggcttggaaaaagctcagcatttggccaaactggttaagccaacaccaaaggggaaaaataacaatatgacaaaagcaaaacacgtttctgaactatcagcct

SEQ ID NO: 181472 - DNA, 639 bp, Homo sapiens
tcttgggccttgaataaacagaagcagtagccaggcagtggtcaccgtgggccttgggtgagacccagtgctgtgcttgcatcaggtatgacccagcacagtcctggtggtggtgaccatagaggtamttgtgtcacccctagccctagctcctggaagttcagcacagagacagagactccttttgtctgggacaaagtaagggaagagaagaagagtctttgcctgataatccaaagaattatcccagatcttacctgagatcacctaggcagtacctataagagtccacaagagccatagttgttcatgggcttgtgttgtgccctaatacagatacagctgctgtgtctaaagacttaaatcacaaaaccaaagtaccttcaagttttttggaaatccttgccaagaaggatggatacaaacaagcccagactgtgacgactacaagtaatacataattctttaatgcctagcactgaaaaacatccacaagcatcagagtcatccagaaaagcataacctaaacaaacaaattaaataaggcactagtgactagtcccatagagatacagatgtgtgaccttccaaacagagaattcaagatagttgttttgaggaaactaaagaaattcaagg

SEQ ID NO: 181473 - DNA, 535 bp, Homo sapiens
gagtagataaagaaaatgtggtgtgtatatatgtatacatatgcatatgtacacaaacacagacacacacacatacatcatggaatactaagccataaaaaagaatgaaatcatgtcttttgcagcaacttggatagaactagaggcggttatcctaaatgaagtaactcagagacggaaaaccaaaagaggggatgtagggaggaggtgaggggtgaaaaaaatcacctattgggtataatacacactatttgggcaaaagcccagacttcrctatgcaattcatgtaaccaaaaacctcttggaccactataactattcaaataaaaaataatttaaaaattatataattttctgtccaggtgtggtgactcatgcctgtaatgccagcactttgggaggctgaggcaaagtggattgcatgaggtcaggagttttgagaccagcctggtgaacatggtgaaacactatctgtactaaaaagacaaaaatactaaaaatacaaaaattagctgggcgtggtggtgggcacctg

SEQ ID NO: 181474 - DNA, 540 bp, Homo sapiens
ttgcttgacctcttggtaaatacagcatcatctgcatggaggttctgattcatgagatctatactgttggaaaactcttcaaaaaagcaaataacttcctgtggcccttcaaattatcctctccatgaggtggaatgaagaaaaagaccacccattttgtagaaaatgaatgttggcaacagggaagactacatcaataggcttattagaaggatgaactaagggtccaccataattttttttttttttttgagatagagtctcactctgytgcccaggctggagtgtagtggcatggtctcggctcactgcaacctctgcctcctgggttcaagcgattctcctgcctcagcctcctgagtagctgccactacacctgccactacacccaactaattttttgtatttttagtagagacgaggctggtctcaaactcctgaccttgtaatccgcccacctcggcctcccaaagtgctggaattacaggcatgagccactgtgcccggctaccttgattatttttctaatctggtcaatta

SEQ ID NO: 181475 - DNA, 427 bp, Homo sapiens
gctggtggggatcctgaagctgactgaacccatgaacacaaattgcagctgtgatccatggatcaggaaaccactactgctccttgtggttcaactgtctcacaatactcaatacctacaaagcaaatgactggacactggacactgctccagaaaaatcccacagcctcatgaccagacrtgctagcaggaacaatcaaagcagcagaggagggtcttcacctcacttccactttccgaatcgtattcatctgcatctaattagtgcgacataattcacttcctagctgcaaggacatctgggaaatgcactttttagctctttggtttctgaagcagaaaggtaccaatttggaatggagctgaatgccaatccattccaactactgcctttggattttgcagccagactgcctgggtttgaatt

SEQ ID NO: 181476 - DNA, 448 bp, Homo sapiens
gatgaatgaaatatctgccagtgttttaagaaacatatcacaaggccaaatgtggtggctcacgcctgtaaccccaatactttgcaaggctgaggtgggcagattgcttgagcccaggagtttcagaccagccttggaaacatggcaaaacaccatctctatgaaaaaaatacaaagattagccgggtgtggtgtcatgtgcctgtagacccaggtgcttgggaggctaaggtcggaggatcrcttgatcctgggaggtcaaggctgcactgagctatgattgcaccatggcactccagcctggacaacagaacaagacccttctcaacaaaagaaaaagaaaaaaggaaacatatcacaaaaattagaccatatttttccttataatatctaagagagcaggatggaggacctgcctttatgccagacagaaatgaggctgctgctt

SEQ ID NO: 181477 - DNA, 481 bp, Homo sapiens
agaaaacggaactcttgtacactgttcgtgggaatgtaagttggtrgagccactatggagaacagtatggaggttcttcaaaaaattaaaactagaactatcatatgatccagaaatcccattgctaagtatattccccaaggaaaggaaattagtatattgaagagatagctacacactcccatgtttattgcagcactattcacaatagcgaaagtttggaagcaacctaaacatccatcagcagacaaatggaaatgaaaatgtaccacagaaaatgtggcacttatacacaatggagtactattcagccataaaaataataagatcctgtcatttgcaacaatatggatgggactggaggacattatgttaatagaaataagccaggcacagaaagattaaccttgcatgttctcatttatttatgggagctaaaaattaaaacaattgaactcatggagataataaaatggtggtt

SEQ ID NO: 181478 - DNA, 502 bp, Homo sapiens
  misc_feature (1)...(502): n = A,T,C or G
ntgtcactgtctcccattacccccagatgggaccatctagttgcaggaaaacaagttcagggctcccactgattctacgttgtagtgagttgtataattatttcattatatgttacaatgtaataataatagaaataaagtgcacaaaaaatgtaatgtgcttgaatcatcccaaaactatcstccaccctgggccctgcccatggaaaaattgtcttccataacaccggtccctgatgccaaaaagactggggactgctgatttaaacccaagggaagttgccaacctacatttaaatggtagctgtaggaaaggggaaaagaataactaggaattgtaatgtccactatttagtaatatttaacctttcctatgtcacccactgctttgagtgtctgatggaaactgtgaggccaattctaggaaaaatgcaaacatactttaaaagaaaacattttactttcaataccttacacatatacatgtgtatgtatgtgtgta

SEQ ID NO: 181479 - DNA, 620 bp, Homo sapiens
agagactgctcaaactttgagtgggttcatatttataggaataaagatgagagacctccaaatcttttcctgatccaataaatattttgtttataaaatatctgacattagaaatgtgtaggggtggggacaacaaaaaaaatgctgagacaaaataggcaaaagmatccaaatgtaatgttgacctttgatccttcatctccattgcttaagattttattctcccaattgtcttaagaggtcttaagcaacaaacataagtgttcaaaaaactacagagctctgttagagctaggcatagcacttgacttagtatcctcccaaagcaaaattttgcagatagacaacacatactacataaaacggtgtttcctcttgctcattttaaatttacctcccattaatttcattgcctgtcccttcccaattgtcaagcaaaagcagtatgatcagatttcatcaaaataacttagaccacttaaatcaatgtgtattagacttttcttctttctgtgccagggtactctggaattttatgctctcttttagtaactgctcttctctggtaccaattgactggtgcatttatcatgacctgtattccaactgacacaccacaa

SEQ ID NO: 181480 - DNA, 620 bp, Homo sapiens
gagtaagtcacctaagatcaagcagctggtaaataacagagccaagatttgaattcatgtctgtctgacttttttttttttaccatgtgatttaccaaccacactcagtacccaaaatattacttgtggaatgccattttcacagggttgtttatcacacctctaattaaacctacccttgagagggaaaaaactgyaactcagcaaaactgtaattcacaactagcctaatggccaagtggaatggtacatgccatggtcaatcacttagcacgtaagtagtgtgtgatgaagaggtaaaaattgaggcacacacagagccagcctctgttaataacaatgattctttggggactgagtctccactttcattttaactaccactgtagaaaaatgataaataaagtcagtaggtaggatggcaatatgataggtagaaagagaagaaaaaataatttgtgtatttgtttaccactaaaatgcccttaagaggcagctttgtccaagtggcacttttaacatttatttttacttttaataatcatgtgtattatatttttatggctcaatggcactatatgtttgaagaattttagaacattaatatccaatgttaccta

SEQ ID NO: 181481 - DNA, 489 bp, Homo sapiens
aattcatgtgacaaagtctctgctctctggcacccttcttcttctgcctaagaacatgcatcccatctaactggtaaaggagcaggtttcagggtgtggagaacayggccacaggagcaaagttttctgttttttgttttgacagaatctcactgtgttgcccaggctacagtgctgtggcaccatctcagctcactgcaacctccgccgcccaggtccaaatgagtctcgtgcctcagcctcccaagtagctgggattacaggcatatgccaccacacctggctaatttttgtgtttttagtagagatgtgattttgccatgttggccaggatgtttctgaactcctggcctcaagtgatctacctgcctcggcgtcccaaagtgctaggattacaggcatgagccaccattcccggcctggagcaagttctaaccaaatggtttgaccaaccacaagctgattactgacatccaatcaccagcatct

SEQ ID NO: 181482 - DNA, 489 bp, Homo sapiens
aattcatgtgacaaagtctctgctctctggcacccttcttcttctgcctaagaacatgcatcccatctaactggtaaaggagcaggtttcagggtgtggagaacacggccacaggagcaaagttttctgttttttgtttygacagaatctcactgtgttgcccaggctacagtgctgtggcaccatctcagctcactgcaacctccgccgcccaggtccaaatgagtctcgtgcctcagcctcccaagtagctgggattacaggcatatgccaccacacctggctaatttttgtgtttttagtagagatgtgattttgccatgttggccaggatgtttctgaactcctggcctcaagtgatctacctgcctcggcgtcccaaagtgctaggattacaggcatgagccaccattcccggcctggagcaagttctaaccaaatggtttgaccaaccacaagctgattactgacatccaatcaccagcatct

SEQ ID NO: 181483 - DNA, 570 bp, Homo sapiens
ctgttggtgttgcagtgaacacgtgccacttaatggtattctgattatgaaacaaacaaagatctatcacaatgaactgaaaattgaagttaaccatgaatattcaagaagagacacagcattagacttgtaaagattgtggtagtaaagcatctgctgattacaaagcagkgaaaaaaaaatttagtaacaagtttgccaaggtcatcacttgtgaaaatctgatgctagaacaagtctataatgctgatgaaacatcactgttttggcattattgccattattgccccaggaagacactaaccacagctgatgagacagcctagacaggaattaaggaggccaagggtaatacctctgctgggatgtgctaatgcagcagacatacataagtgtaaacttgctgttttaagcaaaagcttgtgtccctgctgttttcaaggagtgaatttcttaccattctgttattatgctaacagaaagacatagatcatcagggacatgtttcctgattgatttcacaaacattttgtaccagcggctcatgctcactgcatggaagctgtactg

SEQ ID NO: 181484 - DNA, 573 bp, Homo sapiens
aatgggcatgttagaactggtgaaataatatttctatttgattcattaaccatactcaagggaaggccttggcacttgcaaatagttcagctctctgagtataaagagctcctttcccgctctccatatacacatccccattatggacctcaaggctcagaaaacctttctttgtaagtacttcaaaggtaatctgctttagacacgtctgagtggacttctccccaaattttcaattagcaagtctgacagtaaggtttctactcttccccagtgctgctasacttcgggagttgccacaatttctacttacaggcctatgagacagacttaagggaagatgaagggggaatgcaggcaggtgagtgatgagcaatgtttgaaataaagcagtttgtgctgaaaagtggtaaaaacaagctgctgaaatgacccgctgccaggcttccagcacctcctgggagctgtgctctgggtagagagaagcaggccatgcggatgctgaaatgacgctatagccatcaaaaatcctgttagacaaagcaggtcactggcaggtgtaattgggctttt

SEQ ID NO: 181485 - DNA, 607 bp, Homo sapiens
atggtggccctccactctgtgtaaacacatctcaagtgtctctcagcatgtccaaatttcctatttttataaggacatcagtaatactgaattggggcccatcataacagcatcattttactttaatcatcactttaaagggcctatatccaaatacatcactttaaagggcctatatccaaatacagtcactaagctactaggagttagagcttcagcatttgaatttcgggaggagatggggacataatttaatgcccaaaatttaatgtcccaaaccgtctagtgagatgaaatattcacccagagcttctctaactcaactctcattcatcaaaaagtaataaacctcatcctttgtctgctaagtaaggactcagtaaaatctaacagagtaagcatgctaaattattctggcatagggagtattgttgtctgtattcctactcttttagatccaggacarttttttctcttgaaaagtttacttcttaatttactacttctggcattctcagggaagcatcatcaagttcattttaatttttaaattgctgacactgggagctagtgtcactcaaaatcatttcttttcttttaatggaaa

SEQ ID NO: 181486 - DNA, 423 bp, Homo sapiens
ttaaattcatatctgccttcctatgccttcttacctaatgttgattggctttctctatagatgttcacagagcattatctgctttctggcaataaaggactatgatgtcatgtaagactttctaagacaaacccatgcaatactagatcaatgttctaacagtgtgtattaactrtgtatactcttacaattagcagttagcagtatgggttcgtcccaggttctttttacccgtaggagggaagtgcttcagaagcaataccccctggcctgatgagccaaaaatgaaatttctcctaacagcagatatgaatcctgacctgatagatgacactgaaaataaagctgcagtatctcatgaaaaaactctctgtttgctagccccccactgagttaagctactgtgcaagcaaagtgatctct

SEQ ID NO: 181487 - DNA, 425 bp, Homo sapiens
tcagaaacaaccacttacatggtctcataattgaatkatatgtatttttaaaattgtgtttcacattctcaaaccttcagaatacactgaatttttagtatataaaaattttcataagatattctttcctggccaaagaccacaatagaggtcttgattgtgtggtttcctcctcctttttcccttcacgaacagaggttttcctatcttggcagctgtttcctacaaagcagtcatcagtccctgatttcttccttcctcctccttcccacaaacaagggctctttgaatagtggatgactgaagacagactgatcttggatcactttaagaaagtggaaacgtgtgcaagagttgagcatgtgggcaagctgcctgtaggcactagctcattcaaatcaaacaatgaaaacttggacagtaaa

SEQ ID NO: 181488 - DNA, 406 bp, Homo sapiens
aaccacccactcatttctctgaatccgaagactaatccaaaggtgaccacacgcaaccactgctgactcaagcaagtgtcttagaaaggaaagacactatatccccatatatattcttatgaggtatttatttctcactttaagtggggaagattaacacactgaaactagtggcacctcttsaccttccacaaattattacccatgctaataattcaatcacttaaaaagtatcagccatgtaaccttttacccacttaaggctgtgatgtcatgtctttcctcctgcatgctttaaaaaaggaattttccctaaaacttcaaaaggctgtaaattaagccttttctttttctgaacacactaattctattggtaataatagacatgcttttctgctggagtaac

SEQ ID NO: 181489 - DNA, 427 bp, Homo sapiens
ttctaataaattctaatattctagcttattatctcatgtgtagataaagtgtaaaataagttgattttattaagatgatttgaaaacatagctatttttcatttgctctactacaacaatttaaattgaaggcatcatatatgtaaggttttaagagccaataatctgtaaatgttgatacaactttygtgtgatttcctccaacagtttttaagtggtagtattaaatttttactgacagatttttgttgttgtttaaattaattcagtggtaattaatggaagaaacattgagctccactatttcttaaacctagtggatttaacagtttagtaacattggaaggcaaaaataacctttgaaaataatgaaaacatttttgcttttaaatgtgtaacgatagttcttttaaattctctgttaagg

SEQ ID NO: 181490 - DNA, 574 bp, Homo sapiens
gatctgcggtctgaaaaaacaaacagaaagaccactggaatcatctcaagccaaattaaatagagcaactctcatttcagacactttcttaaagccatgagtaatgtagataggtgagttctaaaactatgtctttcttggtcttcacatatgacatgttaacaaattttgagagaaccgtgacgtgttagtttcacaatatatctgatttatttatacaacatttaaatgtgttaaagactacaaaatcatttacttctatttttttcawaatgagatttttccttctaacatccacaagagatgtattacctctaaaactaatagtggagtaataaacagcactaaaaaaaatctactacattgctataatatacttaaagaaaatacatagcaaagaaaaaagaatggatctttaaaatatgcaaggcacaaaaatatgtattagtaaaatgccatcagaagcctaattacccacaattattctcctcagataatgtacaaagtaggtactggtgttttttgttgttgctgttgctgctgttactatcatagttttggtatgcaatttcag

SEQ ID NO: 181491 - DNA, 323 bp, Homo sapiens
gttcatgataatttatttgcctagctccctaattagattaaacatttgaaggcagaggtcatgtcctataccatctcccatttcattctatattttccccagtagactaatgtttcttagtgtggtagtctagaccactgagattcttcagcttatccaaaaagagaacccctttgccctgcctagattctgaacaatgtcaaaaataaaacaataaaattgaaggccaaaatattaccartgctactgataaagctaagtacaaaaatgaccttgcggaagagccaaagtcaccttcaaagacaactcctgaactggaaaag

SEQ ID NO: 181492 - DNA, 637 bp, Homo sapiens
gcagaagttggaaagagtagacttgctgagtcttccagcctccatctctctcctatgctagatgctttctgccctcgaacaacagactccaagttcttcaaatttggattcttggacttacatcagcgatttgccagggccttcagccacagactgaaggctgcactgtcagcttccctacttttgaggttttgggacttggactggcttccttgctcctcagcttgcagacggcctatcatgggacttcaccttgtgattgtgtgagtcaattctaattaacttcccttcatatatacatatatcttattagttctgtccctttagagaatgctaatacacatgggaaatattccaaagtctgggtaaggaggcaggcaaactcaggctggtttatctacagattccaagtcccagggactgtgtcattctccagggagaaaawaaaaaaagatgacacctgtatggacataaagagagagacagtatacacagactccatgtggggaataatagtaaggtgtgatgccaaaagccaaaagttggagcaatttcttttgagggttggttcaattggatattgaaatcagaccaagaggacgtcacaggggttaactcagggaacaggataaacacc

SEQ ID NO: 181493 - DNA, 526 bp, Homo sapiens
ctcaatatcaggccaatagttcctgagttactggggccaatgggaggattatctgaattgatagcgcatctgtatttttttctagaagagtagagtatctctcatctgtggctcattcccagtatttataattgaacagtgtgtaccagaataaycactgactggattttaaagccaatttcccttctgattgatcagtgtcctgactctaccagctatcaagtatttgaatatcacctatatcatgtgctcttttctatcaaaattcctttaacactgtgttgtaatcctacttatatgtttggtcttttcaagaatgtgaactccttcagggccgtgacaatatctcgaatgataatagctacaatcgcttgagtaactaaatggatgccaaaaacatgctgaacattttatatacatgagtgctcatttctgtgttaaatctatgaggcattatcattttaatcctcattttatagatgataagcaaggattaataaagcttaactttcccaaatcaattaaa

SEQ ID NO: 181494 - DNA, 526 bp, Homo sapiens
ctcaatatcaggccaatagttcctgagttactggggccaatgggaggattatctgaattgatagcgcatctgtatttttttctagaagagtagagtatctctcatctgtggctcattcccagtatttataattgaacagtgtgtaccagaataaccactgactggattttaaagccaatttcccttctgattgatcagtgtcctgactctaccagctatcaagtatttgaatatcacctatatcatgtgctcttttctatcaaaattcctttaacactgtgttgtaatcctacttatatgtttggtcttttcaagaatgtgaactccttcagggccgtgacaatatctcgaatgataatagctacaatcgcttgagtaactaaatggatgccaaaaacatgctgaacattttatatacatgagtgctcatttctgtrttaaatctatgaggcattatcattttaatcctcattttatagatgataagcaaggattaataaagcttaactttcccaaatcaattaaa

SEQ ID NO: 181495 - DNA, 551 bp, Homo sapiens
acatacatgctctcaagacaaactataactagtcctcatgtaagaggacatgatggcacagtttgtcacacagaattcattctaaattcatttggtaattgggtgaccatcttgttagctaattgactttatccaaaggaaaaataaatttctaatatctttatcacaggaggcagttttgcmacttagagcaaggcatctaccaaagataagcttctcccctcccactgaaactggtagatagggatgctgtcttccttaatgattgcatttcaaagaaatagttcccaggtcctcgagaaggaattcctggaccatacagcagacaagaggctaatttagcttttaacgacttacaaagagacagagaaacaacttgtaagttttctaaagtaaataaatactctaagcaaagggaaggaagtctcttcccttattattttcaacagggagaattaagcatttattttctatgtacttttaaacacaaaacctggtgcataataaatgtgcattacacatttattgttgattcctgttgacatgtaatg

SEQ ID NO: 181496 - DNA, 551 bp, Homo sapiens
acatacatgctctcaagacaaactataactagtcctcatgtaagaggacatgatggcacagtttgtcacacagaattcattctaaattcatttggtaattgggtgaccatcttgttagctaattgactttatccaaaggaaaaataaatttctaatatctttatcacaggaggcagttttgccacttrgagcaaggcatctaccaaagataagcttctcccctcccactgaaactggtagatagggatgctgtcttccttaatgattgcatttcaaagaaatagttcccaggtcctcgagaaggaattcctggaccatacagcagacaagaggctaatttagcttttaacgacttacaaagagacagagaaacaacttgtaagttttctaaagtaaataaatactctaagcaaagggaaggaagtctcttcccttattattttcaacagggagaattaagcatttattttctatgtacttttaaacacaaaacctggtgcataataaatgtgcattacacatttattgttgattcctgttgacatgtaatg

SEQ ID NO: 181497 - DNA, 359 bp, Homo sapiens
cactacttaatgaccagctacatggkgcaggtacctgacacagtgaccagggttcttgtatagttttgtggaaaaaatgagaagtggctgagttcctctcgagagtaccataaaagaggagtgaaagagaaaaaaagtatggcattaatttctgttatttatggcacagtgttcctgcttgccagccaatgtggacaaatctatggtcaataatttgatgaataagatgagcaatgtcttcataagaggttagggaacaaggatgcacgtggagagaaagaggctaaaatctcctcctctgccttggcagtcagcagccctagagggccctttgcaggagccaggctgtctttctctgg

SEQ ID NO: 181498 - DNA, 614 bp, Homo sapiens
taactgtatttattttttttaaatggcaataggagatatgtgagtctgtagacctaggttttattatacaaatatgcagaacaaaatgtgtgtgtccatgtgaactttaaaaattgttatctgttttttaattgtatgctcacatgcggttgtaagtaataatacagggagggtttttgagtatatctctttgtttagcctttttgatgttgctaaatgagtaaagctgtttaagtatttaagtccttattgataagggagctgaggtatttctaagcattactgcatgaaagcacacctggggcaggagcgagactttcaaagatgactgcacattagaatcacctgggaacttttaacaagcactaatattcaggccttacattataccaattaaatcagaatctttcctgggsgctaggagtagacacatgtaacatttttaaagttctccaagtgattttcaacatgcaaccagagttgagaactattggcgatatttctcaaacttaagtgtacataagaatcacctgggaatcttgttaaactgtagattttaattctagagatctgtgattctgcatttctaaggagcttcaggttgatgattatgc

SEQ ID NO: 181499 - DNA, 502 bp, Homo sapiens
tccagtaaaaaattaaactattatcaaataaatgtaagagtagttaaggaacctaatgagatatttagaaagttcctttccctaaggattccctaaaattaaaaataattcttagtttctcctgacttgtttgctcataactgtgtgataaactaaagctcttgtgcaaagttatcagtgtcaagaactacacaaaatattaccctgggaatagagaggatgtgtgccaatgtgtgtgttgggggcggttagaagaaatccaattaagaaaastgggcaaagacattttagtatcaaggttgaaacaggaagataaggaaagagaatttgtccctatgtgcctgagggaatagacctatataattctgagggaggttggatagacatacattatctaccatctgtttctacaccttgaggagcctaactaatgagatcttggatttgccactaacgtttggcgaataattgtgggaagactctgaagcttcattctgaaact

SEQ ID NO: 181500 - DNA, 502 bp, Homo sapiens
tccagtaaaaaattaaactattatcaaataaatgtaagagtagttaaggaacctaatgagatatttagaaagttcctttccctaaggattccctaaaattaaaaataattcttagtttctcctgacttgtttgctcataactgtgtgataaactaaagctcttgtgcaaagttatcagtgtcaagaactacacaaaatattaccctgggaatagagaggatgtgtgccaatgtgtgtgttgggggcggttagaagaaatccaattaagaaaactgggcaaagacattttagtatcaaggttgaaacaggaagataaggaaagagaatttgtccctatgtgcctgagggaatagacctatataattctgagggaggttggatagacatayattatctaccatctgtttctacaccttgaggagcctaactaatgagatcttggatttgccactaacgtttggcgaataattgtgggaagactctgaagcttcattctgaaact

SEQ ID NO: 181501 - DNA, 577 bp, Homo sapiens
ttctttataacaatgcaagaatgggtgaatacatgattctttccaggaatttatcctggaccctccttgcctctgtctctgatgatgccctgccccattctcaggcttgtctttacttctcctcctggcttttgaacttgaagtggtttcatttccctttttaatcccacaaggtatcccttgtgattaattttcagctctgggaggatgctcccctctggttttacctctcaaaactcatgcctggtrccaggttttaattagccccttgtcagcccctccctcccttcaggaatgaaaaagactgaggtcaatgtattataattacaattgtgttgaagatatttccaacacactggatgctgataggtgaagagataatgagtggtaaaatatcaagactaatattcttatcactactgtctagaaatacatactgacaatgggatcaaagaaaaccagagcagcctagggaaccctattctatcccatttgtaaattttgatttataactgaacctgactgatctttgttatcaatgaataataagttattgctgaggatgtggacaaataaa

SEQ ID NO: 181502 - DNA, 574 bp, Homo sapiens
gatctgaactgtagtgtctgttattttctgtttcaagttgcaggtgtgaaacagaaaatactccagcatctctcagcctccttggatatgtaggctaagccagatcatgttctcatggcaatgcaagggtcaaacagccaggcccaatatcacaggtacttgtaagcctttggttctgccatgtttactaacattccattgcttgagtaaatcatatggtcagacccaatgtcaagagacagagaaactgtctacttccatggaggtggcactgaaaaggccataaaaatttctgaatcataatctaattatatatgagaaattattgtttgcttaagtggaaggggtattattttgtaagggaaaataaaactttacycagtcccatatgccaagaaatatttctcaaatgctattttatatgcgtggttcttagggatacaatggacatatcactgacaatgtttcctaagtctactggttttaaattcatatcgctatttcttgaggttaacctaattcaaacaggtgcttatattgtggttattgtctcacatgcattgttgaattagat

SEQ ID NO: 181503 - DNA, 522 bp, Homo sapiens
gaagagaggcttctcaaccactggttaagaaaggatgatatagataaaaatgcagtcctctgaatttccaccctttaagttgtgtgtatgagttttcttttgctgctgaaacaaattagtacaaactaagtagcttaaagcaacacaatatttttatgttacagttctgtaatgataaaataagcaccttgattttaacctggttcaaccatgtcagacttctgtaagaaatgtagggctacatttccttttggaggctcaagctggggagtccattttctgactttaccagctactagaggggacctgcatttcttggcttgtggccccttcctccrtcttcaaaagccagagtgcaggctgagttcttttaccattgcattactctgactgcctcttctgcctcctcctctattcttaaaaaaaacttgtgactacactgagctcatttggataatccaagacaatctccttatcttaatatcagctgattagcaaccttaattccatctgcaactttaa

SEQ ID NO: 181504 - DNA, 446 bp, Homo sapiens
gcgactaattatataacatgacaatgagattagaggaagaggaaattgaggagatagtgagcagagcctcatagaagtagagagtagaatagyggttaccagaggctgggaagggtagtggggagaaggggatggagaaaggttggttaagagaaagttacagttagataggataaataaattctgattctttttgcacattagtgtaactatacctaataataaggtattgtttatttcaaaatagctagaacaaaggattttgaatgttgtcaccataaagaaatgacaagtatttgaagtgatggatatgctaattaccctgctttgatcattatacaatgcatgaatgtatcaaaacatcacactgtatcccataaatatactcaattatttcgtatcaattaaaaacaaaatgaaacttataaaaaataaatgtgtcatga

SEQ ID NO: 181505 - DNA, 545 bp, Homo sapiens
ggtttgggtaaaggagaaattggtaatctcagttctggacagattaaatctggccgttgtaaaacattcagatgtgagcattagaaggcagattaaacggtggatgtagagctcaggaaaggagctggaggtaaatatgtggacttggacagcatctgagagagtgtgagattgtcaagtgaggaaagaccctggacacaccacaagagaatgctccattaaggatctagaagaaacagtgtgcaaaggatgagtcaagaaagagggagaaccaagatagtcgtagaagcatacaaggggtgactcttctaagaaggasggggcagtaaagtgtccagttgcatgcagagactaaagagtgagatggaagaaagaactattggagtaaataattccttgatgactttaccttcctgagagcatatcccatgtcatcaaccctccatagtggtcttgctgtggctgtctcgtttgtaatgattatggaaccaaattatttaatttgtagactatcaagttgctttgatatttttcacttcttattg

SEQ ID NO: 181506 - DNA, 648 bp, Homo sapiens
tgattaggatcaggaaaacagacactatccccaagcaagatggtcatttgcaagttcacccctctgtacaggcccatatctttctcacaaaatctctattcttctatacgtaatttatgaccagtcatacaaatactgtcttttaacaagttgttttggttgttttgcagttggtagaacttctgcttctgtctgtgaagaattaactgctgtgcaaattgcttttttctgtgaacaagttgaaaaccagacaaaacacatgaaagaatcattttcaggcattgtacaacagatgccacacaactgggcttcctaagagatactgcytggaggtcatttccaggtcacagcacgtggagggaaaaccaatcagaacctagaattctacctgaggtaagggggaatggattggaatttaaggatgttgaggtggttagaatttgtgggacagagtaatgaagaagagggagatacagagagtggggagagcactttggaaatctgcagaggatcccccccagtcttctcctaagtatgatttggatatgagctggaagaaactacttggagttgaagaaaaaaacactgataggcaatagctgagtaattcctggagctcacacagggctgagactaccctgtgtttcc

SEQ ID NO: 181507 - DNA, 540 bp, Homo sapiens
aatgccacctttaaccctgagaagtagcaatatgtaaataacagctacgatctataatcattatcacaagtgatattgaaataaggtctcagaataaaagatagtccttttatttacttttgaacttataaactttgaacaagtttagcttcatgcagaacttacaacaacgcccttattttgtgaatttcagaggaggcaccagaygtgcttccctttgggcctgaaatatctcctttgttctaagagttaagttattatggtccttattaagctgcatgaggaatctaggaaaaacaaaacattctcccatatcaattattagtattggctgagcatggtggctcactcctgtaatcccagcactttgggaggctgaggtgggaagatcacttgaggtcaggagttcgagaccagcctgcccaacatggcgaaaacccgtctctactaaaaatattttttaaaatcataataaaatcatcagtatcaggcaaagtcatcagataggttttaggacacctagcaaggtcctttgaaatg

SEQ ID NO: 181508 - DNA, 540 bp, Homo sapiens
aatgccacctttaaccctgagaagtagcaatatgtaaataacagctacgatctataatcattatcacaagtgatattgaaataaggtctcagaataaaagatagtccttttatttacttttgaacttataaactttgaacaagtttagcttcatgcagaacttacaacaacgcccttattttgtgaatttcagaggaggcaccagatgtgcttccctttgggcctgaaatatctcctttgttctaagagttaagttattatggtccttattaagctgcatgaggaatctaggaaaaacaaaacattctcccatatcaattattagtattggctgagcatggtggctcactcctgtaatcccagcactttgggaggctgaggtgggaagatcacttgaggtcaggagttcgagaccagcctgcccaacatggcgaaaacccgtctctactaaaaatattttttwaaatcataataaaatcatcagtatcaggcaaagtcatcagataggttttaggacacctagcaaggtcctttgaaatg

SEQ ID NO: 181509 - DNA, 492 bp, Homo sapiens
aacctctgcttcctgagttcaagcaattctcctgcctcagcctcctgagtagctacgattacaggtgcctccaccacgcatggctcatttttttttgtatttttagtagagacggggtttcaccatgttggccaggctggtcttgaactcctgacctcaggtgatccacccacctcaacctcctaaagtgctgggattacaggcgtgagccaccacacccagccagatatatgatttcaaatattttattctagtctgtggctttttctcattctcttaagattctctttgaaagagaagatgttcttaatgattaaaaagkctaattcatcagtgttttcttttatggaccatgcttttggtattgtacctaagaaatatttgcttattccaaggtcacaaaatttttcttatatgttttcttttataaactttacaggtttaggttttataaataggtctgtgatccattttgagttaatttcttaatat

SEQ ID NO: 181510 - DNA, 492 bp, Homo sapiens
aacctctgcttcctgagttcaagcaattctcctgcctcagcctcctgagtagctacgattacaggtgcctccaccacgcatggctcatttttttttgtatttttagtagagacggggtttcaccatgttggccaggctggtcttgaactcctgacctcaggtgatccacccacctcaacctcctaaagtgctgggattacaggcgtgagccaccacacccagccagatatatgatttcaaatattttattctagtctgtggctttttctcattctcttaagattctctttgaaagagaagatgttcttaatgattaaaaaggctaattcatcagtgttttcttttatggaccatgcttttggtattgtacctaagaaatatttgcttattccaaggtcacaaaatttttcttatatgttttsttttataaactttacaggtttaggttttataaataggtctgtgatccattttgagttaatttcttaatat

SEQ ID NO: 181511 - DNA, 559 bp, Homo sapiens
tgaatttttaaatttattttaagattgttcattgaaagtgtgtataaataaaattgattcttgtatatkaagcttgtatcctacatccttgctgaactcatttatttcaatagcttttagtggatttcttaggatttagtatatacaagataatgtcatcttcaaacagagacagttttacttctttttaatctggatgcattataggtcattttcttatgcaactctcttggctaggacctctcatataatgttgaatgaaagtggtgagaatagatgttcttgttctgttcttgatcttaaagggaaggaattcagtgtttcactgttaagtgtgatgctatgtgtgggtttctcacagatgccctttatcaagttgaaaaagttgccttcaattcccagttatttgaatgttgtaatcatgaaggggtgttgtattttgtcaagggttttctctgtatctattgacaagatcatgtgggattttgtctttattcaatatatcaacagcattaattgaatttcttacgttaaacaaatcttacatttctaggtaaat

SEQ ID NO: 181512 - DNA, 571 bp, Homo sapiens
cttgaactcctcaccttgtgatccacccaccccagcctcccaaagtgctaggattacaggcttgagccaccacgcccggccaagataggcattattttatacacacacatacacacacacacacagacacacacacacacagacacacacacacacacacagataaatgattaactgaaagttaaagaattagcctcaaatcacacagtgaggaactggctatgctaatatcctagccccagggccctgattctgagccttgttctctttctgattcagcttggtatttcaatgaaagatcagagttaccatgtaactgaaagacatggaaataaagcaacaggtgggaacataagtgacgggaaaactagtctttggataactctaaaaaccaggattgattttcacagaagygctaggttgataaaaacccacatgcatccctatcacactttcagatgacggtgtgtatctgatgttactgttccctggatgttcccagactaaggctcttctaataggccacaaagtagtatccatcaagaatggctttaaaattaaaacacaaaga

SEQ ID NO: 181513 - DNA, 626 bp, Homo sapiens
gaaaacaaacaaagaagtagtcacagtactaacatttaaaacccagaggaggaactcacatgttggtgtttcagttttgacagacctactaggatgaactatcctgagagggctgttgcagagggtgttgatttcagcaaggcatttgaaatcattagatttttttttaaaggataaagcagaaataaatttaaattcatgggcacctaaggaagatgtatttggacctctgtgctgttctttggtgtgccagaagcagttctatcacttcctcactgtagttgaagagtggattcagtgttatcccacagaactcacgtgaaactgggcagtacacaagagcaggtgttttggacgtgtctcatcatagctgctttaagaggaaaaatgataataaatgcgtgtattccctgcccatgtatttttgttgctaaaattgttttttaaaattgtctttccctgggaaacctaagtagagtatctccacgtctgttttaggcagcttctttttggtttgcrtgcaatttttattttaaaaaagtgaaaattaggatttatagaatcatgaagtaagtatgactcatgcattcatcatccaccatccctcttagttctgattaaaagat

SEQ ID NO: 181514 - DNA, 330 bp, Homo sapiens
gggactgagctgtacacaggttgatttctctccaaggctgtcattgcttgcagctagctgtgtgaatgattttccagttcctcacttataaattgaggacttgggattaggacagttaagaatcatccaaccgtaattgtctaaacttctgctgctgcctcaggtcatccaaccctgtaagccagcaggtgaagaagcagattctccaaagcaatgcctgaactcaacacaacttgctcctcaagtyggcattccttcttgtattcttctatccagtggctacggctgaagttttcatttagagagctcaactagctgagtgatgtacat

SEQ ID NO: 181515 - DNA, 396 bp, Homo sapiens
aacttcttttgcagtgtaaggtcacattgcacgggtcmcagggttaatctgctcatctttgtgtggggagtcatcattctccctattttctctactgtacaatataatatattgtatgcattaaccccatcttatttgtgttattaagttcctataaatgtaataacaagtaagatggggctaatatttatcttgcgtactaaaagtgagtaattttgtgctgattaaaaatattcttacttacttaacattaccttctaaagactttatctagtgggttcattaggatatggttaaaattattaaaattgaattgctttacagtatattcgataatccactcctctttctaattcaggctggcctacactattcgctgacatcagatataagtag

SEQ ID NO: 181516 - DNA, 396 bp, Homo sapiens
aacttcttttgcagtgtaaggtcacattgcacgggtcacagggttaatctgctcatctttgtgtggggagtcatcattctccctattttctctactgtacaatataatatattgtatgcattaaccccatcttatttgtgttattaagttcctataaatgtaataacaagtaagatggggctaatatttatcttgcrtactaaaagtgagtaattttgtgctgattaaaaatattcttacttacttaacattaccttctaaagactttatctagtgggttcattaggatatggttaaaattattaaaattgaattgctttacagtatattcgataatccactcctctttctaattcaggctggcctacactattcgctgacatcagatataagtag

SEQ ID NO: 181517 - DNA, 396 bp, Homo sapiens
aacttcttttgcagtgtaaggtcacattgcacgggtcacagggttaatctgctcatctttgtgtggggagtcatcattctccctattttctctactgtacaatataatatattgtatgcattaaccccatcttatttgtgttattaagttcctataaatgtaataacaagtaagatggggctaatatttatcttgcgtactaaaagtgagtaattttgtgctgattaaaaatattcttacttacttaacattaccttctaaagactttatctagtgggttcattaggatatggytaaaattattaaaattgaattgctttacagtatattcgataatccactcctctttctaattcaggctggcctacactattcgctgacatcagatataagtag

SEQ ID NO: 181518 - DNA, 565 bp, Homo sapiens
aagctttgtttcccaagagattggtattctgtgttccaagcgtctgcaccttgactaatttacaccatgtgaacttctggagacgatttgctctgtgtcgtcagattggagggtctgcaagctgctaccagaggagctcagaagcctcatggttttcctttcatagaaaaatgtacaccacaagaatgsaagcagcctgacaaatgaccaacgcttacagaaatccctgccatttgtactccaggattttggaacgtgtttattttcttgttgtttttatttcagtgtctgcttttgagagccaacctggctttcagggactattacccagggtaaaatgtttccatagaaacctcctgctgagacatattgggcaaatcctcattttgaatctagttcataaataatcattaagggtttgttttattatatttaaagatagaatagaaaaagaaacaagaggagaagaaggagaaagaggaagaggagaaggaagaagaggaggaggaaggggaagaggatcagaaaagcacacgccctcaatgtattgttggctattaagcta

SEQ ID NO: 181519 - DNA, 567 bp, Homo sapiens
gattggtattctgtgttccaagcgtctgcaccttgactaatttacaccatgtgaacttctggagacgatttgctctgtgtcgtcagattggagggtctgcaagctgctaccagaggagctcagaagcctcatggttttcctttcatagaaaaatgtacaccacaagaatggaagcagcctgacaaatgaccaacgcttacagaaatccctgccatttgtactccaggattttggaacgtgtttattttcttgttgtttttatttcagtgtctgcttttgagagccaacctggctttcagggactattacccagggtaaaatgtttccatagaaacctcctgctgagacatattgggcaaatcctcattttgaatctagttcataaataatcattaagggtttgttttattatatttaaagatagaatagaaaaagaaacaagaggagaagaaggagaaagaggaagaggagaaggaagaagaggaggaggaaggggaagaggatcagaaaagcacacgccytcaatgtattgttggctattaagctaaattggcttgtttcaagctt

SEQ ID NO: 181520 - DNA, 580 bp, Homo sapiens
tttgcctctgctaatactgaattaataattatccataacacgaagaaaaaataaatgtgtctagtgttctatataatattcaaagtaataaatgcaaagtgtttatctcacaataatttaaatttattcctaagcaaagtacttctaattttctcactagaatcataccttcagtccccaacagcatcacgattccttgacaaaacttctttcatcagagatacacctggaacaagactgggaggtgcatttagaacagagagatgttttccatcccaacatgtcaagttcagagctcarcgcacccaggcatgtgccttagaggctggtctaaggaaaccttcctgattgaaggctttgaagtcatcacttgtttttttgtttttttttacagagtagatatgcaaagcatttgaagaattcagttttgcgatcggtggattttaatggggtggcacatgccttcctcacataaaaatctcctcagcctctctcaccacaagtctatccatcacaggcttctacatcctgtggcttgccctctgacagagaagacagcactcgaacttgcacaacatca

SEQ ID NO: 181521 - DNA, 627 bp, Homo sapiens
aaggccatgtgactggagccggtggaatctgagcagaaggcaactccagatcccagtgtgcacattcgtgtccatctgccagtggcactgtggaaaatgtcaaagcctcttaaaagttcacgtttaagctgccattgtagaaagcttgaacacccctggtttactcaagtcccagtagtctgtggataatggagagaattctttctccacaccagggaagtgcagttagaacaggtaaatggcaggatctcaaatcaagccccacctccaaacacgtctgcccaygacacagattctctaaaaaaaagcccactattagaaatgtctttccatgacagtaatgcattaaatgatcaaacctaaaggctgctttcttcaatccatgctcttctgtaataggacaatcaggggaacttaggttctgtggagagagctgtgttttcaactgagattggagagagccaggagtccatgcaccagagactcctaattgtctcactagaatcacaagtccagcacaggagatgagtattctccagatcattagtatctcagagatcctcagcaaactttattttgtaaaaatctaacttaaaatattttatttttgtattatataaaacaaat

SEQ ID NO: 181522 - DNA, 519 bp, Homo sapiens
tgatttataattcaatagcagagacagaagcaggaaagggaccttcatccttgaaacaaaaagaaacgctgctgcatttacctagaaactccccaaggccaaagtccttgtctttgattttatttctgttttcacatggcctacagctctaacggttcctacctacagcaaatttcagcaaatgaaaggactgagtagtactttttagagcctcctgggtggctcttttatgtaggaacaattctaacctggatccatctggaggaagtcayggtgggtgaccagggtccaccactgccctttccaccctctttgtcactatggtcaccaagctcacctctctatcccctgttctgatgaggagggcctggccttctaggcacaatcttagttggaaaaccttttatcactcaatagatgcttggcagcctttgctttccctgcagccttagaacgcgagtttagtaggggtttagggcagcccatcacagaaacaccatgtctcacccagccttccac

SEQ ID NO: 181523 - DNA, 519 bp, Homo sapiens
tgatttataattcaatagcagagacagaagcaggaaagggaccttcatccttgaaacaaaaagaaacgctgctgcatttacctagaaactccccaaggccaaagtccttgtctttgattttatttctgttttcacatggcctacagctctaacggttcctacctacagcaaatttcagcaaatgaaaggactgagtagtactttttagagcctcctgggtggctcttttatgtaggaacaattctaacctggatccatctggaggaagtcacggtgggtgaccagggtccaccactgccctttccaccctctttgtcactrtggtcaccaagctcacctctctatcccctgttctgatgaggagggcctggccttctaggcacaatcttagttggaaaaccttttatcactcaatagatgcttggcagcctttgctttccctgcagccttagaacgcgagtttagtaggggtttagggcagcccatcacagaaacaccatgtctcacccagccttccac

SEQ ID NO: 181524 - DNA, 519 bp, Homo sapiens
tgatttataattcaatagcagagacagaagcaggaaagggaccttcatccttgaaacaaaaagaaacgctgctgcatttacctagaaactccccaaggccaaagtccttgtctttgattttatttctgttttcacatggcctacagctctaacggttcctacctacagcaaatttcagcaaatgaaaggactgagtagtactttttagagcctcctgggtggctcttttatgtaggaacaattctaacctggatccatctggaggaagtcacggtgggtgaccagggtccaccactgccctttccaccctctttgtcactatggtcaccaagctcacctctctatyccctgttctgatgaggagggcctggccttctaggcacaatcttagttggaaaaccttttatcactcaatagatgcttggcagcctttgctttccctgcagccttagaacgcgagtttagtaggggtttagggcagcccatcacagaaacaccatgtctcacccagccttccac

SEQ ID NO: 181525 - DNA, 519 bp, Homo sapiens
tgatttataattcaatagcagagacagaagcaggaaagggaccttcatccttgaaacaaaaagaaacgctgctgcatttacctagaaactccccaaggccaaagtccttgtctttgattttatttctgttttcacatggcctacagctctaacggttcctacctacagcaaatttcagcaaatgaaaggactgagtagtactttttagagcctcctgggtggctcttttatgtaggaacaattctaacctggatccatctggaggaagtcacggtgggtgaccagggtccaccactgccctttccaccctctttgtcactatggtcaccaagctcacctctctatcccctgttctgatgaggagggcctggccttctaggcacaatcttagttggaaaaccttttatcactcaatagatgcttggcagcctttgctytccctgcagccttagaacgcgagtttagtaggggtttagggcagcccatcacagaaacaccatgtctcacccagccttccac

SEQ ID NO: 181526 - DNA, 625 bp, Homo sapiens
gaggcctcgtaatcatggcagaaggtgaaaggcacgcagcagacaagagagagaatgagaatcaagtgaaatgggttttcccttatcaaaccattggytctcgtgagatccaatctcccatactactaaaagaacagtatgggagtatccacccctatgattcaattatctcgcaccagtcccacaacacgtaggaattatgggagctaccattcaagatgagatttgggtggggacacagcaaaaccatatcaccaagtatgcctggcaccatgctttctgtacagactgtagaattgtgagccaattaaatccccttgctatacattacccagtctcaggtgtttctttgtagcaatccaagaatgagctaatacaacttactttcacttgttaaatgatgatggaattggggcacagagatgttaaataaccagcccaaggtcaaccagtttgcacttggtggagccaggatttgatctcgagcagtttggctcctgggcctagtttcttaatcactactccaagagccacactctcttatgctcatgacatattcttctcttcctattctgacagtataattttaaattggtattaaaatatttcaaatggctcttccata

SEQ ID NO: 181527 - DNA, 625 bp, Homo sapiens
gaggcctcgtaatcatggcagaaggtgaaaggcacgcagcagacaagagagagaatgagaatcaagtgaaatgggttttcccttatcaaaccattggttctcgtgagatccaatctcccatactactaaaagaacagtatgggagtatccacccctatgattcaattatctcgcaccagtcccacaacacgtaggaattatgggagctaccattcaagatgagatttgggtggggacacagcaaaaccatatcaccaagtatgcctggcaccatgctttctgtacagactgtagaattgtgagccaattaaatccccttgctatacattacccagtctcaggtgtttctttgtagcaatccaagaatgrgctaatacaacttactttcacttgttaaatgatgatggaattggggcacagagatgttaaataaccagcccaaggtcaaccagtttgcacttggtggagccaggatttgatctcgagcagtttggctcctgggcctagtttcttaatcactactccaagagccacactctcttatgctcatgacatattcttctcttcctattctgacagtataattttaaattggtattaaaatatttcaaatggctcttccata

SEQ ID NO: 181528 - DNA, 519 bp, Homo sapiens
tcatctgccactcagaaaagcagggagttgcaaagagagtagcctctgttctttttgctacttgggcctggaaaattggcgttatcttttgattagttctaggaagtcagtgtgaatcggccttaggttccctgcctcaggaccctattctcctgcctcatatatatgtawgtctatttatgaagagatcgataaggtactggctcagggaattatgaaggtgagcagcctcctaatccaccatctgcagctggagacccagaaaggccagtggggtagttcaaaggcctgagccaacggtatagatttccagagtgggtctgaaggcctgagaaccagaaatcccacgggcaggagaaaatcgacgttccagctcaagcagtcaggcagaattcattcacccttctgcatttttgttctattcgggatggattggatgaagccaccctcactggtgcctctttgctcagtctactaatttaaaccccagtctcttctgcgaacacactgaaatcatgt

SEQ ID NO: 181529 - DNA, 519 bp, Homo sapiens
tcatctgccactcagaaaagcagggagttgcaaagagagtagcctctgttctttttgctacttgggcctggaaaattggcgttatcttttgattagttctaggaagtcagtgtgaatcggccttaggttccctgcctcaggaccctattctcctgcctcatatatatgtaagtctatttatgaagagatcgataaggtactggctcagggaattatgaaggtgagcagcctcctaatccaccatctgcagctggagacccagaaaggccagtggggtagttcaaaggcctgagccaacggtrtagatttccagagtgggtctgaaggcctgagaaccagaaatcccacgggcaggagaaaatcgacgttccagctcaagcagtcaggcagaattcattcacccttctgcatttttgttctattcgggatggattggatgaagccaccctcactggtgcctctttgctcagtctactaatttaaaccccagtctcttctgcgaacacactgaaatcatgt

SEQ ID NO: 181530 - DNA, 516 bp, Homo sapiens
attagcaattccactcccaggtagttacccaagagaaataaatacatatgtccatgtaaagatttgtttgtttattcttagcagcatcattcattatagccagcatctgaaaagaacccaagtgtccatcaaccagaaagtggataagcatattatagaactccatacaatgagatactactcaataataaaaaatagtaagttactgctatacgctgcaatatggatgaatcttcaaagcattatgctaagtgaaaccagccagatacaaaaggctacatactrttatgcttacaaggcaatctggaaaaggcaaaactatggtgatagaaaatggatcagcgtttgtcaggtgttggaggcttgggaaagggattgacagctaagtggtacagaaaaacttttggggctgaatataatgttttatatcatgattgtgctgatggttaaatgactatatatttttgtcaaactcatcaaatggtacactcaccactagagattttattatataaa

SEQ ID NO: 181531 - DNA, 617 bp, Homo sapiens
gattttacacttcaaattctccacatgtctggtaattttagcttgctttagggataaggggaggatttaagtgaaagccctttaaataggaattaaactcatttgcacaatggagacccagagatctctcctgcgagcacgatgaggcattttatagaatttaacccttcaaatattgttttatttctttgctttccctccctatggaattattcatcaagatgaactctaagccaaatcgagagataccaagaactatacagcttccaaaaatactctgctygtattcaaaagatagtagccagttttgcaactcagagtgctaggatttaggaaaggatggatgcccatcatttgaaagaccactaatattgctctttagctaagtagacaggcaatgtgagccttctgaaaattgacaacctgcaaaacagaggtcctaagggcactcaccatagaaagcttgtctagcagctcttctcccttcactgaacacagggccaaatgcctaaccctgcatcagtccaatctagcttgcctagagaccaagtgatgggctctaaaaccttctgctaaattagcagatatttctggttggtagacaggtgaacaggtca

SEQ ID NO: 181532 - DNA, 617 bp, Homo sapiens
gattttacacttcaaattctccacatgtctggtaattttagcttgctttagggataaggggaggatttaagtgaaagccctttaaataggaattaaactcatttgcacaatggagacccagagatctctcctgcgagcacgatgaggcattttatagaatttaacccttcaaatattgttttatttctttgctttccctccctatggaattattcatcaagatgaactctaagccaaatcgagagataccaagaactatacagcttccaaaaatactctgctcgtattcaaaagatagtagccagttttgcaactcagagtgctaggatttaggaaaggatggatgcccatcatttgaaagaccactaatattgctctttagctaagtagacaggcaatgtgagccttctgaaaattgacaacctgcaaaacagaggtcctaagggcacwcaccatagaaagcttgtctagcagctcttctcccttcactgaacacagggccaaatgcctaaccctgcatcagtccaatctagcttgcctagagaccaagtgatgggctctaaaaccttctgctaaattagcagatatttctggttggtagacaggtgaacaggtca

SEQ ID NO: 181533 - DNA, 516 bp, Homo sapiens
tgattgccaactggtagcttattcacaattagaatccttctggattttttcacttgtttctgcgattttattcctactgtttttctacagttttatcaagactttgttgcctataatctactgattcttctctaacgtcctctaaatacaaaaaaaacaaaacaaaaacaaaaacacaaaaaccctcctctgtgtttycatccttctctcttgacctgcatgctaccaccacaaatgtgataatgtagccactttacacaaatcctacacaagatccatattctgtagcatgtcctaaggccttttccaagctgaccccaatttcttttttcaacctgtcctctaccatttccctcctacttgaaccacacaaatacaagctgtgctcccatgccttttacgtatgttgttccctttgccacactcatcacccccagccctaccatgccaaattctgtgaactcttagtgctatcttttaaaatctcatcgctttcacctaccactgtcttgaatt

SEQ ID NO: 181534 - DNA, 551 bp, Homo sapiens
gtttgttgtcatgcacatacaggctcgagaaccattgtgttttaaaagrtaatttacttgagatgtttataaaccattttaacactaaaaggatgcattttggaatcatttaatacatttaaactgtagtttgatatattttactgacatgcagagctgaactgcttaggaaccactgccaattgaatactaatagtgagaagataattctgaaattgaaatatgtcaacaggaaaatgcaatttgattgttaaaaaaagtagtttacatttgttttttcaaggatttctgaagaaggtttctcatatctgtgaaactgtcattccattcatgtagaatttcaccagcaatttctgttatggtagaatttatgtaaatatttgcttttgaaaatattataagtataggtagaatcacgcagagattctggagtcactatcatgtatgatagtgtcacaagggaaaataatactatagcctgacacaggtacctctattcatattgtttggggaggttgaatggttgggtatatttttagttatcacagtga

SEQ ID NO: 181535 - DNA, 551 bp, Homo sapiens
gtttgttgtcatgcacatacaggctcgagaaccattgtgttttaaaagataatttactkgagatgtttataaaccattttaacactaaaaggatgcattttggaatcatttaatacatttaaactgtagtttgatatattttactgacatgcagagctgaactgcttaggaaccactgccaattgaatactaatagtgagaagataattctgaaattgaaatatgtcaacaggaaaatgcaatttgattgttaaaaaaagtagtttacatttgttttttcaaggatttctgaagaaggtttctcatatctgtgaaactgtcattccattcatgtagaatttcaccagcaatttctgttatggtagaatttatgtaaatatttgcttttgaaaatattataagtataggtagaatcacgcagagattctggagtcactatcatgtatgatagtgtcacaagggaaaataatactatagcctgacacaggtacctctattcatattgtttggggaggttgaatggttgggtatatttttagttatcacagtga

SEQ ID NO: 181536 - DNA, 446 bp, Homo sapiens
ccagggcgtgtgtagcaaggactcgagcaggggtgtctggagaggagagagtcggcaaagagggcagcaaaagaagagccatgctgcatgctctggggtccctccaggtgaggcctgggcacccaagctccctatttgtcccrggcaccagggacccccagcccctttcttcagggccccaaggggaaactggagcccaggattggcagcgtggaatcaggggaccccaccggactcttaccaaagatttgatggtgttcttcagttgactgatttctacggaccttgaatccaggactactgctcgttcttggcacgggctctgaggttcatgcagagaggaggaggtggagcaggagtcgggggagaggtagagagaacaatcattagggctggggtgtgtgggctgtctcagctggcagaggggcacccagtccctcctggag

SEQ ID NO: 181537 - DNA, 446 bp, Homo sapiens
ccagggcgtgtgtagcaaggactcgagcaggggtgtctggagaggagagagtcggcaaagagggcagcaaaagaagagccatgctgcatgctctggggtccctccaggtgaggcctgggcacccaagctccctatttgtcccgggcaccagggacccccagcccctttcttcagggccccaaggggaaactggagcccaggattggcagcgtggaatcaggggaccccascggactcttaccaaagatttgatggtgttcttcagttgactgatttctacggaccttgaatccaggactactgctcgttcttggcacgggctctgaggttcatgcagagaggaggaggtggagcaggagtcgggggagaggtagagagaacaatcattagggctggggtgtgtgggctgtctcagctggcagaggggcacccagtccctcctggag

SEQ ID NO: 181538 - DNA, 446 bp, Homo sapiens
ccagggcgtgtgtagcaaggactcgagcaggggtgtctggagaggagagagtcggcaaagagggcagcaaaagaagagccatgctgcatgctctggggtccctccaggtgaggcctgggcacccaagctccctatttgtcccgggcaccagggacccccagcccctttcttcagggccccaaggggaaactggagcccaggattggcagcgtggaatcaggggaccccacyggactcttaccaaagatttgatggtgttcttcagttgactgatttctacggaccttgaatccaggactactgctcgttcttggcacgggctctgaggttcatgcagagaggaggaggtggagcaggagtcgggggagaggtagagagaacaatcattagggctggggtgtgtgggctgtctcagctggcagaggggcacccagtccctcctggag

SEQ ID NO: 181539 - DNA, 446 bp, Homo sapiens
ccagggcgtgtgtagcaaggactcgagcaggggtgtctggagaggagagagtcggcaaagagggcagcaaaagaagagccatgctgcatgctctggggtccctccaggtgaggcctgggcacccaagctccctatttgtcccgggcaccagggacccccagcccctttcttcagggccccaaggggaaactggagcccaggattggcagcgtggaatcaggggaccccaccggactcttaccaragatttgatggtgttcttcagttgactgatttctacggaccttgaatccaggactactgctcgttcttggcacgggctctgaggttcatgcagagaggaggaggtggagcaggagtcgggggagaggtagagagaacaatcattagggctggggtgtgtgggctgtctcagctggcagaggggcacccagtccctcctggag

SEQ ID NO: 181540 - DNA, 498 bp, Homo sapiens
tcgctcctgctggaactctagggctgtttttctgccaatattcttttaactgttggaaagaagagcagtaatactcatgagaaccgtcagcccctacagccacatcctcctttacagtttttacaaaatacacttacacacyatctgatttaatgacaccaacaactgtacaaggtgttgtcacactcatttagtgactgagaaggattgatatcatggctagaaaaaaaaaaagaaaaaggcaatactggcactttgaaactcagtcttctgactccaagctctgaggttttgccaagaatcagcagctgccagggaccaaaaccagaggcagaggtagaaaagtaaacattaagtaggcaggaactgtatgccatgtggtttagagtcatacatcctcacacgtctgttagtgtgaagaagtgcaccagtacctctcaaacttttatatcaatgtgtcctcacggcagaaggcagcctttctcttaaatcagaatt

SEQ ID NO: 181541 - DNA, 383 bp, Homo sapiens
tgatgtggagatacgaaagagaatatcactgtcagccaccagcagtgccttttcagagaagagcaatggggaagaaattgagcagacaaagccagaatccccattagcaaacagaaagagggagctcaggataaccacatacattaataattcttgccccgcaaagggaagctctgtaaaataagttgtattacatctgtacatagcagtactttaaatataactctagcttaagtattttaagcatctccgtgatatgaacctaagggaataaactcaataaatcaatatttataagctctgttcacttrtgtcttgtggtttcagccactgatttcagaatatgcatgaaaaatatatttcttctgaatatttgatttcat

SEQ ID NO: 181542 - DNA, 599 bp, Homo sapiens
agagagtgtcctgtggtatacttgagaagaacgtgtattctgctctttttggtgaaatgttctgtatatgtctattagatctgattggtttatggtggtgttctttggctaaaactgagatgctgcagggccagttgtcaaagtcacagtgaaaaagcaaggttttcccaagctcttataatcacatcagttttagagttcacattaatccattcaaaaatatgtatcaggccaggctgtaatcgtagcactttgggaggctcaggcgggtggattgcttgagctcaggagtttgagaccaacttgggcaacatagcgaaaccctctctctacaaaaaatacgaaaaytagctgggcatagtggtgtgtgcctgtggtcccagctacctgggaggctgaggtgggaggattgcttgagccagggatgcagaggttgcagtgagcggagatcaagccactgcactccagcctgggctccagcctgggtgacagagtgaaatcctgtcttgggggtgggtggaatctttctatctgtctgtctgtctgtctctctctctctctctatatatatatatataattattttttaatttatatat

SEQ ID NO: 181543 - DNA, 545 bp, Homo sapiens
gaattcagacaaaatttgcctatgttctgctgttgtttgatctaatcttaatcacagtgagctcttcgttagctcaatatgtagtttgcccccaagtgtgcactgtttattactttgtaatatgccactatgagtactgacatttagagttgtttaaaggccaagaactggaaacagcctttcctccattttctgtgtattggtgatgggagtgataaccttttgggggagctttttaaatctcacagaagaggaaagtggcctcctctggcaggtatgtgcaggatagagtgtgtttcatctgttccggtgccaggaattagcagtgtattatgrtggttcccttaggatttctatgtgctctgggctcatgaagatattgcatcatgagctgcagcagttgcactctttttggatgacctaaaaagggcttatttctgaggaatgaaaggttcccatcgttgactgtggatgtggaaaacctttcctagcttagagcatttgtatctacaatacattttaaagtcagagttcatgttacctgt

SEQ ID NO: 181544 - DNA, 557 bp, Homo sapiens
attcttttcattgtaattaatattaagtcgttaaagtaataataaataactaacatttaggttcctgaaaaaaatggttaaattgaacatcaaatagtttgcatttatrtcacactgtacaatttatattttttaggcggctttactgtaagatttcattgaacaaatgcatcttatgatttcaaggtaaggtattcaaatatgcctttttaaaatgtaatgctgtattagtgattttaaaatatgtaaaaaaaaatgtgtgggaaatactagaaatgttatttgaaattaaccaattctgggtttgcttatttttttttttattttatttgccaaactgagaacaacagcctttacacattttctatttttctggacttgattcttaggaactttaattttgcacttttgcattcctctataaatgttaatgtcttagccaatgacatttttctagataaattcaaaagcttaacctaagtaatgtaatggtggcatttatgaaattgactcctggttctctctttaaattctttttattgtttatttctatggca

SEQ ID NO: 181545 - DNA, 389 bp, Homo sapiens
tgtttttataccagtaccatgctgttttggtatacctttctagtaaactttgcacttgatctaagccaaaaaagaccaggaagtgactgtagtataattttaagtcaggtaatgcaatttctccagttttgttttttgctcaggatggctttggctattctgtctcttgtgattccatacaaatttcaggattttwttttctatttctgtgaagaatgtcattggtattttgatagggattacattgaacctgtagattgctttgggtagtacagacattttaacaatattgattcttccaatccatgaacacagagtatcttttccttttctgtgtgtcttcttcaattttctgcatcaatgttttacagttttcgtggtagagatct

SEQ ID NO: 181546 - DNA, 365 bp, Homo sapiens
tttctgggttctctattctgttccattggtctaggtgtctgtttttataccagtaccatgctgttttggtatacctttctagtaaactttgcacttgatctaagccaaaaaagaccaggaagtgactgtagtataattttaagtcaggtaatgcaatttctccagttttgttttttgctcaggatggctttggctattctgtctcttgtgattccatacaaatttcaggatttttttttctatttctgtgaagaatgtcattggtattttgatagggattacattgaacctgtagattgctttgggtagtacagacattttaacaatattgattcttscaatccatgaacacagagtatcttttc

SEQ ID NO: 181547 - DNA, 368 bp, Homo sapiens
gaattctttttatatattgtttacttctacttgctaataattcactgaatatttttgtgtctatatatatattaaggtatattgttctgtagtttgtactgtctttagktacggtacctaatattagcttcttaaaatgctaatattagctctaatattagcttcttaaaatgctaatattggctctaatattagcttcttaaaatgctaatattggctctaatattagcttcttaatatgaattgggaagtttttccttttctagtttccagaagagattgttttgagtctgtgttaattcttttttaatgtttgatggaattatccagtgagttcatttggatctggtaatttctttttttttttg

SEQ ID NO: 181548 - DNA, 548 bp, Homo sapiens
aatgaacatgtgcttaagaattttttgtggtttttttttttgtctgtttgtttgttttagagatagagtctcactgtgtrgccatggctggcctttaactcctgggctcaagagatccttctgtatcagccacccaagtagctgggactacaggcatgtgccatggcatgcaaccgtgaattttctttatgatgaccaaaagtcacaaagaaatgggactattctgtttaaaaaaatccttgtttaggattataagaaaatatgcaatacatttttagaaaactatattatcagagttaaaatgtaaaaggctttaacacttgaagcggtaaggttaatttatttagaaccttcatcttatttagaatctatcatggcccagtgaaatgaaatacatgaggagttaacaaaacagaactggttttattttccattttggaagaaagaacaaaaagagtcttatataccaagattctaaggatatacaagcccagttctgcagcctcagccccagagattactgtaaaaatgctgatataagatgaaaa

SEQ ID NO: 181549 - DNA, 592 bp, Homo sapiens
ttgcgtggctctctaaattgtctcagctccaggtaaggtcaaatccttctcccatgatctggaccttcaggttcctcagtgagggtgtgtgtttgggggcagatgatccccctttctcactttcacagtttgggcactaacagtattccggctgtctcccgggtcctgcaggagcaatctgcttccttcaaaaggtctgtgggttctctcagctttcctggtatattcctgcagtagttcttggaccagaagttcatggtgcgagtctccacatgctgctctgtctgcccgagtgggarctgcaatttggtcctgcctcctatccaccattttttttcctagaaaaaaaatctttttattcaacacattttttgattaccagctatgtgccaaccattgtacttaatgtagaggttagcttggtaaataaaatggccaaaaatttctacttcatgatatttgcaatctggcatgtgagacagacaaacattaaagaaataatcatacaatttctaactataaactgtgacgtgaaatagaataacagtaatacctaattcagatttaggaaaaacagagagaatgcctctct

SEQ ID NO: 181550 - DNA, 592 bp, Homo sapiens
ttgcgtggctctctaaattgtctcagctccaggtaaggtcaaatccttctcccatgatctggaccttcaggttcctcagtgagggtgtgtgtttgggggcagatgatccccctttctcactttcacagtttgggcactaacagtattccggctgtctcccgggtcctgcaggagcaatctgcttccttcaaaaggtctgtgggttctctcagctttcctggtatattcctgcagtagttcttggaccagaagttcatggtgcgagtctccacatgctgctctgtctgcccgagtgggaactgcaatttggtcctgcctcctatccaccattttttttcctagaaaaaraatctttttattcaacacattttttgattaccagctatgtgccaaccattgtacttaatgtagaggttagcttggtaaataaaatggccaaaaatttctacttcatgatatttgcaatctggcatgtgagacagacaaacattaaagaaataatcatacaatttctaactataaactgtgacgtgaaatagaataacagtaatacctaattcagatttaggaaaaacagagagaatgcctctct

SEQ ID NO: 181551 - DNA, 411 bp, Homo sapiens
aagacttaaatttaagacttaaaattatgaaactactggaagaaaacattgcggaaatgctccatgatactggcctgggtacagaygttttatataagactcaaaagcatggacaaccaaagtaaaaattgacaagtggattacatcaagttcaaaagcttctgcaaagaaaatgaaacaatcttcacaaagtgaagagacaacccacagaacaggaggaaatatttgcaaaatatccatacgatatggtttggctgtgtacccacccaaatctcatcttgaaatgtatttcccataatccccatgtgtcgtgggaggtaattgaattacagtggcagttaccctcatgctgttcttgtcatagtgagtgagtgagatctgatggttttataagaggctttcccccccttt

SEQ ID NO: 181552 - DNA, 418 bp, Homo sapiens
ggtatggtatgaatatgtatgtcctaattttcctgtaagacagggagctcctgkaaggcagagagcagatctaattcatactgcaatttctcgcagtgcctaacaaggcattggacacagaggagcatttcctgtgctaacctttaggaagacttaccatatgccaggggagtgatggaagtggaagcatggaacccacccatgtgtactgctgctgagatttaaagagctagaagcacacctgagaaatgaggccatctaacaccttaacgatctaagaaaatataaatctttaagaccaccgttatattgtgggtcctgagcagcatacatttgggtagttcaacatatttagccacacatccagtttagtgggccaatcagtgcacacatgtaatgggattgtttgatcactcaa

SEQ ID NO: 181553 - DNA, 418 bp, Homo sapiens
ggtatggtatgaatatgtatgtcctaattttcctgtaagacagggagctcctggaaggcagagagcagatctaattcatactgcaatttctcgcagtgcctaacaaggcattggacacagaggagcatttcctgtgctaacctttaggaagacttaccatatgccaggggagtgatggaagtggaagcatggaacccacccatgtgtactgctgctgagatttaaagagctagaagcacacctgagaaatgaggccatctaacaccttaaygatctaagaaaatataaatctttaagaccaccgttatattgtgggtcctgagcagcatacatttgggtagttcaacatatttagccacacatccagtttagtgggccaatcagtgcacacatgtaatgggattgtttgatcactcaa

SEQ ID NO: 181554 - DNA, 418 bp, Homo sapiens
ggtatggtatgaatatgtatgtcctaattttcctgtaagacagggagctcctggaaggcagagagcagatctaattcatactgcaatttctcgcagtgcctaacaaggcattggacacagaggagcatttcctgtgctaacctttaggaagacttaccatatgccaggggagtgatggaagtggaagcatggaacccacccatgtgtactgctgctgagatttaaagagctagaagcacacctgagaaatgaggccatctaacaccttaacgatctaagaaaatataaatctttaagaccaccrttatattgtgggtcctgagcagcatacatttgggtagttcaacatatttagccacacatccagtttagtgggccaatcagtgcacacatgtaatgggattgtttgatcactcaa

SEQ ID NO: 181555 - DNA, 510 bp, Homo sapiens
cacccaggctttagagatttmcatgagaatcagcaaaccttattttagcccaatatagagaatgtgcaatgcatggagggaactctggactgattccccagataagtcatttatttctttcctcaaagaaaaatccaatattctgagatcagatgcatattgaagctttggtggaaaggaaccagacaggggctggattaacatgttcccatcaacgtctcccccacacagtgatctgtgaagtgaagggaacctccgtggtcgaatgttccatattgggcaggagcagtgcctcccacacagtcattcccacggaaggcacacaccatcctgggatgggaagcttcccttcttatcagcacatttggtctcttaactcaatgtcactaaataatgtgtcagagagctgaagccacctgcaccccagggcccctccaggtctgtgctcgcctgctggacagggatgggacaggggcttccatagctgtccaggggaggacaatggccaac

SEQ ID NO: 181556 - DNA, 495 bp, Homo sapiens
agggaaagaaggcccaaaataaaggcatctctctggaaatcagaaacccaaattagttctacaccctggctgcacccacttctccgccaactccctgcaggtgaacaggagtgagctctgttcccacccccaaagagacaggacctgacactgcctctgcatgcacagagctcagaccttggatgccacagccagaaaggaaaggccagctggccctcccccsaccccctgttttttcagaaggggaaatttaggttcacagatatgccagctctctttccaggtatattgtaggattgcatgtccccacctcctttgaactaattgtgaccgtgtagctttcctggaccaaggaaatctgagtggaagtaaagtgtgtcacttctgggtggaagctctcgaagccatgtactcatgtacaattctcatattccctttttgctgcctcagtgatggtgaaggcccaattggggcgattctgcctagccagggttt

SEQ ID NO: 181557 - DNA, 495 bp, Homo sapiens
agggaaagaaggcccaaaataaaggcatctctctggaaatcagaaacccaaattagttctacaccctggctgcacccacttctccgccaactccctgcaggtgaacaggagtgagctctgttcccacccccaaagagacaggacctgacactgcctctgcatgcacagagctcagaccttggatgccacagccagaaaggaaaggccagctggccctcccccgaccccctgttttttcagaaggggaaatttaggytcacagatatgccagctctctttccaggtatattgtaggattgcatgtccccacctcctttgaactaattgtgaccgtgtagctttcctggaccaaggaaatctgagtggaagtaaagtgtgtcacttctgggtggaagctctcgaagccatgtactcatgtacaattctcatattccctttttgctgcctcagtgatggtgaaggcccaattggggcgattctgcctagccagggttt

SEQ ID NO: 181558 - DNA, 612 bp, Homo sapiens
aacacttgtgggttcactagagctttagatcaaagtgtacccattttatggatgaaggaaaacaaaaggagagttgtctaaggccccacagctagtaagccacacagtcaggactagaatgctgaccttcagcaatctagagactaatggaagaatgcaatgagctaaccgatccatgaccagagtagtacctgcacctggatatggggacagaaagagaagaggaggaggaggcaggatggaaagctggtcctgtccacctgcatgagccatgagcataracacgtcatcacaccctctgagccaccaatgcctcatactgaaaatggagataataactgcgtcatcagcatcaagtgaaccaaagccccttctgaaacagaatctactctgttatctcagttgtgtttttaaaaaccatttatccctcagtgtgtgtgtctgtaaggtcatttctccgtctcttatctatctaccgatctgtctaaacacaggaacaatgtaaacaaaacactcgtgtatttttctgggtggcaaggatacaggtgattttaattttctttctgcatttctaaattttcaaacgttcctgtaaagaaaagagcatgtgtt

SEQ ID NO: 181559 - DNA, 458 bp, Homo sapiens
cacctcactatgggtcccatttgaagtcagctctctgctcagatgccgccccccgactggaagaagggatggtttcagtttccaatcaacctccacaacactttgtctacccccctcgaacagtgctcactactgtcagccttaaattatagctatttatgataaaataaataataagggtggttgttgagtgcagccaggctctcttatttgcaggccaggcaccttgttgaagccacaygaggacctggttcatgtaggcttcaatgggtcctttttacaaagaggaaaacagaggtgcggagatgtttatagatatgcctccagggtgcgaggctagtttatttccgagccagaggcagtgcaccttaattatgagagctcaatgcttggatctgagagcaccaaactctgggcctaggacttgcattcattccctcattcattcattcactcgc

SEQ ID NO: 181560 - DNA, 458 bp, Homo sapiens
cacctcactatgggtcccatttgaagtcagctctctgctcagatgccgccccccgactggaagaagggatggtttcagtttccaatcaacctccacaacactttgtctacccccctcgaacagtgctcactactgtcagccttaaattatagctatttatgataaaataaataataagggtggttgttgagtgcagccaggctctcttatttgcaggccaggcaccttgttgaagccacatgaggacctggttcatgtaggyttcaatgggtcctttttacaaagaggaaaacagaggtgcggagatgtttatagatatgcctccagggtgcgaggctagtttatttccgagccagaggcagtgcaccttaattatgagagctcaatgcttggatctgagagcaccaaactctgggcctaggacttgcattcattccctcattcattcattcactcgc

SEQ ID NO: 181561 - DNA, 527 bp, Homo sapiens
gatgtagccttggcccctggcaatcattttctgtttcaagtgttcagtttggtgtagaattgtagttcagtggatgctatcagaagaaaaaggacagagtgtcacgtggaaaattggagataaactgataactccagggttagaggaactgactcatccgcccccactggcttgtggtggaggacagtctccctccttctctcttttgggccatattctggctcagaagtcagtctatgtaatttctggaagtgtcaatgtttttcytcaccccatagaacacatgtagaacagagcttttccaccataagagctgccaggtacctcagagttcagccttgtcactgcatggaataaattgggtggtcatgcgcaagacccataacttcagagcctcagtttatgcatataaaagatgggaatatcagtgcctgccctgtctgcctcactaatttgccatgaagactaacagggctgatgagaagacagtgcactctgagtgagagggaaggggcttgggccatcac

SEQ ID NO: 181562 - DNA, 635 bp, Homo sapiens
atattgtatataacatacccaggacagtttctcctacaaactatcccctcataaatgttagttccttcatatttaaaatactttgtaccaacttgagaaagcagtttgcatatagattctggattctgttataatatttcttctctttcattataaacacagtctcacatagtattttatttctaatacagtcctgaaaaattcctacctgtgtttcatgattccaaacacacacactgccattgtaaagacttgccaacatccatggctctgtaggatgcagatccacactcttaactcgatcagatctagcagttagctttcttttgatatcaagtcgcagaggctaaaaagaaacattaaaaaaattaaattgctaagccaaataaaatatgtttgagattttaactaaataagtgcatgaataggcctacaaaacaattcagctactactttgctaagcttttgaaacagtttcaagtctaagcacttatttcttcatttacacaycaaaaaaatcagaatattcaacattttaagatttacagcagtggtcttcaagctttttgctctaaggattcctttatagtccttaaacactttgaggacccctaagagcttttgtttatgtgagt

SEQ ID NO: 181563 - DNA, 544 bp, Homo sapiens
ttagctatccctgctggtgtctcagtagtcacatgcccccaagtccacccagttcagcactaccactcacctaagagttcagtccttatggcctagacagcctttcaaatttacttagagacccagagccctttagcccatcatggcaattgacstctggggattagtgattcccctctggctagggctggtccaaatgcttcctctgtgggtggatataagctgagtttggtttggtttttctttctggtctaacagacagccttgagttcatcaatgcctcacacttgctatgctctccctctccccagcacccagaaatactctccacaccatgctgcactgctgcggatgagggaaggatggtgtcggggcttcaagactgtttttcctacctcttcagtgcctctttcagtgatatgaagttaaaaccaggtactatgagtgctcacctgatttgtggttcttatggaggtgctttgctcgtgtatatagttgttaacttggattccttgcaagtgggacaataggtggagccttgtat

SEQ ID NO: 181564 - DNA, 584 bp, Homo sapiens
gctgggattataggtgttarccactgcgcccggccagtgctcacttcttaatacaatgctttttaacctgtttaaattcatgcccctttggttaaatgtgaaaattctgccccatatattaaacactacatctttcacaggtttccagacatcaagtagatattaagtttaattttctttatacatattatccatttttaaagtttccaaatatgaaagcatattgactatgcttttgaaaagtgcagtaggctttccagagatttgggtcaacctgactaggaaggaggctccttattaatagttacagattatggcaaaactgaagaggggtggatccaacagccattctgaaccttctcctcattgccatccgcttgaaacattcactagctcttccatatttgcttgcagcgagggatggccatgtgacatcgttgttgtagtagtgagatgcaagtagaagtctgctggtgaggggttctggaaaacctttgcttacctaataaaaaggatagacttagctggtttcatctcttcatgccttcttgacatacagaagtttgccaccttcagcaacctca

SEQ ID NO: 181565 - DNA, 579 bp, Homo sapiens
agcaacatataaaaaggattatataccataatcaagtgggatttatcccaggaaggccagattggtttaacatctgaaaaatcaattcatgtaatacgctctattaatagagtaaagaacacaaaccacacgatcatctctatagacacagaaaaggcatttggcaaagtccaagagggaggagagggaaaggcactccagacaggggaaacaacctaaacaaaggcacaaggggaaaagagttttatttagaggatgtacagggaataaagaagtattttcagaaaccagatgggtgtcaatctatagagagccttgaatataccagtctaagggatcaagagggagccatgagagtgctgagcaaagctttgacataatttaaatgacgctttaggaagctaaactggacaaaattatccagtgatccatttatatacaccaatatgactccaagatacagagtaacaatcaacacaattttctggaggataaactgcaatckaatttactcccagcgtggatccaggtttcgcagctgaaagtacgtatcagttttgaggccctctttaagataaa

SEQ ID NO: 181566 - DNA, 579 bp, Homo sapiens
agcaacatataaaaaggattatataccataatcaagtgggatttatcccaggaaggccagattggtttaacatctgaaaaatcaattcatgtaatacgctctattaatagagtaaagaacacaaaccacacgatcatctctatagacacagaaaaggcatttggcaaagtccaagagggaggagagggaaaggcactccagacaggggaaacaacctaaacaaaggcacaaggggaaaagagttttatttagaggatgtacagggaataaagaagtattttcagaaaccagatgggtgtcaatctatagagagccttgaatataccagtctaagggatcaagagggagccatgagagtgctgagcaaagctttgacataatttaaatgacgctttaggaagctaaactggacaaaattatccagtgatccatttatatacaccaatatgactccaagatacagagtaacaatcaacacaattttctggaggataaactgcaatctaatttactcccagcgtggatccaggtttcrcagctgaaagtacgtatcagttttgaggccctctttaagataaa

SEQ ID NO: 181567 - DNA, 660 bp, Homo sapiens
agatctattgcacagcatagtaactgtatttaacaataatatattgtatacatataacatcactttgtactccataaatatatacaaatataatttgtcaatttttaataaaaaattaaacaaaattatgtatctgggaaaatacatctgaatcacagaaaaattcttctatagattacataatctaaataattgataccacagagttacagatattgagtatttcacatgtggaataaaagatgaattccaattacagtgaatagtacattgaatatttctttcttatttttgagcttagtttctttcatggaaatgtatacatatatttcctatgtaaaacagagtttataaagtacttttttattttttaatctcttttctgttttattgctattatactactaacattgcattcataagaggtcatccttcagatagcagtgaggatgaatgattatttggctgtccgtcaataaagttgatgatggtataattttaaaaacgaacaatactcaatttattgagtacttagtagaggtcaggcacaaagtttaagtgctttacaataaattatctcacttagttctcaaaaaccccttatatataaactatcatcaatttytactgtaaaactaagaaaattgaagttaaaaatta

SEQ ID NO: 181568 - DNA, 587 bp, Homo sapiens
cataacattcaagcaaatcatacttgaacaccaaaggcaaggaagaaacaatctttaatgaaaaggttactaattcatctcttctttataaaaactaataatggatcattattgtggtgttagaaaggttttcatatcttgctcacacctcccagctcatgaagttaaaagctatttagcatgtaagtgagatattctgttcatgattctacatttataccatagatttaaatatggatagcaaatcagcacatatctccaattaaccagtgctgatatatatttgagtaatcagtgtccacagcaatatggtaatttctgattatgcatggataaacatagttgtccccttagtcrttgaactttactataataaatatagccctttgagaatggtagtagataatgaactaatgggggatttattgtagcaggctgtaaaatagcccgatggaagatatgaaaaaatcaaaacaccaaccatttccaggagcagtagtagacaggccttaaactattgatttgacagtttgggccattagaatgaaggcccaactaagaagcagatttcccagtctgcagagcct

SEQ ID NO: 181569 - DNA, 409 bp, Homo sapiens
cttcatatctcccttcttgccgactctgtctacacagacatacaaaatgacatgaagaagaaggcagtcttggtcctcaccccggtatctgtttctttgcagaaagcacagataagtggtgaatgttctttttctgattttcattatgtggactggatggaggctttcaaactggtgccatactgctgcagggcctaaagggaggcccatctttatagctgatccgctacaacccyatgtattagtccgttttcatgctgctgataaagacatactcgagactgggtaatttatataggaaaaaaaggtttattgacttacagttgcacgtaattggggatgcctcacaatcatggcagaaggtaaggaggagaaagccatgtcttacacagatggcagcaggcaaaaa

SEQ ID NO: 181570 - DNA, 583 bp, Homo sapiens
ctatttttttaattccaaaagtcatgaaaattaaaagactcttgatcatcacttaggatgctatctgaacacaggaagttagactctcctgccttattaattttttagctggaacttattattttgaaggaacatgaaacacaaagctaaaatatttatagagacattaaaatatttatacatgcaaaagcaaaatgaccacatttacttccctcawaacttcctaatgagcaaaaaagaaatgcaaaaaataatttcccttttatgctctttgcttcaatcaaatgatcaaacaaactgattattattaattttttttggcaagtgtgggtgccactaaatctgccgtccttgggttttgtctgtgcgatggtccatgttggtgtcccactcgcaacctcttgacctactggagcactccattgcccaagagcacagtcccaggagatcaggctgagggcagactttatgtgacaccatagaactatatctttgcttgcctccttctctttctctctcctgtttctctcatctcttacagattccccaagagtacttcctctttaaatcttgtgcccctaaa

SEQ ID NO: 181571 - DNA, 404 bp, Homo sapiens
atgccattctttaattctctctgtccactgaaatttaaccaattttctatcttacgtagtaatctcttcttgctcacatgactcaagggacatatctcaacccagcttcyttctgccccagagctgggatcaacacagtgccactgagagcagtaatgaccattcgaagaatgcactggcaggatctgcagagctcaatcttttctttatactctttgccatttacactcaagaatgacatcaccattttgggagacttacactggcaattcatcacttccattcaagagtgttcacaagcatgtgtccctgtggttctgggaacaaatttagtgtgaagaagtgcatagcctggttgaggtggggtagggagaggagcaaagcagggttaatatatatgatac

SEQ ID NO: 181572 - DNA, 586 bp, Homo sapiens
gctagcttaaaacatttccatctatatgctgtgcattagttttctactgctgcataacaagttaccataaacttaacagcattaaacaagacacatttgatagctcactcttctgtaggtcaagtctatgtgggctccactgggttctctacttaggttctcataaatctgaaatcaattattggccagacttggctctttcctggaggagccaggaaaaacctgattcccagctcattcagcttgttggcagaattcagttccttttgcttgtagggctgaggtccctgtttcctttctggaaatggccctggccaccttargtcttttcaaattgtctattccatgtcagcaaaggagagcatccctgcattgaatccctctctagcttccaatatcgctgacttctactgctttttaaaggactcatatgagtaaattagtaccacccaataatctttcttttgctgctcatcatagtcacaggttccacccagaactaaaggaaagaggattacacaagagcaagagccataggaggtcattctcggaattccatctcacatatactgttctcagagtcatg

SEQ ID NO: 181573 - DNA, 311 bp, Homo sapiens
cattagctggagtgacagggacaattggactatcagctggggtgacagggatagctggactctcagctggggtaacagagagtactggactatcagctggggtgacagggacaattagatcatcagctgtggtgacaggtataaatggactatcagcaggagtgacagggaccactggaccatcagctgaagagacaggggcaactggaccatcagctgaagtcacagggacaactggaccatcaggtggagtgacagggacaagtggaatatcagctgaagtgacaggracaactggcctatcagctgaa

SEQ ID NO: 181574 - DNA, 585 bp, Homo sapiens
cctggtaggctgcagcgagcccacactccagcctgggcaacacagagagaccctgtcgaaacaaaaacaaaaacaaacaaaacaaaacaaaacaaaacaacaccttgtaatcttctttaaaagtctgtgtaatgaaaaggaactccctaaaatcaacacacatttattgagaacttactatgtcccagaccagccaggcaggcccatgtccgtgacttctgacttagtttcccaggactgtccyaacacattgccacaaactttgtggcttaaaacaacagacacttattctctaagagtttggaggccagaagtcctcaaccaacgtgttggcagggccaggctccccgcaaaggctcacgggagaatccatcccatgcctctcctagcttctggtggttgccagcaagccttggagttccttggcttgtaaatgcatcagttcaatctctgatttcatattcacattccgttcttctctgtgtcctaaattttcttctcctttctcataaggataccagtcatgggatttaggggctacccttagtccagataatctcatcccaaatccctgacttaatcaca

SEQ ID NO: 181575 - DNA, 585 bp, Homo sapiens
cctggtaggctgcagcgagcccacactccagcctgggcaacacagagagaccctgtcgaaacaaaaacaaaaacaaacaaaacaaaacaaaacaaaacaacaccttgtaatcttctttaaaagtctgtgtaatgaaaaggaactccctaaaatcaacacacatttattgagaacttactatgtcccagaccagccaggcaggcccatgtccgtgacttctgacttagtttcccaggactgtcccaacacattgccacaaactttgtggcttaaaacaacagacacttattctctaagagtttggaggccagaagtcctcaaccaacgtgttggcagggccaggctccccgcaaaggctcacgggagaatccatcccatgcctctcctagcttctggtggttgccagcaagccttggagttccttggcttgtaaatgcatcagttcaatctctgatttcatattcacattccgttcttctctgtgtcctaaattttcttctcctttctcatraggataccagtcatgggatttaggggctacccttagtccagataatctcatcccaaatccctgacttaatcaca

SEQ ID NO: 181576 - DNA, 229 bp, Homo sapiens
aatgtaaccaaataataattacctgtgtataaatatttttcttagaaaaaaggcagtgttttgttttcagtttgataatctgtgatcatagaaatcatacaygattatttaaaagagcactttacaatatgtctcacaagagaacatttactctgacttaaatttctaagataagcctctataggaataacatctgtttcttaaacaaaatttaattatcatggcattt

SEQ ID NO: 181577 - DNA, 461 bp, Homo sapiens
gtagtagcagggtttatttaaatatgaagtacactctgaaacacaaggcagagtgggctgcttaaaagaatgagccagcagcagctagtgctgggggactgcttttatgagaatcttacctgattattcatgaaggggcrtgaggggtgtattacttgcatgcatgtttcaggatgtctctttgggcgcgcatgctctgtcgttgtacatgctggtacacacattgtatgtctcattagcatttaaaatctccacccagggatgtgctttttactcttataatgagcaaaagtctactccaggacaattttttggaggagtgtgcatgctcctcagtgaggaaagtccctaacctgattatctccagctggggcctggtaagtccccttcaaggcaagaggagctcaatcacaaggccagaagtagccagtgtagctgttgtctttttttgctgcctgtca

SEQ ID NO: 181578 - DNA, 461 bp, Homo sapiens
gtagtagcagggtttatttaaatatgaagtacactctgaaacacaaggcagagtgggctgcttaaaagaatgagccagcagcagctagtgctgggggactgcttttatgagaatcttacctgattattcatgaaggggcgtgaggggtgtattacttgcatgcatgtttcaggatgtctctttgggcgcgcatgctctgtcgttgtacatgctggtacacacattgyatgtctcattagcatttaaaatctccacccagggatgtgctttttactcttataatgagcaaaagtctactccaggacaattttttggaggagtgtgcatgctcctcagtgaggaaagtccctaacctgattatctccagctggggcctggtaagtccccttcaaggcaagaggagctcaatcacaaggccagaagtagccagtgtagctgttgtctttttttgctgcctgtca

SEQ ID NO: 181579 - DNA, 509 bp, Homo sapiens
taatcaccatggtgatcccagtcctcttggtgtttcagctacgactggggtggctcctggcacaacccttgcccctggcagttccagtacaggtgagtctgcaggttggyagggaagtcttcagagctcctcccataatttgatatcttctctggtgcttgtctttttaagagtaatatcttattcatttcatagtgattgaatatttttcaaatatgtcttttctgtttttctgtctctcagaggccacaacttccataggaggaagtgcatcaacaagaggaggaatagccacaggtgagcattgctgggtcattgcactcatttgccaataatatccaataaagactgtggtgcgaaatgaatccatgtgactggattctcccatattgagtactgatcgagaacatattaccgttgttcattgatgaaagatcggaaactcaaatttcattcttatttcctgtgctgtaagcagattctccttccacacccaaggcagtcgtaca

SEQ ID NO: 181580 - DNA, 623 bp, Homo sapiens
attgcactcacctggtaataatattcaataaagcctgtggtttgaaaagtatccatactctcatttctcccatattaacattgttaggaaagttcctaccatttttcactgactaaatatagaatctcaaatttcattcttattttttgtggttgaacagactcttctattgccccccaaggaaaacatgcagccatttgactgacagttacatagaaaatctagagttagcttctattttcctattcatgaaatattgagaaaaggaagcctaataagttaaaaaaaattgggcaaatataccatgggaagaatattatttgagaagtgtagagattagcttttgacatttaaaggccaatttattgaaataataaataagtatacagcctgtgtctatttatttgcttaatactcatttcccacttcatggtaatgaggtaatgacccaccactgccccatccctttcttaatagctascagtggggcattctctgggaagactctggaacctgggattgacaacacaggcaagtcaaaaagcacacagagaatgctacaccatggctgctcagatggcagtctcctagggcaacgtaaccctgtactccccatactgcag

SEQ ID NO: 181581 - DNA, 623 bp, Homo sapiens
attgcactcacctggtaataatattcaataaagcctgtggtttgaaaagtatccatactctcatttctcccatattaacattgttaggaaagttcctaccatttttcactgactaaatatagaatctcaaatttcattcttattttttgtggttgaacagactcttctattgccccccaaggaaaacatgcagccatttgactgacagttacatagaaaatctagagttagcttctattttcctattcatgaaatattgagaaaaggaagcctaataagttaaaaaaaattgggcaaatataccatgggaagaatattatttgagaagtgtagagattagcttttgacatttaaaggccaatttattgaaataataaataagtatacagcctgtgtctatttatttgcttaatactcatttcccacttcatggtaatgaggtaatgacccaccactgccccatccctttcttaatagctaccagtggggcattctctgggaagactctggaacctgggattgacaacacwggcaagtcaaaaagcacacagagaatgctacaccatggctgctcagatggcagtctcctagggcaacgtaaccctgtactccccatactgcag

SEQ ID NO: 181582 - DNA, 584 bp, Homo sapiens
aaattcaaaagtgtgacaacagccctgttgacagttctggaaagaaacaggtggtgctctgcgcattgctggtgggagcacaaaatgttacagcccggaggaggataacttggcaaaatctaacagaattacagactcgtttatcctttgacccagaaatcccgcttttagtgctcctgaagctagacraccaaagtataaaataacatatgtataagcttttcataccggcattgtttttttatagaaagagcctggaaacaactcattaaagacacattgaataaaagatgacaaaaagcagcactagaccatcctaatagaagagtgagaaagatctctatggactgatctagttatttccagaatttattgtaaaggaaaaaaacaaatcagaattgtatataccatttatacctttatgaaaaaagagggatgtgtgtatgtgtgtgtacatatatgtatatatgttttgtaaggatatgaattatatatacatatgcaaatatgtatacaaaaaacacagaagataaactaaaaactagtgaaaatcattacttataggaaacaaatcagaacagcag

SEQ ID NO: 181583 - DNA, 555 bp, Homo sapiens
aggttgttaaagcttatttgcttcatgtctatgtttaaggttgtgaagcttygagtaaaagagagaaaaaaagacaaatttcattctcaaacaatgatccagctgtttaaaaagttctactctgggtaaaagcagaatgtagttttgtatgtgcataataatctatcagataagtgaaggaaaaaagcataaaattgttaaaagattagaaggaaatgtagcaaaagttaatatagctgtttctaagggtggtataaatagtaagttttcatgtttttataattttctgtgttttccaaaatttttaaagcaatcaaaataatttaatgcaaagaaattccaaatgaacaatcttagcctcaatgttcacctaacaaaaccagtgtcaatggctcgagcaggggataaaagactataaagaggtggagacggagtgcttcaggcagaggactaccacggtcaaaggatcagaggtgacaaaaagaataactttcataggaacagaaatttcactctgacctcaatgagtccaggaaagacactggacagaataaa

SEQ ID NO: 181584 - DNA, 552 bp, Homo sapiens
ttgttaaagcttatttgcttcatgtctatgtttaaggttgtgaagctttgagtaaaagagagaaaaaaagacaaatttcattctcaaacaatgatccagctgtttaaaaagttctactctgggtaaaagcagaatgtagttttgtatgtgcataataatctatcagataagtgaaggaaaaaagcataaaattgttaaaagattagaaggaaatgtagcaaaagttaatatagctgtttctaagggtggtataaatagtaagttttcatgtttttataattttctgtgttttccaaaatttttaaagcaatcaaaataatttaatgcaaagaaattccaaatgaacaatcttagcctcaatgttcacctaacaaaaccagtgtcaatggctcgagcaggggataaaagactataaagaggtggagacrgagtgcttcaggcagaggactaccacggtcaaaggatcagaggtgacaaaaagaataactttcataggaacagaaatttcactctgacctcaatgagtccaggaaagacactggacagaataaa

SEQ ID NO: 181585 - DNA, 417 bp, Homo sapiens
tcagaaacaatattccttacgctgctgtctcgatctttcttatccttyccaaatgctgggttatgtaaattgacctctttcattgctaaaagattttgaccactatgctttctaacctaaaataaagaaaaacacaacaacaacaaaaggaacagggtaaagaaggagaagatagaaagaggaagaaagagatagactaacaaagtcacatgagtaactaagtcatataaataagtcacagagcatttaaagttccagctgtatttacattaagctcagctcaaaacactggtatcccctgggtcagtctgcaatacttagtagcattttttaatttagagattgcatcatgcattgggagaaactattttgaatacctttgtgagagattaataatgccttttgtcttaaaaagtc

SEQ ID NO: 181586 - DNA, 417 bp, Homo sapiens
tcagaaacaatattccttacgctgctgtctcgatctttcttatccttcccaaatgctgggttatgtaaattgacctctttcattgctaaaagattttgaccactatgctttctaacctaaaataaagaaaaacacaacaacaacaaaaggaacagggtaaagaaggagaagakagaaagaggaagaaagagatagactaacaaagtcacatgagtaactaagtcatataaataagtcacagagcatttaaagttccagctgtatttacattaagctcagctcaaaacactggtatcccctgggtcagtctgcaatacttagtagcattttttaatttagagattgcatcatgcattgggagaaactattttgaatacctttgtgagagattaataatgccttttgtcttaaaaagtc

SEQ ID NO: 181587 - DNA, 582 bp, Homo sapiens
aacactcccctcctggatggtgtcatccattcccatgatttcaaacactctttcaaccctgtcatcatgatctcagcccaggcattgctcctaacttccagaagttttagccacatggatattccacaagtactctccatactacccctaaactcaaagtcattagcctcctccccaggtctattcttcaccttatatccccgatcttgwctcatggcaccacaatattttcagtcttccaagccacaagactgggagtcatcaagacacatactcctcttttcacactcctccactgtcaatcaagagctcttagtgttttctatttcctgggcaacgttgggattcttttgaacaccaggcagctaggtaaccccactgctcctcccatccttgtaatcctttgtcatgctcaagatataaatccctctttcatctacctctccaatattctcattctcatacggctttctcattcctttcccctgagctgattacctatggctcctctccctcccaaattttgtgctctgacattaataataaatgttccttgataaatagtattctttaccttcacga

SEQ ID NO: 181588 - DNA, 383 bp, Homo sapiens
ctctgctcctcctcctcttgtggagggcctgacatcaggcaggctcgcctgcagttatcyggaggcctaaccgtctccctgtgatgctgtgcttcagtggtcacgctcctagtccgccttcatgtttcatcctgtacacctggctctgccttctagatagcagtagtaaattagtaaaaatactaatagtccctgatatgcggaaataatggcataagctgtctttctctctgtctcctctccctctctgcctcggctgccaggcagggaagggccccctgtccagtggacacgtgacccacgtgaccttacctatcattggaggtgactcacattctttaccctgccccttctgccttgtatccaataaataacagcgcagc

SEQ ID NO: 181589 - DNA, 398 bp, Homo sapiens
taaaaatactaatagtccctgatatgcggaaataatggcataagctgtctttctctctgtctcctctccctctctgcctcggctgccaggcagggaagggccccctgtccagtggacacgtgacccaygtgaccttacctatcattggaggtgactcacattctttaccctgccccttctgccttgtatccaataaataacagcgcagccagacattcggggcactactgttctccgtgcattggtggtagtggtcccccgggcccagctgccctttctcttatctctttgtcttgtgtctttatttcgacactctctcatcgccgcacacaggggagagacccaccgaccctgtggggctggtccctgcagggttataggcatgagccaccatgccc

SEQ ID NO: 181590 - DNA, 383 bp, Homo sapiens
ctctgctcctcctcctcttgtggagggcctgacatcaggcaggctcgcctgcagttatccggaggcctaaccgtctccctgtgatgctgtgcttcagtggtcacgctcctagtccgccttcatgtttcatcctgtacacctggctctgccttctagatagcagtagtaaattagtaaaaatactaatagtccctgatatgcggaaataatggcataagctgtctttctctctgtctcctctccctctctgcctcggctgccaggcagggaagggccccctgtccagtggacacgtgacccacgtgaccttacctatcattgsaggtgactcacattctttaccctgccccttctgccttgtatccaataaataacagcgcagc

SEQ ID NO: 181591 - DNA, 424 bp, Homo sapiens
agtaaaaatactaatagtccctgatatgcggaaataatggcataagctgtctttctctctgtctcctctccctctctgcctcggctgccaggcagggaagggccccctgtccagtggacacgtgacccacgtgaccttacctatcattggaggtgactcacattctttaccctgccccttctgccttgtatccaataaataacagcgcagccagacattcggggcactactgttctccgygcattggtggtagtggtcccccgggcccagctgccctttctcttatctctttgtcttgtgtctttatttcgacactctctcatcgccgcacacaggggagagacccaccgaccctgtggggctggtccctgcagggttataggcatgagccaccatgcccgggctgctttgttcgttttcaaaa

SEQ ID NO: 181592 - DNA, 424 bp, Homo sapiens
agtaaaaatactaatagtccctgatatgcggaaataatggcataagctgtctttctctctgtctcctctccctctctgcctcggctgccaggcagggaagggccccctgtccagtggacacgtgacccacgtgaccttacctatcattggaggtgactcacattctttaccctgccccttctgccttgtatccaataaataacagcgcagccagacattcggggcactactgttctccgtgcattggtggtagtggtcccccrggcccagctgccctttctcttatctctttgtcttgtgtctttatttcgacactctctcatcgccgcacacaggggagagacccaccgaccctgtggggctggtccctgcagggttataggcatgagccaccatgcccgggctgctttgttcgttttcaaaa

SEQ ID NO: 181593 - DNA, 424 bp, Homo sapiens
agtaaaaatactaatagtccctgatatgcggaaataatggcataagctgtctttctctctgtctcctctccctctctgcctcggctgccaggcagggaagggccccctgtccagtggacacgtgacccacgtgaccttacctatcattggaggtgactcacattctttaccctgccccttctgccttgtatccaataaataacagcgcagccagacattcggggcactactgttctccgtgcattggtggtagtggtcccccgggcccagctgccctttctcttatctctttgtcttgtgtctttatttcgacactctctcrtcgccgcacacaggggagagacccaccgaccctgtggggctggtccctgcagggttataggcatgagccaccatgcccgggctgctttgttcgttttcaaaa

SEQ ID NO: 181594 - DNA, 440 bp, Homo sapiens
tctggggggtgttcccccctgtaggcgacctcaaataagaacgtcagctcctcccagagttttcagctgcatgaccctcaattttaacatcagctcctctccaggtctgcagctccatgaccctaaaaatacatgagtcagctcctccctgaatcttcagctgtacgaccctcaaactacaacatcagctcctgtctgcacctccagctgcagrgccctcaaactagaatatcagctcctccccgagtcttcagctgcacgaccctcaaactagaacatcagctcctgtacagatttccaactgtagggccctcaaactagaacatcagctcctccccgagtcggcagctgcaagaccctcaaattaccaactcagctcctcccggagtcttcagctgcatgaccctcaatctcgaacatcagatactctctgggtctgc

SEQ ID NO: 181595 - DNA, 246 bp, Homo sapiens
ggtctgcagctgcaagaacctaaaattagaacatcagctcctctctgggtctgcagctggaagatccactagctagaacatcagctcctgtccgggtctccagctccrtgaacctcaatcaagattgtcagctcctccctgagtctccagctgaaagaccctcaacgcgaacaacatcagctcctcgaagtcctcaactgcatgaccctccaactacaacatcagctccaccccgagtcttcagct

SEQ ID NO: 181596 - DNA, 246 bp, Homo sapiens
ggtctgcagctgcaagaacctaaaattagaacatcagctcctctctgggtctgcagctggaagatccactagctagaacatcagctcctgtccgggtctccagctccgtgaacctcartcaagattgtcagctcctccctgagtctccagctgaaagaccctcaacgcgaacaacatcagctcctcgaagtcctcaactgcatgaccctccaactacaacatcagctccaccccgagtcttcagct

SEQ ID NO: 181597 - DNA, 246 bp, Homo sapiens
ggtctgcagctgcaagaacctaaaattagaacatcagctcctctctgggtctgcagctggaagatccactagctagaacatcagctcctgtccgggtctccagctccgtgaacctcaatcaagattgtcagctcctccctgagtctccagctgaaagaccctcaacgcgaacaacatcagctcctcgaagtcctcaactgcatgaccctcmaactacaacatcagctccaccccgagtcttcagct

SEQ ID NO: 181598 - DNA, 568 bp, Homo sapiens
gtataaagcattaactctttttggttccttcagatatgttgttgcattctaccttaacaataataagtgtagtactgtgacaccttcaaagacatggtgcctcctccaagcctgaaatactctgtggttcatcttttccctatgagtttgatcctacggctcagaaggtgacactttttacaatacaacttcattcattttagagcttgctttctctgawgatttgggatcttacctattttgccaccatttattaatcttagagctcctcagacacaaggttttcatttaatatttaactttggcccagagacatttttaagtttctccagcccaagtcttggaaaagagctaaggaaatgtagccaggagaactctacaacaatgtttttaaaacctcatatgtccagatttaaaactacatacatttatcttttcttcaggaacagcaataactctaagctgacaagatttttattaatattcttggtaacagctggtggacccaacatgtttttttggaaaaagaaagaaacctcaaatacctttcattcacccgtgatgacct

SEQ ID NO: 181599 - DNA, 286 bp, Homo sapiens
tcatttgcaataaatgcaacattgcggagcaggatgttcataatgggggaggttgtgccagtgtgggggtaggaggaatatatgggaactttgtactctcccatatattcctgtaaacctaaaactgctctaaaacataaagtcagtttttagaaattaagtgatacacggcagaatgarataaaattagatcttattaaaaatggggagcaggtttatgtggaggatctcaaggagtaaccccaagcagcatgatggggatgccaaaggatccagggctcaccaa

SEQ ID NO: 181600 - DNA, 559 bp, Homo sapiens
gtacagtaaaagtttaacagaggagcagagcactataaccactgaggtgtatgtgtgtgttacaaactcatgtttttatatttaattgtcagaagaaaatgtcagatcccagattttatcattgaaacacagcatttaaaaaatactcaaaatgtgggttatatctgtatatttctaataatttctgttggatggtttttaaaagtatatgacattggtgcctatcatttttgcctcatagsagtttttttgtttttgctaattttgtttggagcaatgcacgactttggttttcatattttaaaagaaaaattatatgttatttggcctgaggataggctatataaactgcaggttagtactgagaagtaggattttccacaaactattatttcaaacctagggaagcccaccataatgagaagagcggggccaacacccatgtcactgtggagaagtacagaatatgcaatggaagagttgtttatctgatataagcggtaattggaaactgaaaaattcctgctctggaaaaaagatattctgctcttctgaatct

SEQ ID NO: 181601 - DNA, 581 bp, Homo sapiens
aaggagagatgtggaaagatgttattgaaccacacaaaaaataactctattctttcctatttcacatcatactgtatttaagcataagaggaaatatcttggccataaattattatatttaaaaactttgccaggcacaggaagaaaaatcctgcatattctctcttaaatgtggaatctaaaacaatcgaactcatagaaacccagaggagaatggtggttaccagaggccttggggtggggcaggagggagagaatggagagatgatgatgaaaggtttaaagcctcagttaggcaggagaaataagttgttttttggatatctattgcatagaatagcgagtatagttaataataatgtattacacacttcaaaatcactgaaagagtaaatttcaaatttctcacgagataaaaataagtatttgaagtgatagatatatttagcttgatttaattattccacattgtattcatgaatcatagtatcactttgtaccccataaataaaatacaactataatttggataacaactccaatattgtttaaaakacacacacacacacacacacacagat

SEQ ID NO: 181602 - DNA, 407 bp, Homo sapiens
ccattgtcatggctatcagcatgtgccttccttttagctatacaaatttctgcagccagtctgaactgctccccggaaaatgggcttttcttytctaccacatgactagtttgcaaatttttcaaacgtttatgttttgcttcccctttaaacgtaagttctagttttatgtcctttctttgctcatacattattagcataggttgttagaagcagccaggccacatcttcaacacattggtgcttagaaatttcttctgccagataccccaaatcatcactctcaagttcaaagttccatagattcctagggcaggggtacaatgccaccaggttctttgctaacacataacaaaagtaacctttgctccagttcccaataagttcctcactttcatctgagatct

SEQ ID NO: 181603 - DNA, 593 bp, Homo sapiens
gacaatcaacagtttgcaaaatataaatattctttttgaaagttaagaatttttctctatttgtagtctagggtacttagagcattatttttaaatgcctcagaagatcacaggaaatgtttcatttttttattttgcatgtcccttggtcacaattctcctggacagggcatcagcttggtgcacaactgttgtattttcactactctagagtttctgttttcttttaataatttcctctgtcagaaagaagttatctttgtattgagggagattaataagccaaacaataacaacaacaaccaccaacaacaacaaacaccaacaacaacaaccttggaattasagaaaaagtattaaacaggagttaagaagttctaatttagttctcactattacaaatttttcccaaccaatgagtaggacgattctttccctggttttcgtaatgtgaacatatacttttaaagtgaggatgatgattttcctactctctcaaagaatacattaaagagaaagagaaaacaaacttcttattttgtaacagatttcagtttaaaatgtcactttgtaataactcttaaattcactgt

SEQ ID NO: 181604 - DNA, 609 bp, Homo sapiens
tttactcaagtgcacaggatagatcagaggctaggccataaaataagcctcagtaattttaaaagaattaragtcaccaaaaataagttattcaataacaaaagaattaaaggaaaaatatgggttggatatgaaatttgtggttaaaagttcttttttcagcacttgttccatttcctctgacctccatagtttctgatgaaacgtctatcatatttctgttattctgtaggtaaaatgtcatttttctctggctgctttaaagattttcaatttttggttgagggaagtttagctacgtgtgtattaaggtctccagagaaataaatccatatatgtacaaatacacagaaaaacttcctctaagggattggctcatgtgattatgcaggctatcaagttcaaaatctgcaaacaaggctgacaggctggagacccagaaaggaactaatgttgcagcttgcacccaaaggcagtctattggcagaatcctttcctgttcagggaaggtcagtttttgttctgttaaggccttcaaatgattggatgttgcccacctacattatggagggaaatttgccatattcaaagttcacagatgtaaatgtt

SEQ ID NO: 181605 - DNA, 609 bp, Homo sapiens
tttactcaagtgcacaggatagatcagaggctaggccataaaataagcctcagtaattttaaaagaattaaagtcaccaaaaataagttattcaataacaaaagaattaaaggaaaaatatgggttggatatgaaatttgtggttaaaagttcttttttcagcacttgttccatttcctctgacctccatagtttctgatgaaacgtctatcatatttctgttattctgtaggtaaaatrtcatttttctctggctgctttaaagattttcaatttttggttgagggaagtttagctacgtgtgtattaaggtctccagagaaataaatccatatatgtacaaatacacagaaaaacttcctctaagggattggctcatgtgattatgcaggctatcaagttcaaaatctgcaaacaaggctgacaggctggagacccagaaaggaactaatgttgcagcttgcacccaaaggcagtctattggcagaatcctttcctgttcagggaaggtcagtttttgttctgttaaggccttcaaatgattggatgttgcccacctacattatggagggaaatttgccatattcaaagttcacagatgtaaatgtt

SEQ ID NO: 181606 - DNA, 374 bp, Homo sapiens
ttcttttttaatttgggggaaaactaaggagaacttaagagagtgttgggtttaaactcccaatttttcatagaattgcaaaatgaaaaataaaagaaagctatggagaagttaatatgttggatgattgaagagtagcaggattatagcattcactttggatgttgttccaaatccrgttgttcctaataataatattattaggtgggtaaagcacagaaagcccttttaacttatgtgtgtttttaaaaaagttaagaatagtctaaaagatgattcttctcatatggcttgccatccttttgcccttttattttcattttcaggtcaacttaaatttttctaaagaaaaaagtttaccaggatccaatgtc

SEQ ID NO: 181607 - DNA, 374 bp, Homo sapiens
ttcttttttaatttgggggaaaactaaggagaacttaagagagtgttgggtttaaactcccaatttttcatagaattgcaaaatgaaaaataaaagaaagctatggagaagttaatatgttggatgattgaagagtagcaggattatagcattcactttggatgttgttccaaatccagttgttcctaataataatattattaggtgggtaaagcacagaaagcccttttaacttatgtgtgtttttaaaaaagttaagaatagtctaaaagatgattcttctcatatggcttgccrtccttttgcccttttattttcattttcaggtcaacttaaatttttctaaagaaaaaagtttaccaggatccaatgtc

SEQ ID NO: 181608 - DNA, 549 bp, Homo sapiens
ttatccctgagagaagatccaactcatcttccccttttgttcatatctggaaggcacgggacatcaccggtacccattttagcctctgcgttctgtagcttggacaggcattatcttgatgtcactgtgkgacactctcagctcctctgatcctgtatagcatctccagtaaacaactaaaagtgctttgtggagcagggattgccaagaggcaaatcaagagtgttcctctgacaagtgctgattcttgttgaggatgacgggaactgcatgggagtgtaggacaagtagatttgtctcttgaatttgagaatcagaaaaagagaaggaagagaaataggtgtacaggaaacatcttgactcagaaacaaacaaaaaattgtcaagtctatttcaaatgttaagttttactatcctgggtgaggtattaattaaagaaaggatgaactttatgctgttttaattcatttaaaatggcatgtcttgtgtcaaaagtaaatgttgtcaactaattaagtctcttcaatgagaagatcttttaatacaaaa

SEQ ID NO: 181609 - DNA, 549 bp, Homo sapiens
ttatccctgagagaagatccaactcatcttccccttttgttcatatctggaaggcacgggacatcaccggtacccattttagcctctgcgttctgtagcttggacaggcattatcttgatgtcactgtgggacactctcagctcctctgatcctgtatagcatctccagtaaacaactaaaagtgctttgtggagcagggattgccaagaggcaaatcaagagtgttcctctgacaagtgctgattcttgttgaggatgacgggaactgcaygggagtgtaggacaagtagatttgtctcttgaatttgagaatcagaaaaagagaaggaagagaaataggtgtacaggaaacatcttgactcagaaacaaacaaaaaattgtcaagtctatttcaaatgttaagttttactatcctgggtgaggtattaattaaagaaaggatgaactttatgctgttttaattcatttaaaatggcatgtcttgtgtcaaaagtaaatgttgtcaactaattaagtctcttcaatgagaagatcttttaatacaaaa

SEQ ID NO: 181610 - DNA, 549 bp, Homo sapiens
ttatccctgagagaagatccaactcatcttccccttttgttcatatctggaaggcacgggacatcaccggtacccattttagcctctgcgttctgtagcttggacaggcattatcttgatgtcactgtgggacactctcagctcctctgatcctgtatagcatctccagtaaacaactaaaagtgctttgtggagcagggattgccaagaggcaaatcaagagtgttcctctgacaagtgctgattcttgttgaggatgacgggaactgcatgggagtgtaggacaartagatttgtctcttgaatttgagaatcagaaaaagagaaggaagagaaataggtgtacaggaaacatcttgactcagaaacaaacaaaaaattgtcaagtctatttcaaatgttaagttttactatcctgggtgaggtattaattaaagaaaggatgaactttatgctgttttaattcatttaaaatggcatgtcttgtgtcaaaagtaaatgttgtcaactaattaagtctcttcaatgagaagatcttttaatacaaaa

SEQ ID NO: 181611 - DNA, 554 bp, Homo sapiens
tttcaatgctattttgtcttctttgtcggtcatattgcaataggactcacccctaaggagtgatctctgagtttaccatatagataaataaaaaattgagacccaaagaagagaggtgatttaccatatcagttaatgacagactggaggctccggatatcttttgcaacatccatcccaccatgccaaaatgcatttttgaagaatatattttttaaatatacataatgcctaaaagctccaaactgaaattacattttgaaatgaaaacttggctgcagtaaaatatttttaaaatccatgatttctgaatgagtttttctctttatttataactttagttgaattagagtaggaaaacgtgccccaaagtttctccaaagtactttaaagctcaatgaaatgtatttaattcttacyaaaaccaatacttcattaggtatgcatattttttcataattttcttttcacatactttttaagagaataggctacttgttctattattgtattgaagaaaaattaatttttctctgactcattaaaatgtggca

SEQ ID NO: 181612 - DNA, 630 bp, Homo sapiens
ttctttgactccttaggacccacatccagggcacactggtgcaagggctcccaaggtcttgggcagttctgcccttgtagctttgtggatgcagcccctgtgcatgctctcatgggttggagttgagtgcctgaggctttgcaggttcaggatgcaagctgcttttagatctaccattcttgggtctgaaggatggtggcctccttcccacagctccactaggcagtgacctagtaggggatctgtttacggtcttcaaccctacatttttactctacactgtctctagtaaaggcttcctatgagggctccacccttgcaggaggcttctgcctggtcacccaggctttcttgcatgttctctgaaatctgggagggagctgccaagcctccttcactcttgcattccatgcacctgcaggtttaacaccatgtggaagcaaccaaggcttacggtgccttatggtctccaaagcagtatctggggccctttgagctgattccagagccagagcaaccagaatgtggggagcagtgacctaaggctgcacagggcagtgrggcccttggcttggcctccaaatccacttgtttttcttaggcttctgggcttatgatgggagggagttc

SEQ ID NO: 181613 - DNA, 476 bp, Homo sapiens
acctttgtgaatgcttgaacaaatagaatgcagcagaagcgatattatgggatttcggagaacatgtcataaaaaaatatatagtctctctctcactttctttttctccatctctcattctggaaccctgagcaactatgtaagaagtctggctgccatgatgccaccatgctggagggaccacatggacataccatgaagatatatagacaaatgctttagaaacctcagctgttccgtctttcagctatttgagtcttcctaggccaagggccagatatataaacaaagaakacttgatggtgactccagccttagtcaacgtctaactgcaaccacgtgagagactttcaaccagaactatgcagtggagctgcttctgaactcctgacccatagaaaccatgaatgataataaatgattgctgttttccttaaatgtttggtcgcatttctcagtgaaatcatctgtgccta

SEQ ID NO: 181614 - DNA, 647 bp, Homo sapiens
ttttggatactgagatgtatagtctttgtctaaaaggagttgaaagacagaaatatgacaatatgagagggtttagatgattctattagaatgatatttatgtatttaaaacagatatggttaaggagttcagcaaaaataatgtctcaatacataagatcagagattaagcgtggaggaagaaagttggagaaggattaacaagaagtgatgttttcaaatttcatgtgtggttagaagccatcatcttagtgactcaaggcagtaatactactgctttacaatacagtgctctaaaataatgttacagatattgcatgtacttttaaaaacatatatcrttttggggatactctttgatgccaagtttaaaaaattctgaagtgtttaaaatgatacaaacttagagcatgatctgtgttccttttttttttaatcaggtaagcttcttggttttgggtgtagatctgaaaagttaacatttcttgaaccaataaaatgtttccagttttatataattatatcacaaagtctaccttctgccttgatttgcaaagaaaagctccaaaaaggaccataaagaagaggagataacacacaaatggtgagcaatgaagtagatgtacaaaatggtttgtgcagatttg

SEQ ID NO: 181615 - DNA, 647 bp, Homo sapiens
ttttggatactgagatgtatagtctttgtctaaaaggagttgaaagacagaaatatgacaatatgagagggtttagatgattctattagaatgatatttatgtatttaaaacagatatggttaaggagttcagcaaaaataatgtctcaatacataagatcagagattaagcgtggaggaagaaagttggagaaggattaacaagaagtgatgttttcaaatttcatgtgtggttagaagccatcatcttagtgactcaaggcagtaatactactgctttacaatacagtgctctaaaataatgttacagatattgcatgtacttttaaaaacatatatcattttggggatactctttgatgccaagtttaaaaaattctgaagtgtttaaaatgatacaaacttagagcatgatctgtgttccttttttttttaatcaggtaagcttcttggttttgggtgtagatctgaaaagttaacatttcttgaaccaataaaatgtttccagttttatataattatatcacaaagtctaccttctgccttgatttgcaaagaaaagctccaaaaaggaccataaagaagaggagataacacacaaatrgtgagcaatgaagtagatgtacaaaatggtttgtgcagatttg

SEQ ID NO: 181616 - DNA, 593 bp, Homo sapiens
gattctggagtggttctcattctcgtagacaggaattaaaaataaagtctggcaaataacatytatcaagcaatgtcttctcatacatccccatctcaaagtttaatatgctctgatgtgtgtactcaaggtcttaatagaatcagagatggttaaataaaaatccagagaagaccaatatgtgtgtgtgtttgcacttgctttgattccttttgtggttggttcttccgtgtgtgtgtgtgtgtgtgtgtgtgtgtgtgtgtgtgctttgattccctttgagcttgagtcttctgaggatctgcaatgcaggctagagtgaaactgctggcaggcatttgatttttctcaactagtgacaagaaaaagacaagaggaggacacagccaaagggggcctgatggctaaatgtgtggtgagtggctccaagttttgtgagtcaaatactatatttctgaatgaaatcaatttctaggttgcacaaatgttcatggcctatttacaaagaaaatagaaacctcaactgtgattctaaagctatcacttaacttggtgcccacatccaccctatggtaagattctatagcacacaa

SEQ ID NO: 181617 - DNA, 593 bp, Homo sapiens
gattctggagtggttctcattctcgtagacaggaattaaaaataaagtctggcaaataacatctatcaagcaatgtcttctcatacatccccatctcaaagtttaatatgctctgatgtgtgtactcaaggtcttaatagaatcagagatggttaaataaaaatccagagaagaccaatatgtgtgtgtgtttgcacttgctttgattccttttgtggttggttcttccgtgtgtgtgtgtgtgtgtgtgtgtgtgtgtgtgtgtgctttgattccctttgagcttgagtcttctgaggatctgcaatgcaggctagagtgaaactgctggcaggcatttgatttttctcaactagtgacaagaaaaagacaagaggaggacacagccaaagggggcctgatggctaaatgtgtggtgagtggctccaagttttrtgagtcaaatactatatttctgaatgaaatcaatttctaggttgcacaaatgttcatggcctatttacaaagaaaatagaaacctcaactgtgattctaaagctatcacttaacttggtgcccacatccaccctatggtaagattctatagcacacaa

SEQ ID NO: 181618 - DNA, 565 bp, Homo sapiens
gagcctgggaagtcaaggctgcagtgagccaaggtcccaccactgcactctagcctgggtgacagagtgagatcctctctcaaaaaataaaaataaggagattggactatccaattggtaataaggataggcactgatacttattgaacacttaatatatgtgggggactgttgtgaattaatgaaatgtattgtcacaaaaaacatgttatctccttttaacatacaaggaaatcaaagcacagagaggttgggtaactagccccacatcacacatttggtcaggcagaaccaggattcaaaactccagaatccatgtgttttcccagtatgtttttgtcaacttccagcttatgctattataatgattcccactttgttacctgctcattatcaataagatgtttaatctcttactctgactctatatatactgcctgtattacttcccagagattagtcctctgtgtatccatcaatacttgagccttcaaacatcgawgaaaagcttgtatttataattcaaataagagaaactagacattttatatctacttgtggatag

SEQ ID NO: 181619 - DNA, 569 bp, Homo sapiens
agaaaaagcacaatgttggaatagaaatatgtgctaagagcaaacaaattgagtatccatcaggagggaaatagttaaataaacttatatttctatgctacgaaatactatgyaccagctaaaaggaatgagattgctcgctgtgtactgacatagctagagctccaaaacctattgtcaaatgaaaagcaggctgcataaagatatcttcaaaatgacattattttcatacaaaaatatacacacttgtataagtaacattatattacttctatatgtgcttatatatgctttctaggttacatgtatataaacacatagaaaaacttgaagtatatacactaaaattataagtggctatttattgtcacttgagaaagtttgttggggcaagggggtagtattccaaggagacattagcctttcagaaacatttaaattttttacagataatatactcttgctgtttgtgtaattcaacatttgttttcaaaaaagaaacatggaaagagcaagggctttgaggctggctgaaactggctcaaaccctggcctcagcagcttgttaa

SEQ ID NO: 181620 - DNA, 561 bp, Homo sapiens
ttatatatagcatatgagctgggtgatagtttttgttcagctggtttttgtccattctattctgccaaccattgtattttaattgctatatgtaggccaawtaattacatttaatgtaattattaattggttagggcttaagtatgtcattttattttttgtttttttgtttgttctctgtttttcattcctctgttttatgtttcttgtcttactgcaggctactagaactttttttagaattctattttgatttatctgtagttttagagtgtatctttttatatagatattttaaaggttgctctaggtattacattatacatatgtaacttatcacagtctttttgtgtcaacattttgccagtttgaggaaagtatagaaacattaccttcacttaggttcctttactcttccccctttataatataattattttaaatatttcttttatatacactgagaatcacatcaggtaatgttaaaattttgcttcaaggctattctatttacccacatgtttatactttacattgttgtttcttcattcttaattttcc

SEQ ID NO: 181621 - DNA, 561 bp, Homo sapiens
ttatatatagcatatgagctgggtgatagtttttgttcagctggtttttgtccattctattctgccaaccattgtattttaattgctatatgtaggccaattaattacatttaatgtaattattaattggttagggcttaagtatgtcattttattttttgtttttttgtttgttctctgtttttcattcctctgttttatgtttcttgtcttactgcaggctactagaactttttttagaattctattttgatttatctgtagttttagagtgtatctttttatatagatattttaaaggttgctctaggtattacattatacatatgtaacttatcacagtctttttgtgtcaacattttgccagtttgaggaaagtatagaaacattaccttcacttaggttcctttactcttccccctttataatataattattttaaatatttcttttayatacactgagaatcacatcaggtaatgttaaaattttgcttcaaggctattctatttacccacatgtttatactttacattgttgtttcttcattcttaattttcc

SEQ ID NO: 181622 - DNA, 586 bp, Homo sapiens
ttttttgtttgtttgtttgtttgtttttgcaatgcaaaaggttttgatttttatgtggtgaaatttatcaatttttagaaattgtatctgaattctaagtcatatttaggtagcattccctccactcaggctatagagaaaatcatcccgattttcctttagcattgttaggtcaatattttaacatttagatttctgattcatttggagtttattcttatgtatggtattgttaaaagaaaaaccttagccaaattaaatttaacagagtttaattgagcaaagaacaattcatgaattgacagattccagggctagagtaagctcygagggactccagggcagccacatggtggaatatttatagacagaagaaggaaagtgacatacagaaaacagaagtgaggtaaagaaacagccagattggttacagcttggcattcgccttatttgaatgtggtttgaacagttggcccccttagggtggcccaaactcagtgagtggcacaagagtaggttatagcctgtttatacctttaagttacagttcactacatacacagaaatctttaggctgaactgaaaa

SEQ ID NO: 181623 - DNA, 586 bp, Homo sapiens
ttttttgtttgtttgtttgtttgtttttgcaatgcaaaaggttttgatttttatgtggtgaaatttatcaatttttagaaattgtatctgaattctaagtcatatttaggtagcattccctccactcaggctatagagaaaatcatcccgattttcctttagcattgttaggtcaatattttaacatttagatttctgattcatttggagtttattcttatgtatggtattgttaaaagaaaaaccttagccaaattaaatttaacagagtttaattgagcaaagaacaattcatgaattgacagattccagggctagagtaagctctgagggactccagggcagccacatggtggaatatttatagacagaagaaggaaagtgacatacagaaaacagaagtgaggtaaagaaacagccagattggttacagcttggcattcgccttatttgaatgtggtttgaacagttggcccccttagggtggcccaaactcagtgagtggcacaagagtaggttayagcctgtttatacctttaagttacagttcactacatacacagaaatctttaggctgaactgaaaa

SEQ ID NO: 181624 - DNA, 454 bp, Homo sapiens
taactaatattatagatgcaaatgagagaagttaattcattgtatacaatagatgccttaaggcatcagggtttatttttttctctctctctgtctctcttctatctctcaagtatttgcaagggtaacaaagatacactgcaattatcagctgaattttccccagttccattaacaacacttgaaggaggtcttttacttaggactttatattgccgacaaaaggataaatgctatattgagtattgttactcgctaccaacctaagcaaccacttataacacaacagactacaaataagatatggagtgcttcyggtagtcactttaatccttcattgttaagggataggcaaattaaattctgagctgggaggaccaaaagagaagttcctcaccttgccctttgccctatgtatatcgttttttgggggttatgttttgtttcgttttgt

SEQ ID NO: 181625 - DNA, 429 bp, Homo sapiens
cttgagctccttataccctattaggcaagacatgacatagctagtaggtgttgtagccaggatggcagcctcagcaatctggctccagartccccaggcacttaacagttcaaggcataattggtaaggatcttagttaaggagccaacttagtagttgatgcgagtagaggaagggagggagacaggcagggagggaataaggaaagcttgtgggaatgacaaagccttcacagaaaggtgcatttaaactaggcttggagattgaaaacatttttgatatatggagactagaatgtgaatgatggggcaaaaccccacccaaaatggttaaggcaaaatggaaatattttggcttatgtgcctgaacaatctagtgggagtagctctggctttgagctgagcttgatcagggctgtccaactgcatc

SEQ ID NO: 181626 - DNA, 429 bp, Homo sapiens
cttgagctccttataccctattaggcaagacatgacatagctagtaggtgttgtagccaggatggcagcctcagcaatctggctccagaatccccaggcacttaacagttcaaggcataattggtaaggatcttagttaaggagccaactkagtagttgatgcgagtagaggaagggagggagacaggcagggagggaataaggaaagcttgtgggaatgacaaagccttcacagaaaggtgcatttaaactaggcttggagattgaaaacatttttgatatatggagactagaatgtgaatgatggggcaaaaccccacccaaaatggttaaggcaaaatggaaatattttggcttatgtgcctgaacaatctagtgggagtagctctggctttgagctgagcttgatcagggctgtccaactgcatc

SEQ ID NO: 181627 - DNA, 638 bp, Homo sapiens
ttttctataatttatttcaaatcctctcagactttactcttgtaaggtaagattatttggagtctgattatataaatgttaagattgtgaggtttttcgggttacatgttttcttatgttgattattgtttaatttctacacccattctgagtgtctagtttttctcagcctacctctttgttacaccacctctattccagcggaatctcacatgcaattttagttcttcccaaccctgttatctgggcatacatattattattgggcatttccttttgtagttagtgcagcgtttagctgttacttacccctgagaatatagtgtggaattagcagtggcaggatatggaattagcaataaagttcctggcttggagttgaagtgaagcaaagaatattcttcttattctcccatccactgtgatcacacattctatttaacttcattgcccctagctaggtgaaagctgatagctgctaattgtggtcactggggtgttggacaaatttttgagttagaggagggttcatagccaaaggaagaacaccagtctagaaagaacactgggcagcacgtggcagcagygactgctaacaagctaacaacttgctaaacagcaggctggggttagagcaa

SEQ ID NO: 181628 - DNA, 620 bp, Homo sapiens
  misc_feature (1)...(620): n = A,T,C or G
ggctaacacctgtaattccagcactttgggaggctgaggtggatcgcaagagcccaggagttcgagacaagcctaggcaacacagtgagacctcatatctacataaaattgaaattaaaaaaagaaaaaaaactccagtgtacttcagagatagctgttactttatagaacaaatgaagttttaaaatatgtgctgtgatttgcttggctaaccaatcattaaagagtgctatgattcattactcctaaaaacagaaaataagggtttcttcaaaccatacatattccctcacaattaaccatgcaatctcttaggtggnttcaaagctaccatacagtggcagggcatggtggctcacacctataatcccagcactttgggaggctgaggcaggcagatcacttgaggtcaggagttcaagacagcctggccaacatggcgaaaccctgtctctactaaaaacaccaaaaaamattagccaggcatgattgcacctgtagtcctagctactcgggaggctgaggcaggagaatcacttgaaaccaggaggcagaggttgcagtgagcccagattgcgccactgcactccagcagcctaggcgacagagcgagattccag

SEQ ID NO: 181629 - DNA, 461 bp, Homo sapiens
ggaattcttaggcttcaggcacagtgggtttcccgagtggccaactgcaaaggggagagcctggccttggagcccgagtgtgcccggctccccgatgctctgctcacaccctgctgctgccagagtcccggggctgcccagcctctccccaggacatgctgaaacagtggcatcccaagccttccgtggatggatggcaaataggcagggctggggtccagggctgggcgggctgttgagatagaagctaggaccaccgcagggctagatgctccgcctcccgccaccctcctatcrgggacgctccccctgcaagactgtcctgggacgggagactgacagtcctgggctcatcacaaatggtactgatccctgacaaaggagcctcatcctgatgtctgacaaaggcacctcacccatcagcaaatggcagtggggggcgtggccagggacacccccca

SEQ ID NO: 181630 - DNA, 419 bp, Homo sapiens
gcaggacacatggagacaccgggaaagtctttggagtctcttgctggaaggccagaagcagtgttcctgtctacaggcgagggcaagaactggccccggtgcaggggcttctgacggcgcagagcgccaggcgaagctcttgtggaatccaggtgcttctgcctccattctgggctcgttttaccacagtgcaggcactgggagcccttgctgtctgtgttttggggtcacaggcgactcagsgtcttgagtgtgcacagccctccctcccaggccggggagcccccagtcaggaggcctgagggtcaggaggctgggcatctggtcccagggccaggccgcctgctgtgtaaccctggacaggccattccacctcttgggcctcagttgggttattggaaaagcaagagaaagaattc

SEQ ID NO: 181631 - DNA, 552 bp, Homo sapiens
acactgggacttagggttttaacacatacatttgcagggggacacggacattcacatcacaagaccccacccccctacgcccccattcaggtgacagttcaggaactttctgccagagagctggagcaaactgctaaatgtggcaaagtgagtttgggtgcaccctgagttctctactcccagctgagcggcttccccaccccagagttcctgctccagccagcatttccaaagcacttaccgtgcaagtctgagaggcaatcgcatcaattatgctcacagaggtcctgagcatgcactttcccacagccctctcacagttgcctcgtgcactcggagactcagggagaaagcacwatcggggggctgctccgagcccagacatccggccctggtggaaggaaaacatggagtctgctctctgggctaattggtgcctcctctgacttgggcacctccctcaggcctgaggagcaggtgggaactttgacccactgaaccgagtgaggggcgctggtctgaggctggctgggcagagatgcatccgtggga

SEQ ID NO: 181632 - DNA, 552 bp, Homo sapiens
acactgggacttagggttttaacacatacatttgcagggggacacggacattcacatcacaagaccccacccccctacgcccccattcaggtgacagttcaggaactttctgccagagagctggagcaaactgctaaatgtggcaaagtgagtttgggtgcaccctgagttctctactcccagctgagcggcttccccaccccagagttcctgctccagccagcatttccaaagcacttaccgtgcaagtctgagaggcaatcgcatcaattatgctcacagaggtcctgagcatgcactttcccacagccctctcacagttgcctcgtgcactcggagactcagggagaaagcactrtcggggggctgctccgagcccagacatccggccctggtggaaggaaaacatggagtctgctctctgggctaattggtgcctcctctgacttgggcacctccctcaggcctgaggagcaggtgggaactttgacccactgaaccgagtgaggggcgctggtctgaggctggctgggcagagatgcatccgtggga

SEQ ID NO: 181633 - DNA, 538 bp, Homo sapiens
gagaattgagcccttgtgagacatcaggtcccccagcctacgcgcctctgtgtgtccatcctcagctccrtgctccagcaataaacctgggagtctttcttcatccagacctagggaggccagcccaggccagggatggggaagagagatcagggccctccccattccctacctttcacaagcccctagtctgaatgaagggctggaatcggcccatgggcacagccaggcagtcgtgcaagagcatgcaaatgtggacgtgtggccagctggacacattcccagcagtggcacaatggtgtgcccacaatggcagcagccctggggccagagagctgggctgaccctactccacttcctgcttctccgtctcactgtatgactccccggtgcttgggcccctcatctccagtagagggttgataacagctgttgccctgagggttatgtgagcaggggagggtgcggaggcagctcgtggcatgccacgggctttgagaaatgtgacctcaccacttcctatcatcattgttaataa

SEQ ID NO: 181634 - DNA, 538 bp, Homo sapiens
gagaattgagcccttgtgagacatcaggtcccccagcctacgcgcctctgtgtgtccatcctcagctccatgctccagcaataaacctgggagtctttcttcatccagacctagggaggccagcccaggccagggatggggaagagagatcagggccctcccsattccctacctttcacaagcccctagtctgaatgaagggctggaatcggcccatgggcacagccaggcagtcgtgcaagagcatgcaaatgtggacgtgtggccagctggacacattcccagcagtggcacaatggtgtgcccacaatggcagcagccctggggccagagagctgggctgaccctactccacttcctgcttctccgtctcactgtatgactccccggtgcttgggcccctcatctccagtagagggttgataacagctgttgccctgagggttatgtgagcaggggagggtgcggaggcagctcgtggcatgccacgggctttgagaaatgtgacctcaccacttcctatcatcattgttaataa

SEQ ID NO: 181635 - DNA, 538 bp, Homo sapiens
gagaattgagcccttgtgagacatcaggtcccccagcctacgcgcctctgtgtgtccatcctcagctccatgctccagcaataaacctgggagtctttcttcatccagacctagggaggccagcccaggccagggatggggaagagagatcagggccctccccattccctacctttcacaagcccctagtctgaatgaagggctggaatcggcccatgggcacagccaggcagtcgtgcaagagcatgcaaatgtggacgtgtggccagctggacacattcccagcagtggcacaatggtgtgcccacaatggcagcagccctggggccagagagctgggctgaccctactccacttcctgcttctccgtctcactgtatgactccccggtgcttgggcccctcatctccagtagagggttgataacagctgttgccctgagggttatgtgagcaggggagggtgcggaggcagctygtggcatgccacgggctttgagaaatgtgacctcaccacttcctatcatcattgttaataa

SEQ ID NO: 181636 - DNA, 541 bp, Homo sapiens
acacacacccacgcacacagacatacacatgcatgctcagcccccacacaccccaccgacgaaggggcctccccattggggcctgggttttattaacgcacagaggcaccagctgtgactgggaaaccctcatggttaggagtcctgcccacctggcctgggggtctcttgctggttgggtggtcttgggcacagtgttccagtcgtaagccccttaggagaaggaggccatctcctcactcggccctgtgagcccacggagcccatccacggaggccagctttaggcgccatcggcattccactgtgttcttatctagaggaccccaggctcatgccaggcctcggtaggcacagrtgctcatgaccttcacaccaggcccacttctattcacccactccctccttactgcagtggctggcgtggtgtccccgaaaggacaaggccatgtcctaagccctggaacctgtcaatgtgaccttcttgagaaaaagggtcttttcagatgtagttaagagaaggatctggagattatcctgaa

SEQ ID NO: 181637 - DNA, 541 bp, Homo sapiens
agaattctaatgtgttgtccatgcacacacacccacgcacacagacatacacatgcatgctcagcccccacacaccccaccgacgaaggggcctccccattggggcctgggttttattaacgcacagaggcaccagctgtgactgggaaaccctcatggttaggagtcctgcccacctggcctgggggtctcttgctggttgggtggtcttgggcacagtgttccagtcgtaagccccttaggagaaggaggccatctcctcactcggccctgtgagcccacggagcccatccacggaggccagctttaggcgccatcggcattccactgtgttcttatctagaggaccccaggctcatgccaggcctcggtaggcacagatgctcatgaccttcacaccaggcccacttctattcacccactccctccttactgcagtggctggcgtggtgtccccgaaaggacaagkccatgtcctaagccctggaacctgtcaatgtgaccttcttgagaaaaagggtcttttcagatgtagttaaga

SEQ ID NO: 181638 - DNA, 522 bp, Homo sapiens
attgcagatggcatgagtgtgtgtgtgtgtgtgtggtgtgtgtatgtagaagatcccaaggaatctgtaaaactgctataatgtataatgaggttaatattaaaaaaccaattgtatttctaatactatcaatgaatgacccaaaaatgaaattaagaaaacacaaacacagttctggtcacaacagcatcaacaacaataagatacttaggaaaacatttaatcaaataagtgcagaacttgcagaatttgtctactaaaaactacaaaataggccaagcatgtggctcccagcactttgggaggctgaggcaggagaactgcttgagcccaggagctcaagaccaacctgggcaacagagcaagaccccattgctattaaaaacaaaacaaaagctacaaaactttgctaagggaaactaaagtattgaaataaatgaaaagacattccatattcagatgttggaagacayaatattatcagatggcacttctccccaaagtgatgtataaattcaacat

SEQ ID NO: 181639 - DNA, 519 bp, Homo sapiens
aagactatttcagaagattaacaaataaagaagtagaaatgccactgaacagataraagaaatgatgcaatgaaaatttaaataatattttaaaagaaatgatcagatttaactgtgaggcaagattgcacatttatgagataattcaaaatgtctcaaacctctttgtaaatttaacatcataaatagaacatcaaaaatgcttccattccaatgtcaaatcagaggaagggttagtaacagccaggaacactgttaagtaggatccagaggtagaatttacttccacagaaaagaatattacaattaaacagagacgtacaacatagttaactgaaataacacaactggaccttacttgaagctcctaaaacatcgcatgacatattgatgtttagtggatgatactggctttaaaaatgataatggaaacttatgttgaatctacctgtatagtgaataatctcattaacctaactttgtagcaagtaagtttgtaaattgcaattaaggtcatga

SEQ ID NO: 181640 - DNA, 541 bp, Homo sapiens
tgttgggttcttcgtgactgcagtgttactcaccctgtcttgaatgatgatggttagtatttgcaacatatacatgtcgaattcccgactagtttgtggaggaagggaagagtgccaatccatatccgtaagcccatcctcaatccaccagcttccaccatgtagtccagcacctaatggttgtttaataaattcttgaagagctatattgaaattggtttgtgtaatcttggaatagacccttcagtggtaaaaaccagcatttttccaaaggttgggtgagattttargagttctataagtttcttttaggtggttcacagacacagcaggaaacaagattgaatcatagggtggagaaagttttcctttttgagttttcttttaacacattgtatagcattcaaaacaaaatttctcatagccacgtatttcagtggttacctgtgataactagaattccaggagaccaatgtgtttatatttgtacagttgcttaccatttatggttaataatagtagtgtcccacttatactagaa

SEQ ID NO: 181641 - DNA, 547 bp, Homo sapiens
ccgtggttaaggaaaatagtagatgtgttaagaccttgtttatttcagcagagaaggttagagttgatccacatctggataaaaataattttaacctaggagaagttatattttctttataccataagctccccttctctggtagcctaaatgaatcagcgccacatctgggcatggtggcccatgcctgtaacagcagcactttgggaggccatgacagcargattatttgaggccaggagttcaagaccagtctggggaacatggtgaaacctcatctctacaaaaaaattagccagtcatggtggtccatgcgtggaatccaggctacttgaagggctgaggtgggaggatcacttgagccggggaggtggaggttgcagtgagctgcaattatgtcactgcacttcagcctgggcaacacagtggaacttgtctcaaaaaataataattccatttaaaaaaaataagcaggcatagtaacacacgtctatagtcctagcatctcggggggctgaggtaggagggtcacttgatccagaaggaa

SEQ ID NO: 181642 - DNA, 571 bp, Homo sapiens
ataaaaatgtgacttgccaaattcccagaaatatggcatgccacagaattagactaaacttttcagcttccagtggtcataatctaatctgtgcatggaagtaagcccagtcataaaactattttcgtcagtgttctgatctacttactttcaatgactcaatgcaaaagttcattctaaattcatgtatcattttagaaattatgaagtgaagcatctgatgctataaaattaatgtttattttcattatctaaattatatacctaaatatatatraccttatgtatatatattatcatcataagcactcaaagtatctattaaaatgaaaattataaaaataaatatctgcattaattttacaatttacagaagacttttcttatagattatcgcactttaaacttacaattttaggaaatattaacttttttttacagatagtgtaactgtcacctgtgatgatgaaaataatagtttgagaaaccaaagttatagaatactgtttgttagttcatatatatttacttcagatagttttacacgattaaaaaagaatattttaattct

SEQ ID NO: 181643 - DNA, 384 bp, Homo sapiens
agataatccatactggaccacttgccaaataccaaaaaggcttcattaagaaaatttcatgtataagataaatctctaatttagaacttcgagaaataactcgtgtaaaataaccaaccatctcttctatccacttcttcagacactttctaaaatgtaaaagtcaytttgttttttcatgtagttatgagaacttatggtgtttgatattactatattacctcctttgttttgggaaagtgaactttatatgcatctgtaatttattagcagctgtaatttattagcaattaatgaaagagaatctggcagcttggatggtaattaacacttgttcacaagttttaaataccagagaacagcttggtttcttcaaaaactatg

SEQ ID NO: 181644 - DNA, 418 bp, Homo sapiens
tgccagataagagaaactttggtggaaatttataacacagtggttataagtggtgataaaatcaatagaagtttgcgggagttaatatagacaaaaacaaattaattggaaaactagcctttacaaaacagataggttagtaatgaggatgagaggctagaactcccatcacaccatgctataggaagaatctagttagaaggctgcaggtcagaccctggaccctsgtgtttcacgcagcgctgtatgtactcacaccaccaggaataaattctaatgtatttcctacttctgtgcattatttccccaagaacagttccagctgggaacatctaactgtccctctttctctagcttggttactgggataaagagaaagtatctcagaagctttggtttaatattaggtgggtagacc

SEQ ID NO: 181645 - DNA, 418 bp, Homo sapiens
tgccagataagagaaactttggtggaaatttataacacagtggttataagtggtgataaaatcaatagaagtttgcgggagttaatatagacaaaaacaaattaattggaaaactagcctttacaaaacagataggttagtaatgaggatgagaggctagaactcccatcacaccatgctataggaagaatctagttagaaggctgcaggtcagaccctggaccctggtgtttcaygcagcgctgtatgtactcacaccaccaggaataaattctaatgtatttcctacttctgtgcattatttccccaagaacagttccagctgggaacatctaactgtccctctttctctagcttggttactgggataaagagaaagtatctcagaagctttggtttaatattaggtgggtagacc

SEQ ID NO: 181646 - DNA, 418 bp, Homo sapiens
tgccagataagagaaactttggtggaaatttataacacagtggttataagtggtgataaaatcaatagaagtttgcgggagttaatatagacaaaaacaaattaattggaaaactagcctttacaaaacagataggttagtaatgaggatgagaggctagaactcccatcacaccatgctataggaagaatctagttagaaggctgcaggtcagaccctggaccctggtgtttcacgcagcgctgtatgtacycacaccaccaggaataaattctaatgtatttcctacttctgtgcattatttccccaagaacagttccagctgggaacatctaactgtccctctttctctagcttggttactgggataaagagaaagtatctcagaagctttggtttaatattaggtgggtagacc

SEQ ID NO: 181647 - DNA, 626 bp, Homo sapiens
aaaacataaaaactaacattgctatcttgtttgtgaccacatggagaattgttcttgctatgggcaagaagcaataatatatattataaggagtgtcctggagttttgccatcctgccatttcaaaaacactgagtgtctgaactgatgtgatttcagaagcaatgtaatattaaagttaggtcttttgagttttcccttttctgacatttcaaataattttaaaatgttgtattttcttctgtttttaaaagagaatagtatttaaarattatctgtacaaattaaacattacccaaattccagcaataagagatgtcattgttaccattttgttgtactgcctttaatacttttctctgtgtatgtacatgtgtattatatatagatatatacacatttgtcattatatatgtgtatatattaatatatgtatatgcgtgcatatataccttttataagattgggtcatatgctttatatatattacattagccacaactttgtggcaactattcctaattttgtatttattgtttttttatttgtttctgggatgaaaatccctttccctatatagccagatggcccattcccacatttacttaaggtctttacgcaaatacc

SEQ ID NO: 181648 - DNA, 520 bp, Homo sapiens
tagggttgaagcctattaatacgggttttggctatatttaagacatatagcactttcaaaaggtaagagagttggagatctgaaatttaacatagtgttagtagccatacattatggtttctgtagttgttctaggcttggagggtatatatmcacaacacaaatgctgtttttatttatgaagagtatatcaacagcagtctatgtgatcatccaggacagcctcccattcaatgcagaaacctctgaagaacaaccttctttaggcaggttgcaagatacctctaactcataaaaagctcttttaatattgtccccaactgctttaaaatttcatccactggggctgattagctgtctgatgagacatagaagtctagtgatgtttctttgcaacatttttttactatgtcattattcaaaggttgccatggtggatataattaattatagaatcatatagggaacttatttgcagatgaaaattccagtgccgttccctgccacccactcctagatt

SEQ ID NO: 181649 - DNA, 429 bp, Homo sapiens
gatataattttgaacagttaagttggattgtaatattttattatatggattcaccttctatttatgaactaattatcatactattgtgattatagaaagagggattctttaagctacttctaatcccarcgtgttactctggttggcctgctgatcattcatgttcccctctggggttcttgctatctaaacattcccttactccattttccattatagtcctaggatctcccatgaaatatttgttaaatgaatcaataaactatggaaaaatatttaccacggtgcaaattccaaattctttggggttgcttcatctttataattcttgttcagaattctcttggtaaataagttaggcttcattttatatcgacaaatcccccttctaacttacattaccagaagttagctgaaaggtctatcaat

SEQ ID NO: 181650 - DNA, 612 bp, Homo sapiens
gcacagataacttctcagagcctcagttttttaatctacaaaagaaagacaatcacacacacacacataccacatacaaacccgtcacgatttgtgagggctgaatgagataacctaggcaaagtacccagaagaatttctgtcttgcagtttccataaagttttctatataaatcactagaggatatcatgttcaatacaagaaacagactaaggtggcccatcccagcagaggtgccacaaagagaaaaccctgtttgtgwcattctttctcattcgagctccctgcttggaataaatatccatgtggactcataatagtgtttcatgaatagatagaacactttttgaacctcatgccataatgggtcactgtgagtttattgataatggaaaaattatattggagaaggtattgctgtggttcagatgtggcttgttcctgtcaaagcttatgttgaaatttgattcccaatatggcagttttgggaagtggagcttagtgggaggtgattgggtcacagggatggatctctcacgagtagattaataccatctggggaagaaagttctccctcttgcaggattggattagttagcagaaaccaggtt

SEQ ID NO: 181651 - DNA, 638 bp, Homo sapiens
acagccatatgtgagaattcaagttgctttacattttcaacaacagttagtattgtcagttttttcaaattttagtcattcaactgtatatataatgttatctcatcgtaattttaactttcattgccttgatgacttaatgtcattgagcgcagttttgaatgcttattggcacaaatgtgttgcaatcatttgcttgtctttaatgagttatttgttctattattgaatgattgcagttctttacatattcctgatacaagttctttgttagatagacacactacacaaatattcccaggctattgttttttcctgttcattttcttaatgttgtctttccaagaagtttttgatgaagtctaaataatttttttcttttgtgtcttattttctctgtactaagaaatctttgcatctctttggttgctaagattttctcctatattttcttccagaattgtattgttttagctcttacattagatttatgatgcatttccagctaawttttatgcaagatgttagatatggtttaatgttcatcttttccatacctatgtccagtaattctagcaccattaattgaaaaaagtatccttccctcattgaattactttcatacatttgcaaaaata

SEQ ID NO: 181652 - DNA, 638 bp, Homo sapiens
acagccatatgtgagaattcaagttgctttacattttcaacaacagttagtattgtcagttttttcaaattttagtcattcaactgtatatataatgttatctcatcgtaattttaactttcattgccttgatgacttaatgtcattgagcgcagttttgaatgcttattggcacaaatgtgttgcaatcatttgcttgtctttaatgagttatttgttctattattgaatgattgcagttctttacatattcctgatacaagttctttgttagatagacacactacacaaatattcccaggctattgttttttcctgttcattttcttaatgttgtctttccaagaagtttttgatgaagtctaaataatttttttcttttgtgtcttattttctctgtactaagaaatctttgcatctctttggttgctaagattttctcctatattttcttccagaattgtattgttttagctcttacattagatttatgatgcatttccagctaatttttatgcaagatgttagatatggtttaatgttcatcttttcyatacctatgtccagtaattctagcaccattaattgaaaaaagtatccttccctcattgaattactttcatacatttgcaaaaata

SEQ ID NO: 181653 - DNA, 530 bp, Homo sapiens
gcattagtattttaaaaatcttgtagatgatttaattttagccataaatgtatcccatagtttgtttatcccataatttctgattcttcccacatcaagaatcaggtgacatcactgaagattgtacaagtattaagttgataattagacaatataaaaaagsattatttcaatatatttaacattgtaatgaaatggaaatttttgaaatataaaaattactaaagcttactcatgaagaaataaataacctgaatagccctatatctaataaattagttgttcaatttccttcttgacagcccacctacagaaaccctgggagtggagaacaaaggatactttggtgatgagcagcagataaggactgagccaatcctgccagaaattcatttcctaaatgtaagaaacttccatttgcaacagttaatttattgattttttttttttaagtagctgaatgtgtttaaagtagaacccgtcctaagctaagtgacatgggaagtgcagaggagcaatttaacatggtt

SEQ ID NO: 181654 - DNA, 434 bp, Homo sapiens
gatttgattgactcacagttccacatggaggcctcaggaaacttacaatcatggtggaaggggaagcaaacatgtccttcttcaatggcagcaggagagagaagtggagagcaaagggggcaacaccccttataaaaccatcagatctcatgagaactcactcattatcacaagaacagcataggggaactgcccccatgatctaatcaccttccacaaggtcctcctccaacacatggcgattacaattcakattacagttcgagatgagatttgagtggggatacagagccagaccatatcacccacttagctgcaaaccaaagctgtcctttatatagcactttctagttaaaagtggtattttcatctccatatataaaattcacacatgtatctctcaatgtgctttgaactcaagggggaaaaaggga

SEQ ID NO: 181655 - DNA, 616 bp, Homo sapiens
catttcagcaaagtttagccttgtgattcacttgcacattacattttgaaaggcatttttcaatgttacaaagttagtatggtctgtgcctagggtgtggacagaaaatattctgactctttgccctcttcctttcctatcttacttcaccaatctcctttgtagataatctggcaaatattctctaccttttatttaacccctccagtattagggaagcagacttttttcaccagaaaacatctcatttttgaccagctacaataattgttattttatggaacagaaaattaactttttaatgacttctcaatattttttattgcttgttctacagagaaaaaataaacaatctcttttcaatatgacagtcctgtaaatatttggagacatttttgatattatgattcattttatcctgrtagccaatttctttaacatattcccaatggtttaagtattttttattatggcagcctttccttacatgcattctacctttgtcgttgaataacgtcaaaatgtcatacatttagtaattaattcaagatacttttgctgagaatctattatgtgcctgtgctagatgttagagatagaataaggggcaagatct

SEQ ID NO: 181656 - DNA, 539 bp, Homo sapiens
attttttgacattttcacgaccactagtctacaaaaatgaataagtgaaatttgtacatgcagtaataacagtgtattgtaaaaaatattttacaattaaaaaatgctatatataatatcatttaaactagcagaatattgaagagtggcataaaraaaatgtggaagataaactccatagaaattgatgtacagaaaaaaataaataattcaaacagctcagaattggttattactgatcctatgttctgaatcctaattgaagtctatttctccctctactatgccgtcatttttgaaagaataacaccagtgattattgtttattttctcttttcttgaagttccttttgtttttatttagttttttgttttgctcataatatttatattagtaatatattcaatttgaatgtaggtaaacagtgttattattaagcaaaataaaataatcactcattcaacctgctgagagagaactgacagtgattttgtctgccagttgtattaacaggaacttagattctttgacgtagcat

SEQ ID NO: 181657 - DNA, 546 bp, Homo sapiens
tgacattttcacgaccactagtctacaaaaatgaataagtgaaatttgtacatgcagtaataacagtgtattgtaaaaaatattttacaattaaaaaatgctatatataatatcatttaaactagcagaatattgaagagtggcataaagaaaatgtggaagataaactccatagaaattgatgtacrgaaaaaaataaataattcaaacagctcagaattggttattactgatcctatgttctgaatcctaattgaagtctatttctccctctactatgccgtcatttttgaaagaataacaccagtgattattgtttattttctcttttcttgaagttccttttgtttttatttagttttttgttttgctcataatatttatattagtaatatattcaatttgaatgtaggtaaacagtgttattattaagcaaaataaaataatcactcattcaacctgctgagagagaactgacagtgattttgtctgccagttgtattaacaggaacttagattctttgacgtagcattagaaattccaaa

SEQ ID NO: 181658 - DNA, 546 bp, Homo sapiens
tgacattttcacgaccactagtctacaaaaatgaataagtgaaatttgtacatgcagtaataacagtgtattgtaaaaaatattttacaattaaaaaatgctatatataatatcatttaaactagcagaatattgaagagtggcataaagaaaatgtggaagataaactccatagaaattgatgtacagaaaaaaataaataattcaaacagctcagaattggttattactgatcctatgttctgaatcctaattgaagtctatttctccctctactatgcygtcatttttgaaagaataacaccagtgattattgtttattttctcttttcttgaagttccttttgtttttatttagttttttgttttgctcataatatttatattagtaatatattcaatttgaatgtaggtaaacagtgttattattaagcaaaataaaataatcactcattcaacctgctgagagagaactgacagtgattttgtctgccagttgtattaacaggaacttagattctttgacgtagcattagaaattccaaa

SEQ ID NO: 181659 - DNA, 505 bp, Homo sapiens
gaattacatcaagacaccggtaattttgatctgatgtctacagtttgaaccacgatgatgagaaacaggaggttagtacccaaatgacatcaaatgataaataagaatctttaaattttacttagcagagctggagagtcaaatttataaatatgactgatatttttagccccctctaattttagagtacaaagaaaatactaaaccatragggaacagatgacagcatttattattaattaactaactcacgtattcaacaaatataaagtggatatctgacagatttttttaatatgaaaaacttaaaatacttgtcctcaatgtttcataattttctagatgttcagaaaattgtaattagcctgtaaaaaattttgatcaaaatatactgtttaacaattggattactaaaagaaacaaatatgaagaacagcctgagttagctcacatgttcctatattttatcaaataactttatgtcatgaacttgtcatcaaacaag

SEQ ID NO: 181660 - DNA, 505 bp, Homo sapiens
gaattacatcaagacaccggtaattttgatctgatgtctacagtttgaaccacgatgatgagaaacaggaggttagtacccaaatgacatcaaatgataaataagaatctttaaattttacttagcagagctggagagtcaaatttataaatatgactgatatttttagccccctctaattttagagtacaaagaaaatactaaaccatgagggaacagatgacagcatttattattaattaactaactcacgtattcaacaaatataaagtggatatctgacagatttttttaatatgaaaaacttaaaatacttgtcctcaatgtttcataattttctagatgttcagaaaattgtaattagcctgtaaaaaattttgatcaaaatatactgtttaacaattggattactaaaagaaacaaatatsaagaacagcctgagttagctcacatgttcctatattttatcaaataactttatgtcatgaacttgtcatcaaacaag

SEQ ID NO: 181661 - DNA, 556 bp, Homo sapiens
ggattacagaagttttcttyttaaatgtatgccaatgttgtctatttttacctttttgtaaaagtcatctgagataatttctccacatagagattcccaagccctttccctagagattccgattaagtcttattctagcagatctcagtaatctttatttttttgtcaaggcatgtatgtatctttctaatgatcaggccagtttggaaaatattgacttatattcttcattttagtaaaagttatgcatataatgactcaaatgttatggaatttgaactgaaataaaattttaggtatgcaatatgaaacaaaatttcttactctactgtttggtcatccatagaaaatttatcttttattttaatgaccagtggtatacccaacatgaaatatatttaactgatatcttctttttgttggtagaaacacattcaggacttaaggaattctatcatcttctttatgatatttcttaactagagggatacattagaatcaatcttgacatttttctgaatatatttgcctaggaaattcattgtcaacatgttaa

SEQ ID NO: 181662 - DNA, 556 bp, Homo sapiens
ggattacagaagttttctttttaaatgtatgccaatgttgtctatttttacctttttgtaaaagtcatctgagataatttctccacatagagattcccaagccctttccctagagattccgattaagtcttattctagcagatctcagtaatctttatttttttgtcaaggcatgtatgtatctttctaatgatcaggccagtttggaaaatattgacttatattcttcattttagtaaaagttatgcatataatgactcaaatgttatggaatttgaactgaaataaaattttaggtatgcaatatgaaacaaaatttcttactctactgtttggtcatccatagmaaatttatcttttattttaatgaccagtggtatacccaacatgaaatatatttaactgatatcttctttttgttggtagaaacacattcaggacttaaggaattctatcatcttctttatgatatttcttaactagagggatacattagaatcaatcttgacatttttctgaatatatttgcctaggaaattcattgtcaacatgttaa

SEQ ID NO: 181663 - DNA, 559 bp, Homo sapiens
taaccaactctgagtaattggaatagaaaaaaatatacttcaaaacatgatatttctccaacaatgtttggtgatttatgaagcaaggttcatgaaaagggcaggaaataatggaaactaagaggttggaactacaaccaaaatcatgctttrggtccacccaatggtaagtttcccaaataaacaatgagtttcaaattcagagcatgagagaaagtgtgaaatatttactgttccaattgtttttttccttttccaccttcttcctaatcaatcagatgcccatattataaagttaactttagtgttactttttatttgtttgtatttagcaacgttgagtgagttatttaaattctttaaatctccttaggagttaatacagtatcagtaatagaccaatattttgggaattatattaacaggtctaatttcttggtgtttggaggtatctcacagcctacatgaaaggtaagaaatcccccgaaacttataccacagattagtaacttttctattcattttgcatattttccattgcatttctccctttgagaca

SEQ ID NO: 181664 - DNA, 632 bp, Homo sapiens
cctgggcctcccaaagtgctgggattacaggcatgagccaccgtgccctgccaatttgatgaacttctaaattgactatatagaacacaatattatcattgaactatatttgcatattaatatctaatgacttactatatttggggaaataagtaagtagccttggaggcagtgttctaatgtgataagtgcaatatggtgatgttttctaaaatacaagcttaaacatatttctttacacctatatatgcctgtgtgtaagtgtatatatgtgcataagtgcctacacatgtatatacatatacctgatatatacatrtatatgtgtgtatataaacatatatatgtatattcaaataaggaatgtaaatatgccagaatattttaaaattagtatgtaatactttatctttttagtatactatatttttattatataagagacagtctaaatgagaagtatacctaatgaaaaggtatagactacagttcacacgggaattacataaattccagagcacttgataaattaattaccagatcaagtcagttaaattccatagcagcatcataaggaaagtctgtaactgggatatggacagcagcaaaaccaaatgcattgaattaaggca

SEQ ID NO: 181665 - DNA, 532 bp, Homo sapiens
aaaaaaccccatctgaaggtcaccaacatcaaagatcaaaggtagaaaaatccatgaagatgaggaaaaaaatagcacaaaaatgctgaaagttccaaaaaaagaatgcctcttcttcttcaaaggatcacaactcstcacctacaagggaaaaaaactggacagagaatgagattgatgaattgacagaagtaggctccagaaggtgagtaataacaaactcctacgtgctaaaggagcatattctaacccaatgcaaggaagctaagaaccttgataaaaggttagaggaactgccaactagaataaccagtttagagaagaacataaatgacctgatggagccaaaaaacacagcacaaaaactttgtgaagcatatacaagtatacaagctgaatcgatcaagcagaagaaaggatatcagagattgaagatcaacttaatgaaataaagtgtgcagacaagattagagaaaaaagaataaaaagaaatgaacaaagcctccaaaaaatatgggactatgagaaagat

SEQ ID NO: 181666 - DNA, 600 bp, Homo sapiens
ttttagcagtaaaaccaatgtacagtatatccaatcaagtttgttttatagggctaaatcatcaaatatgctgttgcttatccaaaaaccaaattgagagatggctaaaagtttggcttcccctaataatttaaattatttgtgtcacctatatttcaataaaaaggagaattctgagatccatgaygacacaccactgcttctttaatgcattgatgtaacaagctgctgaacaattatagcttcagattatactttgaaagaatatgaaactcattcaatagaaatagcttttggttttatgctgagcatggctttaacatttttttttcatacttccagattccaagaagaaaaaatttcatttgaatttctctctgtttctgtctactttcttggtaagtagctagaccaaggaatggtttgggaaaatgcataatctctccataatctccgtaaactaactatgtcaaagttgcttgaaatcaaataggcagatagatttcacctagacatgtccaaaaaagaaattctttgaggtcctattgctcttggctattatccatactccactaacccatgtctttgtgttcctggaca

SEQ ID NO: 181667 - DNA, 600 bp, Homo sapiens
ttttagcagtaaaaccaatgtacagtatatccaatcaagtttgttttatagggctaaatcatcaaatatgctgttgcttatccaaaaaccaaattgagagatggctaaaagtttggcttcccctaataatttaaattatttgtgtcacctatatttcaataaaaaggagaattctgagatccatgacgacacaccactgcttctttaatgcattgatgtaacaagctgctgaacaattatagcttcagattatactttgaaagaatatgaaactcattcaatagaaatagcttttggttttatgctgagcatggctttaacatttttttttcatacttccagattccaagaagaaaamatttcatttgaatttctctctgtttctgtctactttcttggtaagtagctagaccaaggaatggtttgggaaaatgcataatctctccataatctccgtaaactaactatgtcaaagttgcttgaaatcaaataggcagatagatttcacctagacatgtccaaaaaagaaattctttgaggtcctattgctcttggctattatccatactccactaacccatgtctttgtgttcctggaca

SEQ ID NO: 181668 - DNA, 480 bp, Homo sapiens
aaattttactctaaagattcatcagagggatctgagtatggcttccattgtgatttagctgtaagtctgtaaaattagtataattgtacaccataacattgttgtaagaattaaagtgatttagacataaagtgctgaggaaaatgtgttctcgtgtgtgtgtgtgtgtgtgcgcttcaagaaaactaagaacrtaaacactatttattatgtttcaaattaaaaaaagtttacttcaattgatatacatattctacgattcagtaaatgttgagcaactgaatatacaaatgggcaatggccagaccatatataacagtagaactctgacctgtagcctctgtagcaactagtctgggaggccagaacagaacttctacagcaactagcccacgagagcaagccacaatctttgcagcaattggcccagaatggggaggacttaatcagtaactgccagcttctctattttttttaacc

SEQ ID NO: 181669 - DNA, 599 bp, Homo sapiens
gcaacaattagactgacagttcacctcataaaagcaagaaagccagaatacagtagaaggatgtgtttaatctactaaaggacaataatatccatattagaattctatacctgggaaaaatacccttcaattaggagagtaaaatatactgttagtgctgggcacagtggctcacgcgtgcaatcccagcactttggragaccgaggagggtggatcacctgaggtcaggagttcaagaccagcctggccaacatgatgaaaccctgcctgtgctaaaaatacaaaaattagctgggcatggtggcaggcacttgtaatctcagctactcgggaagctgaggcaggagaatcgcttgaacctgggaggtggaatttgcggtgagccaagattacaccactgcactccagcctgggtgacagaacaagactctttctcaaaacaaacaaacaaacaaaattgttagattgattttttttaaattgatagtcttcacaatcagcagatttgcattaaagagaataaaagctagttaactttaggcaggaagttaatttcaggaaatgacttctgtcagaagcacagaaatgtgacaaggaa

SEQ ID NO: 181670 - DNA, 599 bp, Homo sapiens
gcaacaattagactgacagttcacctcataaaagcaagaaagccagaatacagtagaaggatgtgtttaatctactaaaggacaataatatccatattagaattctatacctgggaaaaatacccttcaattaggagagtaaaatatactgttagtgctgggcacagtggctcacgcgtgcaatcccagcactttgggagaccgaggagggtggatcacctgaggtcaggagttcaagaccagcctggccaacatgatgaaaccctgcctgtgctaaaaatacaaaaattagctgggcatggtggcaggcacttgtaatctcagctactcgggaagctgaggcaggagaatcgcttgaacctgggaggtggaatttgcggtgagccaagattacaccactgcactccagcctgggtgacagaacaagactctttctcaaaacaaacaaacaaacaaaattgttagattgattttttttaaattgakagtcttcacaatcagcagatttgcattaaagagaataaaagctagttaactttaggcaggaagttaatttcaggaaatgacttctgtcagaagcacagaaatgtgacaaggaa

SEQ ID NO: 181671 - DNA, 549 bp, Homo sapiens
aaacaacaaaattgaaacattgtggtgcactggcaagactgcaacagtctctgccattgtagtgtgaacacagacatagacaatataaaaaaaataataatgagcctggctctgcaccagtaatgccttattaaaagagggctggacttgctcagcaggccatagttaacatagttaactaaatcctcatatagagcatacttcttaattacaataaaattaggttagaagcatataataaaaagaaaattggaatatcctcagacatacagaaatttaaaatttcwcttttaaagatgccataattcaaagaaaacattgctaggataaaaaatggctataatacatgaaaaaaatacctcatatcaaaatgtgtgttactcactaaatgaagtaggggtgctcagggagttggctgattccgcatctgaggcaggatatgaacaagatgagcctaaaacctgttgtgaaaagagaaaattaagaaatttttcaaaatcacagtaaaaccacaggaaccattttaaaatttatccctcagaagttgag

SEQ ID NO: 181672 - DNA, 549 bp, Homo sapiens
aaacaacaaaattgaaacattgtggtgcactggcaagactgcaacagtctctgccattgtagtgtgaacacagacatagacaatataaaaaaaataataatgagcctggctctgcaccagtaatgccttattaaaagagggctggacttgctcagcaggccatagttaacatagttaactaaatcctcatatagagcatacttcttaattacaataaaattaggttagaagcatataataaaaagaaaattggaatatcctcagacatacagaaatttaaaatttctcttttaaagatgccataattcaaagaaaacattgctaggataaaaaatggctataatacatgaaaaaaatacctcatatcaaaatstgtgttactcactaaatgaagtaggggtgctcagggagttggctgattccgcatctgaggcaggatatgaacaagatgagcctaaaacctgttgtgaaaagagaaaattaagaaatttttcaaaatcacagtaaaaccacaggaaccattttaaaatttatccctcagaagttgag

SEQ ID NO: 181673 - DNA, 549 bp, Homo sapiens
aaacaacaaaattgaaacattgtggtgcactggcaagactgcaacagtctctgccattgtagtgtgaacacagacatagacaatataaaaaaaataataatgagcctggctctgcaccagtaatgccttattaaaagagggctggacttgctcagcaggccatagttaacatagttaactaaatcctcatatagagcatacttcttaattacaataaaattaggttagaagcatataataaaaagaaaattggaatatcctcagacatacagaaatttaaaatttctcttttaaagatgccataattcaaagaaaacattgctaggataaaaaatggctataatacatgaaaaaaatacctcatatcaaaatgtgtgttactcactaaatgaagtaggggtgctcagggagttggctgattccgcatctgaggcaggatatgaacaagatgagcctaaaacctgttgtgaaaakagaaaattaagaaatttttcaaaatcacagtaaaaccacaggaaccattttaaaatttatccctcagaagttgag

SEQ ID NO: 181674 - DNA, 409 bp, Homo sapiens
tcaaagaaccttttcattgacctggatgtttaaatagccatttgacaattttacacctttaagcaattgaaagaagtaaataaggaaactgactatgagtgtcaagggaaccaagtcacaggcacaaaacatctgtctgaaactcaagagattctctggactaactcatgrtatttttacatgtgttagtaaatattgatggaagattagagaaacttaatataagcaaaatcactaaactctcaggacaaatttcaggagagaaacttgggcatgctctactgcagaaaacatcagtaacaacaagaaaactgcaatggttgaggtattgtctaacacataatggttagtggaggaaggacgttttacgatccagatgaaagttataaattatggagaacacttggat

SEQ ID NO: 181675 - DNA, 409 bp, Homo sapiens
tcaaagaaccttttcattgacctggatgtttaaatagccatttgacaattttacacctttaagcaattgaaagaagtaaataaggaaactgactatgagtgtcaagggaaccaagtcacaggcacaaaacatctgtctgaaactcaagagattctctggactaactcatggtatttttacatgtgttagtaaatattgatggaagattagagaaacttaatataagcaaaatcactaaactctcaggacaaatttcaggagagaaacttgggcatgctctactgcagaaaacatcagtaacaacaagaaaactgcaatggttgaggtattgtctaacacataatggttagtggaggaaggrcgttttacgatccagatgaaagttataaattatggagaacacttggat

SEQ ID NO: 181676 - DNA, 580 bp, Homo sapiens
tatggtatgatcccatttacatcaaaatcttaaaacagataaaactatatcatggttaaaaaaaatcagaacattggttgccctagaagaaatggaagcggagattgatagagaaaaggcctgagagaaayatttgaggggatgatgacattctatatcttcatgcatctatatattgatgtattttgcaaaaatatacacttttgttcaagactcagagaatacgcatgtaacatctgggctgtccattgtataaaaaatattgggatgcaatgagttaatgcaaatgattcagtgaaatctcagtcaaaaccccagaaagttattttgtggatatcaataaactgattcttagtttagacaggcaaaacccccagaatagtcaactcaatattgaaagaaaagaacaaggtcagaggactagcaatactaaatttcaagacttactattatacaaagtcatagtaaataagactggctggtattgatgaaagaatagacaaacatatcaatagaacataatgagagtccagaaataaaatcacataaatataaccaacctatcttggaaaaagttgca

SEQ ID NO: 181677 - DNA, 450 bp, Homo sapiens
gaaagtttttattgtttgcattgtttccttagtttttctacttcttattcatttgtatctataaaattaatgtttgggccaggagcggtggctcacgcctgtaatcacagcgctttgggtggctgaggtgggtggatcaagaggtcaggagttcgagaccagacgttggtgaaaccccatctctactaaaactacaaaaaattagctgggcgtggtggcaggcacctgtaatcccagctactcgggaaggtgaggcaggagawtcacctgaacccaggagacagaggttgcagtgaactgagattgcgccattgcactccagcctgggcaacaagagcgaaactctgcctccaaaaaaacaattaatgtttgaaatacgaagattactcaggcaaataaaagacatttatacctagccaaccaacccacctttacttaagccacaacctg

SEQ ID NO: 181678 - DNA, 587 bp, Homo sapiens
tggggcagtaaaagcctgagtatcacacarcagggtttccatagtgtcctaaccatttataaatcaaatccatttaaggccaataataaataggacacagcaatttcaagagaaacagtgtggcttcttcaaatatttaaacaattccgaattttgcaacttcaaaaagttattttgcatttaaaaatacctttatttgctctacctgaagactatttttgaggcaaaacaaagcagcactagaaggccagaatcagaatattcttaatgccttcttgagctccctctactgatttttagacagtttttaatttaaccgaagtgttcagcaaaacatgtataattaaccagaagtccagtagagtagcatccagagcagttttcacagctgggcacacagtccgactacagacattatcaattaagttgtactatttgtgcacagacagggaaacaaacagaatgaaagcccttcgactttctcaggcctcaggacatgtagagaaacagggcactggctaaaagaaaataaacagttgcagagggtattaatttgaaatcgttgttgtcatgaattgtaaagaagt

SEQ ID NO: 181679 - DNA, 581 bp, Homo sapiens
agtaaaagcctgagtatcacacagcagggtttccatagtgtcctaaccatttataaatcaaatccattkaaggccaataataaataggacacagcaatttcaagagaaacagtgtggcttcttcaaatatttaaacaattccgaattttgcaacttcaaaaagttattttgcatttaaaaatacctttatttgctctacctgaagactatttttgaggcaaaacaaagcagcactagaaggccagaatcagaatattcttaatgccttcttgagctccctctactgatttttagacagtttttaatttaaccgaagtgttcagcaaaacatgtataattaaccagaagtccagtagagtagcatccagagcagttttcacagctgggcacacagtccgactacagacattatcaattaagttgtactatttgtgcacagacagggaaacaaacagaatgaaagcccttcgactttctcaggcctcaggacatgtagagaaacagggcactggctaaaagaaaataaacagttgcagagggtattaatttgaaatcgttgttgtcatgaattgtaaagaagt

SEQ ID NO: 181680 - DNA, 558 bp, Homo sapiens
tgagtatcacacagcagggtttccatagtgtcctaaccatttataaatcaaatccatttaaggccaataataaataggacacagcaatytcaagagaaacagtgtggcttcttcaaatatttaaacaattccgaattttgcaacttcaaaaagttattttgcatttaaaaatacctttatttgctctacctgaagactatttttgaggcaaaacaaagcagcactagaaggccagaatcagaatattcttaatgccttcttgagctccctctactgatttttagacagtttttaatttaaccgaagtgttcagcaaaacatgtataattaaccagaagtccagtagagtagcatccagagcagttttcacagctgggcacacagtccgactacagacattatcaattaagttgtactatttgtgcacagacagggaaacaaacagaatgaaagcccttcgactttctcaggcctcaggacatgtagagaaacagggcactggctaaaagaaaataaacagttgcagagggtattaatttgaaatcgttgttgtcatga

SEQ ID NO: 181681 - DNA, 558 bp, Homo sapiens
tgagtatcacacagcagggtttccatagtgtcctaaccatttataaatcaaatccatttaaggccaataataaataggacacagcaatttcaagagaaacagtgtggcttcttcaaatatttaaacaattccgaattttgcaacttcaaaaagttattttgcatttaaaaatacctttatttgctctacctgaagactatttttgaggcaaaacaaagcagcactagaaggccagaatcagaatattcttaatgccttcttgagctccctctactgatttttagacagtttttaatttaaccgaagtgttcagcaaaacatgtataattaacyagaagtccagtagagtagcatccagagcagttttcacagctgggcacacagtccgactacagacattatcaattaagttgtactatttgtgcacagacagggaaacaaacagaatgaaagcccttcgactttctcaggcctcaggacatgtagagaaacagggcactggctaaaagaaaataaacagttgcagagggtattaatttgaaatcgttgttgtcatga

SEQ ID NO: 181682 - DNA, 581 bp, Homo sapiens
agtaaaagcctgagtatcacacagcagggtttccatagtgtcctaaccatttataaatcaaatccatttaaggccaataataaataggacacagcaatttcaagagaaacagtgtggcttcttcaaatatttaaacaattccgaattttgcaacttcaaaaagttattttgcatttaaaaatacctttatttgctctacctgaagactatttttgaggcaaaacaaagcagcactagaaggccagaatcagaatattcttaatgccttcttgagctccctctactgatttttagacagtttttaatttaaccgaagtgttcagcaaaacatgtataattaaccagaagtccagtagagtagcatccrgagcagttttcacagctgggcacacagtccgactacagacattatcaattaagttgtactatttgtgcacagacagggaaacaaacagaatgaaagcccttcgactttctcaggcctcaggacatgtagagaaacagggcactggctaaaagaaaataaacagttgcagagggtattaatttgaaatcgttgttgtcatgaattgtaaagaagt

SEQ ID NO: 181683 - DNA, 538 bp, Homo sapiens
ttttttttttttttttttttgcattaggatgatttttacttcaacttctgctccacacacatttytgtcagtataagtcacctcttctactctctgataaagttctcctgtttttaacctaactggaacaatttcttacccttggcattgccctcatgctcatatttgtcagactactgcagtgttaatactgaattatgcaattgttagcatatgttttatgtttgctaaatgattgattctctgtttaatgtattttgcaaggaatgtcttaataatgagaaaggtgataagaattataaaactgatattacatggatgcttcccattagtccatgagtgtatggttatgcaaaaataactgaggaatggaatttacttaatataaatatctttaagacataagaatttttagtagtgtggctaaaaccacactttcttttctactccaaaattgcataaattttgttttgggaattcataaaatttggttaagcaatttggaatttaaaccaagggaaattattttatatctgga

SEQ ID NO: 181684 - DNA, 620 bp, Homo sapiens
tcaaatgtaaatcttttgaagttgttcacatgttttaccctaaacagatattctttgtaggattcatgtcagtcatgtgatcttaaattaaatattcatacaaattttgaaagcctggattgggtagaggggcaaaaaagaatatataaaacactgagctaggaagtttatacaacataatctcctttaaatacacagagaatcattctttccactacaaattttgaaatgttcttgttaaaactaattatgttggtataaatatttaggctgtgaaatttctaayagaattatggcttattttattttcaattttatttattatcttgaaacatgaatacatatcttaattttataacttatttgaaaggcatactatatataaacattatatttactcaaaatgtacctaagtgtgtcattgacttccatttgcacaaagttttccaagatgtatgtctttattcaagtataaatatttaccttgaactaccaatatctggaattctttaagatgaaatttaatgtttcatctaacaataacatatttaaacactgaagtcaaactatgctactggcaataataaccaaaggttgactcagtgagattgcaaatgtaa

SEQ ID NO: 181685 - DNA, 535 bp, Homo sapiens
aatttctgatgattcataaaatcctgtgcatagtcttaagcatttataaacacagtttcattttatatgcataacagtttataatgtagatatagggaaaccatctttttttaaaaaaagttaaattatttttcaactgttattttagattcaggggatatatgtgcatgcttgttacctggatatattccctgatgctgaggtctggggtatgagtgatcccaccacccaggtactgagcataatacccaataattagtttttcagcctttgcctccctcccgcctctccactcttgtagactccagtgcttgctattgtcatccttatgtccatgtatatacaatatttagctcccacttataactgagaacatgggatacttggttttctgttcctgtgttaatttgcttaggataatggtctccagctgcacccacattgctgcacaggacatgatcttatccttctttatggctgtgtagtattacatggtgtatgtgtaccacrttttcttcatccaatctaccattga

SEQ ID NO: 181686 - DNA, 440 bp, Homo sapiens
gcttacttaacagttccaccttcatgtttcaaaaacagccctcgtagtatgcacaccttcacataacaccacacttttccagattttcattcatctgtgtacttaaaccagaaaccaaggaaacatctttgatatctcttgtttaccctttagattaaactcatcattaattcttttatatctaccttctaaatacattcccaaactttgcttcccctccaaattgacggtccccactctattgcaagctgtcaagacrcttctcacctaaactgccccaaccacatcctcgctagtcttccacatttctatatatgcatcttaagtccactctccacacaagagcctgagtgatcatgttattgcactcattaataactttagcatattttcacgtacttttaagataaaaaccaaaatccctgacctagctgacaagt

SEQ ID NO: 181687 - DNA, 450 bp, Homo sapiens
ggttagaaaatggtaatattctatcatttcttccttatttattaattggaatcattttataaagagaaatttcttttataaattttttggtcttccartcgtttgtacccaagtcaaatacttgaaacaaattatattcaaataagtctaaggttcatctatgtccccactattctactcatttgtactctgaggtatagctcataaaaggaagaaaggataaataattgcttttgttctaatttgccaatttttgaaactaatgagctagtttcctgatagtctccaaaagtaactatttagtattattattaatatatttaaacaaatatgatatgtttccatccattgcagttattactctgattaacgttcaaagtggcccatctttgaccagtgggtgacaattcatgttggctcctgagtcctttgagtgcaacctctgtagtc

SEQ ID NO: 181688 - DNA, 561 bp, Homo sapiens
tctagccttgccaaaagaaagtttttgaaattgggtgtttaacaatcaggtgggaaatagatggcatctcagtgatgtttttattttgtattccccctattatgagcatcttttcacatagtttagacacatttgctcttttttctttcaaaaatttgtattttaactcattttttatagttacttgtctctatattcagctgttatttctttaatttcagtagctttaggggtacacatagtttttagttacatggattaattgcatagtggtaaagtatgggtttttagtgtaaccatcacccagatagtgtacactgtagccaatagatgatttttttctccctcacccctctttcagccttcccccttgagtccccaatgtccaatataccactctgtatgcttttgtgtacccatggcttcgctcycacttataagtaagaagatgcagattttggtttttcattcccctgagttagttcagttaagataatagcctccaattccatctaagttggcgtaaaagacattatttcattcttttttatatctgagtac

SEQ ID NO: 181689 - DNA, 604 bp, Homo sapiens
tttatagttgaactcctatgccatttacttacaacacttcaatgacaaaacatactgtatcttatattaaagtgatttttgtttttactaggctatagcttccttgaggacatggattattcctgatccatttatgtatctattgtagagtctatcattgtgccttctaatatttaagctgctgatcaatgtgtttcaatgagttggaaataatatcaatgagttatttgaattcaggaaatatgtagacttcatggtacattgtctggcatagagtaaatatttctcctccttgcagcttctgtgatagtttttgctatgtgggtgtatcagtccattttcgcactgctgataaagacatacctgaaactgggaaagaaaagaggtttaattggacttacagttccacatggctggagaggcctcagaatcatggtgagaggcaaaaggcacttcctaacatagtggtggcaagagaaaaatgaggaagaagcaaaagtggaracccctgataaacccatcagatctcatgagacttattcactatcacgaacatagcataggaaagactggcctccatgattcaattgttcagtaagaaggg

SEQ ID NO: 181690 - DNA, 604 bp, Homo sapiens
tttatagttgaactcctatgccatttacttacaacacttcaatgacaaaacatactgtatcttatattaaagtgatttttgtttttactaggctatagcttccttgaggacatggattattcctgatccatttatgtatctattgtagagtctatcattgtgccttctaatatttaagctgctgatcaatgtgtttcaatgagttggaaataatatcaatgagttatttgaattcaggaaatatgtagacttcatggtacattgtctggcatagagtaaatatttctcctccttgcagcttctgtgatagtttttgctatgtgggtgtatcagtccattttcgcactgctgataaagacatacctgaaactgggaaagaaaagaggtttaattggacttacagttccacatggctggagaggcctcagaatcatggtgagaggcaaaaggcacttcctaacatagtggtggcaagagaaaaatgaggaagaagcaaaagtggaaacccctgataaacccatcagatctcatgagacttattcactatcacgaacatagcatrggaaagactggcctccatgattcaattgttcagtaagaaggg

SEQ ID NO: 181691 - DNA, 616 bp, Homo sapiens
taatactgtgtttttactgcaccttttctgtgtgtagatacacaagtacttaccactgtgttacagatgcctgcagtattcagttcagtagcatgctatacaggctcttagccyaggagcagtaggctataccatatagcctaggattatgtaagtacactctatgatgttcacacaatgacaaaatcacctaatgatacatttctcagactgtatccccattgttaagcaatacataattatattttagggagtctgtgtgctgtaaatttttttttccaatttcaaatctttgttatttatgtaattctcaaaagttgttttcctgtctgcaccaaggtattttgactagagttttaaaataaaactatttgtcttagaagtatccataggcctctttatttcctccctttccacactttttgcctgtgctgggatctgaactttcatcagcctatcttctattatttttctcagaatacgtcagttcattccgttgccaatcttcctagagacactttctcctcatctagaccatcgtttagcttgtacaaatacacaggaataaaaaccatttcttggtatttttactttctggaggaatactttttatctc

SEQ ID NO: 181692 - DNA, 537 bp, Homo sapiens
caggctaccttggtccatcataaacgtcctacttaagaaatcaagatagctagatagtcaaagaaatgtgttccttggtcatattttccataatgaattctcctcttattggccatgcattttgcattatctaatctatacatccmtttggtctatacatccatttgcttaccatcagtctgtattgagcaacaacaataatatctagaactacacaatgattattcttgcaaaataaactagccttgaaaactaatatagcactagcatgctaagaaggaattttaccgtctagtaagtctattctatgggagatgaaataagtgaccactttttgatatctgcccagaatagattggcacctacttggaacattattctattgcttgactaaattaagtggaaggatgataaggatactattatgacacatggaaactcttccatagtttccttcccaatgcatctgtaatgggtttgttccgattttcacccctcagtgtcatcctttatcctgtccttcaaactaaaacatct

SEQ ID NO: 181693 - DNA, 582 bp, Homo sapiens
tatgtatgtgtatctatatgtgtatatatgtgtgtgtttatatatatatatatatatatatrtgtgtgtgtgtgtgtgtgtgttaagagttcttagactttaagatggaataaggaataagatggaataaggaaaacgctctgcaagcatccaagctttaaagcaaatcatttacaaggcaaagaaatcaggttggcctcaaatgtttccacagcaatattttatgctaggagacaatacagcactagctataaaattctgagggaaagtttgacacaagaatattatacttaacttaaatggtgtatatgtatgaaggcaataagtaggcaatcattctcttgcattgttgctctttgaaatttaattataactccaaaaccgatttgttttcaccctcaatatcttatatttgactttcctgtgcacgctagtgtaatgctttattatttgtttttaagcttttatgatctagaatttatgttattacctcccggtaaaaatataaaacaagatggagaatacacaatccatgagcctttcaaaaaactacttgacaaatatatctactcaaaacaaatc

SEQ ID NO: 181694 - DNA, 553 bp, Homo sapiens
atcctacagtgatacagccttttcagattggcttctttctgttaatactatactatacttttaagtttcttccatgtcttttcatgcttgatagctcatttcattttagcactgaataatattccattgtctggatgtaccacagttgttttttgttttgtgtgtttctttagttgaaatatttctaaagcataaaaggtaacacaagttattacaagtactgtgattgttgaaattacatttcaacattgtcagtttgactgtctcaactcttggttctggggtcactaagacttactgattcctyattttttgcctccaaaacatatgaaaaaatatgttcaagactttggctgaggcttgtataaatatcacactcataaagcagtcagcttgcaactgttgcgcctattacttaatgttatgctaatgttacttaaacttcaggtcaaatagtcacaaatcctttcatagacagaccatgctaaaggatttccagagaaacatttctcttttctctcctccagagatcaattcagtgtcaatctgagcc

SEQ ID NO: 181695 - DNA, 424 bp, Homo sapiens
actgaattcttatgataattcaatgagttaatatgtttcatgtgcttaaaacaaaggctaaaacacaattaacgctcaacaaatattagctgccattatgcttattatcactgaagcttcctcaccacactagttgagttcattagatatctcaaaatgtacatctcaaaaggatacaatataatcagcacacacatgaaaattctgttttttccattgctgtgatagctgagcacttctaacatggattayaaaaattaccctcattaacactttgaaagaaaagtacaaatcaagacccacatgtcatatgtctacatgctttaaaagctaacgaatcattaaattaacaaaaattctatcctccttgtttgacaaatacacttcatggtgacctagaaggccaagttcaaatgtaaacttc

SEQ ID NO: 181696 - DNA, 397 bp, Homo sapiens
ttaatttctttgggtagtaaatctctattataggaagaagaatgtaagaattggttacaataaaggctgttttactttggggaaataactgaatatttttgaccttcatagaattatgcagcttccaggtggtcgtggtttagtatttgagcatttagaaaaataggagagggctgtataagaatgaagtaacagaatttgttggagtattataaggagaactttaaatggactgtgacagaggaaaaaataaataaaatacttatttcagtcattaccattagtggtcagaatmgcttgtatttaaatagtggaaccacagagaataaatatcttaaaggaaagaaaggaatagaaagcaggtcaactgacctttatcaagatttatgtttctgat

SEQ ID NO: 181697 - DNA, 559 bp, Homo sapiens
aatttgacaaagttttatttctatttgttagtaataaaaggaatcatcattttactgaatatatagccattggttttaatgatttcagaacaaataatcttgtccagggggttttagtcatcttagtctttacttattcttatctgagaagagcagaaataaaatttctcatcagaaaagtagacacggctcctgcctatctttctgtcagcartccaccagagtgttcatttcaaggcaccatatctagctccagatgacctaggtcaatgtccattaaatattgggaaaagtaaatctttcaagtcccaaagtggtgaaagaaaaattagcattccaaaatcattctttgccactgcttctttcttttaatatatttgaaactattcctagaaacttttaaaaaaaataggaactttaaaatatctaaaccttccttttatcacaccctgtctcacatcacttctaaaatacatgttttgaagtgcaattcccgagttttacattatgtctggacttctggctaattctagtattgagtactctagatgggctattt

SEQ ID NO: 181698 - DNA, 634 bp, Homo sapiens
ttcattctgttataattatatgtcagaaccaattactctacatgaatgcaattttccacataaatggtgttgacaacaaytgatattgtggcccagaggctgtagaaatggtcaaagccctagctgggaggatagcttttaaaaatgttgtttaactgaattagcttatttcctttcctttctgctgcctattttccacctcttgtttagaatgaaccaacattttaatagccaggactagaaaagtggtggtgaggggaggcattaaatgaaatgatagtttatctagagaacatgcaatgaatccacacttaactttcttcatcactttcccctatttcagaacttgcataaacttctgtaaagtcttcagttcttgttttgtttatttatttgggataaaataaattatcatctcatctacgtacaaggagcaaaatacacaggtagccttgcatggatcatagacatgagaaaactgagcattctcaaactttttaaagatcaatttattttgaaaaaatttacaggactgattttgctatcttttcaaataagcatttctgtgaatttttaagtttgaaatgttatattcaagtaatttccatttatataaaaatatagcaatcaaaat

SEQ ID NO: 181699 - DNA, 434 bp, Homo sapiens
aatatgcaaacacatgagttatggatgtaaaatcataatacacaaattattgtgtgttcattaaataatttaagatatgacttttttcatactgcaaaaccattcagtttatcataactcagactaagagacatcttgtgcctacagagttctcaaaaatatcctgcatatgcaaaggtcccttatagacataaatgaagtaaaacaaaataaaattgaaaggagaactrtgaaagaagtaacaaagcaaattagcattaagccttttctgtgggttttgtccaatccatgctctttaatgtgaagagagaacttacaatgtttatttaaaaaaaatgaatggagtgagaattacatttgactccaactctaattggtcttagactgaaagatatgataaggtattactttgtataaccattttagtaaaggca

SEQ ID NO: 181700 - DNA, 527 bp, Homo sapiens
tcatatattttattaagttttagggttttttttttatagcagatgtgctgctctgttactagtaacttcattatagcccaaagcagaaggctagagtgttttatgcaaattccaggtatcataaatatataattttatttttaaatattttaatgatagagatattttaaatatataacatatgtgattatatgccaaaaataaaaatatcatttagtattctgttcacattaaaatgtcctaaattatctcaaataggtctctttataattggtttgttcaaattacagcaattgtatttatttggttattatatctcttaagtccatttttaataatttttctttgccttcttcccctctaccactacatatttttttttttttgtaaacaragacagagtctggctctgttaccagtctggagtgcagtggtgcaatcatgactgactgtaactttgggttcctgagctcaagcaatcctcccttctcagcctcccaagtagctggatctacaggcatgtgtca

SEQ ID NO: 181701 - DNA, 496 bp, Homo sapiens
gtggtgggcacattttagaagccaagtatggcaactcctgtcacaaaagtgtccttgtggaaaagacaacttggtttgtttctgttgacaaagtcaaatcaaactgctaccacttctctccaaaactaaccttaaccagttttttccccagtgataattacctgacagctgttaagtgtttaaggaaccccattaatgagtacccctcctctcctgagttctgaaccaactgaaaattatgataaagggttaragcagatagagattaaaacattcacaagctcaccattattactgatggagctgacattagataaggtggttgccttcttttccctagaactgaaaagattgactgctgtaggcatttgtcattaagcttaatgcatagctgagaacagtagaaaatgcaagatttctaagagtaaatttactccaaaaagtatcaagaagaaggggattaacacagaatgtccaggctctacttccaaataca

SEQ ID NO: 181702 - DNA, 434 bp, Homo sapiens
aagctctcattgacgggtagttgctggttatggccaacagccaggttggttcaggcactgacatgttaggacattctgcacatgcgtgcctctaacactcctcccccagcctcttccttccctctgcagagacacccttctcctttctgctgtctctgcacgggtggccagagccacacagccctttctttaagtcaggagttgccctgtcagagcacaaggcaagaaggaagtggtaaagggacggaggggaagccctgagaggactgagaggatgggaaattctctgctgagagaaaacaggtaagtctagactccctgtgggagagcagaggagatgggacaggacaayacagcaaggaagagaaaaagaaagctagtatacagttagcacactaagttggggtagaaagtagttgggtaaagaaactgcc

SEQ ID NO: 181703 - DNA, 536 bp, Homo sapiens
cagatctcatgagaattcacacactatcatgagaatagcaaaggggaaatctacccccatgatccaatcacctcccaccaggcccctcttaycattcaacatgagatttgggcagggacacaaatccaaacaatatcagatggtcttagagggtggggcctttgggaggtgattagatcatgaggggagagcacttttgaatggtattagtgcccttataaaagaggcccagaaagctgcctttccccttataccatagaagatatagctagaaggcatgatctacgaaataaaaagtgtgccctcaccagacagcaaatgtgtgctgacactttgatcttggagttcccagcctccagaactgtaagcaataaatttctgttatgtataagctacctagtttatgatattctgttatagtagcccaagcagactaaaatagcatacaaacaaatggtagtttcacatgtataataattgagatgatgacagttatttttagataaatatctctagccaagagtacttccaaaact

SEQ ID NO: 181704 - DNA, 482 bp, Homo sapiens
agaaattcaagctatcattacagactattatgaacaactatactccaacaaattggaaaacctggggggaatggataaattcctggacacataaacctactgagattgagccaggaagacataggaagtccgaatagaccaatgaagacttacaagattgcagcagtaatataaagtctcccaagaaaaaaacatttttgaaagggaaggaattcttccaaactcattttatgaggctagcattaccctaataccaacagcaaacaacacaacaaaaaaagaaaactataggctaatatcyctcatgaacacagatgcaaaaatcctcaacaaaatactagcaaacaaagtctaacagcacatcaaaaagattatacactatgatcaagtgggatttatcccaggaatgcaaggatatttaaatatacacaaatcaacacatgtaagacatcacattaacagaaagaccaaagccatttgat

SEQ ID NO: 181705 - DNA, 479 bp, Homo sapiens
ggccttaattacacaggatgtatgcctttaaatcaggtagtgtaaatcatctaacttttttatatttgttttgcctattataggtcctctgcattttcatatatattctacaaaaagagtctgtggagagttggattgaggttgtattaaatctatagatcaatttttgaagaatggatatcttaataatattatgggctctaatccacaaatacggtgtacttctccatttatttaatcttttttcagttatctargaaatattctatggttttcattgtagagttattccacgtatttcattaactttatctcttttatattttgattatttttgtaaaaagaattaaaaattttatttccagttgtttgttactagtatatgaaaacacaattaatttttggaatttggacttgtattttaccatcttactaaattcattataaattctagttatttttggtagaatcttaaaaat

SEQ ID NO: 181706 - DNA, 575 bp, Homo sapiens
tcaacttcctttttcatttataagcacagcaataggcaacatctattttatatctagggtggaaagccctcttagatttgaggctttccagctgataccatcaaaaaaacatcaaggactgcttatagcaatttgtgttgaaatataaaactattttatttgatctttcaaccatagttaataacgtgctccaaatgaagcagtgacacccatttctcaatcttatcatttttcttgtcacttatgacatctctgggcttagaaagatggtgatataaagacaacccataggggagtgtccctactcagcatattaagctgcayaattgagtagtgagctcaagctcaacttatgaaagtggtgtccatccacctactaactacaccaggctaagtggatatttaaaatgtcttgtggacaaggttgtgctcaaattcctactttgttaattgaatgcctaactctgtgatagaagcagctcttagaagtcaggtcacaagcccaaatattaaccatatacatatcagaattttgtcaagaatgagtatgttagcaaacatggccacatactgca

SEQ ID NO: 181707 - DNA, 575 bp, Homo sapiens
tcaacttcctttttcatttataagcacagcaataggcaacatctattttatatctagggtggaaagccctcttagatttgaggctttccagctgataccatcaaaaaaacatcaaggactgcttatagcaatttgtgttgaaatataaaactattttatttgatctttcaaccatagttaataacgtgctccaaatgaagcagtgacacccatttctcaatcttatcatttttcttgtcacttatgacatctctgggcttagaaagatggtgatataaagacaacccataggggagtgtccctactcagcatattaagctgcataattgagtagtgagctcaagctcaacttatgaaagtggygtccatccacctactaactacaccaggctaagtggatatttaaaatgtcttgtggacaaggttgtgctcaaattcctactttgttaattgaatgcctaactctgtgatagaagcagctcttagaagtcaggtcacaagcccaaatattaaccatatacatatcagaattttgtcaagaatgagtatgttagcaaacatggccacatactgca

SEQ ID NO: 181708 - DNA, 561 bp, Homo sapiens
cccgcattctggacaattgcactgaatgattactcacctgcatctctctggggtagagcccccagcagacaggcaaaagaccttcatccacaaccactgctaaggtcatttccactgttgccgccaagttggggaaggcaacagtgagatcacacaagagctgtggtaggcagccttggagtgccaatttgtgatctacagccagsactcaagtaggaaaggagcccacatgttcagggcattgacagagagcatggctgcaactgtaaggaaatgtaggggagccatgtgaccaagtaagagcccaccaactgaccacaatacctaaccaccacctactggttcacaccccaaagtttcaacaccaaaaatacctcctcactaacatatctgccctgtgaaaccaaagacaagaagtcatttgcaaataaagactctgcacaaagccttggcccaatgaaaacattcagaaaagaagtctactgactgcactcaatctgcaccacagctaaagggacacccaaacacagagatgagaaagaaccaatgcaagaactctgt

SEQ ID NO: 181709 - DNA, 561 bp, Homo sapiens
cccgcattctggacaattgcactgaatgattactcacctgcatctctctggggtagagcccccagcagacaggcaaaagaccttcatccacaaccactgctaaggtcatttccactgttgccgccaagttggggaaggcaacagtgagatcacacaagagctgtggtaggcagccttggagtgccaatttgtgatctacagccaggactcaagtaggaaaggagcccacatgttcagggcattgacagagagcatggctgcaactgtaaggaaatgtaggggagccatgtgaccaagtaagagcccaccaactgaccacaatacctaaccaccacctactggttcacaccccaaagtttcaacaccaaaaatacctcctcactaacatatctgccctgtgaaaccaaagacaagaagtcatttgcaaataaagactctgcacaaagccttggcccaatgaaarcattcagaaaagaagtctactgactgcactcaatctgcaccacagctaaagggacacccaaacacagagatgagaaagaaccaatgcaagaactctgt

SEQ ID NO: 181710 - DNA, 397 bp, Homo sapiens
gttaatgagtgaagcacaccaacgtgtcacatgtatgcatatgtaacctgcacgttgtgcacatgtaccctagcacttatagtataataamaaaaaattcaagataccattttaaaagaaaaaacagggaatttcaagtgaatataatagcatttcttataaggttcaaaagcacttactttgatgggccctctttttcctttctggtattatacacccaattaagtagtagttttctagcaaaggtaactgttttttggctttcagaataattctttattgtatcaagactcatacatctagaaaaagagagaaatctttaaacatgctttaaacattttgagataagtttaatgttgtactggaagtttaatgttgtacgtaagtttaattttgc

SEQ ID NO: 181711 - DNA, 451 bp, Homo sapiens
ccaaacatttgaggcaataaatcaaaaaggtacatggagtatacactgcagaaaacatagaatatcacaagcgaaaaagaggttattcagtcaccataagtttcctcttttatagattgggagaatggaaactaaatagattaagtccttagtcacatatcatattartaacaaaaacaagactcaaaatgaagtttccttcatttattttgtgggttcttgtacaccatattttcctgaaatacattaaaattgggaagtgactaaaagacatggcctcataacatttttaagttacaaggaaatagaaataattctacaggtatccaaacaagaaagggagctgtatttaatttcataaatattaatttattaattgcataaaaatcattcctttgtcttcatataaatgtatcattacttggataaaactcctatttttaggtctgaa

SEQ ID NO: 181712 - DNA, 451 bp, Homo sapiens
ccaaacatttgaggcaataaatcaaaaaggtacatggagtatacactgcagaaaacatagaatatcacaagcgaaaaagaggttattcagtcaccataagtttcctcttttatagattgggagaatggaaactaaatagattaagtccttagtcacatatcatattaataacaaaaacaagactcaaaatgaagtttccttcatttattttgtgggttcttgtacaccatattttcctgaaatacattaaaattgggaartgactaaaagacatggcctcataacatttttaagttacaaggaaatagaaataattctacaggtatccaaacaagaaagggagctgtatttaatttcataaatattaatttattaattgcataaaaatcattcctttgtcttcatataaatgtatcattacttggataaaactcctatttttaggtctgaa

SEQ ID NO: 181713 - DNA, 357 bp, Homo sapiens
aatatattatatcagacccatggactgttaattcttttgtaagttagttcaacttccatgtcaggtaaaatgtggctcttttttrtattgggatcataggccaatccatatcatgtatcagttatctataattaacattaattgtgacaagctgtactgttgttatctaaagttataggactattatacagctttgttgaagttgcacagccaattcaagagtagctttaattgctaatgaatgtagttcctttttttcagtcatttttctcttacaccactagccatacaatctattagtcattccaactacaaattccaaacctagatttctgtgttgcctgacatttttcagag

SEQ ID NO: 181714 - DNA, 441 bp, Homo sapiens
aatatattatatcagacccatggactgttaattcttttgtaagttagttcaacttccatgtcaggtaaaatgtggctcttttttgtattgggatcataggccaatccatatcatgtatcagttatctataattaacattaattgtgacaagctgtactgttgttatctaaagttataggactattatacagctttgttgaagttgcacagccaattcaagagtagcttyaattgctaatgaatgtagttcctttttttcagtcatttttctcttacaccactagccatacaatctattagtcattccaactacaaattccaaacctagatttctgtgttgcctgacatttttcagagcttgtctgtaggtattttctcacagtcttctacaaaagacttagaaatagatatcactgtttcccttttaaaagttaagaattc

SEQ ID NO: 181715 - DNA, 511 bp, Homo sapiens
  misc_feature (1)...(511): n = A,T,C or G
atacaatctattagtcattccaactacaaattccaaacctagatttctgtgttgcctgacatttttcagagcttgtctgtaggtattttctcacagtcttctacaaaagacttagaaatagatatcactgtttcccttttaaaakttaagaattcccttttagaattcntaaggctggagaaatatagatacttgcctgaggtcacatggcagaatgcagcagaatctgatcaggatgcaagacaattttaactccaacttgagactttttcttctgtcacacagggggtcctgattaaaaacaaaaacagaaacagaaacaggcagacaattcttccaatgcctgaatatacaaaatgcaaatatatacaaagatgcctctatatacaaacacgtaaagaaatttggattcttccctactatgctcatattatctcagagctagctgactctgttaatgcctctctattaatcctcttattgactataggataaaataaagcccttactc

SEQ ID NO: 181716 - DNA, 298 bp, Homo sapiens
aatttgaacttgagatagataatttagggtatctggcaaaagaaatctctaagcagcgaagcattcaagaagtgagctgtattgttctgaatgttttcagttatatgcattcaaaaaaagatggtttcaaattggaacttatgtttaaaagcgaagcagagtataaaggtttgggaaatatgcagcctgactataaagaaaaaactcattttctggggaggaattcaagctggttgcagaaatttgcataagtaatraggagccaaatgttaatagccaagtcaatggggaaaatctc

SEQ ID NO: 181717 - DNA, 626 bp, Homo sapiens
taagtttaaaattgagccaaaaaggtcttgattgataagggtggctgatacatttttgaatgttttcactggcatgattcacaaaattgtataaattgtatagtcccaggctatcccaccattaactgcctcatggggactgtctctaacttccccaggacttgatccatagggaaatgcttgcaagaataaaaagcattaatgaattcaggattcgtttctcactaaacagcagtttggggtgatgtcwcacacacacacacacacacacacacacaaaaatggaacaagccagccccattttcagcattgcctcatttaagcttggcacacaaagacaattgatgctgactcagagttatttcaagatggaaagagtgtcctgaattatcacaccccacgtaatcctagccaccctgtattccttctccttactgtcccataggtgggtacatccatcccagataacaaggtttgactcatttaaggcccttttccttctgcacaagatcctgaaattttccctaccgtgtgtgtttgatggtgcagaagaaataattctcaaaaataaactagtttatcattagatggaagcaaggtatcacctttattaatgagaaagcaga

SEQ ID NO: 181718 - DNA, 311 bp, Homo sapiens
ggcctgtgcttagaaaagcacagtttacaagcatctgttccagctctgccaaaagccaaaatcattccakgcataacttgtttccaaaattttacaccttgctcatttctcaaggtgcatagcccacgcatcagagttatttgagagaagctaaatgaataacattccttttgccatgacctggattacaaactaactgaaaaataacgtttcaagcaaataaaagccaaaatatacccattattaataataagggtagattgggatacaaaacttacatttgtgagcaattggacgtactaacactagct

SEQ ID NO: 181719 - DNA, 595 bp, Homo sapiens
gtattgctggacacaaattatgagtcattaagcaagtaattgtgctcttagactggtgtcacttttgacatttgttctgagttccctagacacatcaccacttaaaatsctaaatctcagtaatctcctactttcttaaaagatgaataatatacaaatatataaaaacagatctacaagggaaattcaattacaaaagatgtttatcttactaaaatagtccttcttgtgccattggtatagatagattctctgaaatgtgaaattagatcagcagtttttgttgataatgttcatgtgaaaatttggcatctgcatatttttctagttaaataaataatcttagagcactaatttactctaatgacagagacaccatttggcttcacaaaaaacaaaactaatctaaggtccatttcctatttatggggtgtatacaacattcagttgtaacattcactgaagtttaaaaaatgagttcaagcaaatttaaagcacggggacactggcacaagaactctttgccatgaatggtaatttgaatttaattacagatgttatccctatgcattttctatcaacatttaaaaaaaca

SEQ ID NO: 181720 - DNA, 595 bp, Homo sapiens
gtattgctggacacaaattatgagtcattaagcaagtaattgtgctcttagactggtgtcacttttgacatttgttctgagttccctagacacatcaccacttaaaatgctaaatctcagtaatctcctactttcttaaaagatgaataatatacaaatatataaaaacagatctacaagggaaattcaattacaaaagatgtttatcttamtaaaatagtccttcttgtgccattggtatagatagattctctgaaatgtgaaattagatcagcagtttttgttgataatgttcatgtgaaaatttggcatctgcatatttttctagttaaataaataatcttagagcactaatttactctaatgacagagacaccatttggcttcacaaaaaacaaaactaatctaaggtccatttcctatttatggggtgtatacaacattcagttgtaacattcactgaagtttaaaaaatgagttcaagcaaatttaaagcacggggacactggcacaagaactctttgccatgaatggtaatttgaatttaattacagatgttatccctatgcattttctatcaacatttaaaaaaaca

SEQ ID NO: 181721 - DNA, 495 bp, Homo sapiens
ttattttccaaagtggctctgccagtcagcattctcaccaatagtattaaaatgtttaaattcttttcacatcctcaccaatacattgtctttttatatatattacaatagccatcctgatgggtgtgaagtaatatctcattgtgctttcacttcgcatttgcctaattagtgatgtttagaawttttttacatgatcgtttgccatttttatgtcttcttttcagaaatacctatttagatcctctgtctagttttttttttaatcaggttgtcttcttgctattgagttctctgagtttctaatatattttggatactaatcccttatcatatgtatggcttacaaataaatttttttttctattgtatagattgcttcttaactctattgtttactttgctgtgcagaagctttttagtttagtttgatgaatttccatttgtctatttttgttttttgttggctgagcttttggggtcaattccaaaaaa

SEQ ID NO: 181722 - DNA, 549 bp, Homo sapiens
tggaactgaaccctgggcctccttgtcaggtgagatgactgatttaattctgcaatcaagcagagctgatggctgggaactgtagttgactctgattgggcgaagcgacagagtgtattcccttgacagatggtattgatatttaagayctgaaattggacagagttacaggctgggccccaagggtaaatggagttccctctttggacaaataagaccagctgttatgcttgatagagatgcatggttgaggtttacctccctgcctaggtggggacttgggttgagctttgaagacgacctgagcaccatttaaactcctgggtctgggaaaatccctgctctttgccaaattgccctgtggtgagcatcagtcttgctgggcagaggcttggagtagggctagtagttgggcctcttggctgggatattcaagccagatcctataaattatgggagccaccagctcagttttccaggtgggctatgctgttcactagttactctgattgagcaccaccactggcaggtacacagggccaccacaaa

SEQ ID NO: 181723 - DNA, 549 bp, Homo sapiens
tggaactgaaccctgggcctccttgtcaggtgagatgactgatttaattctgcaatcaagcagagctgatggctgggaactgtagttgactctgattgggcgaagcgacagagtgtattcccttgacagatggtattgatatttaagatctgaaattggacagagttacaggctgggccccaagggtaaatggagttccctctttggacaaataagaccagctgttatgcttgatagagatgcatggttgaggtttacctccctgcctaggtggggacttgggttgagctttgaagaygacctgagcaccatttaaactcctgggtctgggaaaatccctgctctttgccaaattgccctgtggtgagcatcagtcttgctgggcagaggcttggagtagggctagtagttgggcctcttggctgggatattcaagccagatcctataaattatgggagccaccagctcagttttccaggtgggctatgctgttcactagttactctgattgagcaccaccactggcaggtacacagggccaccacaaa

SEQ ID NO: 181724 - DNA, 549 bp, Homo sapiens
tggaactgaaccctgggcctccttgtcaggtgagatgactgatttaattctgcaatcaagcagagctgatggctgggaactgtagttgactctgattgggcgaagcgacagagtgtattcccttgacagatggtattgatatttaagatctgaaattggacagagttacaggctgggccccaagggtaaatggagttccctctttggacaaataagaccagctgttatgcttgatagagatgcatggttgaggtttacctccctgcctaggtggggacttgggttgagctttgaagacgacctgagcaccatttaaactcctgggtctgggaaaatccctgctctttgccaaattgccctgtggtgagcatcastcttgctgggcagaggcttggagtagggctagtagttgggcctcttggctgggatattcaagccagatcctataaattatgggagccaccagctcagttttccaggtgggctatgctgttcactagttactctgattgagcaccaccactggcaggtacacagggccaccacaaa

SEQ ID NO: 181725 - DNA, 549 bp, Homo sapiens
tggaactgaaccctgggcctccttgtcaggtgagatgactgatttaattctgcaatcaagcagagctgatggctgggaactgtagttgactctgattgggcgaagcgacagagtgtattcccttgacagatggtattgatatttaagatctgaaattggacagagttacaggctgggccccaagggtaaatggagttccctctttggacaaataagaccagctgttatgcttgatagagatgcatggttgaggtttacctccctgcctaggtggggacttgggttgagctttgaagacgacctgagcaccatttaaactcctgggtctgggaaaatccctgctctttgccaaattgccctgtggtgagcatcagtcttgctgggcagaggcttggagtagggctagtagttgggcctcttggctgggatattcaagccagatcctataaattatgggagccaccagctcagttttscaggtgggctatgctgttcactagttactctgattgagcaccaccactggcaggtacacagggccaccacaaa

SEQ ID NO: 181726 - DNA, 563 bp, Homo sapiens
gctgactgctatgggctctaccatcttgctttgtttccacttggcctcagatattctgcctatgctgttacaccttcttttcctgtacagtgaggccaaagttggctttctgagaagtgtctyaaaacatgagaaagactagatgtggttctcttttctcactttagaaaccatgagccttggacaatcctctctttttggtactatgtcaactacaaagacatatttttaagaatcaccataacataatcctgaacatttgtaaataaaacctttttagaaatggttaggtcaagcaggcaaaaatgatcattaagaatacagaaaatgtgaaaaatcaagtggtaaaatctgaaggccaaggctaagattgacaaagagggagggattgataaagagagaagtggggagagagataatgatatgatttgtatgtttgtcccctccaaatctcatgttgaaatgtgatctttaatattgaacatgaggcctggtgggagatgtttgggtcatagggatggatccttcatgaatagcttagagccatcctcctggtaatgagt

SEQ ID NO: 181727 - DNA, 563 bp, Homo sapiens
gctgactgctatgggctctaccatcttgctttgtttccacttggcctcagatattctgcctatgctgttacaccttcttttcctgtacagtgaggccaaagttggctttctgagaagtgtctcaaaacatgagaaagactagatgtggttctcttttctcactttagaaaccatgagccttggacaatcctctctttttggtactatrtcaactacaaagacatatttttaagaatcaccataacataatcctgaacatttgtaaataaaacctttttagaaatggttaggtcaagcaggcaaaaatgatcattaagaatacagaaaatgtgaaaaatcaagtggtaaaatctgaaggccaaggctaagattgacaaagagggagggattgataaagagagaagtggggagagagataatgatatgatttgtatgtttgtcccctccaaatctcatgttgaaatgtgatctttaatattgaacatgaggcctggtgggagatgtttgggtcatagggatggatccttcatgaatagcttagagccatcctcctggtaatgagt

SEQ ID NO: 181728 - DNA, 563 bp, Homo sapiens
gctgactgctatgggctctaccatcttgctttgtttccacttggcctcagatattctgcctatgctgttacaccttcttttcctgtacagtgaggccaaagttggctttctgagaagtgtctcaaaacatgagaaagactagatgtggttctcttttctcactttagaaaccatgagccttggacaatcctctctttttggtactatgtcaactacaaagacatatttttaagaatcaccataacataatcctgaacatttgtaaataaaacctttttagaaatggttaggtcaagcaggcaaaaatgatcattaagaatacagaaaatgtgaaaaatcaagtggtaaaatctgaaggccaaggctaagattgacaaagagggagggattgataaagagagaagtggggagagagataatgatatgatttgtatgtttgtcccctccaaatctcawgttgaaatgtgatctttaatattgaacatgaggcctggtgggagatgtttgggtcatagggatggatccttcatgaatagcttagagccatcctcctggtaatgagt

SEQ ID NO: 181729 - DNA, 257 bp, Homo sapiens
aggaagaaagttatggaggaagaagaggagttggagtagatgggagaagraaaagaggaggttgcacttcagctgtaaaggctcagaagaacaaacagaataaacatgatgatattgaaaagaagaaaattgtgaaataggagaaaaaacataaactaaatagaaaataaaacaacaaggaaagttaaaaaccataaaatcaactctggactaactgcaaaatagataactttttttctcaggactaatcaaataaa

SEQ ID NO: 181730 - DNA, 257 bp, Homo sapiens
aggaagaaagttatggaggaagaagaggagttggagtagatgggagaagaaaaagaggaggttgcacttsagctgtaaaggctcagaagaacaaacagaataaacatgatgatattgaaaagaagaaaattgtgaaataggagaaaaaacataaactaaatagaaaataaaacaacaaggaaagttaaaaaccataaaatcaactctggactaactgcaaaatagataactttttttctcaggactaatcaaataaa

SEQ ID NO: 181731 - DNA, 433 bp, Homo sapiens
gtaagcacgcttcattgttttttattcttttttcttttgtctcctctgactgtattttcaaatagcctgtcttcaggctcactaattctttcttctgcttgatgaattctgctgttaagagacactgatgcattcttccacatgtcaattgcatttttcagctccagaatttctgctcgactctttccaattatgttaacctctttgttaaacttatctgataggattctgaatttgttctctgtgttatcttggatttagttgagcttcctcaaaacaactcttttgaattctctatccaaaakgtcacacatctctgtgtctccgggattagtcactggtgtcttatttagatcatttggtaaagtcatgttttcctggatgatcttgatgcttgtagatgttcattaatgtttgggcattgaagagtgag

SEQ ID NO: 181732 - DNA, 232 bp, Homo sapiens
tgtagcacaccaggctgccacgccctggaccaagcagtagccttgacctgtggcctctcccaggcactgctgccccaaccyacaaaatagctactttcccagttcctgatgtagatttgttctgcctggttttgacttctataaaatacagcacattctatttagcctggcttctttggttcagtattacagaacacatccatgttcttgtctatggcagacattgatttat

SEQ ID NO: 181733 - DNA, 411 bp, Homo sapiens
tgaattcattactgaaacaatgtatagatttcagactaggaaagtaactatttataaaagaaaagcttaaaacctgaaacagaaacaaaatcctgaaactgtaaaattgagtcaaactaaaatttaaaaaacaaagcaatgatataaagtatcatttgtccaaatgtgttctacaaaaygcttttttcttaaatatgtctgaggaaaaacaggttctaggagtaaaatatgtttgaaaaatgctgggttaaacaactgaacctatgaaggaaggaacagaacttctcaagctcttgactctggaatcttttttacacggcaattaacaccatgcttcttcttggatttgtatttcagataaacacaatctgggaaacattttataatacagagggccacaccagattgaat

SEQ ID NO: 181734 - DNA, 411 bp, Homo sapiens
tgaattcattactgaaacaatgtatagatttcagactaggaaagtaactatttataaaagaaaagcttaaaacctgaaacagaaacaaaatcctgaaactgtaaaattgagtcaaactaaaatttaaaaaacaaagcaatgatataaagtatcatttgtccaaatgtgttctacaaaatgcttttttcttaaatatgtctgaggaaaaacakgttctaggagtaaaatatgtttgaaaaatgctgggttaaacaactgaacctatgaaggaaggaacagaacttctcaagctcttgactctggaatcttttttacacggcaattaacaccatgcttcttcttggatttgtatttcagataaacacaatctgggaaacattttataatacagagggccacaccagattgaat

SEQ ID NO: 181735 - DNA, 411 bp, Homo sapiens
tgaattcattactgaaacaatgtatagatttcagactaggaaagtaactatttataaaagaaaagcttaaaacctgaaacagaaacaaaatcctgaaactgtaaaattgagtcaaactaaaatttaaaaaacaaagcaatgatataaagtatcatttgtccaaatgtgttctacaaaatgcttttttcttaaatatgtctgaggaaaaacaggttctaggagtaaaatatgtttgaaaaatgctgggttaaacaactgaacctatgaaggaaggaacagaacttctcaagctcttgaytctggaatcttttttacacggcaattaacaccatgcttcttcttggatttgtatttcagataaacacaatctgggaaacattttataatacagagggccacaccagattgaat

SEQ ID NO: 181736 - DNA, 615 bp, Homo sapiens
actcaaatcttgttgactgatccagtgagaaatgaccaacttcagttccagcctctctttaacatgtacatagcaatttgggcaagtcaagctccatcctgaaggacataatargggactctttaagcacattattatgaaggcccttcagggataacaccagagtgatgaggtgccctataccagggataatggagacagagttcttgggattcatcactggggtcctcaaagcatcttccaagggcataataaggaaggactcaaacacctttgaatctccgtgagaccaggcatgaggtcttttgaaagagttctttaactggagtgaatgtcaaagagaagtataataaaataaaagacctgagtagggtcccccttgttcataaaatgacactacctaaatcaccaaatctcactgagccttggtttaactcaagaggttccatgccactataagaggtggtaactgccaactgataggaaatattttcatatgcatagtcacagtgccccatatttatgaacttcttaagagtcttcaaaaagctttctatatacattatcctttactttctaacttttctaaatacaaggtgagagagacacaagtgt

SEQ ID NO: 181737 - DNA, 615 bp, Homo sapiens
actcaaatcttgttgactgatccagtgagaaatgaccaacttcagttccagcctctctttaacatgtacatagcaatttgggcaagtcaagctccatcctgaaggacataataggggactctttaagcacattattatgaaggcccttcagggataacaccagagtgatgaggtgccctataccagggayaatggagacagagttcttgggattcatcactggggtcctcaaagcatcttccaagggcataataaggaaggactcaaacacctttgaatctccgtgagaccaggcatgaggtcttttgaaagagttctttaactggagtgaatgtcaaagagaagtataataaaataaaagacctgagtagggtcccccttgttcataaaatgacactacctaaatcaccaaatctcactgagccttggtttaactcaagaggttccatgccactataagaggtggtaactgccaactgataggaaatattttcatatgcatagtcacagtgccccatatttatgaacttcttaagagtcttcaaaaagctttctatatacattatcctttactttctaacttttctaaatacaaggtgagagagacacaagtgt

SEQ ID NO: 181738 - DNA, 430 bp, Homo sapiens
acaatatggatagggtgaagggcgtcaccaagaagcaatgaaaagatacatttgcagttaaattcgaaaaccatgatgtttaatacatatagtaataaagaatactttctcctgtttcaaaattattttagaatttaagatagaagctaaaatacctagggataatgatatgactatcaaaaattaaaaattaaaggacattttgagtattataaattaagaatgagaacttattacccaatgaacaggggataattcattatgctccatatccattgaattaaaagacaggcccattacctggataatttgaaagtttaattttatttaaaagtcttgtttcattcatcaagctaaaggattagctcccagaaatattctakgattgcctatccccaactctgtaggaagtatagaaagaatgttataa

SEQ ID NO: 181739 - DNA, 430 bp, Homo sapiens
acaatatggatagggtgaagggcgtcaccaagaagcaatgaaaagatacatttgcagttaaattcgaaaaccatgatgtttaatacatatagtaataaagaatactttctcctgtttcaaaattattttagaatttaagatagaagctaaaatacctagggataatgatatgactatcaaaaattaaaaattaaaggacattttgagtattataaattaagaatgagaacttattacccaatgaacaggggataattcattatgctccatatccattgaattaaaagacaggcccattacctggataatttgaaagtttaattttatttaaaagtcttgtttcattcatcaagctaaaggattagctcccagaaatattctaggattgcmtatccccaactctgtaggaagtatagaaagaatgttataa

SEQ ID NO: 181740 - DNA, 430 bp, Homo sapiens
acaatatggatagggtgaagggcgtcaccaagaagcaatgaaaagatacatttgcagttaaattcgaaaaccatgatgtttaatacatatagtaataaagaatactttctcctgtttcaaaattattttagaatttaagatagaagctaaaatacctagggataatgatatgactatcaaaaattaaaaattaaaggacattttgagtattataaattaagaatgagaacttattacccaatgaacaggggataattcattatgctccatatccattgaattaaaagacaggcccattacctggataatttgaaagtttaattttatttaaaagtcttgtttcattcatcaagctaaaggattagctcccagaaatattctaggattgcctatccscaactctgtaggaagtatagaaagaatgttataa

SEQ ID NO: 181741 - DNA, 264 bp, Homo sapiens
gttatcagaggacttccctgaagttcctgacagtactgagcacactgaccgagtataatcctagtgttctccttccttacctggcagccagagccccaggagcccyaggagccccaggagctgagtgggggccctcacgtccttgctgtgtcctgactggggctgactcctgcaccgggtgtgaccagcctataagaagtcttcagggcagggggctgtgctctaggaacaggcaaatcagcaggggatggggcaggctgagca

SEQ ID NO: 181742 - DNA, 264 bp, Homo sapiens
gttatcagaggacttccctgaagttcctgacagtactgagcacactgaccgagtataatcctagtgttctccttccttacctggcagccagagccccaggagccccaggagccccaggagctgagtgggggccctcacgtccktgctgtgtcctgactggggctgactcctgcaccgggtgtgaccagcctataagaagtcttcagggcagggggctgtgctctaggaacaggcaaatcagcaggggatggggcaggctgagca

SEQ ID NO: 181743 - DNA, 264 bp, Homo sapiens
gttatcagaggacttccctgaagttcctgacagtactgagcacactgaccgagtataatcctagtgttctccttccttacctggcagccagagccccaggagccccaggagccccaggagctgagtgggggccctcacgtccttgctgtgtcctgactggggctgactcctgcaccgggtgtgrccagcctataagaagtcttcagggcagggggctgtgctctaggaacaggcaaatcagcaggggatggggcaggctgagca

SEQ ID NO: 181744 - DNA, 486 bp, Homo sapiens
atttacaataaagttatagagtgtggggctgtcagaaatttcagttagtctcaaaggaattcgatgagtgtaaaagtatttagtgctataataacaatgtctctgtcagtgtgaaattgcttcttttttgaaatgaatataaaaagaatttatcagaagcatctttaataaattcaatagaatttactaacaaacttaagacattgttcctaggagtaaaaggaaaaacaattctctgaagatgcacaaagatgatgactgtgtcacgcatakatctgccattatccagagctatgggtctctttaagacccaggggctaaatgggctgcaccttattcttggcgtgatgatccccatattctattccctttcctgcctttggtataatttcttatggttctccagcatggagagctgactagtaataccaggtctcattatttcaaaatctctgtttcactcgcggactataggagcctggatta

SEQ ID NO: 181745 - DNA, 486 bp, Homo sapiens
atttacaataaagttatagagtgtggggctgtcagaaatttcagttagtctcaaaggaattcgatgagtgtaaaagtatttagtgctataataacaatgtctctgtcagtgtgaaattgcttcttttttgaaatgaatataaaaagaatttatcagaagcatctttaataaattcaatagaatttactaacaaacttaagacattgttcctaggagtaaaaggaaaaacaattctctgaagatgcacaaagatgatgactgtgtcacgcatatatctgccattatccagagctatgggtctctttaagacccaggggctaaatgggctgcaccttattcttggygtgatgatccccatattctattccctttcctgcctttggtataatttcttatggttctccagcatggagagctgactagtaataccaggtctcattatttcaaaatctctgtttcactcgcggactataggagcctggatta

SEQ ID NO: 181746 - DNA, 486 bp, Homo sapiens
atttacaataaagttatagagtgtggggctgtcagaaatttcagttagtctcaaaggaattcgatgagtgtaaaagtatttagtgctataataacaatgtctctgtcagtgtgaaattgcttcttttttgaaatgaatataaaaagaatttatcagaagcatctttaataaattcaatagaatttactaacaaacttaagacattgttcctaggagtaaaaggaaaaacaattctctgaagatgcacaaagatgatgactgtgtcacgcatatatctgccattatccagagctatgggtctctttaagacccaggggctaaatgggctgcaccttattcttggcgtgatgatccccatattctattccctttcctgcctttggtataatttcttatggttctccagcatggagagctgactagtaataccaggtctcattatttcaaaatctctgtttcactcgckgactataggagcctggatta

SEQ ID NO: 181747 - DNA, 270 bp, Homo sapiens
ttgcagaggcatttttaaatacattaaataacaatakcttggggaaaatactttgatttctcttaggacgtggtatctgtcacattggtatcttattgctatgaagagttttctttgtcagtctcaaggtctctgtcttcatattaaaagctggtcagttgtgcctgaattttaaagggaagagggtaagttaaggcatatccaatcatccgttccgatcatggactgcattgtatttcagattgtgtccttggttgagaggaggagttc

SEQ ID NO: 181748 - DNA, 487 bp, Homo sapiens
agaaccagctttgcagaggcatttttaaatacattaaataacaatagcttggggaaaatactttgatttctcttaggacgtggtatctgtcacaytggtatcttattgctatgaagagttttctttgtcagtctcaaggtctctgtcttcatattaaaagctggtcagttgtgcctgaattttaaagggaagagggtaagttaaggcatatccaatcatccgttccgatcatggactgcattgtatttcagattgtgtccttggttgagaggaggagttcattcagttggttagggagcttagagtttcatttttggtttacacacctatgtccaggtaagagcgccccacacaggagggtttgctcagaacctggcttgcagggctgcttacagaccttctatgtctcctgttgtcatgcacaaggaaggacacagccaatgacaaccctcagccatccggggagaagctgtgtctgcagaggacg

SEQ ID NO: 181749 - DNA, 270 bp, Homo sapiens
ttgcagaggcatttttaaatacattaaataacaatagcttggggaaaatactttgatttctcttaggacgtggtatctgtcacattggtatcttattgctatraagagttttctttgtcagtctcaaggtctctgtcttcatattaaaagctggtcagttgtgcctgaattttaaagggaagagggtaagttaaggcatatccaatcatccgttccgatcatggactgcattgtatttcagattgtgtccttggttgagaggaggagttc

SEQ ID NO: 181750 - DNA, 487 bp, Homo sapiens
agaaccagctttgcagaggcatttttaaatacattaaataacaatagcttggggaaaatactttgatttctcttaggacgtggtatctgtcacattggtatcttattgctatgaagagttttctttgtsagtctcaaggtctctgtcttcatattaaaagctggtcagttgtgcctgaattttaaagggaagagggtaagttaaggcatatccaatcatccgttccgatcatggactgcattgtatttcagattgtgtccttggttgagaggaggagttcattcagttggttagggagcttagagtttcatttttggtttacacacctatgtccaggtaagagcgccccacacaggagggtttgctcagaacctggcttgcagggctgcttacagaccttctatgtctcctgttgtcatgcacaaggaaggacacagccaatgacaaccctcagccatccggggagaagctgtgtctgcagaggacg

SEQ ID NO: 181751 - DNA, 487 bp, Homo sapiens
agaaccagctttgcagaggcatttttaaatacattaaataacaatagcttggggaaaatactttgatttctcttaggacgtggtatctgtcacattggtatcttattgctatgaagagttttctttgtcagtctcaaggtctctgtcttcatattaaaagctggtcagttgtgcctgaattttaaagggaagagggtaagttaaggcatatccaatcatccgttccgatcatggactgcattgtatttcagattgtgtccttggttgagaggaggagttcattcagttggttagggagcttagagtttcatttttggtttacacacctatgtccaggtaagagsgccccacacaggagggtttgctcagaacctggcttgcagggctgcttacagaccttctatgtctcctgttgtcatgcacaaggaaggacacagccaatgacaaccctcagccatccggggagaagctgtgtctgcagaggacg

SEQ ID NO: 181752 - DNA, 321 bp, Homo sapiens
cagtgggtgatatgacagcacagagggactctgtgggkccagctgcatggagcactctgggagagtcactggcacccgtgctagacagatcttcattcaacttctggagcacacggatttagatctctttacatcattttgaaagaccatttatcattctgaaggaaaccactgtaattaactaaggtaacatctttaataggtagaaagaaaaaagtgattattttattgccaagatgattacaagaaaagaaacaaacaaaaatagcatgaaggaaagagcaacactagactgagggctttgggtaagaggttgagact

SEQ ID NO: 181753 - DNA, 321 bp, Homo sapiens
cagtgggtgatatgacagcacagagggactctgtggggccagctgcatggagcactctgggagagtcactggcacccgtgctagacagakcttcattcaacttctggagcacacggatttagatctctttacatcattttgaaagaccatttatcattctgaaggaaaccactgtaattaactaaggtaacatctttaataggtagaaagaaaaaagtgattattttattgccaagatgattacaagaaaagaaacaaacaaaaatagcatgaaggaaagagcaacactagactgagggctttgggtaagaggttgagact

SEQ ID NO: 181754 - DNA, 321 bp, Homo sapiens
cagtgggtgatatgacagcacagagggactctgtggggccagctgcatggagcactctgggagagtcactggcacccgtgctagacagatcttcattcaacttctggagcacacggatttagatctctttacatcattttgaaagaccatttatcattctgaaggaaaccactgtaattaactaaggtaacatctttaataggtagaaagaaaaaastgattattttattgccaagatgattacaagaaaagaaacaaacaaaaatagcatgaaggaaagagcaacactagactgagggctttgggtaagaggttgagact

SEQ ID NO: 181755 - DNA, 321 bp, Homo sapiens
cagtgggtgatatgacagcacagagggactctgtggggccagctgcatggagcactctgggagagtcactggcacccgtgctagacagatcttcattcaacttctggagcacacggatttagatctctttacatcattttgaaagaccatttatcattctgaaggaaaccactgtaattaactaaggtaacatctttaataggtagaaagaaaaaagtgattattttattgccaagatgattacaagaaaagaaasaaacaaaaatagcatgaaggaaagagcaacactagactgagggctttgggtaagaggttgagact

SEQ ID NO: 181756 - DNA, 470 bp, Homo sapiens
aataaccatctctaataccacatgccaaaatcctcatcaatttattctagctaaaggagttgatcagaagcagcagttgaaagcaccaactaaaccagctggggttagttcactgtcattctctcagaaccatctcttctctgaacaaaacaagtacaagagttcattgtgaatctgcattctccttgcctattttaaggttttgatgttgacactaatttgtgaaatccctcctgtggtgtgatatttcgttttccttgctttttgttaggacaagaatgcttcagctcttaatttaaaattatgtttctccctcctaggttgagcgaacttagaatgcattctctgacatatccaagtttttgttmatatgaatttggggaaaaaagcatacttaattagctaagacttcttattctaggcttgaccctgtgttcgacatctattgaatttgtagttgcatgggctgc

SEQ ID NO: 181757 - DNA, 485 bp, Homo sapiens
catgactttatttttatagcaacgaggttgccaagaactgagtcaaaatgtgagggaaaacaagcacctgcaaggagaaagargacagatgcacttacataggacagatgcaaatagacaccactatgacaagtaaagctggaataatcaataaattcctaaagacaaagtggggctggtcagattgggagacggctgacagctgcagaagttgggaaagatccatcatcttgaaaactttttctccacaaacccactgtgatctctcaagcaattggtaaggaatccaagagagtctgtatatgacacagatcagggagagcagaacacttgggaggtgaccaggtcttgggggccgagcccttatgaatcggattagtgcctttataaaagaagctcaatggagttcttgtgtgccttccactatgtgaggacatagaaagaaggcaccatctatgaaccatgaaatgggctctcatcaacac

SEQ ID NO: 181758 - DNA, 442 bp, Homo sapiens
agggttcctaacctgacaacaatgaaagaaccaaactaacctcaaagtcatgactttatttttatagcaacgaggttgccaagaactgagtcaaaatgtgagggaaaacaagcacctgcaaggagaaagaggacagatgcacttacataggacagatgcaaatagacaccactatgacaagtaaagctggaataatcaataaattcctaaagacaaagtgggkctggtcagattgggagacggctgacagctgcagaagttgggaaagatccatcatcttgaaaactttttctccacaaacccactgtgatctctcaagcaattggtaaggaatccaagagagtctgtatatgacacagatcagggagagcagaacacttgggaggtgaccaggtcttgggggccgagcccttatgaatcggattagtgcctttataaaaga

SEQ ID NO: 181759 - DNA, 485 bp, Homo sapiens
catgactttatttttatagcaacgaggttgccaagaactgagtcaaaatgtgagggaaaacaagcacctgcaaggagaaagaggacagatgcacttacataggacagatgcaaatagacaccactatgacaagtaaagctggaataatcaataaattcctaaagacaaagtggggctkgtcagattgggagacggctgacagctgcagaagttgggaaagatccatcatcttgaaaactttttctccacaaacccactgtgatctctcaagcaattggtaaggaatccaagagagtctgtatatgacacagatcagggagagcagaacacttgggaggtgaccaggtcttgggggccgagcccttatgaatcggattagtgcctttataaaagaagctcaatggagttcttgtgtgccttccactatgtgaggacatagaaagaaggcaccatctatgaaccatgaaatgggctctcatcaacac

SEQ ID NO: 181760 - DNA, 485 bp, Homo sapiens
catgactttatttttatagcaacgaggttgccaagaactgagtcaaaatgtgagggaaaacaagcacctgcaaggagaaagaggacagatgcacttacataggacagatgcaaatagacaccactatgacaagtaaagctggaataatcaataaattcctaaagacaaagtggggctggtsagattgggagacggctgacagctgcagaagttgggaaagatccatcatcttgaaaactttttctccacaaacccactgtgatctctcaagcaattggtaaggaatccaagagagtctgtatatgacacagatcagggagagcagaacacttgggaggtgaccaggtcttgggggccgagcccttatgaatcggattagtgcctttataaaagaagctcaatggagttcttgtgtgccttccactatgtgaggacatagaaagaaggcaccatctatgaaccatgaaatgggctctcatcaacac

SEQ ID NO: 181761 - DNA, 527 bp, Homo sapiens
atggaatagggttcctaacctgacaacaatgaaagaaccaaactaacctcaaagtcatgactttatttttatagcaacgaggttgccaagaactgagtcaaaatgtgagggaaaacaagcacctgcaaggagaaagaggacagatgcacttacataggacagatgcaaatagacaccactatgacaagtaaagctggaataatcaataaattcctaaagacaaagtggggctggtcagattgggagacggctgacagctgcagaagttgggaaagatccatcatcttgaaaactttttctccacaaacccactrtgatctctcaagcaattggtaaggaatccaagagagtctgtatatgacacagatcagggagagcagaacacttgggaggtgaccaggtcttgggggccgagcccttatgaatcggattagtgcctttataaaagaagctcaatggagttcttgtgtgccttccactatgtgaggacatagaaagaaggcaccatctatgaaccatgaaatggg

SEQ ID NO: 181762 - DNA, 527 bp, Homo sapiens
atggaatagggttcctaacctgacaacaatgaaagaaccaaactaacctcaaagtcatgactttatttttatagcaacgaggttgccaagaactgagtcaaaatgtgagggaaaacaagcacctgcaaggagaaagaggacagatgcacttacataggacagatgcaaatagacaccactatgacaagtaaagctggaataatcaataaattcctaaagacaaagtggggctggtcagattgggagacggctgacagctgcagaagttgggaaagatccatcatcttgaaaactttttctccacaaacccactgtgatctctcaagcaattggtaaggaatccaagagagtctgtatatgayacagatcagggagagcagaacacttgggaggtgaccaggtcttgggggccgagcccttatgaatcggattagtgcctttataaaagaagctcaatggagttcttgtgtgccttccactatgtgaggacatagaaagaaggcaccatctatgaaccatgaaatggg

SEQ ID NO: 181763 - DNA, 527 bp, Homo sapiens
atggaatagggttcctaacctgacaacaatgaaagaaccaaactaacctcaaagtcatgactttatttttatagcaacgaggttgccaagaactgagtcaaaatgtgagggaaaacaagcacctgcaaggagaaagaggacagatgcacttacataggacagatgcaaatagacaccactatgacaagtaaagctggaataatcaataaattcctaaagacaaagtggggctggtcagattgggagacggctgacagctgcagaagttgggaaagatccatcatcttgaaaactttttctccacaaacccactgtgatctctcaagcaattggtaaggaatccaagagagtctgtatatgacacagatcagggagagcagaacacttgggaggtgaccaggtcttgggggccgagcccttatgaatcggattagtgcctttataaaagaagctcaatggagttcttgtgtgccttccactrtgtgaggacatagaaagaaggcaccatctatgaaccatgaaatggg

SEQ ID NO: 181764 - DNA, 448 bp, Homo sapiens
acactcatttctatgtaggtttcatttaatctttgaaattaaagtgaaattaaaagattgtgatattttgatgaagttagactaaaatgaacaataaccaaataagaactcacttacattctttatatggtcaataaagaagtgatagtggaaaaaaacaagatcaaatgaaggtgatgatttaggaagttggaaagatagctgaaactacaaaatggtatataaccagtgaacacttagacacactgattgatgaacttcagcttttgrcttggtgagagcataaaatgagagcagctgaggtttgcaaatttgtaatctccttgtggaaaaacaggggaaaacacatctcagcctaataagatttatctactaaagagtctagacttgatccatttgtccttgtaattcaaaagctaattcaaatactgatttgatgtattgtgtg

SEQ ID NO: 181765 - DNA, 448 bp, Homo sapiens
acactcatttctatgtaggtttcatttaatctttgaaattaaagtgaaattaaaagattgtgatattttgatgaagttagactaaaatgaacaataaccaaataagaactcacttacattctttatatggtcaataaagaagtgatagtggaaaaaaacaagatcaaatgaaggtgatgatttaggaagttggaaagatagctgaaactacaaaatggtatataaccagtgaacacttagacacactgattgatgaacttcagcttttggcttggtgaragcataaaatgagagcagctgaggtttgcaaatttgtaatctccttgtggaaaaacaggggaaaacacatctcagcctaataagatttatctactaaagagtctagacttgatccatttgtccttgtaattcaaaagctaattcaaatactgatttgatgtattgtgtg

SEQ ID NO: 181766 - DNA, 419 bp, Homo sapiens
tgactggcgggtgaggagaacatatgcgagttcaccaaagagaaaagctgaatgaggcaatgcctcttcctgaccatatctcttactcagataactatakaatttattgtccagtaaagggtatattaaaaaatcatattaaaagtcatgcagtgaagttgtccagggaaatcaagacttaacagtctcactctgacaataatgaacagggggattccctcaagatagactaggacatgaccccacactggcaggtagtagtaccagaaaagaacccatggaaaatctttaccttatgcttgaggtagggaccaggctaaagtgaaagccagacataaaattctatctaaaataaatccacaatcgaagaaaatatgtggtgtacaggcatagaatgtctttactggatcattgaaata

SEQ ID NO: 181767 - DNA, 419 bp, Homo sapiens
tgactggcgggtgaggagaacatatgcgagttcaccaaagagaaaagctgaatgaggcaatgcctcttcctgaccatatctcttactcagataactatataatttattgtccagtaaagggtatattaaaaaatcatattaaaagtcatgcagtgaagttgtccagggaaatcaagacttaacagtctcactctgacaataatgaacagggggattccctcaagawagactaggacatgaccccacactggcaggtagtagtaccagaaaagaacccatggaaaatctttaccttatgcttgaggtagggaccaggctaaagtgaaagccagacataaaattctatctaaaataaatccacaatcgaagaaaatatgtggtgtacaggcatagaatgtctttactggatcattgaaata

SEQ ID NO: 181768 - DNA, 419 bp, Homo sapiens
tgactggcgggtgaggagaacatatgcgagttcaccaaagagaaaagctgaatgaggcaatgcctcttcctgaccatatctcttactcagataactatataatttattgtccagtaaagggtatattaaaaaatcatattaaaagtcatgcagtgaagttgtccagggaaatcaagacttaacagtctcactctgacaataatgaacagggggattccctcaagatagactaggacatgaccccacactggcaggtagtagtaccagaaaagaacscatggaaaatctttaccttatgcttgaggtagggaccaggctaaagtgaaagccagacataaaattctatctaaaataaatccacaatcgaagaaaatatgtggtgtacaggcatagaatgtctttactggatcattgaaata

SEQ ID NO: 181769 - DNA, 445 bp, Homo sapiens
ggaatctgaacccagctaccatatgagagagttcaacttatgttcaatgtgaatgccatggcaatattaaaaggtaagaattcgctccatacgtgcttgaggtaaataggagaaacctagaatttatgtaaacagtgagaagattggatgccttttccrtcacatattttaatactagcagcatattatatatgtcaatccatcaggcattcagaaatacatgcttatgaaaattttttgcaccatcagacaaaagacaagggtagaagacatttgtaaccctataaacactagtaaattaaaaacagaagggacctttatgtcctaacatatctgcgttgtgaaaggctgccctgtgaaatacgggatttcttaaacatattttaaaaatcataggtgtcaatattttttagaaatccatttaaattttctcttgctattttac

SEQ ID NO: 181770 - DNA, 445 bp, Homo sapiens
ggaatctgaacccagctaccatatgagagagttcaacttatgttcaatgtgaatgccatggcaatattaaaaggtaagaattcgctccatacgtgcttgaggtaaataggagaaacctagaatttatgtaaacagtgagaagattggatgccttttccatcacatattttaatactagcagcatattatatatgtcaatccatcaggcattcagaaatacatgcttatgaaaattttttgcaccatcagacaaaagacaagggtagaagacatttgtaaccctataaacactagtaaattaaaaacagaagggacctttatgtcctaacatatctgcgttgtgaaaggctgccctgtraaatacgggatttcttaaacatattttaaaaatcataggtgtcaatattttttagaaatccatttaaattttctcttgctattttac

SEQ ID NO: 181771 - DNA, 520 bp, Homo sapiens
ctcacataacctttttttttttyccctgtgatccaagaccccattctttctgtaaacttcatgtggtagatgagcttctgcacgcatcgtgtgtctgggtcttcgttctaagggctccagtgtacacacattgcagaaacctgtatgccttttctactatttatctgcctcctattagtgattttcagggaaacttcagaaggcaaaagggacattctcctttagcccattctcagacaaaatcccccaacatttaactgattcctaatagcttaaaatcactttgaaaaatccatatatttataaccttttcttccctctatgatttctggtcagcttgggttttgtttttcattccatttacttcatcctcgaaaagatctatatttattctcgtttatggacattgagaaaagaaaataactttcatgtgagaaatgcaagtccttttaaataatcaggcccagagagatattcaaatgagacagcagttctgtcctgctcctctttgagctgtgtg

SEQ ID NO: 181772 - DNA, 215 bp, Homo sapiens
taactccagtcccagttacagcatcatgttctgtaactctactccttgttgctycattctgccattgtctggtatgatcgcccctttcccttctgtaatcaggccaagagcataatataatactatttataactgcacagcttgcctccgttgtgtaaaaaaatcactgagacttaactgtgtccaacttttaaaatgtgaatataagtacaact

SEQ ID NO: 181773 - DNA, 215 bp, Homo sapiens
taactccagtcccagttacagcatcatgttctgtaactctactccttgttgcttcattctgccattgtctggtatgatygcccctttcccttctgtaatcaggccaagagcataatataatactatttataactgcacagcttgcctccgttgtgtaaaaaaatcactgagacttaactgtgtccaacttttaaaatgtgaatataagtacaact

SEQ ID NO: 181774 - DNA, 215 bp, Homo sapiens
taactccagtcccagttacagcatcatgttctgtaactctactccttgttgcttcattctgccattgtctggtatgatcgcccctttcccttctgtaatcaggccaagagcataatataatactakttataactgcacagcttgcctccgttgtgtaaaaaaatcactgagacttaactgtgtccaacttttaaaatgtgaatataagtacaact

SEQ ID NO: 181775 - DNA, 494 bp, Homo sapiens
gagtatggtggtagcctttttattttattttgagagagggtctcactttgtcacccaagatggagtgcagtcatgtgatcagagctcactgaagcyttcacatactgtgctcaagcgattctcccacctcagtctcctgagtagcagggactgcaagtgcatgacaccatactagctaatttttgtaaagatggggtttcaccatgttgccctggctgatctccaactcctggactcaagagatctggccaccttggcctcccaaagtgctgggattatagttttgaggcaccgcgatcagcccagccttaaaaaaggctgactagagatctttatctatgtatatctatatctatctataaaataaacatatgtgttacttatataaaaatatatattattaatattatataaaaatttttttcaaggtagaaatatataaagagggtgcatgtagagcctggggcattgtgtagtgaagctcaagacctctg

SEQ ID NO: 181776 - DNA, 494 bp, Homo sapiens
gagtatggtggtagcctttttattttattttgagagagggtctcactttgtcacccaagatggagtgcagtcatgtgatcagagctcactgaagccttcacatactgtgctcaagcgattctcccacctcagtctcctgagtagcagggactgcaagtgcatgacaccatactagctaatttttgtaaagatggggtttcaccatgttgccctggctgatctccawctcctggactcaagagatctggccaccttggcctcccaaagtgctgggattatagttttgaggcaccgcgatcagcccagccttaaaaaaggctgactagagatctttatctatgtatatctatatctatctataaaataaacatatgtgttacttatataaaaatatatattattaatattatataaaaatttttttcaaggtagaaatatataaagagggtgcatgtagagcctggggcattgtgtagtgaagctcaagacctctg

SEQ ID NO: 181777 - DNA, 494 bp, Homo sapiens
gagtatggtggtagcctttttattttattttgagagagggtctcactttgtcacccaagatggagtgcagtcatgtgatcagagctcactgaagccttcacatactgtgctcaagcgattctcccacctcagtctcctgagtagcagggactgcaagtgcatgacaccatactagctaatttttgtaaagatggggtttcaccatgttgccctggctgatctccaactcctggactcaagagatctggccaccttggcctcccaaagtgctgggattatagttttgrggcaccgcgatcagcccagccttaaaaaaggctgactagagatctttatctatgtatatctatatctatctataaaataaacatatgtgttacttatataaaaatatatattattaatattatataaaaatttttttcaaggtagaaatatataaagagggtgcatgtagagcctggggcattgtgtagtgaagctcaagacctctg

SEQ ID NO: 181778 - DNA, 494 bp, Homo sapiens
gagtatggtggtagcctttttattttattttgagagagggtctcactttgtcacccaagatggagtgcagtcatgtgatcagagctcactgaagccttcacatactgtgctcaagcgattctcccacctcagtctcctgagtagcagggactgcaagtgcatgacaccatactagctaatttttgtaaagatggggtttcaccatgttgccctggctgatctccaactcctggactcaagagatctggccaccttggcctcccaaagtgctgggattatagttttgaggcaccgcgatcagcccagccttaaaaaaggctgactagagatctttatctatgtatatctatatctatctataaaataaacatatgtgttmcttatataaaaatatatattattaatattatataaaaatttttttcaaggtagaaatatataaagagggtgcatgtagagcctggggcattgtgtagtgaagctcaagacctctg

SEQ ID NO: 181779 - DNA, 418 bp, Homo sapiens
ttgagctagggtagcgttaaacasccttgttcttactctcctgttttatgtagtgagcagagactagcttcatgagaacagactgtgacagtcaaggctgcctgttattttgtgcagcattaattgagaaattctagcacctgaagacctctgggccatttgagggtaggtgcaggggaggaaagggaagtttgcatccctcctgctgtggagagaacccgtgggaagcacagaccttgtcctaactgaaggcagacccccttgctaaccagcttctcatcagccaaccctggatgagtttccatgtctatttactaaataatccttattgcttttcttcatatgggcaaagtatggtttacagggaatattgttcctttgaacacccattgtggaaaccccttcctgttgtgggaaa

SEQ ID NO: 181780 - DNA, 418 bp, Homo sapiens
ttgagctagggtagcgttaaacacccttgttcttactctcctgttttatgtagtgagcagagactagcttcatgaraacagactgtgacagtcaaggctgcctgttattttgtgcagcattaattgagaaattctagcacctgaagacctctgggccatttgagggtaggtgcaggggaggaaagggaagtttgcatccctcctgctgtggagagaacccgtgggaagcacagaccttgtcctaactgaaggcagacccccttgctaaccagcttctcatcagccaaccctggatgagtttccatgtctatttactaaataatccttattgcttttcttcatatgggcaaagtatggtttacagggaatattgttcctttgaacacccattgtggaaaccccttcctgttgtgggaaa

SEQ ID NO: 181781 - DNA, 418 bp, Homo sapiens
ttgagctagggtagcgttaaacacccttgttcttactctcctgttttatgtagtgagcagagactagcttcatgagaacagactgtgacagtcaaggctgcctgttattttgtgcagcattmattgagaaattctagcacctgaagacctctgggccatttgagggtaggtgcaggggaggaaagggaagtttgcatccctcctgctgtggagagaacccgtgggaagcacagaccttgtcctaactgaaggcagacccccttgctaaccagcttctcatcagccaaccctggatgagtttccatgtctatttactaaataatccttattgcttttcttcatatgggcaaagtatggtttacagggaatattgttcctttgaacacccattgtggaaaccccttcctgttgtgggaaa

SEQ ID NO: 181782 - DNA, 405 bp, Homo sapiens
cttggttcaatgaattctcctgcttcggcctcctaagtagctgggactacaggtgcacgccaccacrcccagctaatttttgtatttttagtagagacagggtttcactatgttggccaggctggtctcaaactgctgacctcatggtccacccacctcagcctcccagagtgctgggattacaggcataagccaccgtgccaggcctgacgtccttgcaatttctatgtgcattttggcaaaagtaatggaatttgagaatgcgtgatgggagtgaaaaccagcaatcggatatggtggcggcttacctatgctgttgaacctggatctggaagtgaagagaagatgaggtggtccaagcaccattcctcagcccctctggggtcatgtgattgtggtcacagg

SEQ ID NO: 181783 - DNA, 557 bp, Homo sapiens
actgcctggggtttggggagaggtgatgcaagcactcccttagctgcctggctggtttctcactaagtcatgtgccccctaagcccactggctccaagcccagcagagcaccaggtcttgcccaggaattgcagcctttaaggcctggactgccttttaagtctattttggacccaagagccctttaacctgcagtggcagcaaggattgccaaaactctggttccgaccactgggatgggtgattcccctccagctaaggctgttctaaatgctccctctatgggtacccactgatttctgcctggtgttgcttttcattgtgacagggcagcactgagtttcaatgcaaagccccacagtcactgtgctctccctcccttaagtacacagaytctctgtgccacatggtcactgccagggtagtggggaggaggtggtgtcagcaattcaggactgtctttctactcttttcagtgcttctttctgtgatataaagttaaaaccaggtattttgatcactcacccttttttggttcctatgaaggtgtttattag

SEQ ID NO: 181784 - DNA, 622 bp, Homo sapiens
ctttgtctgcaaacaaacaaaaaaataaaaccgttaaatacctgatatcttacccatattatcagaacaataacactaagagcaataagaggcccttaattgggcattatgacagaacctgattaatattcaaattcttcaacccatccaataatataagttccataattaccaactgtatgttttccctgtctctactgtaaagttttcttctgttctatagtaaatactattaaagaaagtataatttattctaaaaataaagtttagacacaaattgaattcatcacacagaaagccaagactgtcaaatggaacactacataacacacagcaataattttagtctagatgtatayttttgcaaaataattagcttatgtagatgcctgaacatttctattcctcctttctctcataagttgctaaaattttatggggttttctataatagcctaatcaataataaataatataactagtgaagtccaatatactttcatatacatttatggaggcaagataatttgtttacacaaaataaaatatagcacatatatcgatataacaatatgccagttttgaatcagtgcttcacaaatgccataggaaaaaaataatc

SEQ ID NO: 181785 - DNA, 420 bp, Homo sapiens
atgatctcttataaattctgtcagaaaataaaatggggagggataatatttcaactgaatttaggattccagtgttaacactgacctcaacattttttccaaacattgtggacatcacaagaagggagatccacagagtaaaatttcttatgaaartagatgcaagatctttaacaaaattttagcaaattgaattcagtcatttaccaagaggatcatgcatcatgaataagtggaagttatcatggaaatgtagtacaattttaatgtctgaaaatccattaatataacttaatcatgttaatactaaaaggaagagaaattatgtacagagtacataattaggatatcaaaaaagatcttgaaaaaaatttaacattgattcatgttaaaattttgcagggcccagcatggtgattc

SEQ ID NO: 181786 - DNA, 551 bp, Homo sapiens
aggatcatgcatcatgaataagtggaagttatcatggaaatgtagtacaattttaatgtctgaaaatccattaatataacttaatcatgttaatactaaaaggaagaraaattatgtacagagtacataattaggatatcaaaaaagatcttgaaaaaaatttaacattgattcatgttaaaattttgcagggcccagcatggtgattctcacctgcaattcaagtgttttgggaggccaagccaggaggattacttgaagccaggagtttgagaccagcctgggcaatatagcaggaccctgtctctataaaaaaatgacataaaatgttagccaggtatggtagtgcatgcctgtagtcctagctacttgggaggctaaggtgggaggatcgcttgagctcaggagtttgaagttagagtgagctatgatcctgccacagcactcaagcctggatgacagagcaagagcctgtctctaataataattataataagtaatagtagtagtaattttttaaagcttcagcaaactataaatagaaatgaatt

SEQ ID NO: 181787 - DNA, 551 bp, Homo sapiens
aggatcatgcatcatgaataagtggaagttatcatggaaatgtagtacaattttaatgtctgaaaatccattaatataacttaatcatgttaatactaaaaggaagagaaattatgtacagagtacataattaggatatcaaaaaagatcttgaaaaaaatttaayattgattcatgttaaaattttgcagggcccagcatggtgattctcacctgcaattcaagtgttttgggaggccaagccaggaggattacttgaagccaggagtttgagaccagcctgggcaatatagcaggaccctgtctctataaaaaaatgacataaaatgttagccaggtatggtagtgcatgcctgtagtcctagctacttgggaggctaaggtgggaggatcgcttgagctcaggagtttgaagttagagtgagctatgatcctgccacagcactcaagcctggatgacagagcaagagcctgtctctaataataattataataagtaatagtagtagtaattttttaaagcttcagcaaactataaatagaaatgaatt

SEQ ID NO: 181788 - DNA, 633 bp, Homo sapiens
cttctactccttaaaattctcaaaagctaccttctggctttctgttactttagttttaccttatcccttctccaaaatgcagaaaaatagcatataccaaaagcagatgaattcttgtgtgttggaggctgacagaggtaacatactctctaaagtggtatagagctagagagaaggtaaaatgaatgttcacagtgacaacacttgttaatcataagaaggtggcargttcaatctgtgacctgagatactgtgaataatcaaggccttaatagaaagtaactagtaagtaaaaatactatagctaaaacctatgtccacagtgagaagacaaaataaaaactagaagataatgtaatgaccaagaagcacatgagaagtcatcctgagaggtctgattctgttgttcttacatgagtctgtttagaacaagatggcctgtttaagaaccagtgtttgccatacaactctcaaagatacatgttaattgtctgatgggatttgacgtttgccaatctgtaaaacattcaacacttttaaactaattttccttattcagtctcatttaatgtaggctatactacacttgaaagggtataggtaaaaatatcaggacgattgcagagtgagaga

SEQ ID NO: 181789 - DNA, 594 bp, Homo sapiens
gttctttatcatggaagcacttcttgaatggttaagggacctcaaaaatacactcttccataaagcaatgagaacactggaaaaagttttcagaataaactgtttcagaactctggaaattaacaaaaggcttgctacaatatgaaaaacaattattcaagaaaatggctgaatttctgtaataatacatagtaacatgctatttatcttgccatattctgattcctctgtctatagctccatggcagccttgtaaactgtagccccacaggatttgtgaaaaacagaaaattagcaattactgaaggagacagaaaggtgtaaagyacctcctgcctccgactcctgcaaaaagaaacccatcctcagagaactgacttgtctggcagctgtctgaaaaagcccaattcacatggcttatctttattagatctggctcagagtttgctcattgtgaagtgcctttctcctgggtgtttgtcaaaaaatgatcagtgaaaattgtttaacattgtaggtgcctcagttagagatacctgttgaggctaatgaagtgctgactaaaaaacttaacagtgaaaactaaagagtgat

SEQ ID NO: 181790 - DNA, 643 bp, Homo sapiens
tctttcataaataaaatgttttgaaagaatattataattaactgctaaatttgataacctaaattaaatggagacattcctagaaagaggaraactgtggaaagtgactcaagaaaaactgaatgtttgaatagaccaataataaagagcaatgtgattgaattcataacttaaaaacctctcgaaaagaaacctccagttctagattatttcacaggtgaattctgccaaatgtttatagaaagaatcaacaaaaattcttataaaaaatagaagaggaagtaagtcttctcaactgttctaggtcagtatagacagattaaaaaattctcagcagaataatagcaaacaaaatccatcagtacatgaaggcaactataaaccttaattaagttagacgtactcgtaaagtgcaaagttagtttagcaaaatccacacaattagtgtaatatgatgtactatattaacaggataaagaacaagaactatatgaacttctgaatctattcagagaaagcgtttgacaaaatccaacatccttgcgtgataagtgcttagcaaactaggaattgaatggaccctcctcaatacgataaaggacatctattaaaaaaagcaaaaaacaacaaaaagcaaaacaaa

SEQ ID NO: 181791 - DNA, 619 bp, Homo sapiens
tgtcttttcttcaaaatatacttgctctactgacaaataacattatttttaattttttttaaacaaagtagatagaatatgctcaacctaatgtgaaattaaaggataatagcctatactctcctaaaatactgtaaattgtatgaatccaacagctagggaattaacagaaagaaataattgtgttgaatattaaattgcctttatattttacatactatattaaattatattatattttatatgtaaacacacaaaaatgtgcctcaatgaaataattataatgaatgtaccaaataggtaatccaagtttgtccttgttgattgtcacactakgtagtcgacttttagaatattgacaataatgcgcaggttgcataccctaaaagaaagtggagtgtaatttctcagcactctaataatcttataaaagtttgaggagtatttctgttattcataaatgtccttccaagtgatctatatgccatctctcagttaaatttatatttgcatttcatggaaactatcaatgatttcagtatgtttagagattctcacagataatgagttaatgtgtgacaatatctttaaccaatttcagtttgaactctttaaatat

SEQ ID NO: 181792 - DNA, 627 bp, Homo sapiens
ggggagaaaaaatcgtcaatccaataatgcgaagtctatcaagtatctgcctggctgcagcttgaaactcctcctccaggctcctatagaagccagatcagggcttagataactgtttttctttaaaaaagcaaatggattttccctcttctctctgaagagctactctgagtgactgagtgagatggcttattcaagggctcaatcttgttttgttggatagagactgatcaagttttggaaagcaatgaaaagagagccaatgacacctgggtttctccttgttagagaaaacacatgcatcgtctataggaaaaaaaacccatataaacacttggctttcagacaaatacagtttaatgcctattactatgcttgaaataaaaataaacycattgcaaaatttcttgcagattttggttcacagagctgaataaactcattgaaacaataataaactctcactgtttaaaaaatatctttcatttttgtgatttatctacttgtatcttaaaagtaaattcaattttgatggaaattaagtttaattggttattcagaaaactgaatgtgttctttatgtagctatttttacttaaaattagacaatgtaattttaaatataga

SEQ ID NO: 181793 - DNA, 542 bp, Homo sapiens
acttggctcctggatctgctgtgttggccctgggccctgcgtttattgcaggtggacataaaacttgagcctgccatgatggacatagattattggttcacaggggctggtctcatcccaggagccactggggtggaccttttgactgggtctgcagaagcaggcttggatcctgtattcatgggggccgtcctaatcccagattgacaaggtttttcatggcactagtttatttcataagcctgaatgtgcaagtgccagccatttgctgggatgggcccggtgactaagtacacagagacagtcctggagcctggtgccccgggagctggaatggctctgagtcggagctataggctgaatatttggggagaggcttgggccctgggactttgaggaccaacttggaacctaagtctacagaggcagtcctggagtctgggtctacrtcttctggccttatgctggggtctactacaatgagggtgagctcttggtcatcggaccctgggtctgttggagcatggggctgcagaggctgg

SEQ ID NO: 181794 - DNA, 239 bp, Homo sapiens
tttgagcctgctggagtcgtagttaagaggatggatttcagagttggactggctaggcatgagccctcttcactatatgatagttatttttcttggagaaagttgcttaacacttgtaaagctcaaatatcccatctatgaaatggacttaataactattttgagatttraaatatacatttgtcaaatgtaactcactaatactaaaaaatcaataattgtttgttcttattaaacaa

SEQ ID NO: 181795 - DNA, 539 bp, Homo sapiens
tgctgcctcacaaatttacacaggactgagggcaagggtggtgtctgctcaggatcttcatgtaatcatctccttacctaccatagatgacagaatttaatgaaaacaggaaaagacctcagtcagactgtaagccagactcttggggaaggtaaaatacctatatttgaaattataggtagacaccaaatatcaaagcggcatcagagaaagaactaattaaaaggcaaacagagaaaattatgaaatctatttctgattagaattccaagattctttttcatctggaaattttctcccctatctcagaaaattcacgaaatattctttagcagtcgtaacacaggaaaactcattccaagttattttacraccccaagtgagtaagttttttgggagagtggagaatagagagaagtagatgaagacacaataatctcttttctaggcatcctaaatggattgtctttgcttctagtttagacttatgagtaggctgctgcttaataccctgcaggagtttcaggaaacccaacatg

SEQ ID NO: 181796 - DNA, 539 bp, Homo sapiens
tgctgcctcacaaatttacacaggactgagggcaagggtggtgtctgctcaggatcttcatgtaatcatctccttacctaccatagatgacagaatttaatgaaaacaggaaaagacctcagtcagactgtaagccagactcttggggaaggtaaaatacctatatttgaaattataggtagacaccaaatatcaaagcggcatcagagaaagaactaattaaaaggcaaacagagaaaattatgaaatctatttctgattagaattccaagattctttttcatctggaaattttctcccctatctcagaaaattcacgaaatattctttagcagtcgtaacacaggaaaactcattccaagttattttacgaccccaagtgagtaagttttttgggagagtggagaatagrgagaagtagatgaagacacaataatctcttttctaggcatcctaaatggattgtctttgcttctagtttagacttatgagtaggctgctgcttaataccctgcaggagtttcaggaaacccaacatg

SEQ ID NO: 181797 - DNA, 539 bp, Homo sapiens
tgctgcctcacaaatttacacaggactgagggcaagggtggtgtctgctcaggatcttcatgtaatcatctccttacctaccatagatgacagaatttaatgaaaacaggaaaagacctcagtcagactgtaagccagactcttggggaaggtaaaatacctatatttgaaattataggtagacaccaaatatcaaagcggcatcagagaaagaactaattaaaaggcaaacagagaaaattatgaaatctatttctgattagaattccaagattctttttcatctggaaattttctcccctatctcagaaaattcacgaaatattctttagcagtcgtaacacaggaaaactcattccaagttattttacgaccccaagtgagtaagttttttgggagagtggagaatagagagaagtagatgaagacacaataatctcttttctaggcatccyaaatggattgtctttgcttctagtttagacttatgagtaggctgctgcttaataccctgcaggagtttcaggaaacccaacatg

SEQ ID NO: 181798 - DNA, 539 bp, Homo sapiens
tgctgcctcacaaatttacacaggactgagggcaagggtggtgtctgctcaggatcttcatgtaatcatctccttacctaccatagatgacagaatttaatgaaaacaggaaaagacctcagtcagactgtaagccagactcttggggaaggtaaaatacctatatttgaaattataggtagacaccaaatatcaaagcggcatcagagaaagaactaattaaaaggcaaacagagaaaattatgaaatctatttctgattagaattccaagattctttttcatctggaaattttctcccctatctcagaaaattcacgaaatattctttagcagtcgtaacacaggaaaactcattccaagttattttacgaccccaagtgagtaagttttttgggagagtggagaatagagagaagtagatgaagacacaataatctcttttctaggcatcctaaatggattgtctttgcttctagtttagacttatgagtaggctgctgcttaataccctgcargagtttcaggaaacccaacatg

SEQ ID NO: 181799 - DNA, 610 bp, Homo sapiens
cctggttgccacacatgtacacacagaaagagagagagaaaaaccctcatgtatatgtagggagtctatacaagtgattagctggctgctgatctgtccatgttgtgaggaaactatatggaagacataaaacaaaaaagttactgccagaaagtaggtggaaaattcccaagagctcacacagacttattggacttattgactttttatgttctcatcagtaagatggaaagacctcctactacatggagtatcaagtagaagtagagtcctcaaagggtattgccttcacagtgaggagaaattagccccaagctaaaaactgctctggatttaccctaacaaagttgaaaagtaagccttaacgttccaaactgagtccaagtaactcaactacattgcagtaaaagcccaacactctttgaagaaatacaaatatatcatcaaaaaatacaaatcacaaaatgtgacatctaacaaaagtgatcaggcatgcaaataaactaaatataatccataatcaagagaatattaattagtagatacataagaataaaygacagaattgtcagataaagacattgaaagagcaattacaaatacataccac

SEQ ID NO: 181800 - DNA, 642 bp, Homo sapiens
ttgctcttgtttttcaactcttcatgtgattttgatgtaaccaagtttgggaaatacagaattaaaacactcgtgattcccaaaggacgatggcagtgaggggtgcagtgacgtgaaaaatgggcataccaaaatcacctgggaaattttttcctaatttcatctgattcttcatctacacctagtaactctgtgtaatatagtgatatcacttcagaaatttgggaataatttaaagatttgtgtaattggataaagatccccaggtaagtttcactatccctcactgcttttacaacaattgaactacagatttggtagaactaaggagaaaaccctttaaaaaatgtttaatgaaggttttttgtttttttttttttwaaatgcactagacattagtgaaaccaaaatggggagatagcataagggactgacaaagactctaagaagggagccaaatgagggaagctgggaggacagccacgttcaatatgcctgtatgtatcatgtcatagttatgacaggaattgtgaggcactttaggaagctttggtgattccttttgaaatgtagcaaggtctgcaacaccctccctaccccaatcattcaaaagttgcaaagggctaggttaaaacaaggaat

SEQ ID NO: 181801 - DNA, 601 bp, Homo sapiens
ttacatttacgtgttatttaaaaaaatgaaaactgatcagtgtttgcctagagattggggaggggatagaggcataagcatgttccttttgttgaatttgttaatgttacagttgcatacatgtgttaaaactaatcaaattgtagactctataaaaagcagctctgttgatgaattatattccaataaagatgcacacataaaatagcatgttaaattaatgaatgggaataggaaagaaagctgcttatgtatgttttgaacaaacacttctaaaattttaggagaaaaagagaatatgactgccaaagaaaaagagaagattcctaaaagcccaattttttaaaaatctctgagkcacactcttaaaatgcataaagctttttgtataactgagaagtgctatgacataccaatttaaatcaatctacaaggaaaataaggaatttgacaatcatactcttgtcttagtctttaccatgagaccaggttcttctgacagcgcccaagacttgatctttgctctgagacgctctcttttttttttttttttttttttataattgtcttttattgtaaaaactcaaatgggcatacaaca

SEQ ID NO: 181802 - DNA, 489 bp, Homo sapiens
agtacacttttcattaatacaattaaaagctcagcaaaattctctataaagagaattagatcatggggaatacaaaggaaccatgtttaattattgtttgtgtggtagttatgcgtatcacatgagaactttcacagtttgaagaaattctaygcatggtcataggcttttaatgatattatattttaaaaactacagtgaccttactcacatttttataggattttcgttttcagcccccacaggttcctttgttaattcaaccaggtaccaatttgctatattttttaagtgaaagaatgttattgagaactatatttttaaataagtcaagagtaacaccatgacaactaatgttttattctctaaaatgaaaagcttaatggcaatttaaaaaaataagtgctagatacaatataaatgtatttttaaaaggcttaaaattttaaagttgagaaaaatataaaagatttgaatatataaaattac

SEQ ID NO: 181803 - DNA, 575 bp, Homo sapiens
ccactttaccttagtagcaacactcaagtcttcatcatccaatgtaggcaatgaatccacacacagttcatgcaaaatgcttgagagcaaaaatacacaatgaaaatgagcaagttgatttctttacaatttttttaaytgccagtttatatccagcttccccctcaaaaaaaggaaaacataatctggggaaaggtcagtgatctatatattaaattatgattcttgatataattaaaatatgtcctctgttctaaaaagagattttagttacctatttctgcctccacctgtctaaatctataaaatattcaatgaaagctaaccttgaggtttataacaaatagtgacagtcaatatattggcagagcctgacaataatgtgccctcacaaattatctgtcctgaagctgaacttaaaattcaattaatggatgacataaattttgttccctaaactggaataaaactgatgacctaaaacaaggtagaaagatccactgtctcttttccatgatctgtctctggataaaacactaatctacatcacttcaaaatggtagtcttgattcctc

SEQ ID NO: 181804 - DNA, 575 bp, Homo sapiens
ccactttaccttagtagcaacactcaagtcttcatcatccaatgtaggcaatgaatccacacacagttcatgcaaaatgcttgagagcaaaaatacacaatgaaaatgagcaagttgatttctttacaatttttttaattgccagtttatatccagcttccccctcaaaaaaaggaaaacataatctggggaaaggtcagtgatctatatattaaattatgattcttgatataattaaaatatgtcctctgttctaaaaakagattttagttacctatttctgcctccacctgtctaaatctataaaatattcaatgaaagctaaccttgaggtttataacaaatagtgacagtcaatatattggcagagcctgacaataatgtgccctcacaaattatctgtcctgaagctgaacttaaaattcaattaatggatgacataaattttgttccctaaactggaataaaactgatgacctaaaacaaggtagaaagatccactgtctcttttccatgatctgtctctggataaaacactaatctacatcacttcaaaatggtagtcttgattcctc

SEQ ID NO: 181805 - DNA, 505 bp, Homo sapiens
ccacacacagttcatgcaaaatgcttgagagcaaaaatacacaatgaaaatgagcaagttgatttctttacaatttttttaattgccagtttatatccagcttccccctcaaaaaaaggaaaacataatctggggaaaggtcagtgatctatatattaaattatgattcttgatataattaaaatatgtcctctgttctaaaaagagattttagttacctatttctgcctccacctgtctaaatctataaaatattcaatgaaagctwaccttgaggtttataacaaatagtgacagtcaatatattggcagagcctgacaataatgtgccctcacaaattatctgtcctgaagctgaacttaaaattcaattaatggatgacataaattttgttccctaaactggaataaaactgatgacctaaaacaaggtagaaagatccactgtctcttttccatgatctgtctctggataaaacactaatctacatcacttcaaaatggt

SEQ ID NO: 181806 - DNA, 607 bp, Homo sapiens
tatgaaagctaaatgtacagaagtcaaatagcaaagatgtatgttcttattgagaatacttttcccagaaagattaaaatattmacaattataaaatcccattattttcactctataggtcctaccttattcaggtccacataaactagcaagcccttaaaaattttcataggcactcagacacccaaggagagagactgccagaaaagaaacagagtcatgatagttgtacctctatttccctaagtactatctaagtatatttcttcctatggacacccacttccagattctacttctgcagggttccacagaagtctccagtcttcaaatcttcagtgtatgaaagcacagattcctgaaagaatggcctcaaatgaccaggagtaggagctctctatatccctgctcctgaaaaacaagctaactggagtctccatcacctgccaccagctatacacactaccaactacccaactgaactccatgactgatttgccagctaatcatgcccctgacccagcccacatggacatgggaaggacatcagtgaactgtgaaaagaggcagaggtgaggagacacctgccctgtgccacacatctatg

SEQ ID NO: 181807 - DNA, 607 bp, Homo sapiens
tatgaaagctaaatgtacagaagtcaaatagcaaagatgtatgttcttattgagaatacttttcccagaaagattaaaatattaacaattataaaatcccattattttcactctataggtcctaccttattcaggtccacataaactagcaakcccttaaaaattttcataggcactcagacacccaaggagagagactgccagaaaagaaacagagtcatgatagttgtacctctatttccctaagtactatctaagtatatttcttcctatggacacccacttccagattctacttctgcagggttccacagaagtctccagtcttcaaatcttcagtgtatgaaagcacagattcctgaaagaatggcctcaaatgaccaggagtaggagctctctatatccctgctcctgaaaaacaagctaactggagtctccatcacctgccaccagctatacacactaccaactacccaactgaactccatgactgatttgccagctaatcatgcccctgacccagcccacatggacatgggaaggacatcagtgaactgtgaaaagaggcagaggtgaggagacacctgccctgtgccacacatctatg

SEQ ID NO: 181808 - DNA, 607 bp, Homo sapiens
tatgaaagctaaatgtacagaagtcaaatagcaaagatgtatgttcttattgagaatacttttcccagaaagattaaaatattaacaattataaaatcccattattttcactctataggtcctaccttattcaggtccacataaactagcaagcccttaaaaattttcataggcactcagacacccaaggagagagactgccagaaaagaaacagagtcatgatagttgtacctctatttccctaagtactatctaagtatatttcttcctatggacacccacttccagattctacttctgcagggttccacagaagtctccartcttcaaatcttcagtgtatgaaagcacagattcctgaaagaatggcctcaaatgaccaggagtaggagctctctatatccctgctcctgaaaaacaagctaactggagtctccatcacctgccaccagctatacacactaccaactacccaactgaactccatgactgatttgccagctaatcatgcccctgacccagcccacatggacatgggaaggacatcagtgaactgtgaaaagaggcagaggtgaggagacacctgccctgtgccacacatctatg

SEQ ID NO: 181809 - DNA, 607 bp, Homo sapiens
tatgaaagctaaatgtacagaagtcaaatagcaaagatgtatgttcttattgagaatacttttcccagaaagattaaaatattaacaattataaaatcccattattttcactctataggtcctaccttattcaggtccacataaactagcaagcccttaaaaattttcataggcactcagacacccaaggagagagactgccagaaaagaaacagagtcatgatagttgtacctctatttccctaagtactatctaagtatatttcttcctatggacacccacttccagattctacttctgcagggttccacagaagtctccagtcttyaaatcttcagtgtatgaaagcacagattcctgaaagaatggcctcaaatgaccaggagtaggagctctctatatccctgctcctgaaaaacaagctaactggagtctccatcacctgccaccagctatacacactaccaactacccaactgaactccatgactgatttgccagctaatcatgcccctgacccagcccacatggacatgggaaggacatcagtgaactgtgaaaagaggcagaggtgaggagacacctgccctgtgccacacatctatg

SEQ ID NO: 181810 - DNA, 474 bp, Homo sapiens
tttccctaagtactatctaagtatatttcttcctatggacacccacttccagattctacttctgcagggttccacagaagtctccagtcttcaaatcttcagtgtatgaaagcacagattcctgaaagaatggcctcaaatgaccaggagtaggagctctctatatccctgctcctgaaaaacaagctaactggagtctccatcacctgccaccagctatacacactaccaactacccaactgaactccatgactgatttkccagctaatcatgcccctgacccagcccacatggacatgggaaggacatcagtgaactgtgaaaagaggcagaggtgaggagacacctgccctgtgccacacatctatgtagttcagcaatttccagccccttagtactccaggggctctaagccacccctttgtaagtcaggatggaagtagatgacaccacatttctatctgctgtagaca

SEQ ID NO: 181811 - DNA, 474 bp, Homo sapiens
tttccctaagtactatctaagtatatttcttcctatggacacccacttccagattctacttctgcagggttccacagaagtctccagtcttcaaatcttcagtgtatgaaagcacagattcctgaaagaatggcctcaaatgaccaggagtaggagctctctatatccctgctcctgaaaaacaagctaactggagtctccatcacctgccaccagctatacacactaccaactacccaactgaactccatgactgatttgccagctaatcatgcccctgacccagcccacatggacatgggaaggacatcagtgaactgtgaaaagaggcagaggtgaggagacacctgccctgtgccacacatctatgtagttcagcaatttccakccccttagtactccaggggctctaagccacccctttgtaagtcaggatggaagtagatgacaccacatttctatctgctgtagaca

SEQ ID NO: 181812 - DNA, 623 bp, Homo sapiens
acaccacatttctatctgctgtagacattcttcccagtgtctcaatatgttttggcatctttcagtaaaaatcttcaagtttgtcagyccttgatttaaaaaaaaaaaagcagcaaaatttttagagctcccttgaaccttctattttaatgtgcctttgtagataattcccaacatcttgtgtccttcatttttataatttatctttatcaaacttgtcataaaccccaatactttgatctcttgtagaagagtccgtactcctatccaatccagtgttgtttatcttcaaacttggactgcccctgctcattccattcttatctacttccattgggttcaccagctaattccattctcattctatccacagactcactcccgtttgtattatgaaaacacacgccaataggacataaaaagaagcaagagtactgggctttaccatgagttcaaatctcatttctgccaattcctatgtctaaaaaaaagcttcgtaatctctttgagcctcacattctctatctagagaatcacttgaccagaatgttcaacgcagagaaaaatactagaaggtattttaattcattccaagattccttaaaattctgtaattctatgtc

SEQ ID NO: 181813 - DNA, 623 bp, Homo sapiens
acaccacatttctatctgctgtagacattcttcccagtgtctcaatatgttttggcatctttcagtaaaaatcttcaagtttgtcagtccttgatttaaaaaaaaaaaagcagcaaaatttttagagctcccttgaaccttctattttaatgtgcctttgtagataattcccaacatcttgtgtccttcatttttataatttatctttatcaaacttgtcataaaccccaatactttgatctcttgtagaagagtccgtactcctatccaatccagtgttgtttatcttcaaacttggactkcccctgctcattccattcttatctacttccattgggttcaccagctaattccattctcattctatccacagactcactcccgtttgtattatgaaaacacacgccaataggacataaaaagaagcaagagtactgggctttaccatgagttcaaatctcatttctgccaattcctatgtctaaaaaaaagcttcgtaatctctttgagcctcacattctctatctagagaatcacttgaccagaatgttcaacgcagagaaaaatactagaaggtattttaattcattccaagattccttaaaattctgtaattctatgtc

SEQ ID NO: 181814 - DNA, 623 bp, Homo sapiens
acaccacatttctatctgctgtagacattcttcccagtgtctcaatatgttttggcatctttcagtaaaaatcttcaagtttgtcagtccttgatttaaaaaaaaaaaagcagcaaaatttttagagctcccttgaaccttctattttaatgtgcctttgtagataattcccaacatcttgtgtccttcatttttataatttatctttatcaaacttgtcataaaccccaatactttgatctcttgtagaagagtccgtactcctatccaatccagtgttgtttatcttcaaacttggactgcccctgctcattccattcttatctacttccattgggttcaccagctaattccattctcattctatccacagactcactcccgtttgtattatkaaaacacacgccaataggacataaaaagaagcaagagtactgggctttaccatgagttcaaatctcatttctgccaattcctatgtctaaaaaaaagcttcgtaatctctttgagcctcacattctctatctagagaatcacttgaccagaatgttcaacgcagagaaaaatactagaaggtattttaattcattccaagattccttaaaattctgtaattctatgtc

SEQ ID NO: 181815 - DNA, 623 bp, Homo sapiens
acaccacatttctatctgctgtagacattcttcccagtgtctcaatatgttttggcatctttcagtaaaaatcttcaagtttgtcagtccttgatttaaaaaaaaaaaagcagcaaaatttttagagctcccttgaaccttctattttaatgtgcctttgtagataattcccaacatcttgtgtccttcatttttataatttatctttatcaaacttgtcataaaccccaatactttgatctcttgtagaagagtccgtactcctatccaatccagtgttgtttatcttcaaacttggactgcccctgctcattccattcttatctacttccattgggttcaccagctaattccattctcattctatccacagactcactcccgtttgtattatgaaaacacacgccaataggacataraaagaagcaagagtactgggctttaccatgagttcaaatctcatttctgccaattcctatgtctaaaaaaaagcttcgtaatctctttgagcctcacattctctatctagagaatcacttgaccagaatgttcaacgcagagaaaaatactagaaggtattttaattcattccaagattccttaaaattctgtaattctatgtc

SEQ ID NO: 181816 - DNA, 393 bp, Homo sapiens
atttgtctctaagacttgcctaaacttgctttggtaaaacttacagtcctatggccaaagctaagtcagatctgccctagagcctttgaaggtaaaaataagatactggttaccactgaaatcgtcaaatttattaggactaaccacattctaacaataaacttaaatgagagttcaaggtatttaaactctcattaatttagaagytaatcaaattaatgaatctgattgatctgattcagacctatactttgatccaagggctgcacagatatctatcaatctatgctgaggagcaagagaaaggatttggaaggcagacaggctgatggtcaaactgtaggccagctactttgttaactatgggatcatgaggcaaataatcagctctaa

SEQ ID NO: 181817 - DNA, 540 bp, Homo sapiens
tcttacctgactgcagattcatcagaaattccaacatctattaaagaaaaaggtaaaatgtattttaaatcaataataaatgtacagaatattaaaatcataagaatgcacagtgatgcatgcctctaatccaaactacttggmaggatgaggcaggaggatcacttgaggagcccagaagtttgagaccagcttgggaaacatagtaagactctaccttcgtaaaaaaattgtgcacacttgtgtgtatgctttagatcctgttttttgttgttgttgttttggtttggtttggttttttaaagcataagactgacgttttgttacaaagcattcctttgggagcatgcctgggaacttattagaattaacattcattataagtattggtaggtaattaatgcagtaagaactcttccctctgtatttattagatgcaaagaagaataaatttattaaaatttggtatctacaagtgaactgaagtatacaagtcatcctagccaaagcctatgagattgagtaaaaatggtattgtta

SEQ ID NO: 181818 - DNA, 540 bp, Homo sapiens
tcttacctgactgcagattcatcagaaattccaacatctattaaagaaaaaggtaaaatgtattttaaatcaataataaatgtacagaatattaaaatcataagaatgcacagtgatgcatgcctctaatccaaactacttggaaggatgaggcaggaggatcacttgaggagcccagaagtttgagaccagcttgggaaacatagtaagactctaccttcgtaaaaaaattgtgcacacttgtgtgtatgctttagatcctgttttttgttgttgttgttttggtttggtttggttttttaaagcataagactgacgttttgttacaaagcattcctttgggagcatgcctgggaacttattagaattaacattcattataagtattggtaggtaattaatgcagtaagaactcttccctctgtatttattagatgcaaagaagaataaatttattaaaatttggtatctacaagtgaactgaagtatayaagtcatcctagccaaagcctatgagattgagtaaaaatggtattgtta

SEQ ID NO: 181819 - DNA, 484 bp, Homo sapiens
atgtatagggaaaaacagcttgtgattcagtaatattcatggtttcatgcatgcactgggggtcttgaaatgtatctcccacagttaagttgtagttactgcacttattttgttataacaccacacagcctctctagctcttcagwtcaaactgtttagtttagaataaaacatgctatcgccagaaaccaacaaaacataggaatcagaccagaaacaggaatccttgcaaatactttccagccaccagtggagaagatctcaagagagatcagtgtgttactctggctaatactcttctgggtaaggtgctgggtggtttccttagttgtagctatttgctctggcctacgtataacaagccccaaattcacctgccattttacctcccacagaaagaaccactggaaagatcactcctttaagagcttatccacattcagagagaagctgaataaacactggggaggtatggcaggctgtc

SEQ ID NO: 181820 - DNA, 567 bp, Homo sapiens
atcattcctgctgatgacacaattcaattctcacaccctatctacagataacatcagatttaatttaatttataaattaaactttgtcatagatatgtatgtatagggaaaaacagcttgtgattcagtaatattcatggtttcatgcatgcactgggggtcttgaaatgtatctcccacagttaagttgtagttactgcacttattttgttataacaccacacagcctctctagctcttcagttcaaactgtttagtttagaataaaacatgctatcgccagaaaccaacaaaacataggaatcagaccagaaacaggaatccttgcaaatactttccagccaccagtggagaagatctcaagagagatcagtgtgttactctggctaatactcttctgggtaaggtgctgggtggtttccttagttgtagctatttgctctggcctacgwataacaagccccaaattcacctgccattttacctcccacagaaagaaccactggaaagatcactcctttaagagcttatccacattcagagagaagctgaataaacactggggag

SEQ ID NO: 181821 - DNA, 480 bp, Homo sapiens
aaaataaataaataaaaaagatggctgggggcagtggctcawgtctgtaatcccagcactttgagaggctgaggtgggtggatcacctgaggtcaggagttcgagaccagtctgactaacatggtaaaacctcatctctactgaatataaaaaattagccgggcatgatggtgcatgcctgtagttccaggtacctgggaggctgaggcaggagaatcatttgaacctgggaggtggaggttgcagtgatccaagattgtgtcattgcactgcagcctggtcaacaagagcaaaactctgtctcaaaaaaaaataagtaaataaaattaaaaataaagatattcactgaacctgttactatgatatatttaagcaagacacggtgaccctaaaaattagagatcattgaagaccaaagtaacaacatgtggtcattatttctcaaattgaagtatataaaatatataaaataagtaaatt

SEQ ID NO: 181822 - DNA, 480 bp, Homo sapiens
aaaataaataaataaaaaagatggctgggggcagtggctcatgtctgtaatcccagcactttgagaggctgaggtgggtggatcacctgaggtcaggagttcgagaccagtctgactaacatggtaaaacctcatctctactgaatataaaaaattagccgggcatgatggtgcatgcctgtagttccaggtacctgggaggctgaggcaggagaatcatttgaacctgggaggtggaggttgcagtgatccaagattgtgtcattgcactgcagcctggtcaacaagagcaaaactctgtctcaaaaaaaaataagtaaataaaattaaaaataaagatattcactgaacctgttactatgatatatttaagcaagacayggtgaccctaaaaattagagatcattgaagaccaaagtaacaacatgtggtcattatttctcaaattgaagtatataaaatatataaaataagtaaatt

SEQ ID NO: 181823 - DNA, 480 bp, Homo sapiens
aaaataaataaataaaaaagatggctgggggcagtggctcatgtctgtaatcccagcactttgagaggctgaggtgggtggatcacctgaggtcaggagttcgagaccagtctgactaacatggtaaaacctcatctctactgaatataaaaaattagccgggcatgatggtgcatgcctgtagttccaggtacctgggaggctgaggcaggagaatcatttgaacctgggaggtggaggttgcagtgatccaagattgtgtcattgcactgcagcctggtcaacaagagcaaaactctgtctcaaaaaaaaataagtaaataaaattaaaaataaagatattcactgaacctgttactatgatatatttaagcaagacacggygaccctaaaaattagagatcattgaagaccaaagtaacaacatgtggtcattatttctcaaattgaagtatataaaatatataaaataagtaaatt

SEQ ID NO: 181824 - DNA, 512 bp, Homo sapiens
tattttgcttatttaacaattttactgaaaggtaaatgagataaataggacagattataattacctaacattgctatggtaacttatgtacaaatagctgttcgtcaccgaaagtcaaaaaagtaaccagcgctgcaacttaagatggatcatacaacagaaattagtaccaagttaccttatcttataatatgttattaaaatgaaattttaaaacaacaccaaaaattaagttggggytatacaaagtgtgcagaaaagatttcatataacaggcaagagactgccatccttagaaaggcctgcatgcaaggctggcccttggctggtgtttaggaaattggaattgggagggtttccaccattccctgagaagagtggctcactgtgtctaaagtttttatagaaaccgccaatgggtgaaatctaaagcagcagctggtgtatccattaacattctcaaaacaggatgcatctggacccctgtgtgcaatcttcatagcacacagaca

SEQ ID NO: 181825 - DNA, 512 bp, Homo sapiens
tattttgcttatttaacaattttactgaaaggtaaatgagataaataggacagattataattacctaacattgctatggtaacttatgtacaaatagctgttcgtcaccgaaagtcaaaaaagtaaccagcgctgcaacttaagatggatcatacaacagaaattagtaccaagttaccttatcttataatatgttattaaaatgaaattttaaaacaacaccaaaaattaagttggggctatacaaagtgtgcagaaaagatttcatataacaggcaagagactgccatccttagaaaggcctgcatgcaaggctggcccttggctggtgtttaggaaattggaattgggagggtttccaccattccstgagaagagtggctcactgtgtctaaagtttttatagaaaccgccaatgggtgaaatctaaagcagcagctggtgtatccattaacattctcaaaacaggatgcatctggacccctgtgtgcaatcttcatagcacacagaca

SEQ ID NO: 181826 - DNA, 537 bp, Homo sapiens
tacacagcccttttaagcatttcattatattacatctagcttacytctaagggatttattcagatgtgactgaagaaagtctaaagggaaaaaaagcaatttaatttgataaattaaattatcaattatagccaaattatttggctataacaaattaaacattttaagcagacagaagatgcaaacattttaagttgacagaagatataaaatgttcactatcaaaatgtcgcaactgataaaaatgttctcaaatatttctgtctcaaacttgcattgttcattaaggaagcaaaataggtgggacatacacagcaacaacatccctcaaaaaacaccttggctcattcctataagccaggcagcaaatacatcatccttacatatgttaattaccttccaatttcaaattctcaactgtgaaataaagggccattttatttggctgcttctagttcaatatgactgtttttattaaaacatctctaacttgaaaaatatttggtgttttctaaaaaactgcaaattgccacaaat

SEQ ID NO: 181827 - DNA, 537 bp, Homo sapiens
tacacagcccttttaagcatttcattatattacatctagcttacctctaagkgatttattcagatgtgactgaagaaagtctaaagggaaaaaaagcaatttaatttgataaattaaattatcaattatagccaaattatttggctataacaaattaaacattttaagcagacagaagatgcaaacattttaagttgacagaagatataaaatgttcactatcaaaatgtcgcaactgataaaaatgttctcaaatatttctgtctcaaacttgcattgttcattaaggaagcaaaataggtgggacatacacagcaacaacatccctcaaaaaacaccttggctcattcctataagccaggcagcaaatacatcatccttacatatgttaattaccttccaatttcaaattctcaactgtgaaataaagggccattttatttggctgcttctagttcaatatgactgtttttattaaaacatctctaacttgaaaaatatttggtgttttctaaaaaactgcaaattgccacaaat

SEQ ID NO: 181828 - DNA, 537 bp, Homo sapiens
tacacagcccttttaagcatttcattatattacatctagcttacctctaagggatttattcagatgtgactgaagaaagtctaaagggaaaaaaarcaatttaatttgataaattaaattatcaattatagccaaattatttggctataacaaattaaacattttaagcagacagaagatgcaaacattttaagttgacagaagatataaaatgttcactatcaaaatgtcgcaactgataaaaatgttctcaaatatttctgtctcaaacttgcattgttcattaaggaagcaaaataggtgggacatacacagcaacaacatccctcaaaaaacaccttggctcattcctataagccaggcagcaaatacatcatccttacatatgttaattaccttccaatttcaaattctcaactgtgaaataaagggccattttatttggctgcttctagttcaatatgactgtttttattaaaacatctctaacttgaaaaatatttggtgttttctaaaaaactgcaaattgccacaaat

SEQ ID NO: 181829 - DNA, 537 bp, Homo sapiens
tacacagcccttttaagcatttcattatattacatctagcttacctctaagggatttattcagatgtgactgaagaaagtctaaagggaaaaaaagcaatttaatttgataaattaaattatcaattatagccaaattatttggstataacaaattaaacattttaagcagacagaagatgcaaacattttaagttgacagaagatataaaatgttcactatcaaaatgtcgcaactgataaaaatgttctcaaatatttctgtctcaaacttgcattgttcattaaggaagcaaaataggtgggacatacacagcaacaacatccctcaaaaaacaccttggctcattcctataagccaggcagcaaatacatcatccttacatatgttaattaccttccaatttcaaattctcaactgtgaaataaagggccattttatttggctgcttctagttcaatatgactgtttttattaaaacatctctaacttgaaaaatatttggtgttttctaaaaaactgcaaattgccacaaat

SEQ ID NO: 181830 - DNA, 577 bp, Homo sapiens
ttgtaactattcaaacctcttattggttctataattaattctttttctaattagctttttaaaaatcagaattgatattagactaatcagttattaatgaggagatgaaattgagttgtttgtacactttatctaagatagtgttatattggctaactcaaatcagtagttcagcaaatgcagaatcagagcttcttcagtgtggaactctcttgtggttcttgaagatgccatttctttctttttttttttttgagacagcatcttcctctgtcaccaggctcgagtgcagtggcacaatctcaattcacagcaacttctgcctcccgggttcaagcatttcttttgyctcagcctctgaagtagctgggactacaggcacatgccaccatgcccggctaagctttgtattttctgtagatacggggtttcagcatgttggacaggctggtcttgaactcctgaccttgtgatccactggccttggactcctaaagtgctgggattacaggtgtgagccaccgtgcctggcctcttttttcagtctttaataaactgctgccatcatttcagacca

SEQ ID NO: 181831 - DNA, 616 bp, Homo sapiens
gtaactattcaaacctcttattggttctataattaattctttttctaattagctttttaaaaatcagaattgatattagactaatcagttattaatgaggagatgaaattgagttgtttgtacactttatctaagatagtgttatattggctaactcaaatcagtagttcagcaaatgcagaatcagagcttcttcagtgtggaactctcttgtggttcttgaagatgccatttctttctttttttttttttgagacagcatcttcctctgtcaccaggctcgagtgcagtggcacaatctcaattcacagcaacttctgcctcccgggttcaagcatttcttttgtctcagcctctgaagtagctgggactacaggcacatgycaccatgcccggctaagctttgtattttctgtagatacggggtttcagcatgttggacaggctggtcttgaactcctgaccttgtgatccactggccttggactcctaaagtgctgggattacaggtgtgagccaccgtgcctggcctcttttttcagtctttaataaactgctgccatcatttcagaccacttgctattttaggcacttagaaatttttcactggaattca

SEQ ID NO: 181832 - DNA, 577 bp, Homo sapiens
ttgtaactattcaaacctcttattggttctataattaattctttttctaattagctttttaaaaatcagaattgatattagactaatcagttattaatgaggagatgaaattgagttgtttgtacactttatctaagatagtgttatattggctaactcaaatcagtagttcagcaaatgcagaatcagagcttcttcagtgtggaactctcttgtggttcttgaagatgccatttctttctttttttttttttgagacagcatcttcctctgtcaccaggctcgagtgcagtggcacaatctcaattcacagcaacttctgcctcccgggttcaagcatttcttttgtctcagcctctgaagtagctgggactacaggcacatgccaccatgcccggctaagctttgtattttctgtagatacggggtttcagcatgttggacaggctggtcttgaactcctgaccttgtgatccactggycttggactcctaaagtgctgggattacaggtgtgagccaccgtgcctggcctcttttttcagtctttaataaactgctgccatcatttcagacca

SEQ ID NO: 181833 - DNA, 417 bp, Homo sapiens
atgtcaacttagccaagtgatcaaagttaacrttactaataataagataaatgaacttcatgtaacttcttatatgatgcactgagtaggacaaaacatcaattctatggtattcttagacaaaatgtataactttagtcctaaccgtgagaaaacatcagactaactgaaattgaggagggacattctacaaaataactgccagtattcatcaaaagcattttagaaagactgaggaattctccagagacatggaggcatgttatctaagtgcaatggagaacatgcattgtatcatgaaccagagatggacaacagtaggatatgtacaataacaccccaacatttgaacattaaacaaaatacttcagaaaaacccattggccaagaaaagtttcacacacaaaaaaaatagtt

SEQ ID NO: 181834 - DNA, 279 bp, Homo sapiens
gggcaagtggccatggtactgtctaggggtgggttcctgcgactcccacagcccaagtgggcatgtgttacagtgcactcttttagctttgccatccacagacggcttaagtgttaacctgttcagtgccctcttggtacccagttccttgtccagcatccagaaagaattaagttgcacacagacttgaggatggtgaatgtgggggttttattgagtggtggaggtggcactcaatgggatggatgggragctggaaaggggatggaatggaagatg

SEQ ID NO: 181835 - DNA, 619 bp, Homo sapiens
gttttcaattattttgcccagatccatcaaaggaatcactttctagagaagctatagctttatgaaatatattttttaagtgataagrcttgaaagttgaaattattctttgatccaagggcaccagaatgaatgttgggttagtaggcatgaaaacaatattcagctctttatacatctctgtaaaagcccttgagtaccagcggcattgtcagtgagtggtaatactttgaaaggaatcttatttcttgagcagtagttgtcgacagtgggcttaagatattcagtaaaccgtatttgtaaaccgatagtctgtcatccaggctttgttcccatttgtagagtacaggcagagctgtgttttatcataattcttcagggcccttggattttcagaatagtaaatcatcattggtttcatgttaacatcaccaactgcattaggtcttaacaaaagagtcagcatgtccttcgaagccttaaagccaggaatcaactcctctctagctgggaacatcctggatggcatctccttctagtagaatgctgttttgtctccattgcaaatctgtttagtgtagccgtcttaatcaattatcttctagatagctttctgcag

SEQ ID NO: 181836 - DNA, 619 bp, Homo sapiens
gttttcaattattttgcccagatccatcaaaggaatcactttctagagaagctatagctttatgaaatatattttttaagtgataagacttgaaagttgaaattaytctttgatccaagggcaccagaatgaatgttgggttagtaggcatgaaaacaatattcagctctttatacatctctgtaaaagcccttgagtaccagcggcattgtcagtgagtggtaatactttgaaaggaatcttatttcttgagcagtagttgtcgacagtgggcttaagatattcagtaaaccgtatttgtaaaccgatagtctgtcatccaggctttgttcccatttgtagagtacaggcagagctgtgttttatcataattcttcagggcccttggattttcagaatagtaaatcatcattggtttcatgttaacatcaccaactgcattaggtcttaacaaaagagtcagcatgtccttcgaagccttaaagccaggaatcaactcctctctagctgggaacatcctggatggcatctccttctagtagaatgctgttttgtctccattgcaaatctgtttagtgtagccgtcttaatcaattatcttctagatagctttctgcag

SEQ ID NO: 181837 - DNA, 497 bp, Homo sapiens
attttttaagtgataagacttgaaagttgaaattattctttgatccaagggcaccagaatgaatgttgggttagtaggcatgaaaacaatattcagctctttatacatctctgtaaaagcccttgagtaccagcggcattgtcagtgagtggtaatactttgaaaggaatcttatttcttgagcagtagktgtcgacagtgggcttaagatattcagtaaaccgtatttgtaaaccgatagtctgtcatccaggctttgttcccatttgtagagtacaggcagagctgtgttttatcataattcttcagggcccttggattttcagaatagtaaatcatcattggtttcatgttaacatcaccaactgcattaggtcttaacaaaagagtcagcatgtccttcgaagccttaaagccaggaatcaactcctctctagctgggaacatcctggatggcatctccttctagtagaatgctgttttgtctccattgcaaa

SEQ ID NO: 181838 - DNA, 497 bp, Homo sapiens
attttttaagtgataagacttgaaagttgaaattattctttgatccaagggcaccagaatgaatgttgggttagtaggcatgaaaacaatattcagctctttatacatctctgtaaaagcccttgagtaccagcggcattgtcagtgagtggtaatactttgaaaggaatcttatttcttgagcagtagttgtcracagtgggcttaagatattcagtaaaccgtatttgtaaaccgatagtctgtcatccaggctttgttcccatttgtagagtacaggcagagctgtgttttatcataattcttcagggcccttggattttcagaatagtaaatcatcattggtttcatgttaacatcaccaactgcattaggtcttaacaaaagagtcagcatgtccttcgaagccttaaagccaggaatcaactcctctctagctgggaacatcctggatggcatctccttctagtagaatgctgttttgtctccattgcaaa

SEQ ID NO: 181839 - DNA, 619 bp, Homo sapiens
gttttcaattattttgcccagatccatcaaaggaatcactttctagagaagctatagctttatgaaatatattttttaagtgataagacttgaaagttgaaattattctttgatccaagggcaccagaatgaatgttgggttagtaggcatgaaaacaatattcagctctttatacatctctgtaaaagcccttgagtaccagcggcattgtcagtgagtggtaatactttgaaaggaatcttatttcttgagcagtagttgtcgacagtgggcttaagatattcartaaaccgtatttgtaaaccgatagtctgtcatccaggctttgttcccatttgtagagtacaggcagagctgtgttttatcataattcttcagggcccttggattttcagaatagtaaatcatcattggtttcatgttaacatcaccaactgcattaggtcttaacaaaagagtcagcatgtccttcgaagccttaaagccaggaatcaactcctctctagctgggaacatcctggatggcatctccttctagtagaatgctgttttgtctccattgcaaatctgtttagtgtagccgtcttaatcaattatcttctagatagctttctgcag

SEQ ID NO: 181840 - DNA, 488 bp, Homo sapiens
gaaattattctttgatccaagggcaccagaatgaatgttgggttagtaggcatgaaaacaatattcagctctttatacatctctgtaaaagcccttgagtaccagcggcattgtcagtgagtggtaatactttgaaaggaatcttatttcttgagcagtagttgtcgacagtgggcttaagatattcagtaaacygtatttgtaaaccgatagtctgtcatccaggctttgttcccatttgtagagtacaggcagagctgtgttttatcataattcttcagggcccttggattttcagaatagtaaatcatcattggtttcatgttaacatcaccaactgcattaggtcttaacaaaagagtcagcatgtccttcgaagccttaaagccaggaatcaactcctctctagctgggaacatcctggatggcatctccttctagtagaatgctgttttgtctccattgcaaatctgtttagtgtagccgtc

SEQ ID NO: 181841 - DNA, 619 bp, Homo sapiens
gttttcaattattttgcccagatccatcaaaggaatcactttctagagaagctatagctttatgaaatatattttttaagtgataagacttgaaagttgaaattattctttgatccaagggcaccagaatgaatgttgggttagtaggcatgaaaacaatattcagctctttatacatctctgtaaaagcccttgagtaccagcggcattgtcagtgagtggtaatactttgaaaggaatcttatttcttgagcagtagttgtcgacagtgggcttaagatattcagtaaaccrtatttgtaaaccgatagtctgtcatccaggctttgttcccatttgtagagtacaggcagagctgtgttttatcataattcttcagggcccttggattttcagaatagtaaatcatcattggtttcatgttaacatcaccaactgcattaggtcttaacaaaagagtcagcatgtccttcgaagccttaaagccaggaatcaactcctctctagctgggaacatcctggatggcatctccttctagtagaatgctgttttgtctccattgcaaatctgtttagtgtagccgtcttaatcaattatcttctagatagctttctgcag

SEQ ID NO: 181842 - DNA, 476 bp, Homo sapiens
cattctgttaaaggcaatctacaaattcaawgcaatccccatctgaatgccaccatcattcttcacagaattacaaaaacaattctaaaattaatatggaaccaaaaaagagccatgtaaccaaaccaagcctaagcaaaaagaacctggaggtatcacactacttgatttcaaactgtacaataaggccatagttaccaaaacaccaacgtactggtttaaaaataggaacatagaccaatggaacagaagagagaacccagaaattaacccaaatacttacagccaactgatcttcgacaaagtaaacaaaaacataaagtggggaaaggacccccttttcaacacatgatgttgggataattggcgagccacatgtaggggaataaaactggattctcatctctcatcttatacaaaaatctactcaagatggattaagaacttaaatctaattcctgaactataaaaattct

SEQ ID NO: 181843 - DNA, 472 bp, Homo sapiens
ggaatgcaatttaatggattggaatggaatggaatggaatggaatggacaggaatggaatggaatggaaagaaatcaacctgattggaatggagtggaaggcaatggaatggaatggaatcaattrgaaaggtatgaaatggaatggaatggaatggaatggaatggaatggaatggaatggaatggaatggaatcaactcgagtggaatgcaatggaatgaaatggaatggaatggaatgtaatggaatcaaaccgagtggaatggattggaatggaatggaatggaatggaacggcatggaatgaaatggaatcaactagaatggaatagaatggaatggattggaatggaatcgaacggaatcaacctgagtggaatgggatggaatggaatggaatgaatggaatggaatggaatggatactattggaatgtaatggaaatgaaacaacccgagtggaatggaatgca

SEQ ID NO: 181844 - DNA, 514 bp, Homo sapiens
ggaattcaatgtaatggaaacaaaccgagtggaatgtaatggaattgaaacgactggaatataatggaatggattggaatcaacccgattccaatgcaacggaatggaatggaatgcaatgtaaagaaatcaacccgaatggaatggataggaatagagtggaatggaatgcaatggcatggaatgcaatgaaatcaactagaatggaatggaatggaatgaacaggaatggaatggaatgcaatggagtggaatggactagaacgtaatggattggaatgaaatcaacccgattggaatggaatggaatgcaatggaatgtratggaatcaactggaaaggaatcaaatcgaacggaatggaatggaatggaatggaatggaatggaatggaatggaatggaatcaaccccagtggaatggaatggaatggaatggattataatggaatggaatggaatcaatccgggtggaatggaatggaatggaatggattataatggaatggaatggaa

SEQ ID NO: 181845 - DNA, 519 bp, Homo sapiens
ggaattcaatgtaatggaaacaaaccgagtggaatgtaatggaattgaaacgactggaatataatggaatggattggaatcaacccgattccaatgcaacggaatggaatggaatgcaatgtaaagaaatcaacccgaatggaatggataggaatagagtggaatggaatgcaatggcatggaatgcaatgaaatcaactagaatggaatggaatggaatgaacaggaatggaatggaatgcaatggagtggaatggactagaacgtaatggattggaatgaaatcaacccgattggaatggaatggaatgcaatggaatgtaatggaatcaactggaaaggaatcaaatcgaacrgaatggaatggaatggaatggaatggaatggaatggaatggaatggaatcaaccccagtggaatggaatggaatggaatggattataatggaatggaatggaatcaatccgggtggaatggaatggaatggaatggattataatggaatggaatggaatcaat

SEQ ID NO: 181846 - DNA, 577 bp, Homo sapiens
gaattcaatgtaatggaaacaaaccgattggaatgtaatggaatggaaaggactggaatgtaatggaatggattggaatcaacccgattacaatccaacggaatggaatggaatggaatggaatggaaaggaatggaatggaatggaaaggaatggaaagaactggaatggaatggaatttattggaatggaatggaatggaatggaatcaacccgagtggagtggaatggawtggaaaggaaatgaatggaatggaatggaatggaatggaacggaacgaaatggaatgtacccgagtagaatggaatggaatgtaatggaatggaatcaacccgagtggaatggattgcaataaatacgagtggaatggaatggaatggaatggaatggaatggaatggaatggaattaacccgagtggaatgcaatggaatagaatgaaatggaatggtaagaaatgaacccgaatggaatggattggaatagagtggaatggaatggaatggcatggaatgcaatgaaatccactagaatggaatgaaatggaatggaatgaacaggaatggaatggaatgga

SEQ ID NO: 181847 - DNA, 516 bp, Homo sapiens
aacggaatggaattcaatgtaatggaaacaaaccgattggaatgtaatggaatggaaaggactggaatgtaatggaatggattggaatcaacccgattacaatccaacggaatggaatggaatggaatggaatggaaaggaatggaatggaatggaaaggaatggaaagaactggaatggaatggaatttattggaatggaatggaatggaatggaatcaacccgagtggagtggaatggaatggaaaggaaatgaatggaatggaatggaatggaatggaacggaacgaaatggaatgtacccgagtagaatggaatggaatgtaatggaatggaatcaacccgagtggaatggattgcaataaatacgagtggaatggaatggaatggaatggaatggaatggaatggaatggaattaacccgagtggaatgcaatggaatrgaatgaaatggaatggtaagaaatgaacccgaatggaatggattggaatagagtggaatggaatggaatggc

SEQ ID NO: 181848 - DNA, 630 bp, Homo sapiens
ctgttgggtttttgtacatcccattgtcatgttgcagaagatcccttctatgcctagtttattgagtatttttattatagaagggtgttgtatttcatcaacgttttctctgcatcaattgaaataatcacgtgcttattcattttactgttacagcatattacactgattgattttttatatgttgaaccacccttgcattttgkggataaatctcaaagggtgatagtttacaatcctttgattatacagtattgctgctgctagtattttgctagtattgctagtattttgctgagatttttgcttatatattcataagggatatagtgctgtatttctctcttttgtgctctctttgtctttggtataaggataatgctgttatcaaaaaatgaattagcaagtattccttcttcatatattttgtcagaagagtttgagaagaaatggtattaattcttctttaaatgttaggttgactcaccagttaatgcagctatttggtcataaatgtttctttgttaatcgctttcgattactaattcaatctcctaggttataggtctattcagattttctctttcttcttgagccactttggtagtttgtgtctttctagcgattcat

SEQ ID NO: 181849 - DNA, 630 bp, Homo sapiens
ctgttgggtttttgtacatcccattgtcatgttgcagaagatcccttctatgcctagtttattgagtatttttattatagaagggtgttgtatttcatcaacgttttctctgcatcaattgaaataatcacgtgcttattcattttactgttacagcatattacactgattgattttttatatgttgaaccacccttgcattttggggataaatctcaaagggtgatagtttacaatcctttgattatacagtattgctgctgctagtattttgctagtattgctagtattttgctgagatttttgcttatatattcataagggatatagtgctgtatttctctcttttgtgctcyctttgtctttggtataaggataatgctgttatcaaaaaatgaattagcaagtattccttcttcatatattttgtcagaagagtttgagaagaaatggtattaattcttctttaaatgttaggttgactcaccagttaatgcagctatttggtcataaatgtttctttgttaatcgctttcgattactaattcaatctcctaggttataggtctattcagattttctctttcttcttgagccactttggtagtttgtgtctttctagcgattcat

SEQ ID NO: 181850 - DNA, 630 bp, Homo sapiens
ctgttgggtttttgtacatcccattgtcatgttgcagaagatcccttctatgcctagtttattgagtatttttattatagaagggtgttgtatttcatcaacgttttctctgcatcaattgaaataatcacgtgcttattcattttactgttacagcatattacactgattgattttttatatgttgaaccacccttgcattttggggataaatctcaaagggtgatagtttacaatcctttgattatacagtattgctgctgctagtattttgctagtattgctagtattttgctgagatttttgcttatatattcataagggatatagtgctgtatttctctcttttgtgctctctttgtctttggtataaggataatgctgttatcaaaaaatgaattagcaagtattccttcttcatatattttgtcagaagagtttgagaagaaatgrtattaattcttctttaaatgttaggttgactcaccagttaatgcagctatttggtcataaatgtttctttgttaatcgctttcgattactaattcaatctcctaggttataggtctattcagattttctctttcttcttgagccactttggtagtttgtgtctttctagcgattcat

SEQ ID NO: 181851 - DNA, 456 bp, Homo sapiens
gttgactcaccagttaatgcagctatttggtcataaatgtttctttgttaatcgctttcgattactaattcaatctcctaggttataggtctattcagattttctctttcttcttgagccactttggtagtttgtgtctttctagcgattcatccatttcatccagggcacctagtttgttgctagacagttgttcacagtatactcctgtaatccttttgtatttctataaagttggtagtaatggctctgctttcatttatyattttaataattagtcttccatcttttgctcagtcaatatagtgaaaggcttgatctttcaaagaatctacattttttcattctactgctctccaaccttctgttttattgatttatgctctaattatgctctttattatttctttccttctgctagctttggatttagtcttccacctggatttattttga

SEQ ID NO: 181852 - DNA, 576 bp, Homo sapiens
tgtaaccctctttgctaccgatggcctatttctattttacttcctttttaattatkgcataatttctcaacataacatgtcaaaacttatacaccgttaaatattaaaaaataatacaatgtaagcaatattttaaatacaatatttaatgattagatacattaggtttattatattacttataacattccattatataaaaattcatttgtttatttattcagattaaacaactattaaggctgaatgtctcatgtctgtaaccccagcactttgagaggctgaggcgagcagaacacttgagcccaacagttaaagaagagcctgggcaacaaggcaaaaccctatctctacaaaactcagcccagcatggtgacacaggtctatggtgacatagctctattgtttcaactacttggatggctgaggtgtgaggatcacctgagcctaggaaatggagatcggagtgagccaagatctcaccagtgccctccagcctgggtgacagagtgaaaccccatctcaaaaaacaacaagtaaaatgcttcttacatggaagactgtattctaggtact

SEQ ID NO: 181853 - DNA, 576 bp, Homo sapiens
tgtaaccctctttgctaccgatggcctatttctattttacttcctttttaattatggcataatttctcaacataacatgtcaaaacttatacaccsttaaatattaaaaaataatacaatgtaagcaatattttaaatacaatatttaatgattagatacattaggtttattatattacttataacattccattatataaaaattcatttgtttatttattcagattaaacaactattaaggctgaatgtctcatgtctgtaaccccagcactttgagaggctgaggcgagcagaacacttgagcccaacagttaaagaagagcctgggcaacaaggcaaaaccctatctctacaaaactcagcccagcatggtgacacaggtctatggtgacatagctctattgtttcaactacttggatggctgaggtgtgaggatcacctgagcctaggaaatggagatcggagtgagccaagatctcaccagtgccctccagcctgggtgacagagtgaaaccccatctcaaaaaacaacaagtaaaatgcttcttacatggaagactgtattctaggtact

SEQ ID NO: 181854 - DNA, 576 bp, Homo sapiens
tgtaaccctctttgctaccgatggcctatttctattttacttcctttttaattatggcataatttctcaacataacatgtcaaaacttatacaccgttaaatattaaaaaataatacaatgtaagcaatattttaaatacaatatttaatgattagatacattaggtttattatattacttataacattccattatataaaaattcatttgtttatttattcagattaaacaactattaaggctgaatgtctcatgtctgtaaccccagcactttgagaggctgaggcgagcagaacacttgagcccaacagttaaagaagagcctgggyaacaaggcaaaaccctatctctacaaaactcagcccagcatggtgacacaggtctatggtgacatagctctattgtttcaactacttggatggctgaggtgtgaggatcacctgagcctaggaaatggagatcggagtgagccaagatctcaccagtgccctccagcctgggtgacagagtgaaaccccatctcaaaaaacaacaagtaaaatgcttcttacatggaagactgtattctaggtact

SEQ ID NO: 181855 - DNA, 292 bp, Homo sapiens
tccggggtttgattgtggcaaggatgctgctggtgtcaaaaccacaacgtgggaascacagaaccactagttggttttcagtgtttcagtgcatacaattcctaatatatctggccaaggaaatttgtaagttattagattgtcccaaaggtggcgcatgaaatcaaagcaggagaacagtttcctaccaggtgtagcctggaaaagttgggggtgactgatggaaaggaggagtgaagctcctccctttccgctgctaggctgcgcccgaggctatttaaacccaccctgg

SEQ ID NO: 181856 - DNA, 278 bp, Homo sapiens
ccggggtttgattgtggcaaggatgctgctggtgtcaaaaccacaacgtgggaaccacagaaccactagtkggttttcagtgtttcagtgcatacaattcctaatatatctggccaaggaaatttgtaagttattagattgtcccaaaggtggcgcatgaaatcaaagcaggagaacagtttcctaccaggtgtagcctggaaaagttgggggtgactgatggaaaggaggagtgaagctcctccctttccgctgctaggctgcgcccgaggctattt

SEQ ID NO: 181857 - DNA, 292 bp, Homo sapiens
tccggggtttgattgtggcaaggatgctgctggtgtcaaaaccacaacgtgggaaccacagaaccactagttggttttcagtgtttcagtgcatacaattcctaatawatctggccaaggaaatttgtaagttattagattgtcccaaaggtggcgcatgaaatcaaagcaggagaacagtttcctaccaggtgtagcctggaaaagttgggggtgactgatggaaaggaggagtgaagctcctccctttccgctgctaggctgcgcccgaggctatttaaacccaccctgg

SEQ ID NO: 181858 - DNA, 278 bp, Homo sapiens
ccggggtttgattgtggcaaggatgctgctggtgtcaaaaccacaacgtgggaaccacagaaccactagttggttttcagtgtttcagtgcatacaattcctaatatatctggccaaggaaayttgtaagttattagattgtcccaaaggtggcgcatgaaatcaaagcaggagaacagtttcctaccaggtgtagcctggaaaagttgggggtgactgatggaaaggaggagtgaagctcctccctttccgctgctaggctgcgcccgaggctattt

SEQ ID NO: 181859 - DNA, 261 bp, Homo sapiens
caaggatgctgctggtgtcaaaaccacaacgtgggaaccacagaaccactagttggttttcagtgtttcagtgcatacaattcctaatatatctggccaaggaaatttgtaagttmttagattgtcccaaaggtggcgcatgaaatcaaagcaggagaacagtttcctaccaggtgtagcctggaaaagttgggggtgactgatggaaaggaggagtgaagctcctccctttccgctgctaggctgcgcccgaggctattt

SEQ ID NO: 181860 - DNA, 277 bp, Homo sapiens
ccggggtttgattgtggcaaggatgctgctggtgtcaaaaccacaacgtgggaaccacagaaccactagttggttttcagtgtttcagtgcatacaattcctaatatatctggccaaggaaatttgtaagttattagattgtcccaaaggtggcgcatgaaatcaaagcaggagaacagtttcctacsaggtgtagcctggaaaagttgggggtgactgatggaaaggaggagtgaagctcctccctttccgctgctaggctgcgcccgaggctatt

SEQ ID NO: 181861 - DNA, 278 bp, Homo sapiens
ccggggtttgattgtggcaaggatgctgctggtgtcaaaaccacaacgtgggaaccacagaaccactagttggttttcagtgtttcagtgcatacaattcctaatatatctggccaaggaaatttgtaagttattagattgtcccaaaggtggcgcatgaaatcaaagcaggagaacagtttcctaccaggtgtagcctggraaagttgggggtgactgatggaaaggaggagtgaagctcctccctttccgctgctaggctgcgcccgaggctattt

SEQ ID NO: 181862 - DNA, 278 bp, Homo sapiens
ccggggtttgattgtggcaaggatgctgctggtgtcaaaaccacaacgtgggaaccacagaaccactagttggttttcagtgtttcagtgcatacaattcctaatatatctggccaaggaaatttgtaagttattagattgtcccaaaggtggcgcatgaaatcaaagcaggagaacagtttcctaccaggtgtagcctggaaaagttgggggtgactgatggaaaggaggagtgaagctccwccctttccgctgctaggctgcgcccgaggctattt

SEQ ID NO: 181863 - DNA, 606 bp, Homo sapiens
ctgcagtaactttacagaagaaaataacagacaaaaaatttaaaaagacagatggttacaggaaaacaaactgttccmggtgcaggggctttaaattcaccacaaagtgataggtgagggggctctgggcaatatctgccagacaaatgtggggctttatgatactatctctgaataaattgctgggaactgcagacatcgcttgtctcagcactttatcagttaattgcactctttgatatgttgaaagtcagcttgcacaagttaaagtccttgaggaaagggggtgggtagggagcccttgatgtcttgtaaatgaaggagccaaatggagtttgtctggttttctcagctaagggagagtctattcatattaaaaacaaggttagctatctaaggaagagtctattcatgttacaacgttgggtattacaaaacatctgttcatgatctggaaattcttctgtgttagttctgttaaaagaaaaactttaaaggagtttaattgagtaataaacgattcacgaatcatacagtccccagaatcacagcagattcacagagactccagcgcagtcatgtggtggaagaagatttatagacaaa

SEQ ID NO: 181864 - DNA, 606 bp, Homo sapiens
ctgcagtaactttacagaagaaaataacagacaaaaaatttaaaaagacagatggttacaggaaaacaaactgttccaggtgcaggggctttaaattcaccacaaagtgataggtgagggggctctgggcaatatctgccagacaaatgtggggctttatgatactatctctgaataaattgctgggaactgcagacatcgcttgtctcagcactttatcagttaattscactctttgatatgttgaaagtcagcttgcacaagttaaagtccttgaggaaagggggtgggtagggagcccttgatgtcttgtaaatgaaggagccaaatggagtttgtctggttttctcagctaagggagagtctattcatattaaaaacaaggttagctatctaaggaagagtctattcatgttacaacgttgggtattacaaaacatctgttcatgatctggaaattcttctgtgttagttctgttaaaagaaaaactttaaaggagtttaattgagtaataaacgattcacgaatcatacagtccccagaatcacagcagattcacagagactccagcgcagtcatgtggtggaagaagatttatagacaaa

SEQ ID NO: 181865 - DNA, 606 bp, Homo sapiens
ctgcagtaactttacagaagaaaataacagacaaaaaatttaaaaagacagatggttacaggaaaacaaactgttccaggtgcaggggctttaaattcaccacaaagtgataggtgagggggctctgggcaatatctgccagacaaatgtggggctttatgatactatctctgaataaattgctgggaactgcagacatcgcttgtctcagcactttatcagttaattgcactctttgatatgttgaaagtcagcttgcacaagttaaagtccttgaggaaagggggtgggtagggagcccttgatgtcttgtaaatgaaggagccaaatggagtttgtctggttttctcagctaagggagagtctattcatattaaaaacaaggttagctatctaaggaagagtctattcatgttacaacgttgggtattacaaaacatctgttcatgatctggaaattcttctgtgttagttctgttaaaagaaaaactttaaaggagtttaattgagtaataaacgattcacgaatcatrcagtccccagaatcacagcagattcacagagactccagcgcagtcatgtggtggaagaagatttatagacaaa

SEQ ID NO: 181866 - DNA, 606 bp, Homo sapiens
ctgcagtaactttacagaagaaaataacagacaaaaaatttaaaaagacagatggttacaggaaaacaaactgttccaggtgcaggggctttaaattcaccacaaagtgataggtgagggggctctgggcaatatctgccagacaaatgtggggctttatgatactatctctgaataaattgctgggaactgcagacatcgcttgtctcagcactttatcagttaattgcactctttgatatgttgaaagtcagcttgcacaagttaaagtccttgaggaaagggggtgggtagggagcccttgatgtcttgtaaatgaaggagccaaatggagtttgtctggttttctcagctaagggagagtctattcatattaaaaacaaggttagctatctaaggaagagtctattcatgttacaacgttgggtattacaaaacatctgttcatgatctggaaattcttctgtgttagttctgttaaaagaaaaactttaaaggagtttaattgagtaataaacgattcacgaatcatacagtccccagaatcacagcagattcacagagactccagcgcagtcatgtgrtggaagaagatttatagacaaa

SEQ ID NO: 181867 - DNA, 529 bp, Homo sapiens
aaggagtggaatggaatggaatggaattcaatgtaatggaaacaaaccgagtggaatgtaatggaattgaaacgactggaatataatggaatggattggaatcaacccgattccaatgcaacggaatggaatggaatgcaatgtaaagaaatcaacccgaatggaatggataggaatagagtggaatggaatgcaatggcatggaatgcaatgaaatcaactagaatggaatggaatggaatgaacaggaatggaatggaatgcaatggagtggaatggactagaacgtaatggawtggaatgaaatcaacccgattggaatggaatggaatgcaatggaatgtaatggaatcaactggaaaggaatcaaatcgaacggaatggaatggaatggaatggaatggaatggaatcaaccccagtggaatggaatggaatggaatggattataatggaatggaatggaatcaatccgggtggaatggaatggaatggaatggattataatggaatggaatggaatcaatccg

SEQ ID NO: 181868 - DNA, 529 bp, Homo sapiens
aaggagtggaatggaatggaatggaattcaatgtaatggaaacaaaccgagtggaatgtaatggaattgaaacgactggaatataatggaatggattggaatcaacccgattccaatgcaacggaatggaatggaatgcaatgtaaagaaatcaacccgaatggaatggataggaatagagtggaatggaatgcaatggcatggaatgcaatgaaatcaactagaatggaatggaatggaatgaacaggaatggaatggaatgcaatggagtggaatggactagaacgtaatggattggaatgaaatcaacccgattggaatggaatggaatgcaatggaatgkaatggaatcaactggaaaggaatcaaatcgaacggaatggaatggaatggaatggaatggaatggaatcaaccccagtggaatggaatggaatggaatggattataatggaatggaatggaatcaatccgggtggaatggaatggaatggaatggattataatggaatggaatggaatcaatccg

SEQ ID NO: 181869 - DNA, 529 bp, Homo sapiens
aaggagtggaatggaatggaatggaattcaatgtaatggaaacaaaccgagtggaatgtaatggaattgaaacgactggaatataatggaatggattggaatcaacccgattccaatgcaacggaatggaatggaatgcaatgtaaagaaatcaacccgaatggaatggataggaatagagtggaatggaatgcaatggcatggaatgcaatgaaatcaactagaatggaatggaatggaatgaacaggaatggaatggaatgcaatggagtggaatggactagaacgtaatggattggaatgaaatcaacccgattggaatggaatggaatgcaatggaatgtaatggaatcaactggaaaggaatcaaatsgaacggaatggaatggaatggaatggaatggaatggaatcaaccccagtggaatggaatggaatggaatggattataatggaatggaatggaatcaatccgggtggaatggaatggaatggaatggattataatggaatggaatggaatcaatccg

SEQ ID NO: 181870 - DNA, 412 bp, Homo sapiens
gtcagtgcaaacctgggctgtggggcttgatcagtggagacctggtcagctggggcttagtgctggcctggtcagcatgggctggggcactggtgaccaggtcaaggggtgctattcagtggaggactgggcacatgggacctagtcagcagaccctggtgggcgtgtcctcatcagtgaggyccttgtcagtggggccctggtcagggcagccttgtcagcgggacctaatctgtagcgtcctggtcagagaggacttggtcagtggtgacttttgcagtactagtctacagggtgacctggtcagcggggatctcagcatttggtgccagttcagtggggtctactcactagggtcccagtcaggggcatctggtgatcttaggcctggttattaggggcctgatcagtg

SEQ ID NO: 181871 - DNA, 412 bp, Homo sapiens
gtcagtgcaaacctgggctgtggggcttgatcagtggagacctggtcagctggggcttagtgctggcctggtcagcatgggctggggcactggtgaccaggtcaaggggtgctattcagtggaggactgggcacatgggacctagtcagcagaccctggtgggcgtgtcctcatcagtgaggtccttgtcagtggggccctggtcagggcagccttgtcagcgggacctaatctgtagygtcctggtcagagaggacttggtcagtggtgacttttgcagtactagtctacagggtgacctggtcagcggggatctcagcatttggtgccagttcagtggggtctactcactagggtcccagtcaggggcatctggtgatcttaggcctggttattaggggcctgatcagtg

SEQ ID NO: 181872 - DNA, 412 bp, Homo sapiens
gtcagtgcaaacctgggctgtggggcttgatcagtggagacctggtcagctggggcttagtgctggcctggtcagcatgggctggggcactggtgaccaggtcaaggggtgctattcagtggaggactgggcacatgggacctagtcagcagaccctggtgggcgtgtcctcatcagtgaggtccttgtcagtggggccctggtcagggcagccttgtcagcgggacctaatctgtagcgtcctggtcagagaggacttggtcmgtggtgacttttgcagtactagtctacagggtgacctggtcagcggggatctcagcatttggtgccagttcagtggggtctactcactagggtcccagtcaggggcatctggtgatcttaggcctggttattaggggcctgatcagtg

SEQ ID NO: 181873 - DNA, 412 bp, Homo sapiens
gtcagtgcaaacctgggctgtggggcttgatcagtggagacctggtcagctggggcttagtgctggcctggtcagcatgggctggggcactggtgaccaggtcaaggggtgctattcagtggaggactgggcacatgggacctagtcagcagaccctggtgggcgtgtcctcatcagtgaggtccttgtcagtggggccctggtcagggcagccttgtcagcgggacctaatctgtagcgtcctggtcagagaggacttggtcagtggtgacttttgyagtactagtctacagggtgacctggtcagcggggatctcagcatttggtgccagttcagtggggtctactcactagggtcccagtcaggggcatctggtgatcttaggcctggttattaggggcctgatcagtg

SEQ ID NO: 181874 - DNA, 463 bp, Homo sapiens
gaattccagaacactgctgtgaggatctgaawgtttgaccctcacatgggattccagaacactgctgcgagtgtctaaatgtctgtccctcacacaggattcccgaacaatgttacgaggttctgaatgtttgtccctaacataggattccagagcactcctgctgtgctctgaatgcttctccctcacataggattccagaacactgctatgagggtctgaatgcttatccctcatataggattccagaacacttctgctgtggtctgaatgtttgttcctcacataggattccagaatactcctgccatggtctgaatgtttgtccctcacataggattccagaacattcatgctggggtctcaatatttcccttaacataggatttcagaacactgctcttggggtctgaatgtttgtcgctcacataggattacagaacactgctgctggagtctgaat

SEQ ID NO: 181875 - DNA, 463 bp, Homo sapiens
gaattccagaacactgctgtgaggatctgaaagtttgaccctcacatgggattccagaacactgctgcgagtgtctaaatgtctgtccctcacacaggattcccgaacaatgttacgaggttctgaatgtttgtccctaacataggattccagagcactcctgctgtgctctgaatgcttctccctcacataggattccagaacactgytatgagggtctgaatgcttatccctcatataggattccagaacacttctgctgtggtctgaatgtttgttcctcacataggattccagaatactcctgccatggtctgaatgtttgtccctcacataggattccagaacattcatgctggggtctcaatatttcccttaacataggatttcagaacactgctcttggggtctgaatgtttgtcgctcacataggattacagaacactgctgctggagtctgaat

SEQ ID NO: 181876 - DNA, 442 bp, Homo sapiens
tgggattccagaacactgctgcgagtgtctaaatgtctgtccctcacacaggattcccgaacaatgttacgaggttctgaatgtttgtccctaacataggattccagagcactcctgctgtgctctgaatgcttctccctcacataggattccagaacactgctaygagggtctgaatgcttatccctcatataggattccagaacacttctgctgtggtctgaatgtttgttcctcacataggattccagaatactcctgccatggtctgaatgtttgtccctcacataggattccagaacattcatgctggggtctcaatatttcccttaacataggatttcagaacactgctcttggggtctgaatgtttgtcgctcacataggattacagaacactgctgctggagtctgaatgtttgtcagtcacatagaattccag

SEQ ID NO: 181877 - DNA, 463 bp, Homo sapiens
gaattccagaacactgctgtgaggatctgaaagtttgaccctcacatgggattccagaacactgctgcgagtgtctaaatgtctgtccctcacacaggattcccgaacaatgttacgaggttctgaatgtttgtccctaacataggattccagagcactcctgctgtgctctgaatgcttctccctcacataggattccagaacactgctatgagggtctgaatgcttatccctcatataggattccagaacacttctgctgtggtctgaatgtttgttcctcacataggattccagaatactcctgccrtggtctgaatgtttgtccctcacataggattccagaacattcatgctggggtctcaatatttcccttaacataggatttcagaacactgctcttggggtctgaatgtttgtcgctcacataggattacagaacactgctgctggagtctgaat

SEQ ID NO: 181878 - DNA, 465 bp, Homo sapiens
gaggatctgaaagtttgaccctcacatgggattccagaacactgctgcgagtgtctaaatgtctgtccctcacacaggattcccgaacaatgttacgaggttctgaatgtttgtccctaacataggattccagagcactcctgctgtgctctgaatgcttctccctcacataggattccagaacactgctatgagggtctgaatgcttatccctcatataggattccagaacacttctgctgtggtctgaatgtttgttcctcacataggattccagaatactcctgccatgktctgaatgtttgtccctcacataggattccagaacattcatgctggggtctcaatatttcccttaacataggatttcagaacactgctcttggggtctgaatgtttgtcgctcacataggattacagaacactgctgctggagtctgaatgtttgtcagtcacatagaattc

SEQ ID NO: 181879 - DNA, 465 bp, Homo sapiens
gaggatctgaaagtttgaccctcacatgggattccagaacactgctgcgagtgtctaaatgtctgtccctcacacaggattcccgaacaatgttacgaggttctgaatgtttgtccctaacataggattccagagcactcctgctgtgctctgaatgcttctccctcacataggattccagaacactgctatgagggtctgaatgcttatccctcatataggattccagaacacttctgctgtggtctgaatgtttgttcctcacataggattccagaatactcctgccatggtctgaatgtttgtccctcacataggattccagaacattcatgctggggtctcaatatttcccttaacataggatttcagaacactgcycttggggtctgaatgtttgtcgctcacataggattacagaacactgctgctggagtctgaatgtttgtcagtcacatagaattc

SEQ ID NO: 181880 - DNA, 641 bp, Homo sapiens
gtctgaatggttgttcctcacatatgattccaggacactgctacgagagtcttaatgtttgtccttcacrttggattctagaacactgctcccgtggtctgaatgtttgtccttcacatagcattccagaacactgctgctggggtctgaatgtctgcccctcaaatcagattccagagcactgctgctggggtttgaatgtctttccctcacatagaattccagaacacggctgggagtgtctgaatgtttgtccagaacactgttgcgagggtctaaatgtctctccctcacataagatttcaggacactgctacgaggttctgaatgtttgtccctcacataggattccagaatactgccacgtgggtctgaatgtttgccctcacataggattccagaacactactgctggggtctgaatgtttgaccctcacataggattccagaacactcctgctgtggtctgaaagtttgttcatcacataggactccagaacactgctaagagggtatgaatgtccctcacatagtattccagaacactccttctgtggtctgaatgtttgttcctcacataggattcgagaacactcctgctgtggtctgaatgtttgtcccttacctaggattcgagaaca

SEQ ID NO: 181881 - DNA, 641 bp, Homo sapiens
gtctgaatggttgttcctcacatatgattccaggacactgctacgagagtcttaatgtttgtccttcacatwggattctagaacactgctcccgtggtctgaatgtttgtccttcacatagcattccagaacactgctgctggggtctgaatgtctgcccctcaaatcagattccagagcactgctgctggggtttgaatgtctttccctcacatagaattccagaacacggctgggagtgtctgaatgtttgtccagaacactgttgcgagggtctaaatgtctctccctcacataagatttcaggacactgctacgaggttctgaatgtttgtccctcacataggattccagaatactgccacgtgggtctgaatgtttgccctcacataggattccagaacactactgctggggtctgaatgtttgaccctcacataggattccagaacactcctgctgtggtctgaaagtttgttcatcacataggactccagaacactgctaagagggtatgaatgtccctcacatagtattccagaacactccttctgtggtctgaatgtttgttcctcacataggattcgagaacactcctgctgtggtctgaatgtttgtcccttacctaggattcgagaaca

SEQ ID NO: 181882 - DNA, 299 bp, Homo sapiens
taaatgtctctccctcacataagatttcaggacactgctacgaggttctgaatgtttgtccctcacataggattccagaayactgccacgtgggtctgaatgtttgccctcacataggattccagaacactactgctggggtctgaatgtttgaccctcacataggattccagaacactcctgctgtggtctgaaagtttgttcatcacataggactccagaacactgctaagagggtatgaatgtccctcacatagtattccagaacactccttctgtggtctgaatgtttgttcctc

SEQ ID NO: 181883 - DNA, 544 bp, Homo sapiens
tcaaaggaatggaatggaatgaaatcagcccgaatggaatggattgcaatagagtggaatggaatgaaacggcatggaatgcaatggaatcaactagaatggaatggawtggtatggaatggacagtaatggaatggaatggaatggaatggaatggaatggaatggagtggaacggactagaatggaatggaatcaactcgagtggaaagcaatggaatggaaaggaatggaatggaatggaatggaatggactagaatggaatggaatggaatggaatggaatagaatggaatggactggaaaggaatggaatggaaggaaatcaacctgattggaatggaattgaaagcaatggaagggaatggaatcaactggaaaggaatgaaatggaatggaatggaatggaatggaatggaatggaattaacccgaggggaatggaatggaatggaatggaatggaatggaatggaatggaatggaatggaatggaatcaacccgagtggaatgcaatggaatggaatggaatggaatggaatcaac

SEQ ID NO: 181884 - DNA, 544 bp, Homo sapiens
tcaaaggaatggaatggaatgaaatcagcccgaatggaatggattgcaatagagtggaatggaatgaaacggcatggaatgcaatggaatcaactagaatggaatggattggwatggaatggacagtaatggaatggaatggaatggaatggaatggaatggaatggagtggaacggactagaatggaatggaatcaactcgagtggaaagcaatggaatggaaaggaatggaatggaatggaatggaatggactagaatggaatggaatggaatggaatggaatagaatggaatggactggaaaggaatggaatggaaggaaatcaacctgattggaatggaattgaaagcaatggaagggaatggaatcaactggaaaggaatgaaatggaatggaatggaatggaatggaatggaatggaattaacccgaggggaatggaatggaatggaatggaatggaatggaatggaatggaatggaatggaatggaatcaacccgagtggaatgcaatggaatggaatggaatggaatggaatcaac

SEQ ID NO: 181885 - DNA, 556 bp, Homo sapiens
gaatggattgcaatagagtggaatggaatgaaacggcatggaatgcaatggaatcaactagaatggaatggattggtatggaatggacagtaatggaatggaatggaatggaatggaatggaatgkaatggagtggaacggactagaatggaatggaatcaactcgagtggaaagcaatggaatggaaaggaatggaatggaatggaatggaatggactagaatggaatggaatggaatggaatggaatagaatggaatggactggaaaggaatggaatggaaggaaatcaacctgattggaatggaattgaaagcaatggaagggaatggaatcaactggaaaggaatgaaatggaatggaatggaatggaatggaatggaatggaattaacccgaggggaatggaatggaatggaatggaatggaatggaatggaatggaatggaatggaatggaatcaacccgagtggaatgcaatggaatggaatggaatggaatggaatcaacccgagtggaacggattgcaatggagtggaatggaatggaatggcatgg

SEQ ID NO: 181886 - DNA, 458 bp, Homo sapiens
ggaatggaatggaattcaatgtaatggaaacaaaccgagtggaatgtaatggaattgaaacgactggaatataatggaatggattggaatcaacccgattccaatgcaacggaatggaatggaatgcaatgtaaagaaatcaacccgaatggaatggataggaatagagtggaatggaatgcaatggcatggaatgcaatgaaatcaactagaatggaatggaatggaatgaacaggaatggaatggaatgcaatggagtggaatggactagaacgtaatggattggaatgaaatcaacccgattggaatggaatggaatgcaatggaatgtaatggaatmaactggaaaggaatcaaatcgaacggaatggaatggaatggaatggaatggaatggaatggaatcaaccccagtggaatggaatggaatggaatggattataatggaatggaatgga

SEQ ID NO: 181887 - DNA, 610 bp, Homo sapiens
actaactcacacttattttttcaaattaagtaattaaaacagcactctacaaatgaaaaaatcataaggacttttacataaggtaattttgtatcagtgagcttctgataggttttgcagtagtaacaagtaacattacaatctcaattgttcacagcaggcttatttcttattcacattatttgtcagttccatgctgtttttccaggtatcttcsttattctgcaatccagacaggtggagtaggctctgccaatgacatgcattcccatagaagaattgttcaatagcacttaaagcttctgtttagatgttgcatactcacattcaattaatggaagccagtcaaatggtcatgctcaacatcactggctgggaattacattcatcccacagagaggcactgcaagtcacatggcagttgggagggatgtgtaaacctctcacagggagggtagcagataactgaagacaaaaacaaaatctaccacaaacttttctgagtaaacattttaaggagcaaccttgtcttgtatttgtgcatttatggggtttcttaatgtctgcttttagctacacagaggtaaaatattgacctgcatacttctta

SEQ ID NO: 181888 - DNA, 490 bp, Homo sapiens
acgtaagttctatttctgttcttgtgatatgagttcaagacaaagtttcaccagggttgttcaagaaattcataagggtacattcactcagttatgggaaaaccattgaaaaagtagttatctargttcagggtatggtaagtgaaagcataaggtctattcatatccccccacccccaccccttcccaaaattcaagcactttataggctctagagttggagcggagcggctcttcatccttagaagcagctacatccagctgctattgaactgagcctgtattggtcagttctgctgacaggcagattcaaaggtatctccattcaggtcttcaccaccatgaagtttcccagagagactctcaccactgctgttcagacacaaggaccatgccataacctgtcatcaggaaagagactatgttaaagaaggattttcatcctgtcttatgaagaaattccatttcaatgctgcgataatgcaaagta

SEQ ID NO: 181889 - DNA, 571 bp, Homo sapiens
cttgtcatttttctatagagaacaaactaaacctactattagaaagaaaatacagtctactccagaagttttcccagtatataaaaaaaacatacattctcagttttcagagttacaacacaactgcagtagtcytaaatttatgcttttgaacaaaagtacaattctcattctcattgcctcttctatgttgccctgcttaatttgctgttattcaatagcaattaaaacaatactctcatcccagtcagttgcaactgaaaatcattacatgctgacagcttctgggagatgatgttgggagaaaggtggctgtaatatctagtccgcatcagggcactgctcagatgtgacacctaaagagcagggagaatagaacctgcagagtagaagaggtcacgacaaggagtttagttcaggagtgggggaaaagggacatgtataggctgccatcactagccatgccatctctcttcagtggagctgaaacagtaattgagttctggagcagtccatctaagtttgctccaacgattctaaagcctgtctgagattgcttcattgtcttatt

SEQ ID NO: 181890 - DNA, 571 bp, Homo sapiens
cttgtcatttttctatagagaacaaactaaacctactattagaaagaaaatacagtctactccagaagttttcccagtatataaaaaaaacatacattctcagttttcagagttacaacacaactgcagtagtcctaaatttatgcttttgaacaaaagtacaattctcattctcattgcctcttctatgttgccctgcttaatttgctgttattcaatagcaattaaaacaatactctcatcccagtcagttgcaactgaaaatcattacatgctgacagcttctgggagatgatgttgggagaaaggtggctgtaatatctagtccgcatcagggcactgctcagatgtgacacytaaagagcagggagaatagaacctgcagagtagaagaggtcacgacaaggagtttagttcaggagtgggggaaaagggacatgtataggctgccatcactagccatgccatctctcttcagtggagctgaaacagtaattgagttctggagcagtccatctaagtttgctccaacgattctaaagcctgtctgagattgcttcattgtcttatt

SEQ ID NO: 181891 - DNA, 388 bp, Homo sapiens
aaatcctagggcccttcagattatgctaaatctactctgcctttatgctctataaatggaacaacaaagcatgagtgacagcacatctgtttatagcatggtttgctgaatagtttaagcccattgtttaggcctaccgcttaaaaataaataaataaaaaagattctttcagaagattatgtcattggccatgcactttgttgcccaaggtctgtcatggagatgtacaaggagattagtgttgtttccgtgactgctaacatagcatacattctgtagcccagatcaaggagtaatgttgactttcaagtcytattatttaagaaatccatttcataaggcaataacttcaaaagatagtgatccctctgatggatctgagcaaaa

SEQ ID NO: 181892 - DNA, 485 bp, Homo sapiens
cctccactcccctgcctaagggcttcacctgcaccctgggagcagttccgcacctccagcacagcctctgctcaaccccaagggaccagaggacaaagctgaaggcccagtctcaatccaccagggtttgagcacacattcagcagtactgagctgggatctgtgacctgaacatgaatcagggaggagccgacaccctcggaacactgagaagagtgaggcacaggtttctgtgctggtacgagaactgggcatgcctcccactgcaagactagtccagtaagggcatagcctgtcagatggctgcagctgccacttgagagagccctgtggctcagaacacctaacagctcargtatctgggtgcagaagtcttggaaaaaaatctagctggcggggcctgccccaggggcagacactggagggaggttcagttgggggagtagaagctagatggtccccacatctgtctgctgggcaaaaaa

SEQ ID NO: 181893 - DNA, 498 bp, Homo sapiens
gtttaaatgtgtgtggcaattcccctcttgatctctctctcctgccaccatgcgaaggtcctcgtttccccttcaacttccaccatgaatgtaagtttcttgaagcctcccagtcatgcttcacctgcagaactgagtaaattgatcttcttttcttcataaattacccaatctcaggtagttccttatagcagtgtaaaaatgaactatacaccatcccactcccttctagcctccaggtttctaatgagaatattgctgctaatattattgaagatccattttatattatgagtcacttattttttgttttcaaaattcactcttttgcttttccttccaacaattttattataatatgtttccttgtggatctctttgagttcttccttcttggagttgaatgtrcttcttaaaggtatagattcatgtcttttatcaaattcacagttttcaggcattctttctttaaatattctttctgcccctttatctctc

SEQ ID NO: 181894 - DNA, 524 bp, Homo sapiens
ctgttcattgagccgcctaaaaatgtctttagttcaagagttcacaaccttgactgcccattggaatcacctggacaactttaaaatgtaccaatgattcagtttaaattttgatttaaatggtcggggggtgggtgctgaatttcaggatgtttaaaatcttcttagtattctaatgtgaagcgaaagtagagaaccaagcatggctctgtctcctcacctccattatcacataacttcaggccccacaatttcttacatgaattattgaagccattattaagatcagtcaggctcctggtctctagtgttattcacttcaaattcatccttcacacaaaataatagcatgtagctatagaaatatgacaatttatcttccttttaaaaatttttccatgcctggccattaataaagtataaagtctaaattcttttaacaagtccttcagccacttccatcacrtgcccccaatctgatgatgcatggcctcatttcttgccacttggcttttcaatataat

SEQ ID NO: 181895 - DNA, 448 bp, Homo sapiens
caatttctaaaagtaaattcattgtcacaaaataatgatgcaactaaacaatttggttccctcttaggtttcataacaaagtaattccacttaaattgtgtgaataatgaaagtaactttatttgggagacttggtagttgctggtactaaataaagaatacaggtatatagctttgcattgtcagagaatatttaattaaaatcttcttactggggaataatatgttagagttagcaacaactctttcagatcagtgggcaacatttagtgcacttaacagttactaattttctttcttaaagtgtttccttactgacttacaatgtactcaggcattctgctaaaacattcattaaaatayatatgaaaaatttgtaatttttcttcagcatgaaaatgtcccaattttctaaaattatttttttcttctggagaaaacctttttt

SEQ ID NO: 181896 - DNA, 594 bp, Homo sapiens
tttttcatgctcctgttgtctcttccagaattggatcttagggaggaggaattaaagagagtaagaagtcatcatctagctgttgatcatttctgccatggcagacatccatctttcgtraggcaaacatctttcatggatccatttgttctatctttgaaaatttattctgaagctaccttccacattgcccagtttcctgaaaaggtactacagttttggctatctccttacaggcttcttctccaagtgcagactatattagtaccaccacccacattatcttcccattacccatccttcaccttcccattaccatcaccgtgatggggaggcatagttgtgccctgtagcagtgacttttccactggtaagaaatgcctctttgcttgacaaatagtagaagtgatacttgttcaatactatctgcattttccttgtcttgccatcccaggcagatccaagctccttccttccttcagccttccctgtgtgagaagcaggtgcaggcttctttgttcatgtatgccctcaaaatgccagggacagcatttaagtttttcccaaatccctttggtcatgcttcatggtctc

SEQ ID NO: 181897 - DNA, 584 bp, Homo sapiens
ctttgtggtggtagccaaaagtctgagtagagaaaagtttctttcttaacactctattgtaaaaataaagagtaacacttaaaagctcgtgttacgaacactgtgtgtctaaaacctcattatacaygccaacagctttaagaggtgggcattagtatcacaccaattttctgacttaggtggggtaagccaggaaacgtattcagagatggagacttgctggaaagaggtttactggggagtgctctcgggaacaatgcctgtaaatggatgaggattgcagggctggtcaaagggaggagttgaactgtgagacatttgcaacagaggcatcaggtgatctcaaggggaacaccacagtgggggttacccttcagatttggcctgagttaaggcaaaatggctaggacattgtgtctgcacactgaccactcattgagctgggagtttaccaatggttgagggcaattcctgcaaaagcacttagctgggagtcattagcaaatagggatcaggaatgcctaattcctgaagtcatggtctgtacactgacctacaacacatattaaatttatttatgacaa

SEQ ID NO: 181898 - DNA, 584 bp, Homo sapiens
ctttgtggtggtagccaaaagtctgagtagagaaaagtttctttcttaacactctattgtaaaaataaagagtaacacttaaaagctcgtgttacgaacactgtgtgtctaaaacctcattatacacgccaacagctttaagaggtgggcattagtatcacaccaattttctgacttaggtggggtaagccaggaaacgtattcagagatggagacttgctggaaagaggtttactggggagtgctctcgggaacaatgcctgtaaatggatgaggattgcagggctggtcaaagggaggagttgaactgtgagacatttgcaacagaggcatcaggtgatctcaaggggaacaccacagtgggggttacccttcagatttggcctgagytaaggcaaaatggctaggacattgtgtctgcacactgaccactcattgagctgggagtttaccaatggttgagggcaattcctgcaaaagcacttagctgggagtcattagcaaatagggatcaggaatgcctaattcctgaagtcatggtctgtacactgacctacaacacatattaaatttatttatgacaa

SEQ ID NO: 181899 - DNA, 584 bp, Homo sapiens
ctttgtggtggtagccaaaagtctgagtagagaaaagtttctttcttaacactctattgtaaaaataaagagtaacacttaaaagctcgtgttacgaacactgtgtgtctaaaacctcattatacacgccaacagctttaagaggtgggcattagtatcacaccaattttctgacttaggtggggtaagccaggaaacgtattcagagatggagacttgctggaaagaggtttactggggagtgctctcgggaacaatgcctgtaaatggatgaggattgcagggctggtcaaagggaggagttgaactgtgagacatttgcaacagaggcatcaggtgatctcaaggggaacaccacagtgggggttacccttcagatttggcctgagttaaggcaaaatggctaggacattgtgtctgcacactgaccactcattgagctgggagtttaccaatggttgagggcaattcctgcaaaagcacttagctgggagtcattagcaaayagggatcaggaatgcctaattcctgaagtcatggtctgtacactgacctacaacacatattaaatttatttatgacaa

SEQ ID NO: 181900 - DNA, 589 bp, Homo sapiens
gaattaagtcacttttctcagatcagatcattttccatgagcttcctttagtgccagctaacctgggcacagtgagtggcgacaactcctggggacccatgtcacttctggtctgcrgtcctgtcctgagtgataggtgctttaaacagctggactgactgttatgtttccactcaccttcttatgcatttctcgcttagtccaacatcccgcatcattctttctccaccaaagctagctccagagcttcagctcttcttgaattttgtcgttttctaagtttcttctttattcccattgatacttgctaggataggatgcattggtggccccagatgcacaagtgatattggcaaagcagaaatgggctatggatgtcaaagagatgctgctgtcccttattcttggatggagaagtttgatgatacccagaaagatccagtatgtcctaaaagacccaagagagatgtataggcagtcaccctggcgatatacctgggccatttatttcgcagaagaaacaagagattttaagttaaaatatcttaaaattgtgatacaaggagtcaacaggcctttgaggacaggt

SEQ ID NO: 181901 - DNA, 590 bp, Homo sapiens
gttgtatccaaactaagcccattattttttgtggaactcaaattagacctgctattttctgttctgtgtggagcaaagaatttgggcagtgttttcccaagttagtttggactgataactggccttgaaccaaaaatgagctgaatgactctggtcactactgaaatgaatatgtaactgactcaagtcccaggtgtcctttcctgatgtttgatttaaagtctaaatggaggcattgggcccaagagccatgaacagttgatccacagccttaactagcctcacaattctttctattctatcttgtgtaaatcaagtacataagcaggatattctcttcacaggtagttagatcagtgtataagatcagatttactgcatgcttcacaaagttcatatttcccccatatacacacatttttaaaaaggtaaagatattttagtaactcaaaatgtttcccattcaaacaagacagatkagcactgcaaaaacaaccaccacccatttgctctagagaatctgtctttttttttctaacccttaggtagtgacttcggttgcttgggtaacccatgagacagatcaatca

SEQ ID NO: 181902 - DNA, 451 bp, Homo sapiens
attaaatggtgtcacctgtagtcattgacaagtccctggattgtctctgtcaagcaccatctgtgcacaccagagacatatccaaaggctactggcaaacatctttagataatgagcgtaaattaataactacttttgtacgtcacgagagatcatgccattttaatgttatgccctttgggtgaacaaatgggacaaagatcttttagatactaatgaatagtgtcttacaaggattaatttgcccaactttttgctgagttggcatcacatgcaatgtggtctgatttgttggatctgtggcgggggtcggtttgcggaattaaaagagggagagttttaattttgagcatgaagactgttatgtagagaggatgtcattctggatccttaatgactcagcttttcatggggtcacccagtagrgttgtccaggctgtattcacatgca

SEQ ID NO: 181903 - DNA, 565 bp, Homo sapiens
ctctgtccacccaggctggagcgtaatggcacgatctcagctcactgcaacctccatctccagggttcaagcaattctcctgcctcagcctctcgagtaagtgggactacaggcatgtgccaccacgcccggttaattttttttgtatttttastagagacaggttttcaccatgttggccaggctagtatcaaactcctgacctcaggtaatctgcccacctcggcctcccaaagtgttgggattacaggtgtgagccactgcacccattttctaatctccagtgaaaccaacttcataaaggctgtggcatttcttccaagacactacgatgaagatgacatcatcaggagacttagggaaagctacgacttttcaagtaactaaagtgggtgaccctcactattttgtgggctcaatagctgtgtcttcatttataaaaataaaatggtagagactgtattggacaggagagacctggaatatggatctaagtaaccagctagcacaaaaataccccactatttatgttatgtatacatacatatatacatacgtgcattgg

SEQ ID NO: 181904 - DNA, 565 bp, Homo sapiens
ctctgtccacccaggctggagcgtaatggcacgatctcagctcactgcaacctccatctccagggttcaagcaattctcctgcctcagcctctcgagtaagtgggactacaggcatgtgccaccacgcccggttaattttttttgtatttttagtagagacaggttttcaccatgttggccaggctagtatcaaactcctgacctcaggtaatctgcccacctcggcctcccaaagtgttgggattacaggtgtgagccactgcacccattttctaatctccagtgaaaccaacttcataaaggctgtggcatttcttccaagacactacgatgaagatgacatcatcaggagacttagggaaagctacgacttttcaagtaactaaagtgggtgaccctcactaytttgtgggctcaatagctgtgtcttcatttataaaaataaaatggtagagactgtattggacaggagagacctggaatatggatctaagtaaccagctagcacaaaaataccccactatttatgttatgtatacatacatatatacatacgtgcattgg

SEQ ID NO: 181905 - DNA, 565 bp, Homo sapiens
ctctgtccacccaggctggagcgtaatggcacgatctcagctcactgcaacctccatctccagggttcaagcaattctcctgcctcagcctctcgagtaagtgggactacaggcatgtgccaccacgcccggttaattttttttgtatttttagtagagacaggttttcaccatgttggccaggctagtatcaaactcctgacctcaggtaatctgcccacctcggcctcccaaagtgttgggattacaggtgtgagccactgcacccattttctaatctccagtgaaaccaacttcataaaggctgtggcatttcttccaagacactacgatgaagatgacatcatcaggagacttagggaaagctacgacttttcaagtaactaaagtgggtgaccctcactattttgtgggctcaatagctgtgtcttcatttataaaaataaaatggtagagactgtattggacaggagagacctggaatatggatctaagtaaccagctagcacaaaaataccccactatttatgttatgtatacawacatatatacatacgtgcattgg

SEQ ID NO: 181906 - DNA, 493 bp, Homo sapiens
aagctcagtgcttggaacaagtattggctcaagcaaacacatacttcaaactgactcctctcagtgtcatgagctgccagccaaaggagcagtagtacacagaggtcccaggctcagaccgcagccaggagtctgggaggaggatcaaataccctgagcatctggctctgacacatatgccaagaaaactctctccagactccaaagactattcccatgactttgctttgtctggaaattccattgcttgaatagagcagattcattctcttcgttttgaggacccctcttgctcaggcagccaaagcaggctgtgtaacagctgctatcmccatgttcagggccaagacctgagaggcacaagctcaggcaggttgcaaacgagagtcagtcttcattggttttcgatgagcctggaaatgcaggcttggctgatgagagatgacaagaacagagaaccacctttctatctcattaaaaccctgaatagaga

SEQ ID NO: 181907 - DNA, 436 bp, Homo sapiens
tggagtagggtgacttaagaatcagagtcagagtgatgtaatgttagaaatactctgccagccattgctggctttgaaagttgaagggaaccatgagccaaagaatggggacagtcacagaaggtggaaaaagagaagacacagattctcccacagagcctccagaaagaaacaattttcacccacgaagacccattttgaacttctaaagtccagaactatataaaatcrtaaacttgtattgccttaaaccactatgcttatggtaatttgttacaaccaccacagaaatgaaaacaccacatttctaggatggtcagttatgtgttaatatcaatgtcaaacaaaacatttagataataatatcactctcaagcataagagtcacaaaaagtaagatattgagatgatcaaccaaaataaacaagaaaatagc

SEQ ID NO: 181908 - DNA, 436 bp, Homo sapiens
tggagtagggtgacttaagaatcagagtcagagtgatgtaatgttagaaatactctgccagccattgctggctttgaaagttgaagggaaccatgagccaaagaatggggacagtcacagaaggtggaaaaagagaagacacagattctcccacagagcctccagaaagaaacaattttcacccacgaagacccattttgaacttctaaagtccagaactatataaaatcgtaaacttgtattgccttaaaccactatgcttatggtaatttgttacaaccaccacagaaatgaaaacaccacatttctaggatggtcagttatgtgttaatatcaatgtcaaacaaaacatttagataataatatcactctcaagcataagagtcayaaaaagtaagatattgagatgatcaaccaaaataaacaagaaaatagc

SEQ ID NO: 181909 - DNA, 495 bp, Homo sapiens
cccattgtcttaggcttgtgacatacccattgctcacaatctgttctctcccagtgttggaggggagtggtgggagcagctcagggagaaagggacgtgactcggggtcaccttctgtcagctcactcatgccacctctctgtacctgctggtgggcrtggccttgtctagctcatgcttttagtaggttgcccaggatagctgatggcacacccccatcagctagaatgtgtgaatgtatggggcatggctcctaggaaaatcccatctgctgtgtaaccctctgaatgtaaaacagaggtgcttgaggaccgatctcccccttctgtctgagtgacatcactgtggacaccactgggaggtctccattgtcagcctaggccaggtgtgtgcagagtgaggaggaagacctcggatagctacgcaacagccctaaactgcacctcgttttgctgatacttatgggttgcttatatccttgaaattattagcatt

SEQ ID NO: 181910 - DNA, 495 bp, Homo sapiens
cccattgtcttaggcttgtgacatacccattgctcacaatctgttctctcccagtgttggaggggagtggtgggagcagctcagggagaaagggacgtgactcggggtcaccttctgtcagctcactcatgccacctctctgtacctgctggtgggcatggccttgtctagctcatgcttttagtaggttgcccaggatagctgatggcacacccccatcagctagaatgtgtgaatgtatggggcatggctcctaggaaaatcccatctgctgtgtaaccctctgaatgtaaaacagaggtgcttgaggaccgatctcccccttctgtctgagtgacatcactgtggacaccactgggaggtctcmattgtcagcctaggccaggtgtgtgcagagtgaggaggaagacctcggatagctacgcaacagccctaaactgcacctcgttttgctgatacttatgggttgcttatatccttgaaattattagcatt

SEQ ID NO: 181911 - DNA, 493 bp, Homo sapiens
gtattgctaatataagtgatagatttctcttattttcagtactaatgtttttacctaatagcaaaccctagtgattgatacagattgttcatactgcttcttgcttaaaagaatagcctcctttccactctttctatgcaagaggcataatttgccactttcacgaccttcgagcatggctatatgacttcctttggcctcatggtgggtgggagttactccccctccctttgactttaggctcagccatgtgacttgctttggcctctggttcgtggcaagcatgaagcaagccacccggagacaggctggggtggatggaattgctttatcgcacctctgccatcccaacggagagcacttcttagctggcccattgctctaaagaggacgaaggaaccagatggcctagactargctccacagggcttggcttcaacctgtgggttggaaacactgcattatttgaaaggacattcttagtctaggaaag

SEQ ID NO: 181912 - DNA, 378 bp, Homo sapiens
ataaatttctgctgttttagaaggcatacagctttagtttgttcttttatgtatttttgatcctcagtgmtcttagttttgggtatgtgtgcacctgtgcatagctgaggatatagatggatatcttttcccagccctctttctttgatctccttcttaatctttctaagaggggagagtgggaagacatgcttagacacacggagttggcaatgtaatcaggcactgtggtcaacctacgagggaggtgacaagagagatgtgtctgtttctggtagatatttcattctgaaaaatctgaagtgcataaaggctccctccatattaaacatcaaaggtcaaataaagttgtccttttaggatagattcaggaccctg

SEQ ID NO: 181913 - DNA, 635 bp, Homo sapiens
ttgctaaaatgtcttctgagctttggcaggggagtacatcaaccacacaggtgcgatgtttgtgaacaagagtcccactcaggtccaatgctgtaagcagtccccgcaattatgaatctaaaaagtaattaacaccaaaggtggccacattgctttcccacttagaggggcaaatgagagtgcacattagattaagtacagactaacacagcatatgcaaagtcggggagtttcaaatgaaaaaaacaaacctggattgaagtatacgagaggatacatttccaaccatcaagataataaggaaaaaggtcaactggaaatggacttcaacaggacctggcagtttytaattctttgagaaaaatattaactttgagacacattaaaaatcaggggcgggcatggttgctcacacctgtaatctcagcacattgggaggctgaggcgggcggatcacttgaggtcaggagtttgagagcagcctggccaacatggcaaaaccccgtctctactaaaaatacaaaaaatagctgggcatggtggtgggtgcctgtaatcccagctactcgggaggctgaggcaggagaatcagtggaacctaggaggcagaggttgcagtgagctgagattgagcc

SEQ ID NO: 181914 - DNA, 567 bp, Homo sapiens
atggccgggtgccatggctcacacctgtaatcccaacaacttgggaagctaaagcaggaaaatcactggagtccaggagttcaagactagcctgggcaacacagggaagccctgtctctacaaaaaaatyagaaaattagccaggtgtggtaaggcatgcttgtagtcccagctacttgggaggctgagacaggaggactgcctgagccttggagatggaggttgcagtgagctgtgatcacaccattgcactccagcctgagaaacagagcaagaccttgactcataaaacaaacaaacaaaacatggacaagtgatggttctgacattgagcatggggctgatggatgggtaaatctgattgtgacaatgattatacaacatacgcatattcaaatcattacattgtataccctggataggtacaatctgtatttgtcaactaaatattttaaaatacataaagttctacattgagatttccttttaattatattcagtatacacataagcaaaaagacagtaaaataaactatatattttaaagagcaattactcaacataata

SEQ ID NO: 181915 - DNA, 567 bp, Homo sapiens
atggccgggtgccatggctcacacctgtaatcccaacaacttgggaagctaaagcaggaaaatcactggagtccaggagttcaagactagcctgggcaacacagggaagccctgtctctacaaaaaaatcagaaaattagccaggtgtggtaaggcatgcttgtagtcccagctacttgggaggctgagacaggaggactgcctgagccttggagatggaggttgcagtgagctgtgatcacaccattgcactccagcctgagaaacagagcaagaccttgactcataaaacaaacaaacaaaacatggacaagtgatggttctgacattgagcatggggctgatggatgggtaaatctgattgtgacaatgattatacaacatacgcatattcaaatcattacattgtataccctggataggtacaatctgtatttgycaactaaatattttaaaatacataaagttctacattgagatttccttttaattatattcagtatacacataagcaaaaagacagtaaaataaactatatattttaaagagcaattactcaacataata

SEQ ID NO: 181916 - DNA, 540 bp, Homo sapiens
aaatgtcttacagggctgtcagcccataaggttttacaacccaacacaatccacctagataagtgacaaaatggctttatttataaagtaggtacaaaggcaaatgtggagctgagttctttaactctaggtatttttcttaggcagatcaattttaggaaagagaatacacagaagtagagaactcagaaaacagatactcttgaaactatttacatccatatatcctttgaatggttttgcatagcaacaggtatacacgtagcccaatttaagacctctgcaattagcaaatttcctcaggggtctaaaaggagacgagaggtctcgtagatgaacaatcacagcacaactcgcccacacaaatgggaagacgctggttattttttccagcaggtacaaaagcctgtgagtcttacrcacatgtaatattttacgtgtgtgagaggtttcataagttattaccatctaagagcataaatggtaaatctctattttaatttcattcctcttcatctaacatagatgtcatgatgtaac

SEQ ID NO: 181917 - DNA, 607 bp, Homo sapiens
tcaccttctttgttgttgttttcttatttctcttccttcttttgaattcatggtatactcagtaggattattattattattgttattattattattattattattattagagacagggtctcaccgtcacccagactgctggagtacagtggtgtgataatagctcactgcagcctcaaacttctgggctcaaatgatcctcctacttcatcctcccaagtagttgggactacaggcatgtgccaccatgccaggctgacttaattttttttttttttttttaraaatggggtcccactatgttttccaggctggtctcaagttcctggcctcaagtgaatctcttacctcggcctctcaaagtgctgagattacaggcgtaagccaccatgcctggccttttttattctcatctattggaacatcagctttatccgtttgttttttaaaatgattttttgttctgaggatttcagtatgtatcctcaacttcatacaatctaccctaaattaaattaatactacacgcctttatgtgtaagaatcttaaaactgtatttccatctgtctccatcttttgttctattgttgtcttacatttttctta

SEQ ID NO: 181918 - DNA, 582 bp, Homo sapiens
attaggaaatgtgtgtgtgtggtggaggtggtgaggagggtgttgattgtsactgtggaagggggagcctactggtatttcgtggtggactactagggttgctaaactttctgcaatgcacttgttctgcagtcttgcacaacaacgagttgtcccatcctagataccagtagcatccccttaagtgcacactgtgagtagtgcctttagacagggtatctcaaatttaaatgctttcagaggccaggccagtaaaataatgtggtcagcagttccaagttgtcaggatgtggtacacacctgaaggcctatgaattcaaattttcttaagcactgttttggccaaatacaaatattccctgaagccagattcttcttgtgggtttccagcttgctcctgtttcactcccaattgcttttggataacttttcagacaaaaatgaaagaaggaatcgctacgccctgctctttctcttcccccttcttttgtagtcagctgtgtgagtaaagatggatagaaaatactttccccctcccttaaaattcaatgtcatgaatgctagaattaaagtaataaaata

SEQ ID NO: 181919 - DNA, 485 bp, Homo sapiens
gaggagcctaccaaatgaaaaaaggaatctaaggaagaggatgacatgaaatwaaaaaagtaaaaaaaaaaacccaaaaacaaacaaacaaacaaaaaacagtaaaagctaaatataaccccaaagcagagaaatgtctataaagaagtgaagctactgggaaaatctccttcaagtggcaaaatttcatgacccacgatgggagttctttctctatggatctaattctattactcggctccgcagtgaataatatttgcataatggctttaggttttcagaagccactcagagacaaaacaaaaaacatattcatagtttggctatagaaataagaaataagtgtattaactgtgacactgtaataggcagagtctagctaattgggaggtcatgagtagggtgacagaccctcttgggaccaagggggttcccgcatatgggactttcagagctaaaactgggaaagtcctgtgtaaaccagg

SEQ ID NO: 181920 - DNA, 423 bp, Homo sapiens
ctatatatttttatataatcacattaatagtgtatatgcaattttatgtttggatttctaacattaattgtatttaaaacagatttcagtaattgttttcatggttagaattcacaattrtgttccttaaaggtaatgactcatcataacttacttaaccatttcctttttttttttttttggtcatttaaaatggctcagtttttttttggtcatttaaaatggctcagtttttttggtcatttaaaatggctcagttttttcattaaactggaattccataaactaaatttataatgttgagctttttatgcctaattattttgcctttctggaaaagattgcacccatttacatttgctctggtaattgtgtacaaggatatcagtttcaccatcactagcctagtaggctcaaaatgac

SEQ ID NO: 181921 - DNA, 436 bp, Homo sapiens
ctatatatttttatataatcacattaatagtgtatatgcaattttatgtttggatttctaacattaattgtatttaaaacagatttcagtaattgttttcatggttagaattcacaattgtgttccttaaaggtaatgactcatcataacttacttaaccatttcctttttttttttttttggtcatttaaaatggctcagtttttttttggtcatttaaaatggctcagtttttttggtcatttaaaatggctcagttttttcattaaactggaattccataractaaatttataatgttgagctttttatgcctaattattttgcctttctggaaaagattgcacccatttacatttgctctggtaattgtgtacaaggatatcagtttcaccatcactagcctagtaggctcaaaatgacatcatatagttgc

SEQ ID NO: 181922 - DNA, 436 bp, Homo sapiens
ctatatatttttatataatcacattaatagtgtatatgcaattttatgtttggatttctaacattaattgtatttaaaacagatttcagtaattgttttcatggttagaattcacaattgtgttccttaaaggtaatgactcatcataacttacttaaccatttcctttttttttttttttggtcatttaaaatggctcagtttttttttggtcatttaaaatggctcagtttttttggtcatttaaaatggctcagttttttcattaaactggaattccataaactaratttataatgttgagctttttatgcctaattattttgcctttctggaaaagattgcacccatttacatttgctctggtaattgtgtacaaggatatcagtttcaccatcactagcctagtaggctcaaaatgacatcatatagttgc

SEQ ID NO: 181923 - DNA, 568 bp, Homo sapiens
cattctggtttttggaattttcagcatttttgcctggtttttccatatcttcatggatttatgtacctttgatctttgaggctgatgacttttggttggggtttctgtgtgggagttttttgttgatgttgatgttgatgttattgctttctgtttgctagtttttcttctaacaggccccttttctgcaggtctgctgcagttcactggaggtccaccccagaccctgtttagcctgggtatcaccagcagaggctgcagaacagcaaagacagctgcctgctccttcccctggaagcttcgtcccagaggtgcactggcctgatgctagccatagatctcctatgaggtgtctgtaawcccctgttgggaggtctcttctagtcaggaggtacaggatcagggacctacttgaggaggcagtctgtccctcagcagagctcaagcactaggctggcagaactctccttgtctggatcctctgctctcttaagagccaacaggcaggaatgtttaagtccactgaagctattcccacagccgcctcttcccccaggtgctctgtccc

SEQ ID NO: 181924 - DNA, 568 bp, Homo sapiens
cattctggtttttggaattttcagcatttttgcctggtttttccatatcttcatggatttatgtacctttgatctttgaggctgatgacttttggttggggtttctgtgtgggagttttttgttgatgttgatgttgatgttattgctttctgtttgctagtttttcttctaacaggccccttttctgcaggtctgctgcagttcactggaggtccaccccagaccctgtttagcctgggtatcaccagcagaggctgcagaacagcaaagacagctgcctgctccttcccctggaagcttcgtcccagaggtgcactggcctgatgctagccatagatctcctatgaggtgtctgtaaacccctgttgggaggtctcttctagtcaggaggtacaggatcagggacctacttgaggaggcagtctgtccctcagcagagctcaagcactrggctggcagaactctccttgtctggatcctctgctctcttaagagccaacaggcaggaatgtttaagtccactgaagctattcccacagccgcctcttcccccaggtgctctgtccc

SEQ ID NO: 181925 - DNA, 393 bp, Homo sapiens
gacttacagtgggtccagtgggtccccaggctcatccagttgtcatttccccagtgccagaatgcaaaattggcagagacatacttagcagctggcagatcccccacattgcctccctgactggtagggtgaaggctattatggtgggaaagtacaaayggaaggtattagagcttcctctacgtagaaaaataataaatcaaaaccaatatcacatcactggagggattgcaatgattagtgccacaatcaaggacttgaaaaacgcaggggtggtgattcccaccacatgcctattcagttctcccatttggcctgtgcagaagaaagatgggtctctgagaatgatagtgggttattgtaagcttaaccaagtggtgactccaattgcag

SEQ ID NO: 181926 - DNA, 544 bp, Homo sapiens
aaaataacacagtaagcaaaataaaatctggaaattattaataaaaatttggtttagttgactataaaaatgcaaacagctttgttaaagtataattgacatgcaacaaattgtacatatyaaatgtataaaatttggtaagttttgacatatgtatgcatctgttgaaattatcaccacaatcaaggtcatactcatccattatcctgaacaattttcttatacgcctttgtaattccattctcttgcccttctgcttcccaggtaattactaactcctttctgtcatcaaatattagtttatgtctcccagactggcacataaattgaactatacgcatgcatttttttttttttgcctgtctttctgcactcaggatagttattttgagattaatctatattgctgcctatatcaataattcattcctcttcattattgagtctcattgtatggatatatcacaagttgtttattcactcacttgttgataaacatagggttgtttccaatcttaatcattttaaatttttcttgtcatgg

SEQ ID NO: 181927 - DNA, 623 bp, Homo sapiens
gatatatcacaagttgtttattcactcacttgttgataaacatagggttgtttccaatcttaatcattttaaatttttcttgtcatggaatatcctggcaagtaaagaaactgaactgtaaatgtctctayagcatagagcttcaagtctcacttgcaaatttggctgcctagtggaaaaaatctatagattaatcaggaattcaaaatgaatttatagacaagttttaacttaattttacaaggaaacatttatttttaccaaatataagttcgtgttgtaatatatatattttaaaaattgttttacatgttttacagtgtacaaaaatataaaaaacacctatatttccacaaccaataattaacaaacatagtttttgtgtgtgtttcagatactttattaacaaaacaaaagaaatataggtagcatttttatatgccaacactgaacaacctggaaaagaaattttaaaagtaattccatttacaataactacaaatgaaataaagtgcctagggataaacctaaccaaagaaatgaaaaatctctaccttgaaaactgtaaaacaatgataaaaatattgaagaggacacacaaaaaggaaagtcttcatagactg

SEQ ID NO: 181928 - DNA, 623 bp, Homo sapiens
gatatatcacaagttgtttattcactcacttgttgataaacatagggttgtttccaatcttaatcattttaaatttttcttgtcatggaatatcctggcaagtaaagaaactgaactgtaaatgtctctacagcatagagcttcaagtctcacttgcaaatttggctgcctagtggaaaaaatstatagattaatcaggaattcaaaatgaatttatagacaagttttaacttaattttacaaggaaacatttatttttaccaaatataagttcgtgttgtaatatatatattttaaaaattgttttacatgttttacagtgtacaaaaatataaaaaacacctatatttccacaaccaataattaacaaacatagtttttgtgtgtgtttcagatactttattaacaaaacaaaagaaatataggtagcatttttatatgccaacactgaacaacctggaaaagaaattttaaaagtaattccatttacaataactacaaatgaaataaagtgcctagggataaacctaaccaaagaaatgaaaaatctctaccttgaaaactgtaaaacaatgataaaaatattgaagaggacacacaaaaaggaaagtcttcatagactg

SEQ ID NO: 181929 - DNA, 577 bp, Homo sapiens
caatcgtgacaagatgaatttcacattatctattatttatgtatttattttgaaacttttgcattaggtacatatatatttaggaatgcatgtctttttggcgacctgacaccattattattattatgaaatactcctgtttttatacatatgggcattgctttttcttcagtctgctttttccgatactaatatactcactacagtttttttatgcttagtaatttacatagaatgtgtctttctaagcttttaacctagctataatttcaaaatattacttaatatgagtttcctgtgggcagcatatgtttgtgcctggccttttcatcaagtttgattacctctgccatttaaataagaygattaaacgaccataaaattttgattatcagtatatttgactaaagagctagataaccaatctttctacaatcttgatatttgattccaatttattttatctggtctttgctctattttttctttcccacctacttttggattgagtacatttgtagtctgtatttttaaaccttactggctgtagctaatttcctttgttttaattttattg

SEQ ID NO: 181930 - DNA, 566 bp, Homo sapiens
tcaattatgcaagggctaacggaagtagggaagctgcagaagaaaagtttgaaaatagcagagattgattcactctgctagcttcaaactttaagaggttaaagaaaagaagtcatccccataacatgtaagtataaggcaaagcatcaagtgctgatatagaagctcagcaagttattcagaagatctagctaagrtaattgtagaaagggctacaccaaacaagagattttcagtgtagacaaaacagtcttatattgaaagaggatgccatccaggactttcataactagagaggagaagccaatacttacctggcttcaaagactaaaagaaaagcctgactctcttattagggtctgatgcagctttaagttgaagccaatgcttatttacaaatatgaacttattagagcccttaggaattatgataaatcgaccctgcctgtgctgtataaatgaaacaaagcctgtatgacaacacatctgtttacagcatggttaactgaatattttaagcccactgttgaaatgcactgctcagaaaaaaagagattttaaaaaaa

SEQ ID NO: 181931 - DNA, 454 bp, Homo sapiens
attagggtctgatgcagctttaagttgaagccaatgcttatttacaaatatgaacttattagagmccttaggaattatgataaatcgaccctgcctgtgctgtataaatgaaacaaagcctgtatgacaacacatctgtttacagcatggttaactgaatattttaagcccactgttgaaatgcactgctcagaaaaaaagagattttaaaaaaatatatttctgctcattgataatgcatattggcccccaaaagctctgatggagatgtacaaggaaattaaatttgtttttgtccctgacaacacagcaaccctcctgtaggccatgtatcaaagagtaatgtcaactttaaaattttattatttaagaaccgtatcttgtaaggctgtagctgccatatatagtgattcaaatgatagatcttgacaaaataagttgaaaacctgaaaag

SEQ ID NO: 181932 - DNA, 522 bp, Homo sapiens
attagtaaggttttaattgcactagtattctggcagcaaacttttatattttatcattccaaagtttagatataagggtgttggagtctagtgtatttattatgtagtctatttcatatcagtgacgtacttatggggacaactaatgtcctccttgccaggaaagtgacattttgcatatatgtagttgtaaaaaagtttccattcagtcgggcacagtggctcatgcttgtaatcccagcagtttgggatgctraggcgggcagaatacctgagatcaggagttcgaaaccagcctagccaacatggtgaaaccttgtctctactaaaaatacaaaaatcagctgggtgtggtggcatgcaccttaattccagctactcgggaggctgaggcaggagaatcacttgaatctgggaggtggaggttgcggtgaggtgagatcatgccactgcactgcagcctgggtgacagtgctcttacagtgcctgtgttagaagatcataaggaatacaacacattta

SEQ ID NO: 181933 - DNA, 338 bp, Homo sapiens
tttttttcctatagtagaataagtctgcaataaggataaagcccagtattagaatatgttgatgtcctaattccagtgcctgtgtatgtgaccatatttggaaatagagtttttgcagatgttatcaaattaagatgaggtcactagagtgagctccagtccagtataattaaaatcctgacaagcagaggcaagcattatgtgacracacacacagagaaatggacatgtgacaatagaggcagagactgaggccttgccactgcaaactaagaaataccaacaattgcttggcaaacgactagaagctagggcggatcagggaaagatttattttt

SEQ ID NO: 181934 - DNA, 597 bp, Homo sapiens
aatactggggtagtgaaaccttaactgtaagtgacaaaatcatgaaaactcagtgtgaatatcctgagtttaaactctgggtgtttaatcttattttatgagttttgccttcagarcactaccaggctctcacaatgaagactggagaaaaatctgcttgaagaaggaggggaaaaatcattattattaacgtctgaccaaagcattctattttccttaacaatatctaccctaaagaagtctattttaccagagcctaactgactggggttttaccagagatgaactaactcagggtaatctaactccagctccatctttccttcctatattccatgagaagcattggtgaaggtcatagcgcactaaaagactgagacccaattacaggactaaagaatgcttctttcccccacacaccttaccaccgcaccaatcagtctcttgtataacaaaacacatacaactgaaagaactgtgcattcttaatgttatatgagaagaggtctctagggagaccaaaaggcaacaagggtcacataagcagacacgagaaaattgtcagactctgacacccgcagcaaagaataacttaca

SEQ ID NO: 181935 - DNA, 597 bp, Homo sapiens
aatactggggtagtgaaaccttaactgtaagtgacaaaatcatgaaaactcagtgtgaatatcctgagtttaaactctgggtgtttaatcttattttatgagttttgccttcagaacactaccaggctctcacaatgaagactggagaaaaatctgcttgaagaaggaggggaaaaatcattattattaacgtctgaccaaagcattctattttccttaacaatatctaccctaaagaagtctattttaccagagcctaactgactggggttttaccagagatgaactaactcagggtaatctaactccagctccayctttccttcctatattccatgagaagcattggtgaaggtcatagcgcactaaaagactgagacccaattacaggactaaagaatgcttctttcccccacacaccttaccaccgcaccaatcagtctcttgtataacaaaacacatacaactgaaagaactgtgcattcttaatgttatatgagaagaggtctctagggagaccaaaaggcaacaagggtcacataagcagacacgagaaaattgtcagactctgacacccgcagcaaagaataacttaca

SEQ ID NO: 181936 - DNA, 597 bp, Homo sapiens
aatactggggtagtgaaaccttaactgtaagtgacaaaatcatgaaaactcagtgtgaatatcctgagtttaaactctgggtgtttaatcttattttatgagttttgccttcagaacactaccaggctctcacaatgaagactggagaaaaatctgcttgaagaaggaggggaaaaatcattattattaacgtctgaccaaagcattctattttccttaacaatatctaccctaaagaagtctattttaccagagcctaactgactggggttttaccagagatgaactaactcagggtaatctaactccagctccatctttccttcctatattccatgagaagcattggtgaaggtcatagygcactaaaagactgagacccaattacaggactaaagaatgcttctttcccccacacaccttaccaccgcaccaatcagtctcttgtataacaaaacacatacaactgaaagaactgtgcattcttaatgttatatgagaagaggtctctagggagaccaaaaggcaacaagggtcacataagcagacacgagaaaattgtcagactctgacacccgcagcaaagaataacttaca

SEQ ID NO: 181937 - DNA, 597 bp, Homo sapiens
aatactggggtagtgaaaccttaactgtaagtgacaaaatcatgaaaactcagtgtgaatatcctgagtttaaactctgggtgtttaatcttattttatgagttttgccttcagaacactaccaggctctcacaatgaagactggagaaaaatctgcttgaagaaggaggggaaaaatcattattattaacgtctgaccaaagcattctattttccttaacaatatctaccctaaagaagtctattttaccagagcctaactgactggggttttaccagagatgaactaactcagggtaatctaactccagctccatctttccttcctatattccatgagaagcattggtgaaggtcatagcgcactaaaagactgagacccaattacaggactaaagaatgcttctttcccccacacaccttaccaccrcaccaatcagtctcttgtataacaaaacacatacaactgaaagaactgtgcattcttaatgttatatgagaagaggtctctagggagaccaaaaggcaacaagggtcacataagcagacacgagaaaattgtcagactctgacacccgcagcaaagaataacttaca

SEQ ID NO: 181938 - DNA, 636 bp, Homo sapiens
tcttttctttacatgtttaggatgtatataattaactgtgcaatcatgtcataaaaggaaggatatgagtgatttcagtgcatcctgatatttttatacagtacatctgttatgaaaagattttctcctaaatacatgtttcaggtacaaatcaaaggaaatcattttttctttgatcaactctttctaaaatgaacagaaaatgggagtaaatttaagaattcaattttcactgaaaacacacagtaagttatcagtaagaatagagttacttactgcctatattatctacagmacaagcaatataatgtactgtattttatctccagttttatctatctgccaaaattcaaaaaaatctgcaaaacttattctccaacttgatgtgctgcttctgtctgtagcactaataacatgctgtttgttctgcttgaaacctcctcatagatttgaacattctctgtacagctcatctttccaaacatgttatacttactttatatttatcaaagcatcacatttatactctttcattgaaatggcttgattatccatttccaccaaccgaacataaaatctgttaagctacagatgttatctttcttgcataatttagtatcctacaaatgtaactaa

SEQ ID NO: 181939 - DNA, 536 bp, Homo sapiens
ttatcaaactctacttagcagagatgatcagaaaataagttattttgcctcaggcttccctgggaaagacctactttattagaattaaaataagccacttattttaattctaaattcatgaaaacacacactacctctaagcatgtctgttggtaagtttaacgtatttgtctaaattcaatttttattcttccagcttacagataatgaagacaaataggtttcatatgtcaaactctgtcactgcttggagaagacttttaaaaatccatcacctattgcctaggttatttatttaaaatgtacagaaacttctttagtccattaataatatgggaaagacaagatgtctttggattttaatataagcaaatttgtcaccctttcacgtttacatgtgctttctgaattaattaaatttgaaactcttactccaagattatagcctagatgttttctaaatactcattttgaaaagaaaagtgataaatattttgcattacttttaaycctagacattatagagatactcagtt

SEQ ID NO: 181940 - DNA, 531 bp, Homo sapiens
gcttaaaaactatgaggtttattgagctttaaggattaaacttaataaattctgcaaagatctcttatgtgcaatgttggctttagtttttgtgcaatgtgttagtaggttagttcatcctttttgcctccatctccttcactcacctctcttctcttaatatattcccagaatcctaactatgaccttcccattggtatgatgagaagtttgttttgaattaaaaaagraagtttacagataatatcaaccacagctgaaggtcatatttctgtttctgtcatttgctattatttttgttctcacttcaataagatctgtgtgcctgcttcagtctacatccattgttctcattcttttctgttccaatcttttcctctctctctatgcttattcctttctactaagactcaaggcagaaaacgaaactaatgtattagcactgaaacagacctcagatcttcttgtccaaagcattgacattttacagatgaagactaaaacagagttctgtcttgaaaatattcaaaa

SEQ ID NO: 181941 - DNA, 634 bp, Homo sapiens
gagaacctaaaatcatagtaaggtgtttttgtccatgtttcttaattttattcatggctctattctgggtgctgcaggaacttgtgtatacttctttcaggatattttcatatagtactttaatagttgtttttttatttattccagatgatggggctttatgagtataggaartatacattattgttgctaattatcacagtgtctagaacagcaaaatctctaccttattgctgaataaatgtctgttggaaatagattattcacattgtcatatcactgtcaaatattaacgctttggatcaaaattacacaacaaaaattgtttgttatgctatatttggaaagtatttgagttagatctatataagcacattggttgtttaaaaagacaaaggaatatagattggattcaaaatagaatacaatttacttagatagctatcttaacgtagagtttgagtcaaagtatctccaataactatgagctttccttctcctgtctaggataactctcaacatatatctttccgtatttcttatataagttttaatcaattccacagtgaaaatctcattagaaatggcaacatgggaagttttatagaaaagcacacaacaaatgtattaaaac

SEQ ID NO: 181942 - DNA, 492 bp, Homo sapiens
tcccagttagtcatttgcctgccaccccactaactcaccgccagccccagtctactgtatttgggcctagttcagcactaggactagcctaggagttgtagtccttgtagcctagactgtctttcaagtgtatttatggccccagagcactttagcctatggtggcgaggattgtgggaactcaagttttgatcacaaggctccgcaactcccctctggccagggctgatttaaatgctccctccgtgcactggtgtcagctgagtttggtcctgttttgttctctgttataatagggcaacacagagttcagtgcctcacaattgctgtgctctccctctccccagtgcacagaaagattctctgtaccattctgcccctgccaggagttaggggaggggtgrtgtcagcaattcaagactgtttttcctaccacttcagttcctctttaggttatatgaagttaaaaccaggtactgtgagtgcttacct

SEQ ID NO: 181943 - DNA, 495 bp, Homo sapiens
tatataagtgtctataataaaatcaaagcacatatcatagtggttagcacaaaatatttacagtaagattaatcattgtcactcactgacagtgggctaggaatatataaattgaacccaaatatgtaggtacwaggcagggtgcattttttttatggtttggtttataaaccttcagagaataccgtggtgttcacccacgaatcaagaactgttttgccatgcacagtctaatcctttccctgaagtaaaccagggaccagaaagaattatatacttgaaccataacatcaatttattttattaaaccatattctggtactggactttaaaagcacaaactgcttttagggcacttacataaaacagtctgattaacctcctattcaggaagcttttgcttgtaacattacagtttcttctttttgagtttgcaatacataactttctgatacctgtattagtaataattgtatataatctgagtagatggtt

SEQ ID NO: 181944 - DNA, 639 bp, Homo sapiens
tcctgtctcagacattgatcccatatagatttatcaatttcactgctgccccttctagtttctacactactctaaccattcccccctccactaagagaatatgagctaataagctaatgtagcaagacctcccagacataggttgctgaggaaatatttttgagaaaataaaggcaacaagagatattttaggcttatttttttatcagacactagcctgtttcttagagagtctcaatagtggggcatatagtcataataaacctacaaaattattaaagaacacttaaagactcacaaatactaagtcccccaaatcactactgcaaaatttagtaactcttcaaattcaaatttcatttcataagtcatgtaaatatgctagcaatctgaagtattgggttggggaaaagagttataaaagttccatakagctatggtgaaaatgttgtattatttcaaggcctttctacacaagacagtgagttttgggactgctataatttaaaaaggtgtctttgaaaagaaaaggcatagcttttcatggcagctaattctagacaaagagaggggccaatgggtattttagtccaacctaatttgatgtcacagtggtgggtctggttttatttatttatt

SEQ ID NO: 181945 - DNA, 465 bp, Homo sapiens
cttatgaatcaccgatttattaatacaaggcaactaacaacaaagagcctagagagactttaggtctctttcttaaagaagttcataatttaataacctctctgggcttcattttctttatctttaaagtaaggacactgaacttgactttctccaagattccccaagggaggttccaaggctttctaatacagtcatgttatatgttatataaycaagcactcagagcagttcctggccatttgtgaggaaggagaataggatctggaggcagggaacctatgactgatttgcactaacttcctagaacgaatcgaaaggaaaaccccacctctccacaccaaagtaacaaaaggatcagaggctactctttttgcacttcatcgtagaggaaaaatgaaaagtacctctgattgtttccttcccccaaccaatcagactggtggcaggcctagtcttcatttg

SEQ ID NO: 181946 - DNA, 375 bp, Homo sapiens
catcttccgggttcacgccattctcctgcctcagcccccggagtagctgggactacaggcacccgccaccacgcctggctaattttttttgtatttttagtagagacagggtttcaccctgttagccaggatggtctcaatctgctgaccctgtgatccgcctgcctcggtttggagagaaccaatgacaagrgaaaaggaaattcacaatatgactgaaataagtaactaaaagaacagaaaatcagaataattacatatggtgcgtccccaaagcagatcaccttaaatcaggcatttcagattcagttgaaaggagaaataaaaacaccaaaatatagcctctggagggtggttactttctccagtgcttgc

SEQ ID NO: 181947 - DNA, 602 bp, Homo sapiens
aagccagaatttatgctactcaactccatcattttacaaatgatgacactgaagccagagaggtaagagccttacataagatcaccaaagtactaaaagcgaaggctctaggacccaaacctgtgggttctgtttgcaggtccagctgtggactttactttgcacagtgtttcatctcctagaattgtgaggcttactcaggaagtaaactcatcatcctatgggtttggctattaaaaagtaacatattaaagaaagaattcagaatagacggaagccctctatgcgtacaggatattcaattatttaagatttctcaatgccagccaaattatagacamtttaaaatattattactctgttacccaagatacttccttgggccccctaggtgaaggtagaaaatgaaaaagagatattttgaaaatttcaatcaagtaggttttttagggctggataatcattttcctgtactaatgcattagtgcaggagaagggcttagcaaatccaactgcttatgactttgttcttttttacttggagtgtctaaaagcatgcagaagagagttagggtatagagtggttgagtaaaagggatagc

SEQ ID NO: 181948 - DNA, 487 bp, Homo sapiens
gacaacttttaagcataactaaatatttaaaagttgtgatcttttgtttgtactcctgcctaggaccacatgttaggagtggctgcattcataaaggttacctgccaggtgagtcaatgctctataaataggctgagagggagagttataagtagacagctgcagcatctacctcctaagtcagagagcacaggtcagaagtccgagagcaaaggggagggatgggggaaggttagggcagagttggcagaaggctaggggaggggaagttggaggaaatgaaraggttaaggggtgttagggaggaggccataaagaaccttccacaaccctccatccatcattagaatttggccctatgccttaatgccaaggcattaacttagagggcatttaacagccaagagagagtcacaaacaccagtcccattaaatggcactcacattctacctctcattccttctcactgttttgaccccagagaaa

SEQ ID NO: 181949 - DNA, 486 bp, Homo sapiens
ggacttgaaattggacctgagttcccctttgtttttggtggtgagagtaagacttcagtaaggtggtatgtatgagaaggctggtgtaccctctcaccaatcaaacaaccattttaactggttaaaagtataaaagaaaaaaagcactaagaatcatttaatatatctggaaattgtcttaaaatcatgcaaccatacagaaaaatgttgattgaagaaaattgactaaaacttgataagaacagaaagttggtagcatttgagctattacctgctccctttgctccccatttgtaagttctgtgtaamagaagccttacactgagttcgtgtagacaagaacagagctcactctacctcaaattccttgactagagctatagtttcccctttggagaagcaggccacaagtagctttcattccttttgcttacaattttatatgtcagactctctattgcagatagctccagtccatttgagagg

SEQ ID NO: 181950 - DNA, 521 bp, Homo sapiens
gataataacaactagcatttatttattgtgattcttgaacaaatggtgactctttaaggtaattttccaactatttgaactaactttatttttaaaggtggcagaaggtagcatgaaataaaaaaggatacacattgtagtgagagtcagagaatcaggtactggatactcaaccaaccccacctgggagatttccacttctttagatacattgtacagaattaaaatggaaagaagtcttggagagaaactatttacatattatcatcttatagaagatgcctctgaaactttagggaaagtgttttcccaaggaactgcagtgagtcaatggcagagctaggrttagattccagatattctggctgctagttcagttattttcctctaaataatctctatgatatattttagctctaccattctgtgtttatagtgacttcctcttcggcacttttcatccctgaagtgtggttagggtatacattcttactcttcccaccacttcactttacagatgt

SEQ ID NO: 181951 - DNA, 599 bp, Homo sapiens
ctacattgaacagcaaacctccaaaacagcactgatttaaacaagatggaagttttcttgtttatcagaaaggaattttggagataggcttcccagaatggatatcgtggctacataatcataataaaaacaagggtctctccttctattacaccatcgagggtacctcatggcccaagatggctgccagaactccaattatcacatctgttttgtaagccagcagagtaaaaaagtggaggagtcaaaatgatatttgcctcttttcttttaaggaactctttggaagttacacacaaaatttctgcttacatcccattggccataagttagtcacctrgttatacctagctgctagagagttaggaaatatgtctttaacttgggcagcaatgtacttaggctataaactgggattctgatgctgatgaagaatgagtgagtggctaatgaggaaagagggtatgcaaactacattgtctcaaataattcctttttactgttctgtcaatattccttatgtgttatttttgtctgacaaatagaattagttgaagtgagtgagtactgtctcttacattgcacaaaattctttaaaa

SEQ ID NO: 181952 - DNA, 599 bp, Homo sapiens
ctacattgaacagcaaacctccaaaacagcactgatttaaacaagatggaagttttcttgtttatcagaaaggaattttggagataggcttcccagaatggatatcgtggctacataatcataataaaaacaagggtctctccttctattacaccatcgagggtacctcatggcccaagatggctgccagaactccaattatcacatctgttttgtaagccagcagagtaaaaaagtggaggagtcaaaatgatatttgcctcttttcttttaaggaactctttggaagttacacacaaaatttctgcttacatcccattggccataagttagtcacctggttatacctagctgctagagagttaggaaatatgtctttaacttgggcagcaatgtacttaggctrtaaactgggattctgatgctgatgaagaatgagtgagtggctaatgaggaaagagggtatgcaaactacattgtctcaaataattcctttttactgttctgtcaatattccttatgtgttatttttgtctgacaaatagaattagttgaagtgagtgagtactgtctcttacattgcacaaaattctttaaaa

SEQ ID NO: 181953 - DNA, 435 bp, Homo sapiens
ttgtaacatcatcagaggagctgtaggaaccagaccaaggctcagctgttgttaggaataattccaagaacaccacaaaagaactggtctaataaggcactgctttccctcctatcagaaagctgggtcatcaggagactgctggtccaactactggcttcagtattacagtgtttccttcaaagtgcaggcatcagaaagccagcagttgctcccaagatcacatcatatcaactacaattcaagccccatgtcctgcctcttattctcataaggcaggaattggatattggaaactctgataccattaaatgtggaacaaaccaaacaaaaatatcyacgactgtgcttacctgcagaactagcagaagcaacgaagtagagacgttggcttctttctatcatgtacatcatatattggtggctcttttgggc

SEQ ID NO: 181954 - DNA, 481 bp, Homo sapiens
ccactggaggttgaggaacatactcaatgtttattgttttcatrccatcataaagttgaaaagttttgagttgaaccaccatgagtggagactctgtatagattttggtttcaggacagagaactgtattggcaacatagatatggaagccatttgtctatgtattaaatttggggtcacaggagaaggtgacaaactatggagcatgataaagaaaataaagcagcccaggaaagaacttgaggggcacaaatatcaagagcagaagagaaagagtctgaaaaaataactgtgaaggaatgactattaataaatgaggaagataccgtcctggctaacacagtgaaactctgtctcttttaaaaaatacaaaaaattagccgggcgtggtggcaggcatctgtagttccagctactcaggaggctgaagcaagagaatagcatgaacccgggaggcagagcttgcagtgagccgagattg

SEQ ID NO: 181955 - DNA, 618 bp, Homo sapiens
catcccagaactcagagataagaggcattattatattaatcaaataccctcaaatatataaaccagactagtctttatttccacataacacaattccaaaccatacaatggaatttaatagtccttttaataggactattaaaagttgtgtcatggttctggtagcacttatttatatgggaagtggggttaataccttcttcttcataggattgttaaggtcagacagcaaggaacctgacatataagaggtgtgacagatactgctggttacctactgatattgtttttcccatttttttttaaattaaataataggactcccgatgttggaagggcacggggccacctggcttaagacartggtgtgtggtctcccttgtggtagttttagtcatgctactgagttctacacataaattatgtcacttctggtcataacagtaaaggaaaggaatgaatctatatttctcttgccctttcttctacacataagccctggggagaagagagggcaagagaaaaccgctgcagattctttagacccagagatacaatctgggttttgtgtgttgcagaaccttcccacctgagttttactatttcctttattggact

SEQ ID NO: 181956 - DNA, 537 bp, Homo sapiens
ctttatcatacccatggcaaattatttaacctgctctggctttctcagcatggcattcactttccttcccttgcctatgaaatctgtgatttgaaatgttagacaggagtcatttgttttatcattagctaatgtttgccatgaaattaaaagcaaggagaagttataaaggggaagatacattaatcaaaacaaatcaataaccagtctgcagtttgatgcttattttattaaaaattgccagattaggaaaaatctcccccctcctaaaaataaaataaatgtgcattttcaaggatttgaggaagttagaatacccttgattctatagttttgggaaggaaagaaataaaagtaaagctaaaagtgaatcaacttttatgctctcttcctacctcctatttccttttattcttcataaaatatttaaattgaacatattggtaataatctttaaactgattattttgaaaaaaatatttaacgcamaaatataaataaccttgttttaagtaattggcatctcatttctgtaaa

SEQ ID NO: 181957 - DNA, 494 bp, Homo sapiens
tataaaaaggaaggtttggagataaggaataaaaaaatcttaaaaattaacacagtatataaaagtgaagtgaaagtgaacattttaaagatgcggtttaattgtcttctgaattccaatattttcattaagagatcaactgtcagttttgttgtactcctctgaaaataatgtatccttttactctggctgtgttttagattttattcagttttcagcagtttatgtgtgaggtatttaggtttgatggtttgattttcttagggcttattcttgttggggtttgcagaacttcctgaatctgagcattgattaacaacaacaacaaaaaatagtaytgtaaaatacttggccattacttatttaccatcagagaagattttccttttcctttgctaggcagttagggtggggatctgctcaccttaatcagactatgaactggcctgggttaaggctaaactgcaggtgggtaagattcagtcaaccacggt

SEQ ID NO: 181958 - DNA, 552 bp, Homo sapiens
atccgacaatgaaatattttcacttttaaayacacaatcatgctttgagtgctaaaaagcacaagtaggtcaggaaccagttatctaaggtatttctttgagggtgacagtaaattcaagctggaatttaaggaacccttatgcaaccattctggatttcctatctaagtacaaaaatatttggagaaaagtttcattttcaattttaaatatgccttggggactatgactatctattgctaaacttgcaaaaaattttgaagcttataaacataaatattttggctaaattttaaactatatagatggcatatatggtgagggaacccaaaggaattcaactcaaaattacaaaactgccagagagatagaaatctaccaacaaaatctcaccattaatgagaatatcattttcaatcccaaagctcttatttctagtactaaataacattattctatattactaattgtttactgtcctataggtgatggtgaaaaaaaaaaggtaggcaaacaaaaggtagttggtaaaaaaagaaaaaaaacattacc

SEQ ID NO: 181959 - DNA, 568 bp, Homo sapiens
agtaccctattcaataaaaaatagcctttgcctatgtagtttgtctttgtaaacatttgaagggcaaggagttaattttctatacaaccggtaaagacatttttgaggtctttgcacctctggatgaataatgaatgttaattaatgttgacaatgacaatagcatttcatgtttttaccatgttgcactttacccgtctctaagccttttccccctgaagtgggttttctattattttattcattattttactcctggtaacttgcgctttgttaaaatacagcagatttcttcttcttgtaggttaccatagcaaattgcataagaatttacaccataaattattaattacatccaatttagtataattattaattccagaatacattggtgcctgawtacatctcagtgctcattgcaggatcttgaccatgttctgctgaaaataatgatctgtcatggctaataagaatctaacaagtcccactaaaaggtggaaacatttaattaatattggtttaatgaaacaatgatggatccaattgttacaatctgtcagaaattcct

SEQ ID NO: 181960 - DNA, 430 bp, Homo sapiens
aacagcaagagggatggagactggctcccrctatgtaaaggctgatctaccttttagaaatgctcatggttcaggaagaagcatctccatccatccctctcggtgccctgcatctcggctctccagcttgcagcctaaaccctgcccctgacttcctctggccttgagggctgctattcagtcctgccttttgcctggtcttcagaggtgctctgtgctaattcatctctgaagtagaaacccacagaagagcaaatcaaacacagtgctacgaaagcaaaactagctgagaatatgctttgtcatcttgatcaaataccaaattcccatctcaagttctatactcaggtgtttgatttggaggaaattccacttacaaatggattatgtacccagtgttcctcactcagtacccacattcctgtaaaaa

SEQ ID NO: 181961 - DNA, 523 bp, Homo sapiens
aaacttttaacatgagaaggcaaccttaagctctattttagccaaatgaaacaaaacctgaaattgtattagaacatttccctgtcttcaaactggtgtaacagaatcctgatatgcrgcttgatggatttcaccagttaaggcacattcttctccctccgtccctgcaatactgtgtatactgaacaatgtgcatttgtctgaggagttattttgtttgccaccacttaacgaatctcaaaattttgagtaactgtacctcagtctaatcggactttttatgagctttataactacattgaaacccttaattcccatttctgggtgtttgtgagcctgattgctgtcatttgcgactctaggtactcaccagctaaataaacatagtttttgtgtggccagcacgtactgctcctcaattcctttctccagcttccgcggcgtcctggcatccttaaaatatctacaaaatatggccttcattcataaatgaaatcagtttctatgtgagtgtgtggatgtt

SEQ ID NO: 181962 - DNA, 523 bp, Homo sapiens
aaacttttaacatgagaaggcaaccttaagctctattttagccaaatgaaacaaaacctgaaattgtattagaacatttccctgtcttcaaactggtgtaacagaatcctgatatgcagcttgatggatttcaccagttaaggcacattcttctccctccgtccctgcaatactgtgtatactgaacaatgtgcatttgtctgaggagttattttgtttgccaccacttaacgaatctcaaaattttgagtaactgtacctcagtctaatcggactttttatgagctttataactacattgaaacccttaattcccatttctgggtgtttgtgagcctgattgctgtcatttgcsactctaggtactcaccagctaaataaacatagtttttgtgtggccagcacgtactgctcctcaattcctttctccagcttccgcggcgtcctggcatccttaaaatatctacaaaatatggccttcattcataaatgaaatcagtttctatgtgagtgtgtggatgtt

SEQ ID NO: 181963 - DNA, 562 bp, Homo sapiens
tcatctttggtaataagcagaaaaacaaagcatgagaatgcaattactggaaggtagaaaaaagagataaagagtgcctaccccactttttgccctgggggacctggaaagcacctcccttgaatggattcgtgggaagtagtgtttccaagggacaaccaggtttcagtctgagcaataaggtgaaaggaaagttcagagaatatcctaacaaatggcagagcttgcatttaagaagctatatacrgagacacatggaaaatccagccatggtagtggatatacagatagcacaaggttgagggcctgcgtcatgatggatggcctgtgtttgaaatgctttttccttggtgtcataaagaaacagcacttgaacataaatttaattttctcagcaaggccatttcatactttctgcagaaagggtacagcagcagcagttttgccacaacggcacaccgaacaaaccggagacagggtcatttataacctgatgcatccaccctactgctgtgtccggtttccattggctggaatggggcctcacattctgtatttgtcc

SEQ ID NO: 181964 - DNA, 413 bp, Homo sapiens
ttgcatttcccaaaaccaccctggcctgccatggccgcatcctgggcctataaaaacccaagatgctagcaaggcagtgacagaggccgccagacgttgagaggacaagtcagcagaagacgccacagccgctggcggtggagaggaggtcgaraggctcacgcgcgcagaagaaaataccggcacacggacaggccattgaccggcaggaccaggcggagtttggcccgggcagtgggaggagagccaggggaagatcatcttccttctggctccccatcgtgggagagttaacacttgacactcgttctccaagcccaggtgtgctgcgattcttcaggtacaccaaggcaagaacccgggatacagaaatccctctctccttgcgataaggaagggggcctattgagctg

SEQ ID NO: 181965 - DNA, 545 bp, Homo sapiens
ggtttctactttttctcttatgtttttgctatttacctagttctgcaaaccagtggaagttatctttgattatttctcctcccttattcttcatgtgtcaattgtctattgctgcgtgacaaactatcccattaagcatttatttttcatgagtktatgcatcagttgggaggtacttctgattgtggctgaggtcattcaaacatctgtcagctttgggtcagctgatcttagctgggctctcttagacgtttgtagattggtttgctataagttggtctgggatagtttcagatgggaaaagcaggctctgttttgtgtgtgctctctcatcctccagcaggctagtgtgggcttactctcatggaggtggcagggttccagaagaggaaatggaaacattacaaagtctttaaaagtctctgcttatgccaaaccttctaaagccctattggccaaaggaagctgcatgatctatatcaggggaaaataaaccaataaaattataggtcaaagggagtgggtataggacgaccaataattgg

SEQ ID NO: 181966 - DNA, 556 bp, Homo sapiens
gttaactctaatatcctcagcagggaatagggagataacataacttaatcctctgtgaacttctcagctgcagctctctccactcccatgaaaacatcctaaggcccagccatatctataattattaacaatttatgtcatgctytcacctcctaatcaattttaatacccagctcaggaatcccttgttgattttctttgattgtttaagattggccaggatctttatgcctttcttgtggaacatttcatattgtactttaaatatccagctatttttctggttcccacacaagatactaggctttttggcaagtaatattccttggacatagtatgagttcaataagtaatttttgtttgaaggtacataaatagatggatgggattacatagaaatgaggcacagcttggcttggctaaggaatcagaaagtcgtttttgggaatgatctttctaagttgtctctttttttttgctgtaagataaaattagtacataaattccccaatttttctataagtctctaagaaacttcaatttatgcttgtttctt

SEQ ID NO: 181967 - DNA, 582 bp, Homo sapiens
agcaccaccaggtatagtctttaagaagaaaggtttaagaatctctttacataggaccagtttagctttctttggagaaagtgcaatgttcaaattagtataataaaaacattgaataaagagtatttataaaaattatgaaagttttgcaaaggtgatttctaaaaagaggtatccctagcaagtacagatttatgacctaaactttttctttgtgtcttgattgtgactggtgctctttttttatctctgtttctattttcartaagtcttaaatgcttaccattatgatactgcactctttttctaagctttatcttctatctacttgtgaagtggacaaacacacatttcttgactttgtatatgtaatcccagtgacatttgttaaaatgttgttcataattccctctacttaaacttgatgcttttattaacgtctcttggaattcttcaggggccttattgctacgaaaacctatgcagaactttttgatgtgccactgtaccaagacccagagattttttcttgttaaatgttttgcagcatgtggctacagacagagcattccttttgaattt

SEQ ID NO: 181968 - DNA, 582 bp, Homo sapiens
agcaccaccaggtatagtctttaagaagaaaggtttaagaatctctttacataggaccagtttagctttctttggagaaagtgcaatgttcaaattagtataataaaaacattgaataaagagtatttataaaaattatgaaagttttgcaaaggtgatttctaaaaagaggtatccctagcaagtacagatttatgacctaaactttttctttgtgtcttgattgtgactggtgctctttttttatctctgtttctattttcaataagtcttaaatgcttaccattatgatactgcactctttttctaagctttatcttctatctacttgtgaagtggacaaacacacatttcttgactttgtatatgtaatcccagtgacatttgttaaaatgttgttcataattccctctacttaaacttgatgcttttattaacgtctcttggaattcttcaggggccttaytgctacgaaaacctatgcagaactttttgatgtgccactgtaccaagacccagagattttttcttgttaaatgttttgcagcatgtggctacagacagagcattccttttgaattt

SEQ ID NO: 181969 - DNA, 297 bp, Homo sapiens
taccagaattcagtttttgctgaatgtggagaatgtggggaagttcgtactctcatgcacacacatacacacacatgtatatatatgtatayatatgtgtgtatatatacacacgtatacccccacacacatatatgtgtgtgtgtatttgtaggattgttgcatatcctcatcaaccaggaacttattctaaatagtaataatggatatgagccaagatttatatacaaggatgttatttacattgctatgtataatagcacataattggaaacgaacttaatatctctcaagtag

SEQ ID NO: 181970 - DNA, 566 bp, Homo sapiens
atagtacttaaattatcttagcccacctcccaaaaaatagttgcataaatcttgctaatatgtgcttttcaagccagccagatatggcagtcttggtgagtgcctccagcatgaaaactagtataaatgaagtcctaaaaagatgacagctattagcaatccaggrgctataggtggtgcagcaagttttacttttctaaagataatttgattatgtgtaagaactcaaagcaaagtctttaaaagtatttggactacaaagtgaagttaaagattgtctaaatgggccagaggaagcttcactcattaagggctgtctctaacataatggagctcaggtcacctataagcatctcccctctagaaagacatgcctatcacttatttatgagagaggaaccttctgcttggatcaggaatcatgcagctcaatcagcagaggcaggagtgtgccttggccaacacgggcattctcaaggtggccaggtgccaaagaagtgttggccaagtggacagtctgctatcgtgacctctatagtgggtaaagacagccagcatagttgtgt

SEQ ID NO: 181971 - DNA, 596 bp, Homo sapiens
aaatggcagatagaaagcagctggtgttactcaacagagataagccctcctagagctcaccacagagaggagagcatcatgtctgcagatgccacagcagatctgctgagaatcagccagcrccatgtgacacaagaacccacagatgcagattcgtcctgactggtggctttcttctggccattgctgttacagagaagtttctaagcagtactcaatgcacacaaaactaagtagaggctatataggcaattcttcaaataagcaatcattattctcagtaattcttgtagtaagtggatggtaggaggaaaaaaaaaatacctttccactgatgatatcacctttatagctatttcttgagtctccctatcttttccaccttcttcaagaaatagtcccctattacaatttgcatgcccactcttgctgcagaatttgtataggggctcaactctcattattgccaactatatgatttggaccatggatgtgagaagacttcagcaaatcaatccatcacattcctctggctgcaatgagttgggcacataacctaaatgaacacaattatggtgaatttcctggttttgcca

SEQ ID NO: 181972 - DNA, 596 bp, Homo sapiens
aaatggcagatagaaagcagctggtgttactcaacagagataagccctcctagagctcaccacagagaggagagcatcatgtctgcagatgccacagcagatctgctgagaatcagccagcaccatgtgacacaagaacccacagatgcrgattcgtcctgactggtggctttcttctggccattgctgttacagagaagtttctaagcagtactcaatgcacacaaaactaagtagaggctatataggcaattcttcaaataagcaatcattattctcagtaattcttgtagtaagtggatggtaggaggaaaaaaaaaatacctttccactgatgatatcacctttatagctatttcttgagtctccctatcttttccaccttcttcaagaaatagtcccctattacaatttgcatgcccactcttgctgcagaatttgtataggggctcaactctcattattgccaactatatgatttggaccatggatgtgagaagacttcagcaaatcaatccatcacattcctctggctgcaatgagttgggcacataacctaaatgaacacaattatggtgaatttcctggttttgcca

SEQ ID NO: 181973 - DNA, 427 bp, Homo sapiens
cctagtcaagctgctaataaagaaattgcttatgctaggtgactaaaaatgttctgtattgttaaactggtattatgtccatgctgaggttggaattatgatgtttaagtggcctgctattctgaatggactttttccaataaagaaaaatgtacttaaggataagcaaaaaagtatgtaaggtgaacccaccggaaggaataactaggccatcattctcagctgcctgctgtctgtcgttgtgtgcagagctacagggrtgatgcccacctcccaggtgacagccacccctcccaggtccatccagtgacggagttgcctggctcctggataggagcgaaatggcccctgatcatccctctgactgtgttcttagagtagaatgtcctttaataagtccctggtatttgtcagtaacactgaaata

SEQ ID NO: 181974 - DNA, 588 bp, Homo sapiens
cgcgtacctccgcgtcacccacggcctctctgcagtgcgtccctgcgcccgtcggagcggcgccctggccgaagcctgtcactctcggaaggggccgcgctcggacaccaggggcggtttacgcgtgactggacaccaagagccggagaagtttagagactaggacactgtggcgtggcccgagttgcaggagagaggtgtccaatctccatggggtccttactcttgcaggacagagttccccatccccctgctccacccgctctgttcccttggctgccctccccgccgagcgccgacttccatgcaaaaactttgtaaatcgcacttcggggaattcacgctttagtcgcggtctctgctgccctggtcagctataacgcctcccctagagagcttttacttacagcgaaggtcaggaacccctgtaactctcacaccgcaccactgtgggtaagcgatgtctgcagggacccctgacggccactgggaggccaggagagaagagggagaggaarggctaaaaaggcaagtggagtgttgggtaataaaagatccaccgccacctccagcacacacaggcaggca

SEQ ID NO: 181975 - DNA, 571 bp, Homo sapiens
ttcgtcatgttggccaggctggtctcgaactcctgacctcacgtgatccgctcgcctcggcctcccaaagtgctgggattacaggcataagccactgcacccagccagaagtggcttttgaaagagatcttgaaaggttagtagaattcggatgggctgagaaaataggaggtggtccccaagaagtaactgaagcagagattgggaaatcctaggcaagtcctgatccaaaggacaggatccaaaatgaccagaacatgtgggacatttaaaaggaaaggcaagactttaaaagtgttctgagtctagaaatgggggactttgaatgccagaaaaaaaattattatgccagaaaaaaatttattatatgaattttagtrgggtgcaaatctgtggatgtgagcagacactgttagtcgcttaatcaacattctttctttcttgctggaagagccctaagtttgctcaaagcccatctccacgaggccctaaaagagagaatcaacactgccccagctctgagtagggctagggaaataaattatgattggtttaagccaacaggaaaaac

SEQ ID NO: 181976 - DNA, 277 bp, Homo sapiens
cagccaaggaaatccaaatagcctagttgccctgaaaacatttgggaaatcgttgtacttgcttctgttttggttttcccaacaacgttctgatatttgctgggctttacctgttgcagatcttgctacctggggagaatatactggtccccaacatgttaattcctattgcaaaagaggagytggtgctgtagtcatacccagcactttgggcttggttaatgtgagtctctccgagggatgaccctgccctcggtgagagtgcaaggccagtgcc

SEQ ID NO: 181977 - DNA, 367 bp, Homo sapiens
gcatgctactgcatctagctaattttaaaattgtttttgtagagatgggtcttgctatgttgcccaggctgctttcaaactcttggtctgaagcaaaccttccactttggcctcccaaagtgctgacattataggcatgagacrccatacccaggcatgaaactgcttttcaaatggtcatgcttttgttctcaaactctatgggcttacactgtgattctcctattaaaccttttcagaggttccacacagcacccctacttgtcacaaacactatgaattctattgaatgtgttagaataattgcagatctctctcttgcttcgatcctgagatgagtgttgagtaccaaatggctccaagccag

SEQ ID NO: 181978 - DNA, 582 bp, Homo sapiens
gatgatttacggtggtgattctcaaactattacaaggtgttccacagctaaaatttaataatagtgtccttttccaattttcaatggtttaatttattttgtttaatgccttagtaccaaacttaaaataccaaattattgacttatatacatgtcagtgaattatttacatgtccaataggatcaagaagaaacaaaagagagaactttgagccataattaggaactcattctctatatcaagaatgtcttccttcactctcatcagaactcatactaatgtagcagcttcttaaataaaagtatttgttctgataaatcacaagtttcaaggtgttagatttcctgtatycaaaataagtaattatcaaacattaatcaaatagctgtacccaatagtgtatagcataaaaaattaaaacaatgattgctctcaaagaaatgccatctaataggagaaataaatcaagctaatggaaataacaaaaatatgatagtgtataaataatgcagggagtcaaagaaaacatatttaaaagtaagatgaagccataaaataaggcctaatacaagaggaacatt

SEQ ID NO: 181979 - DNA, 582 bp, Homo sapiens
gatgatttacggtggtgattctcaaactattacaaggtgttccacagctaaaatttaataatagtgtccttttccaattttcaatggtttaatttattttgtttaatgccttagtaccaaacttaaaataccaaattattgacttatatacatgtcagtgaattatttacatgtccaataggatcaagaagaaacaaaagagagaactttgagccataattaggaactcattctctatatcaagaatgtcttccttcactctcatcagaactcatactaatgtagcagcttcttaaataaaagtatttgttctgataaatcacaagtttcaaggtgttagatttcctgtatccaaaataaktaattatcaaacattaatcaaatagctgtacccaatagtgtatagcataaaaaattaaaacaatgattgctctcaaagaaatgccatctaataggagaaataaatcaagctaatggaaataacaaaaatatgatagtgtataaataatgcagggagtcaaagaaaacatatttaaaagtaagatgaagccataaaataaggcctaatacaagaggaacatt

SEQ ID NO: 181980 - DNA, 533 bp, Homo sapiens
ccaatcctttctctactagattttatggtatatgtatgtcttatttatacacagaaacatgccttcttttgtccttgcctaacctggaatatcacttgaagaaggccttaaaatgttattaaaaattaatttccaactatgactttcaacacytctaaattccacacagcaacttagagtcagttttcataaatgttaaattagaatttcaacacataatttaaaaggaactgtacaagaatgtaagtttaaataagcttggaatgtcaggggaggtggcagagcaggaagcaccagggatctgtctcttgagagagacagtgattgtactggcagaatctgtctgataaaactatttgggaattctatactccactcaaaggcttgcagtttccaggggaaggtgtggttaattttgatcaatttcagcctagtgcagcagcaactatgcatcgtcccacccccagctctgtggcaggcagctgtgttagggtacctagagtggcttttaggatatggagtgggcaataagg

SEQ ID NO: 181981 - DNA, 533 bp, Homo sapiens
ccaatcctttctctactagattttatggtatatgtatgtcttatttatacacagaaacatgccttcttttgtccttgcctaacctggaatatcacttgaagaaggccttaaaatgttattaaaaattaatttccaactatgactttcaacacttctaaattccacacagcaacttagagtcagttttcataaatgttaaattagaatttcaacacataatttaaaaggaactgtacaagaatgtaagtttaaataagcttggaatgtcaggggaggtggcagagcaggaagcaccagggatctgtctcttgagagagacagygattgtactggcagaatctgtctgataaaactatttgggaattctatactccactcaaaggcttgcagtttccaggggaaggtgtggttaattttgatcaatttcagcctagtgcagcagcaactatgcatcgtcccacccccagctctgtggcaggcagctgtgttagggtacctagagtggcttttaggatatggagtgggcaataagg

SEQ ID NO: 181982 - DNA, 532 bp, Homo sapiens
tctctcttgcttcgatcctgagatgagtgttgagtaccaaatggctccaagccaggctgaaacatgacctagacacagatgctggaattttcctagcatgctttaragaaacgagtatggtggctgtactagtcagttctcacactgctataaagaaatgcccaagactgggtaatttataaaagaagtttaattgactcacagctcaacatgcctggggaggcctcaggaaacttacattcatggcggaaggggaagcaggcatgtcttacaaggtggcaggagagagagagcaagcatgagcgcaagaggaactgtcaaacacctataaaaccatcagatgtggtgagaacatactcatcatgagaacagcatgggggaaactgccccccatgatccaatcatctcctgccaggtccctcccttgacacacagggattatgggaatcacaatttgagatgaggtttgggtggggaaacagagccgaaccatatccctggcttaatgagatgggaatgctggagggaattc

SEQ ID NO: 181983 - DNA, 532 bp, Homo sapiens
tctctcttgcttcgatcctgagatgagtgttgagtaccaaatggctccaagccaggctgaaacatgacctagacacagatgctggaattttcctagcatgctttaaagaaacgagtatggtggctgtactagtcagttctcacactgctataaagaaatgcccaagactgggtaatttataaaagaagtttaattgactcacagctcaacatgcctgggkaggcctcaggaaacttacattcatggcggaaggggaagcaggcatgtcttacaaggtggcaggagagagagagcaagcatgagcgcaagaggaactgtcaaacacctataaaaccatcagatgtggtgagaacatactcatcatgagaacagcatgggggaaactgccccccatgatccaatcatctcctgccaggtccctcccttgacacacagggattatgggaatcacaatttgagatgaggtttgggtggggaaacagagccgaaccatatccctggcttaatgagatgggaatgctggagggaattc

SEQ ID NO: 181984 - DNA, 527 bp, Homo sapiens
ttaactacagccaattgaattatgagtgtttagatgttcacattctcgttcattgattaaaaacttgatttcaacatttcaacttgatttcaactgtgcctagctgtgcagctaacatctcaaattatctcttattatttttaagttgtggtaaatatatgcaacataaaatttaccacattgaccattttaagtgtacatttcagtggcattaagtatattcacaatgttgtacagccttcaccatcatccatctcgagaatcttttcattatcctacacagaaaatgtaccattaaataagtagctcctcattctctcctccttagtccctaataacctctgttctacttttgtctctgtgtatttccctattccatgtacctcctgtaagttaaatcatacaatattttccccttagtgtctgtttatttcacttagcataatgttttcagggttcattcatatagtagcaggtatcacaatttcatttctttyatggctgaataatattccattatgtctata

SEQ ID NO: 181985 - DNA, 443 bp, Homo sapiens
ttgaacatggatgtattttgcctgtaaataaattaattcaagtatgtcaaaatcttcatatagaatgagattaaaagaaatatgacatsagtaaaaaaataatttctccaactcaccagagtggcctaagtgaaagagacagagcataaagtgttggcaagaatgcaggacaactggaattctcatacgctgctggcaggagtacaaattggtacagccactttgaaaaaaatgcttgagtatctaaagctgaacttaggcatgaacatacagtgttcacaatagcactcttcacaatagtctcaacctggaaccaatgcaaatatccatcaacagtaaattttttaatggggatatagtcacacactgaaatactatagtgcctctaaaaatgaatgagctacagttataggtagtaacagaaatacatctcacaaacataa

SEQ ID NO: 181986 - DNA, 382 bp, Homo sapiens
ctttttttctttctaaatcagattctacttttccttcatctatcatctgcctgcctgtacccttccttcatcacctctgccttaatgtgacaagtgtaaactttacaattagttattcttatgaaataaagttttatggtgcctgttcctaatttaacaaacaagggaactgagtatttttatttggtgagataaaaagacactaaattatttttggtatgtgcctcttgattaactctgccttgggcattagtcctcaacaggaaacttattccccacccwtaattccttaaattaagaaaccttcaggctgcaatccactgtgtgccatgaatcagcacctattggtgaaatgtgacaatacagtttacctcaaaataat

SEQ ID NO: 181987 - DNA, 444 bp, Homo sapiens
cagtctactttctcaccgttacaccattaaactgggcctgtcagagaagagctaagtgctgttggatctggtcgtaggcaggactccacgatggctcccaaagctccctggtccctggttattcaatcaaacrctaatcctggtactgctgtgaagggattttgcagatgtcattaaagtctcaaatctgttagccttcaaatgtagattatccaggtagggctgacctaattacaggagctttttaaaagcagagagttttctctggctagtcacagaaggagaagtcaaagagattcaaagcatgaaagtgattcaatgccaaggtttctccattaatgaaatggacgaggtcatgtggcaaggacccgcgaaatggcttgtaggaagtcccctgccaacagccagcgggacaatgcggatcttagtcctacaaatgtaagg

SEQ ID NO: 181988 - DNA, 333 bp, Homo sapiens
ggaaaggataagctgttctgagataactaattatccattgggaagtaaaaactataccagatgaattaaagaactaaatattttcaaaaacctaaaatttttgaagaatatattagatacattttggttggaaagatactttcaagcagacctaaaaagtacaaaccataaaagactgatatatcagtccatattagaatttaaaacttcttttcaacaaagacacyggagacaaagtaaaaagacaagtcacagattagtatttataacaaatataaatgacaaaagatcactatatagatagcagttatgtcaaaagataacgacaaacag

SEQ ID NO: 181989 - DNA, 557 bp, Homo sapiens
ttacctgcttttaagcagcaacagatgagtctttttggtactagatagggaagagtgaatgtcctgtgttgatatagaattgttttagttatctgtccctgtcttaatttctctgcatatttagtgtaattatcttcttgatctatgttgtcttaggatgcaagggggaatttgagcatccttcctgcaatctttccctcctatcagagtctcagaatccactcttctatttccatttgactaaatcataggcatctaagagggagccacctccgccccctactaactagcagaataagactgaccagtttccaactaatcaattacttgagttaccatgtcyggcagatttctactttgctgtatctctcaactctgttgccttgttcatttccagcaccactctgccagtccaggctttgatccgcacatagctggactaactgctcatctacctaatgtggctcattctccatagcactatcagattaattttcctaatgtggcacttgacccctcctactttctgcttaaagcactgccttctaaatagctaa

SEQ ID NO: 181990 - DNA, 568 bp, Homo sapiens
gccgctacgtaatagtgactcaatacatttgtttccttttacattctaagatttctcccacatgagaattgtggttctaatatttggaactctaacataaagggtttgaattgcaaggtgtctaatgatagagaagacttgcagttacctaatgatctgaagcagaatatgtaaacctgaattttttttggcaaagtttatcttttatgatttagtaaaagaatgggactatttacctgagcatttcagctttataaatgatcatttgataattgatgtatgataacaagcttttcagtttgtatttgttgtatagacttagtkgtattggcccctccctccatccccccaccaaaaaaaagaaaaaaaaaagaattctaaactcttgctagtgaacccagtatttatgatgatccaagtggatatacaccaaaggtcaagagggtagcttatttctgggcaaatactttcaggtcagtggatctcactgggggcattttggaaatctgtgggagcattattattgcaaagcgctgctaacatgtagtggtcagaacgcaagggtgca

SEQ ID NO: 181991 - DNA, 568 bp, Homo sapiens
gccgctacgtaatagtgactcaatacatttgtttccttttacattctaagatttctcccacatgagaattgtggttctaatatttggaactctaacataaagggtttgaattgcaaggtgtctaatgatagagaagacttgcagttacctaatgatctgaagcagaatatgtaaacctgaattttttttggcaaagtttatcttttatgatttagtaaaagaatgggactatttacctgagcatttcagctttataaatgatcatttgataattgatgtatgataacaagcttttcagtttgtatttgttgtatagacttagttgtattggcccctccctccatccccccaccaaaaaaaaraaaaaaaaaagaattctaaactcttgctagtgaacccagtatttatgatgatccaagtggatatacaccaaaggtcaagagggtagcttatttctgggcaaatactttcaggtcagtggatctcactgggggcattttggaaatctgtgggagcattattattgcaaagcgctgctaacatgtagtggtcagaacgcaagggtgca

SEQ ID NO: 181992 - DNA, 568 bp, Homo sapiens
gccgctacgtaatagtgactcaatacatttgtttccttttacattctaagatttctcccacatgagaattgtggttctaatatttggaactctaacataaagggtttgaattgcaaggtgtctaatgatagagaagacttgcagttacctaatgatctgaagcagaatatgtaaacctgaattttttttggcaaagtttatcttttatgatttagtaaaagaatgggactatttacctgagcatttcagctttataaatgatcatttgataattgatgtatgataacaagcttttcagtttgtatttgttgtatagacttagttgtattggcccctccctccatccccccaccaaaaaaaagaaaaaaaaaagaattctaaactcttgctagtgaacccagtatttatgatgatccaagtggatatacaccaaaggtcaagagggtagcttatttctgggcaaatactttcaggtcagtggatctcactgggggcattttggaaatctgtgggagcattattattgcaaagygctgctaacatgtagtggtcagaacgcaagggtgca

SEQ ID NO: 181993 - DNA, 608 bp, Homo sapiens
tgggaagaactggtgaaaatgctgcatgatggtaacaactacctgttaggctgacttaaaaagaaggatttagacatgttaataaacgatctacacttcggtaactattagtcatgcttgcccaagcaactcaasagtaaggaaaatatccattttactaaattacaagactaaagaactattaggataattatcccataacaaatgccagaaataagtggttatattgacttaattttatagacactttccaaagtatatattctagccttaccaaaaaaagggcagtaccattgctcagattttactaatccatgagcccctgggaagaaagccctaggtttatcctataatggcagctggccactttttctgtggacataaaagaaattcaatttctccggacacttttttcctctgctaccaatgagctccagggattggtaaactcctaaaggaaaactattaaaaaaaaaaaaaaaaaaacccataatccagaaaaaacaaaatctagctagttaaactatcaccaataagaaacataaacaggaaccattttcagttgcttggaatcaaaagctcaatttttaaaaagcttcaaaacaaga

SEQ ID NO: 181994 - DNA, 563 bp, Homo sapiens
ttagtgttcggttcgaacaaacctaaaagatattttgccctgagctttttcacataactttaaacctaaaattattttatgagaaatttaatccatatgtttctgattaatttgttaagagtcatttgatgtccaagggccttttaagtttttataagccttttaaagactttcacttagagatgttttaccaagagaaaatgaacttagttctcccatagttttagtaccaatctcaacaatgatgggactctgctgaaactatacttcttgctgctctaaactgatcatctacagctccaggtgtaattaactcatcccttattccttttctcaaggctcctagtgagatattgcttatctcataaatgggatgatggttaagtyacattaccaaatacgtatctcacaatttagcctacatccacaccagagagactcttgcagctgagttgaataactgattccataaagcattaagatcaatcgctatagaaaagctcaagatttttttctttaccaaataagattatttctctattgacaatctggcttctactctc

SEQ ID NO: 181995 - DNA, 551 bp, Homo sapiens
ggggtggggggttggagaatggagctggaacacgaaagtaccaaataacagccaatatttgttgggtgcttacgatgargcaggcatgcttctaagcgctcctgtgcattaatttatctaattctcaggagagtggtgttatcagttccatttcacagatgaggaaaactgagatgcaaaaagattaagcatcctccccaagatccacagtgaataagtggcagagttgggatattttatccaggcagtatggcatcagaggttatttagttcaatactacactatgaggccaaacagaagaccctcccttaaacaatgcaccatggggccagatgaatccattgtgaccccatcagcttaggcgtacctccagcaacagtggaggtacatctaagagcatggggccagtgtttgaaaagatacaggcactgggacctgtggagcaaacccaatgacatctcttttttaaatgtattttattgtcttaaaatgaattaagtgtacaatacattattgttgactataggtacaatgttgtacaacagatctg

SEQ ID NO: 181996 - DNA, 551 bp, Homo sapiens
ggggtggggggttggagaatggagctggaacacgaaagtaccaaataacagccaatatttgttgggtgcttacgatgaggcargcatgcttctaagcgctcctgtgcattaatttatctaattctcaggagagtggtgttatcagttccatttcacagatgaggaaaactgagatgcaaaaagattaagcatcctccccaagatccacagtgaataagtggcagagttgggatattttatccaggcagtatggcatcagaggttatttagttcaatactacactatgaggccaaacagaagaccctcccttaaacaatgcaccatggggccagatgaatccattgtgaccccatcagcttaggcgtacctccagcaacagtggaggtacatctaagagcatggggccagtgtttgaaaagatacaggcactgggacctgtggagcaaacccaatgacatctcttttttaaatgtattttattgtcttaaaatgaattaagtgtacaatacattattgttgactataggtacaatgttgtacaacagatctg

SEQ ID NO: 181997 - DNA, 507 bp, Homo sapiens
ctggattactatggggttccaaccagtagcagtggaggagagcatggaggagatccttttattgccctgaggcccacaccgagaaatgccacacagtatatctgctctgaatgtggtcacaggaacacatctaatgcaaagtaggctgtgaaatgaagtctcgttacaggcctagaaagaaagagaaaacaattttggtagacaaagaacagtctccatgccagacacacagtgcccaataaatgatggctattattattaaccaggatgtatacttcaccagcttagagtacaaatagtgtttcacttatttttctagtgacttgmtgaggcccaaggaccttaccaacagaaaatctggtattcctttcttggggcctttcccaatactctatctccagacgatccaacattctagggcctttctcacttctaaagggtcaattacacttccaaatgccaggtgggagaaataactagaaagttctatgaacccaccagcaccat

SEQ ID NO: 181998 - DNA, 382 bp, Homo sapiens
ctttgcagtttcagaaattcagtgttgtcagctacctcagaaagtattcacacttcaggagacaggttcacattgytttccactcatcaaacccaaagggactgatttataaatcacaataccaatttccaactctttttgtgagagaatatctggcaagcttggcagtcttggccttttgcctagaacgcttcatgttggtggaaataactactccttggacaaaagcatataattactttaaaaattatagtcacaagcttattgacatttaaggataccaggaagtagtgtgatgtactaatgaaaagtttatttcaaactactacagctggaagaaatgttcttatctactctagagacatttctttatttagaattc

SEQ ID NO: 181999 - DNA, 487 bp, Homo sapiens
tcctatgctaagatggggttacattttaatcatccttgaactgccttctaaagctagtgaatggggaatattgattcacttaagccaattcaggttactgctggcttggatatagaaccattctcacccaaatcgtgtagattgagaatgaggtttgtaatgcaaacaaacaaacaacaaaacaaagaaaaaccctgaaagtacmctttaattgaagaaatataatcagaactagagtagcaaacaaaacaacatgtatccattccatgtatagattccagatctcaagatccctttcagttcctatcaaagaacagcttgaatatccaccctcaactttctagcactttggcctgttttgaagagcggtaaaggattaacctgaattcctttctgtctcccaatgtaatgctgtaagaaaccaattaatcctagaactccagtagaggtttttggtttttttttttttttttttttttaatagatt

SEQ ID NO: 182000 - DNA, 603 bp, Homo sapiens
gtgtcaacataatgatgcagggtctgacacataataaacaatcaatgagcaatattagtactattaattcattaataataaattaaattaataaatagcattgtaactattattaatattaagggccaggcattttgccatcctttgagagaaaaattattaagccagatattacctgtccttaatgaagctcattctcaatgaaatcaatatggctgactttaacaaaaagatagacatttaatataaagataactagggcattttctctactcattttacttttttcccttcttttataaacaaatgaaccaaaaaaacataaaaagaaattataaaactatatgtttaacatctttgaccaagaaattgtataggctgcacccctgtacagtgtaaagataaatattttactcttttcttgtggacattttcagaactgttgagatagattttttgtwtgaatatattttgcaaatttgattttgttgaaatatagtcttttatctataaaaattcatatttctcagctcttaatgtatcattcattctttcttcctatttggactttggccaaattatactcaaataaccatgagataa

SEQ ID NO: 182001 - DNA, 613 bp, Homo sapiens
tcttatctattttggaatatcatagtatgtaaaataaatgataatgatcctatttacatgaggctttttgattaatggttattactagttgggttccagcatcatttaactgtaaagaatttttaacaactaacaactgagaagtaaaatgtagttacttattcagaataactgatatttaagaaacatttaaacaacmttcttactaaataaaaaataggtcaagcgcggtggctcatgcctgtaatcccagcactttgagaggctgaggtgggcagaccgcaaggtcgagagatagagaccctcctggccaacatggtgaaaccccgtctctactgaaaatacaaaaattagctgggcattgtggcacatgcctgtggtcccagctactcgggaggttgaggcaggagaactgcttgaacctggtaggtggaggttgcagtgagccgagatcacgccactgtactccagcctagtgacagagtgagactccgcctcaaataaataaataaataaataagtaagtaaaataaaataaaatagaagaatgggaacatgaaaagaagaaaaaatgttctgatcctaatttggatcaagctatgacatagttagg

SEQ ID NO: 182002 - DNA, 589 bp, Homo sapiens
cttgtaagagtaccccctgggaatggcatctacatcaattttactgtccttcaaacagaaccaatatatgatttcattactgtatggtaagtcaggactattgttattgatttattcaattatatacacagtaaaacaaggttggaataaaaatatatcacaatcctctgttacaaattgtcatctgatatttgaattgatgtgagtaactgagggtgacagtatgtgtcttgtagaattacatacacaagagaaataggttttggcttatttgccccatgaactaggtaagcattgtggaacaaagacttcataggtgaaaacaagattaaaaaatattattaaattaatgtgctaaaacaggaagttaacagacttaagtttaaggtatggaagttctctacttacaaaagccagtggaatttaagaaattataattatttaatataactagtggatttctgccataaaaatttarttgtattaaagtcttgtcaattgaaacatctttatttaaaaatatattaaggccaggtgcagtggctaacatctgcaatcccagcactttgggaggccacagtgggagcat

SEQ ID NO: 182003 - DNA, 535 bp, Homo sapiens
agacagtgaaatgtctctgggataaaaaatgttaattaaagtatatttgcttaattaatttaacactcaattttagtaaatttgatgtttttcttactattatcactctctaaattatttgtaataaaatctgatatttggtgaaagttttaagttatttatatttgctacacattatatatattacctgccttaagtgatttatatatgctaacttatttaattctcaccatttcatgagaacaaggaaagtgagtcgcagagaagtaagacacatgtaaagtttacacaatgacccagtaggcttgaactgcaaaccgaggcattcagactcttaagcttatgatattaataactacactggggctctgagtaaacgcgcatcatgttactaaatgattttttaaacagtcccttggacaaawaagctttggaaatatttaaaacagggtttaaaatattaaacaactttctaaaaaattagattaactttttagaactttggacatgcaaccttaatatgtgaagaccgaag

SEQ ID NO: 182004 - DNA, 433 bp, Homo sapiens
aggtccctctaggatttgccattagtgagattttaacatgtgtctctacaaatttaaagaaatgagatggaaaggacatattcatattacaatcaggcaaagagtctaatccaagactattaatgctgaggcttcactaaaatccaagtggcaggrcaactggaaagtacaagttctcttagtggaagcctaccaacaatcaatatatttaatgatattccatgagctaggatcattttccctagcaataaaaatgattatgcatgatataaaattacaaacaggagcaaatatatttgaaaaaacaaacacaccagaaagcaaaaattgtcagtttaagaattgattcccatattccagtgctaatgtggatcaggaaaaagaaaacttgaatacttcatgtgagaaaaatttggggtaaattctatgaatt

SEQ ID NO: 182005 - DNA, 479 bp, Homo sapiens
tatttccctctctttcctgctgaatgaaatgcagatgtagtagccagaatttgagcagtcgttttgatcatgaggtggaagcaatgtgcagaagatgatggggaaaaaaaggaatttcaacagatttttgggagagaaaaatcagatgatacaactggtttagaagggggaagaaatttacaatccatggtgcctgtagagattgaggctaatgggaagagagtgttctgccttgcagaacttgtgaaatgctcaggaatttgaggcagtacatacagtggtcagctggattaatgagggctggctggagactgtggaacagtcagactctagaacaccttcaccctccacactcaggcaagtcactcctccaggtcctccaaccactgcccctayagatgagatgagtattattcactggagaagctaagcaggagaactgctggatgttgggaaaccaactgaattgcagggtaggg

SEQ ID NO: 182006 - DNA, 589 bp, Homo sapiens
aagtgcctgctgcaggactggggctgtcccaggcaaaggttcctcctcggtgcaagcaggaaaggcattggaagacctgaaagaaaatgagtatgtctggaatgcagtacccagaaagggtagcctggggaaagaggcagggagactgagaaggccttgatgagaaccagagccaggaggtggacrtaatttaccctcagccaagggaagagtcatcaaaggggttgaagcacaagaatgacacggccacacctgtgtcaggatgaatcaggtggggtatggagaatatattctctgtgaaaacatccaggaaaatgccactgtcatgtctcaggtctgtcttatcttaggttacccaaatgacttgctttatatttttgctttgtcttgtctttgtttgtaacttaaatccattaaaacagttgcagccgctgcatcactaggtggtataaccacatgcagtatcatgtcagggccacagtaacagaggcccacaggccgagtaccttaaacagcagaaatctagtttctcacagtcctgggggctggaagtctgagatcaagctattggcagggttggtttcttctg

SEQ ID NO: 182007 - DNA, 433 bp, Homo sapiens
tctattaggagacactgaagtccctgataacaactgaggatttttccatttctcttttcagatcgttcagttttggcttcatgttgtttggtgcagacacatttagattgtcatatttttttggtgaagtaacccttttatcattatgtaatgcccctctttatccttggtaacttttattggtctgaaggctacttggtcagacattaatacagacactcctgctttctttctatcagtatttgcaagttgtatattttctacccttttacttttatcctgtataggctgttgaatagctgttgaaatgtagaacyttaccaccatttgggtccctttatccacctcccttcttatgacatgtctaaatattacctctatatacattaagtcccatatcagacagtattatattttttgctttctaccttca

SEQ ID NO: 182008 - DNA, 581 bp, Homo sapiens
aactaacacaggaacagaaaaccaaataccgcgtgttctcacttataagtggggaagctaaatgctgagaacacatggacacatggtgcggaacaaaacaccctgggtcctgttggaggacagggggtggggagatggagagaatcaggaagaatagctagtggatgctgggcttaatactggggggatgggctgatctgtgcagcaaaccatcatggcacacgtttacctgtgtaacaaacctgcacatcctgcacatgtacccctgaacttgaaaaagaaaaaaaattgcctttataaaaatcataaaatatatagaattgaatgacaagaacactrcatataaaaacatatgaaaacacagcgtacagaaaattatagcattagataaatatattagaaaagaaaaaagattaaaagctcataagcgttcaactcaagaggttacttttggaaaaaagagttaaaccaaaatcaagtaaggaaataagaaagaaacgaggagatattggcaaattagacaaccaaaaatatctgtgagaattaacaaaagcagaagctaattttggggaaaaaagtaa

SEQ ID NO: 182009 - DNA, 596 bp, Homo sapiens
gccaccataataaagcaagtagtgctaataaacccagtcgcacaagtaagttttggttaccagtgcatataaaagataggtttatataaaactgtagtatattgagtgtgccatagcattatgtctaaaaaatgatatactttaattttaaaatattttattgctaaaaaatgctaatcatctgagcctttggtgaatcataatctttttgctggtagagggtcttacctcaatttaacagctgctgatcgatcaggatggtagttactgaaggttagggtggctgtggcaattttctaaaataagatagcaatgaagtttgatacactgattgactctttcacaaagattttttccatggcatatgatgctgtttgataacatcttgccacagtagaccttttttcaaaattggagtcaatcttctcaaactctgccattgctttatcaactaagtttatgtaatattctaaatcctttgttgtcttttaataatgatcacagcatcttcaccaggaasagattccatatgaagaaatcacttgctttgctcattcataagaagcaactcctcatccattcaatccattcaagtt

SEQ ID NO: 182010 - DNA, 601 bp, Homo sapiens
tgtagcctgggccacatctcaaaagaaaaagaaaaagaaagtagacaaactaagatagaaaggaaagaagagacttttcagaaaatctattttttaagctcttgattcataaagtacaaaatgatactggtcaaayaattgcttcagaagtctaaccctaaagaaaatcgtatcaccttctgtaagaaatctgtaagattgccaaagtaaacagtatgttctcactgcccagaaaggccccacctgtcacctttctggcagaagagtgaagggaagtaaaaggtgaaagtgcacaaggaagttgcaacctcagtgaaccacaaaaccatccccacaggcaggcagttgatatatgaaaattccattgctatttggtcatttttaagaataattttcttaactgtttttacttaaattttttcaaaatcagttataaactttccttatgggccgggcaccatggcttatgcctataatcccagtactttgggaggccaaggcaggaggattgtgtcagctcaggagtttgagaccagcctgggtaatatagtaggacctctgtctcttcaaaaaaaaaaaataacataattagctagcatca

SEQ ID NO: 182011 - DNA, 601 bp, Homo sapiens
tgtagcctgggccacatctcaaaagaaaaagaaaaagaaagtagacaaactaagatagaaaggaaagaagagacttttcagaaaatctattttttaagctcttgattcataaagtacaaaatgatactggtcaaataattgcttcagaagtctaaccctaaagaaaatcgtatcaccttctgtaagaaatctgtaagattgccaaagtaaacagtatgttctcactgcccagaaaggccccacctgtcacctttctggcagaagagtgaagggaagtaaaaggtgaaagtgcacaaggaagttgcaacctcagtgaaccacraaaccatccccacaggcaggcagttgatatatgaaaattccattgctatttggtcatttttaagaataattttcttaactgtttttacttaaattttttcaaaatcagttataaactttccttatgggccgggcaccatggcttatgcctataatcccagtactttgggaggccaaggcaggaggattgtgtcagctcaggagtttgagaccagcctgggtaatatagtaggacctctgtctcttcaaaaaaaaaaaataacataattagctagcatca

SEQ ID NO: 182012 - DNA, 489 bp, Homo sapiens
gtttgggccaaacttgatagagaatagtccaggaagacatttactataaacagtagattaaatgttcttgcctggttaattacatttgaactctgttaatgactgaatcactcaaactgcttaattgtattattagatgcacatttaagttatgtattacatgtctttagtggtgatcagaattttatcagttcctctgtctttctttataccaagtatgaytcataaacccagtattaatttgccaagagattggcatactatttgtatatatgcttttctttcaaataatctggattcccaatgcccacaatcattgatcctaaagaaaatgtgagagtaggtagataaactcaaacatccctaccatcacccctggtaggaaatcactggtgtaatgtatgatattaacatctgcaccaattactcttataggtggaacaatccaaagttttaatcagagaaggtggtgttcagttgctgcttaca

SEQ ID NO: 182013 - DNA, 562 bp, Homo sapiens
ccagatcttgctagaactcactcactatcacaaggacagcaccaagacattcaagagggatctgccctcatgacccaaacatttcccactaggtcccactcccaacattggagattgtatttcaacatgagatttggaggggacaaacatcctaactatatcactgttattgtgctcatagtttaaagagatgagtaattctgcaagccttgttacaaaaatattgctttaccctgcatccttctttcctcagaggcaacaattttcaaatacttacactgcttttttggtatttatcttcctatttctaaataacatgcttatattgttatttcttggtatttcagtgttagacattatctattgacttcctaccatgaaagatraagattgaattttctttcaccactgcccccgccaccacaccactaccatatctatgtacactttccattggcccactctattctggttggagcacaattccaagttttcattataataaccactatttgcagatgaactgtgtagtatattgtgattatttattctttcttgcaca

SEQ ID NO: 182014 - DNA, 588 bp, Homo sapiens
ccttggtagaagatagtgaaggatgcttcctatcaatggagtgaaatgtttgatggtatttgcactctgaggtgcagagatgtttggagaaatctgttagtggcaggatgggaggaattggccttgagagctagaaactctgaggtcaagttttattgtgatatacctaggtatgattttttttttattatactttaagttttagggtacatgtgcacaatgtgcagtttagttacatatgtatacatgtgccatgttggtgtgcygcacccattaactcgttatttaacattaggtatatctcctaatgttatccctcccccctccccctcccccacaacaggccctggtgtgtgatgttccccttcctgtgtccatgtgttctcattgttcaattcccacctatgagtgagaactaatcatgcatggagtttatagcactttgaatctgtggcttgatatatttgtttgtttttgaaagttcttactgttttggagggggcaatctcaaagaaaattgcaataacaatacaaggaactatttttctctgaaatgtttgttgataagtggctgatataatgccctgt

SEQ ID NO: 182015 - DNA, 594 bp, Homo sapiens
tggagtctcactgtgttgtccaggctggagtgcagtggcacaatcctggctcactgtcatctccaaccgcagggttcaagtgattctcctgcctcagcctcccaagtagctgggattacagacatgtgccaccacacctggctaattttgtatttttagtagagacagggtttcaccgtgttggccaggctggtcttgaactcctaactttaggtgatccaccctccttggcctcccaaagtgctgggattacaggtgtgagccaccatgcccgacctaaaattcctacttcyaaagaccccaatctggatgacatctatgggcccttaacctcgtaagaactgagggttaatcaaccaaaccattctgtcaccaaaatctcaaacaacctggcatcccacatattcctcccactgcatttatctagcttgctcccaactctggatcaatcttataatccatcttcccttctcctttacttatttaggctgctgagcacagccagagaaacaatcttgcagaatcgtatcaggacaaattcacagcccttcacattttctagactctcagcataatatgatgatcattgttaat

SEQ ID NO: 182016 - DNA, 559 bp, Homo sapiens
cacccagtcctaaaccttctctgactgcyacctcctgtcactttcttctcctctcttccctgcctccattcttttcaacatatttatgactccactttgtgctaggcattgtgttagatcctggatatacaaagacttgtgatccaaggtgggtcctgccctaggaactcaaagactagaagagacatagacatgtacagttggttcttatgacttgtattatattccatacagtcaccatgaacactgaattagcaaatactagaccattgttcctaggggaaatgggaaatacaaaattaggttcctgagagcctctgatcataatactttttttttttttttgagatggagtctcgctctgttgcccaggctagagtacagtgatgatatggctccgatgagtgaaaaaacaccagggctcttggtcctcatgccagtttagataaaatgacacggacacacatggagtggttttaaggaacggagggtttaataggcaagaaggaagggagaagaaagaaggcagaagctctcttgtacagagacggagggaggg

SEQ ID NO: 182017 - DNA, 629 bp, Homo sapiens
ttttctgagttcatgaaaatctccttcccactggagacctccaatctccagtttcctgaagtagttaatgaatacttaagctgatgtctcacgatctgctcactaccaccacttcccacctcatacaatatatttctagaatatttatgcaaaaattaccacaactcaacaagcagacttctcaggtatgacccttttgcagtatatttttgttataggagttattaagaaattattttaggcagatagagatgaaaaggcgtccttgggaagtttttgtttcttttaaagcagctccagaaatgtttcttgtctaacaggaaagccccggctcttagagcctgcaggcaagctttaatatgcaaataaaggccattagaaactgggtccacyaaacatggtgatttcccttgtcttcctcttgtccccacatgtgcctggcaacatggctgccctcacatatccccacaactggtctctagcacagtcagaacacacacaacatttattgataaagttcaccatcttatacggacatagctcatgttgccccaagataatgacaataataacatcaaagagaactgatcacagattactattacagatataataatgaaaaagtttga

SEQ ID NO: 182018 - DNA, 433 bp, Homo sapiens
ccagtaaaggaagatgcaaataaatccaaaattaatgtacatacataagtaaaatacaaagtaatataaaacttatcacactaccaaagaggcataattttccagttgatttaggactgaacacatgcatgtaactactyttttttttaaaacctccccaaaaaattttgaatggaatagaaaaaaaaattacaaagtctaaactgcagaggacaaaatagaatgccaaaggagatgataataatatctggggagttggctcgctgatagacaagtggtaattgcctttctcaaaaaaaaaaaaaaaaaaaaaaaaaagtaaaccaaatcctaatctcccaatggcaaaaaaataaaaagccagctgctttaccctgctaatcacctgaccatgaaaagagccaaattctgtaaaatatttgaagagtaaatt

SEQ ID NO: 182019 - DNA, 433 bp, Homo sapiens
ccagtaaaggaagatgcaaataaatccaaaattaatgtacatacataagtaaaatacaaagtaatataaaacttatcacactaccaaagaggcataattttccagttgatttaggactgaacacatgcatgtaactacttttttttttaaaacctccccaaaaaattytgaatggaatagaaaaaaaaattacaaagtctaaactgcagaggacaaaatagaatgccaaaggagatgataataatatctggggagttggctcgctgatagacaagtggtaattgcctttctcaaaaaaaaaaaaaaaaaaaaaaaaaagtaaaccaaatcctaatctcccaatggcaaaaaaataaaaagccagctgctttaccctgctaatcacctgaccatgaaaagagccaaattctgtaaaatatttgaagagtaaatt

SEQ ID NO: 182020 - DNA, 667 bp, Homo sapiens
ccagtaaaggaagatgcaaataaatccaaaattaatgtacatacataagtaaaatacaaagtaatataaaacttatcacactaccaaagaggcataattttccagttgatttaggactgaacacatgcatgtaactacttttttttttaaaacctccccaaaaaattttgaatggaatagaaaaaaaaattacaaagtytaaactgcagaggacaaaatagaatgccaaaggagatgataataatatctggggagttggctcgctgatagacaagtggtaattgcctttctcaaaaaaaaaaaaaaaaaaaaaaaaaagtaaaccaaatcctaatctcccaatggcaaaaaaataaaaagccagctgctttaccctgctaatcacctgaccatgaaaagagccaaattctgtaaaatatttgaagagtaaatttttctgtaaaatattctgagccaaatatgagtggtcatgacccaaggcacagtctcaagaggtcctaagaacatgtgcccaaggtggttgggttgacaaaagacatcaatctacacatgtgaagtatccataggtttgggggagaggaggggacaggcgcacaggtgggaagtgtagtagtttataggtcataggattatagatggagtcaaagattttctgattggcaattta

SEQ ID NO: 182021 - DNA, 563 bp, Homo sapiens
atcaataaaaggatctgcatttcatgatacacaagtgcacctggaccctatgcagggagtggcactgctgcaccctggtcactgcctggctcctatgctatgtactcctcttcctgggacctatgtccaccttgaacttctaagtttctttccttaaaccttatgagccaayctgtgctagtttcacacttttcttttacatcttcctcacctctgtcaggcttcaaagaattgaagagaattggggccttgctctggtttaggctttggcttaatggaatgttggggctggtttgatcatctgaccagatcactcaaactttctccatatcagcaataaagcttgtattagtctgtttttagccactgatgaagacatacccaagactgggcaatttacaaaggaaagaagtttaatggagaactcatagttgcacatagctggggaagcctcatgacagtggcagaaggtaaggaggagagagtcacatcttatgtggatggcgacaggcaaagagatagcttgtgtagggaaactccccttttttaaaccatcagatctc

SEQ ID NO: 182022 - DNA, 463 bp, Homo sapiens
ttacaggattattcaagtcatttattttacattggaggagttgtggtactttgtactttttgaataatttgtctattttatctatgttgtcaaatttacatatgtatgttcatagtktttatttttcgtttgatgtctgcagagtctagagctatcttttcatttttgatatggttgaatatctgtaatccaaaaactcaaaatccaaaatgcgtcaaaatctgaaaatttttgagtactgacttgacactcaaaggaaatgcttattggagcattttggattttgcattttcagattaaggatgttgaactataagtgtaatgcaaatagttcaaactctgaaaaagtcccaaatccaaaacacttctggtcctaaggattttgaataagggatactaaaccagtactggtatattggaatgtcttctttctttttaagttttgctagaagttaatgaattc

SEQ ID NO: 182023 - DNA, 510 bp, Homo sapiens
attggtttttcttagtgattcatgaattaggcagcattccatctacaaaataggtgctccaattagcttgagaagagggatgggctttataggcaggaaaggctgaagaaagcagaaatagattacaaaaaatgaatttggtgtttcaaagctgctttccttatggggttaaagctgagggtacttccttattatgctggctcaggttgrctgggttccttttgattggttgctgtgagtttttcagaatctccatttctaggtttgatttgattatgtggcacctagcatgagggactccattctggtttggtttggcctgttgggcttagagcaggtgcccagtctaaaacaatgggctcccataaattttatgtaccatgtataaagtctgacatggtctgattatacttgcctctttttctgtgcgtgtctaatcaaattctacatttgttttagagacagaaccaaagtgggggtaactgagattgtgtgcctacttttgtggat

SEQ ID NO: 182024 - DNA, 534 bp, Homo sapiens
tgagaatctcttatctgaaatgcttgggaccagaaatgttttgaattttgggtattttggattttggaatacttgcatgagacttaccagttcagcatgccaagtctaaaaatctgaaatctgacatgctccagtgaacatttctttgagtgtcatgttggtgcttcaaaagtttatrattttacagcatttcagactttggagtctgttatttgggatgctcaacctgtatagggaatgaggaggaacaaggacaaaatccttgataaaagcatttgatagtcatcagaacttagagcattcgggaactacaaaagagatctctctcatatttttagttagccagggggtatacttgaagacttcaaaatcctttcaaaaataaacctcccctacctcctcatttaggcaagattgagaacataatggatttaggaatttcaaaagcagcaacaggtcctcacaggggatttacagacagtcagttttaaaaacatatgtctttgaaacattttttcatgggcatttgaattc

SEQ ID NO: 182025 - DNA, 558 bp, Homo sapiens
tgaattctaacaacaaatcctaataaataataggagttgagaatctcttatctgaaatgcttgggaccagaaatgttttgaattttgggtattttggattttggaatacttgcatgagacttaccagttcagcatgccaagtctaaaaatctgaaatctgacatgctccagtgaacatttctttgagtgtcatgttggtgcttcaaaagtttatgattttacagcrtttcagactttggagtctgttatttgggatgctcaacctgtatagggaatgaggaggaacaaggacaaaatccttgataaaagcatttgatagtcatcagaacttagagcattcgggaactacaaaagagatctctctcatatttttagttagccagggggtatacttgaagacttcaaaatcctttcaaaaataaacctcccctacctcctcatttaggcaagattgagaacataatggatttaggaatttcaaaagcagcaacaggtcctcacaggggatttacagacagtcagttttaaaaacatatgtctttgaaacattttttcatg

SEQ ID NO: 182026 - DNA, 534 bp, Homo sapiens
tgagaatctcttatctgaaatgcttgggaccagaaatgttttgaattttgggtattttggattttggaatacttgcatgagacttaccagttcagcatgccaagtctaaaaatctgaaatctgacatgctccagtgaacatttctttgagtgtcatgttggtgcttcaaaagtttatgattttacagcatttcagactttggagtctgttatttgggatgctcaacctgtatagggaatgaggaggaacaaggacaaaatccttgataaaagcatttgatagtcatcagaacttagagcattcgggaactacaaaagagatctctctcatatttttagttagccagggggtatacttgaagacttcaaaatcctttcaaaaataaacctcccctacmtcctcatttaggcaagattgagaacataatggatttaggaatttcaaaagcagcaacaggtcctcacaggggatttacagacagtcagttttaaaaacatatgtctttgaaacattttttcatgggcatttgaattc

SEQ ID NO: 182027 - DNA, 547 bp, Homo sapiens
ggaattccaagtggagaaattaaaataactgttcaagaccattaaagtcctgtatttttagcagaagaaaatgtgaaattattgctgtagggaaacttcacagcccagaggtcatgggactcccactgaaaaaacaacttcattgaagatgagctgacaatcagaattaaaaacccaccacaaagaaaatgatccaccatgagggagagtcaacaaatgcaataaacagaatcagcaccttcaaaactgcagagtgcattaatctgaaaagaacaatgaaataaaaagatttcgaagtatgaaagacataagagaataaatgaaaaccatactcaaagcattaatcagtgtagaaagtgatttgaaagaaggccacaaaagttctttaggtgaaaagtatagtcattgaaaaataaaagctcagtggcagagcaaaacacagatgaagcactgctgagggactggtgaacaggaagatggttccgaggatgcaaaagagaatgcagcacagaaagaaagasacgcagcagctgagagacatggagag

SEQ ID NO: 182028 - DNA, 490 bp, Homo sapiens
atatttaaaaagccatgaagtttactgaaagatatggaatatctaaataattcattctaatgtcttaaacttctaattgaaagatgccaaattaatatacgtaactagtgcaattccaattaaagccccaaagacgtttatggccaggcgcggtggctcatgcctgtaatctcaatactttgggaggctgaggcgggtggatcacttgaggtcaggagttcaagaccagcctggccaacatggcaaaaccctgtctctactaaaaatagaaaaaattagtggggtatggtggtgcacaccctgtagtcccaactgctggggaggctgacgcaggagaattgcttgaaccctggagagattcaaatgattgcagtgagccgagagagatcacaccactgcaatccagccygggtgtcctagtgaggctgtctcaaaaaccaaacaaacaaacaaaacaaaaaaacccaaaaggacgtttgtaagtggtgta

SEQ ID NO: 182029 - DNA, 602 bp, Homo sapiens
tttatgtatttcccttaagttctttcaatttaaagtatggctccmgttaatttacgtcaacatttaaaattaaaaagtctaaattttctgaatactgaaagccaacagatgtccttacaagaaataaaattattacacaccaaggatattttaattctaaactgtctgccgcaaaatatcaaaattaatttcacataatttaatttctgtactcataatccttttataatttttagtttacatattaataaaatcaaaatatcataatcaaaaaattacttcactgaacacataacttaattgaacattagcaatcagcctcgaggcactcttttcttaatttgtaagggcttaaatttaggataaaaataagagttaaaattttaatatttatcataacaaaattttgtgaaatctgtcaaatttgaagtaatctcttagaaaaaaagagttcaagcactctacgttttgaaaatctgtaatggcatagatatttccacctgttaggtggcggcattttgggtagggggttttctttcccaattctcattctgttctcacctcctattttctttcatacacagaatattatttttcaggaa

SEQ ID NO: 182030 - DNA, 503 bp, Homo sapiens
tgtaaccgatattcatcaactttctttccttctgggccatgaaatagcacatgcagtacttgggcatgctgtaagtacctaaaatgaatgttcargtttggaaaaactgctttgaagttaacaagttaaatcttttaaagaactgatttttttcaggttttttaaaaatgatagacttttagttttgggtaattgccttaatctgctacctgaaaaaaacgtgattggctaattttgagaatttttatggtctttagtatttgatactgaataatatttttcttaaatactatttttatcacctgtctcttttgctaaaacgtaattattctcaacccctaattatttcaaattaaattttaaactttctataattattaatatacttgtaatctagtcagaaaattaattgtagggaagtgatattactatttaagtgggtaaatcatctttcttttttattcattctcagaggatagcttggagcatctttgaaaatgtct

SEQ ID NO: 182031 - DNA, 503 bp, Homo sapiens
tgtaaccgatattcatcaactttctttccttctgggccatgaaatagcacatgcagtacttgggcatgctgtaagtacctaaaatgaatgttcaggtttggaaaaactgctttgaagttaacaagttaaatcttttaaagaactgatttttttcargttttttaaaaatgatagacttttagttttgggtaattgccttaatctgctacctgaaaaaaacgtgattggctaattttgagaatttttatggtctttagtatttgatactgaataatatttttcttaaatactatttttatcacctgtctcttttgctaaaacgtaattattctcaacccctaattatttcaaattaaattttaaactttctataattattaatatacttgtaatctagtcagaaaattaattgtagggaagtgatattactatttaagtgggtaaatcatctttcttttttattcattctcagaggatagcttggagcatctttgaaaatgtct

SEQ ID NO: 182032 - DNA, 503 bp, Homo sapiens
tgtaaccgatattcatcaactttctttccttctgggccatgaaatagcacatgcagtacttgggcatgctgtaagtacctaaaatgaatgttcaggtttggaaaaactgctttgaagttaacaagttaaatcttttaaagaactgatttttttcaggttttttaaaaatgatagacttttagttttgggtaattgccttaatctgctacctgaaaaaaacgtgattggctaattttgagaatttttatggtctttagtatttgatactgaataatatttttcttaaatactatttttatcacctgtctcttttgctaaaacrtaattattctcaacccctaattatttcaaattaaattttaaactttctataattattaatatacttgtaatctagtcagaaaattaattgtagggaagtgatattactatttaagtgggtaaatcatctttcttttttattcattctcagaggatagcttggagcatctttgaaaatgtct

SEQ ID NO: 182033 - DNA, 648 bp, Homo sapiens
cttgtacctctacagaaagaagctggtatccaatgattagttatccaatgactggtaactataggagtacaaatacctggagtccttgcctcaataggacaactcagtagagacatgccagctccagagatgctcatgggattggcgatggcctctgttcagcttttcctgtgtccaaacaatcctgcctccctcaccccagacaagtgttgttgccaagagtacttcccaaaaaactcttgcaaatctcaccagagtatcagagtctgtctgggaacctgaactatgaaactctactgttgatggtttatagattttttccatagtgatatgtgtcaatttgtttcattcatcttaatggcatcccattatataaacatactacagtttagttattcttccctttcgatgaaaatgtaggtcatttccaatatttgtgatgtcacaaactgtgctgctgttaatacgtttttgcatctctccatgagcatgtgtgtgagtttctctgagatgtatacctagagatggaactgcgaagccaaaaggtatctgcaactccaagtttaccragattgccaaatttctctttgaagttgtattattcatagacactcctgttacccttgcatcagaatgtcacttggtatc

SEQ ID NO: 182034 - DNA, 356 bp, Homo sapiens
ctccagcctgggtggcagagtgagactccggctcaaaaaaaaaaaaaaaaaaaagaatagatatatagctatgtaactaaatatctcagactaggtaccttggagacacgctctgagcctgagattgcatgcaggtttattgggaggtgctctcaggatatttaactctaaggaagtgaagagagcaggattggacagagggagaagctgaactgcaatataattgcaactgagccctcagcccatcctacagtggcccctgcagttgagaggaaccttcagagctgtccaaattgaggcagaaayggcagggtctttatatccgggcatcagccaggtggtgatccctcgccgtt

SEQ ID NO: 182035 - DNA, 185 bp, Homo sapiens
tgttagtctctcatttcaaatgaatttccacttatatcttgcctcatcaacacctcccctctccactctatgcataacaactatggcccctttcgtacctccccctattatctcctgtatctccttcatcaacttcattkcacttttccctatctgatgttatattacatatttcttctgttgtt

SEQ ID NO: 182036 - DNA, 486 bp, Homo sapiens
tgaaagcagttacaatcaatttggatttaaaacaacaaattttgcacttaaaatgtttgttcccattttttaaaaatggagtctttttataattttgttacttttccccccatcacgtaacagtatattgtgagtattttcccakgttagaaagtcctcaaggattataccataacgtatacagatccacaatcccttatccactgtcggggacaagggaagctccttttcactctctgaaggttccctgaaaaatcagcttacaaagcctgattaattggacaaaaggcatacaaatgtatttaacatatatacaatgagagccttcagaaagaatttggggcttggatcctggcaaaacagctataagaggagaagtcaatgggcttgaagaacatacaatgttctattgggcccacagagtgaaagatgatttgtgacaaaagtctgtccaggtttgttgacagactttggtcttccttcctg

SEQ ID NO: 182037 - DNA, 486 bp, Homo sapiens
tgaaagcagttacaatcaatttggatttaaaacaacaaattttgcacttaaaatgtttgttcccattttttaaaaatggagtctttttataattttgttacttttccccccatcacgtaacagtatattgtgagtattttcccaggttagaaagtcctcaaggattataccrtaacgtatacagatccacaatcccttatccactgtcggggacaagggaagctccttttcactctctgaaggttccctgaaaaatcagcttacaaagcctgattaattggacaaaaggcatacaaatgtatttaacatatatacaatgagagccttcagaaagaatttggggcttggatcctggcaaaacagctataagaggagaagtcaatgggcttgaagaacatacaatgttctattgggcccacagagtgaaagatgatttgtgacaaaagtctgtccaggtttgttgacagactttggtcttccttcctg

SEQ ID NO: 182038 - DNA, 486 bp, Homo sapiens
tgaaagcagttacaatcaatttggatttaaaacaacaaattttgcacttaaaatgtttgttcccattttttaaaaatggagtctttttataattttgttacttttccccccatcacgtaacagtatattgtgagtattttcccaggttagaaagtcctcaaggattataccataacgtatacagatccacaatcccttatccactgtcggggacaagggaagctccttttcactctctgaaggttccctgaaaaatcagcttacaaagcctgattaattggacaaaaggcatacaaatgtatttaacatatatacaatgagagccttcagaaagaatttggggcttggatcctggcaaaacagctataagaggagaagtcaatgggcttgaagaacatacaatgktctattgggcccacagagtgaaagatgatttgtgacaaaagtctgtccaggtttgttgacagactttggtcttccttcctg

SEQ ID NO: 182039 - DNA, 608 bp, Homo sapiens
cagccaagccagccgagtggatcatataaaagggacttcccaacttcatctgtaaatgtcatgtgagacactgcagataaagcagttagtatactttctatgcaagctaagtgggactggcttcaaaacggctgggatgttcacccactgaatatgcctgttcctcactgccttgctgcatttgggttgctgtaactgaataccttagactgggttgcttatgggcaactaacatttacttcccagagccaaatgcactgtgattctgaaaactgctagtgaagttttaatggtgactaaggttagattgggaagctatggtgatgcaatgattaatgagattagagaaaaaggttagataaaaattgtgagtttttgtcacatatcctttgcctgaacgtactattgaaatagatattatgtttcacttggtatttcttttcccacctaatactgtaaaatagaaagtgcgaaaatcctctctcagactagttttaattgaataagctatccrggaaccagtagaactgcctgagcccatagaaattgttaatttaaaactatatagaatacctagataccattttaattaatgatatgagtgatgg

SEQ ID NO: 182040 - DNA, 657 bp, Homo sapiens
gcaaattcaaggcaagaagggagaagctggatctctaatactttactggtggaaatgtaaaatggtacagacactctgagaaacaatttggcaatttcttatcagaataaacatgcaattaccatatgacccagaaattgcacccttaggcatctatcccagagaaataaacaaacacaatgttcatggcagctgtatttataatagcaaagaattggaatcmgttcagatgtccttcaacaggtgacatgattaagccatctttgttacatatatattatgaaatactaaacaataacaaggagcacaggaacacatgcagagatctaaatatatatttgtatttgtgcattatatatgtaatttaactttgccaataaattaaatttataataaaaataaaaatataataaaaatagttgagaaagaaaagtaagtgacatgcaattagtataaaaagttaaatgtgatctaatggaaaaatggcttcaactagattaatcacaaaagtcattataatagaattaggtgttgagataggacttaaaaaatggaaacaaaaatcagagaacagacattgagtcttaatgaatttgttttcccaggatcactttgcccagtaattgaaggcttacaattttctccttttttaattga

SEQ ID NO: 182041 - DNA, 543 bp, Homo sapiens
gcacaggaacacatgcagagatctaaatatatatttgtatttgtgcattatatatgtaatttaactttgccaataaattaaatttataataaaaataaaaatataataaaaatagttgagaaagaaaagtaagtgacatgcaattagtataaaaagttaaatgtgatctaatggaaaaatggcttcaactagattaatcacaaaagtcattataatagaattaggtgttgagataggacttaaaaaatggaaacaaaaatcagagaacagacattgagtcttaatgaatttgttttcccaggatcactttgcccagtaattgaaggcttacaattttctccttttttaattgaaatctgtattaaaaataatctgaaaagtcatattctgaatggtatagaggaaagtaactgtagctgatgcatccatgaaagactacattacaaayctttacggccaatagcaatgattgtgcacctactctggatcagacattggtcctgcttttagggacaggaaataaatgtgatgatatatctctgc

SEQ ID NO: 182042 - DNA, 591 bp, Homo sapiens
tagtgtgacgtatccagctttgttatttttgcttaggacggccttggcgatttgggctcttttttgggtgcatataaatttttgaatagcttttcctaattctgtaaaaaatgatayatgtagcttgataagaatagcactgagtccacagattgctttgggcactatagcattttaacaatatttgcccagagtcaccccacagccccactgggacataagccatgcaccctctaccaccaccctataagaattctttcacccatggttccaaggcctatgtgctggtatgcttttgctggcagcccctgataaagtgctgttgccagcagactgggggtaccttggatctgactagcacagctggtgctcaaccttaaggggtcagagaacaaagcagcatgcctggtctcagttccccaaggttacagcatgtagcctaggaatgctgggctgagtcttagcactctgaaagtatccagaaatgaagccaattgactgaacccaacttataccacagtcaaaccctcaagggcatgaaagaacattaaaactaaaaaactaaaagccccatccaaagaacagcaactt

SEQ ID NO: 182043 - DNA, 576 bp, Homo sapiens
ccacagacactataaagcaactacacaatcaagactacaaaactactagataacaacatgatgacaaatcaaaatctcacatgttattttcaagcttgaatataagtggtctaaatgtcccacttaaaggcatagagtgacaagctggattaaaagacatgacctaaatatttgtgtcttcaagagacccatgtcatatgtaatgatacccacargctcaaaggaaagggatggagaaacacctgccacacaaagggaaaacaaaatggagcagggtttgctacttttatatcagataaaacagaatttaaactaacacctttaggaagtacaaagaagagcattatataggaataaagggttcaattttaaaagaaaggttaactattctatatatatatatatatatatatatatatatatatatatatatatatttgcattcaacattgcagcaacaggattcataacccaacctcttcttgacctacaaaaaaatatagacagccacacaacaatagggggagatttaaacacctcactgacaatgttagacagatcactgaggcagaaaac

SEQ ID NO: 182044 - DNA, 578 bp, Homo sapiens
aaccaaattttggagctgtaaaatacaataaataatattttaaaatgcaatagagagcataaacagcagaactgatttagcagaagaaagaatctgttcactcaaagacagattacttgacaatatatcaaaggagaaaaaatagaaaagaataaaaaaactgaagaatgcttatgagatttataggaaagcttaaaaagagcaaatgtatgagtaataggagttaataaggagaggagaaaaataaaggagtaaaatgcttttctaaaaaaaatagtagcaataaactttccgagcctaatgaaagaagtactcatccaggtaaaatgtagtcaaaggtctacattcagattcaattcacaaaagactaccctaaaatatattagaatcaagatgtcaaaaattagagacaaagaggatactgaaagctgcaacagcatataagaaaataacataaaaaagagtttcaatatagctagcagcggactgctytataggaacttttgaagccaggaaagagtagaataatataaacattgtgctgagaaaaatacaaaaaactaaaaattaaaaactgt

SEQ ID NO: 182045 - DNA, 422 bp, Homo sapiens
attcaccaacggatagcctcagtgccatcaataggagttatgattgtatcacatgctcgccagaacttaatgtctccaatwtttaaaattccttatttggtatgtggaattggaaaagttggaaaacatatgttttggtctaatttgcatgttgataatgaataacgatatttttcaacttttgaatacttgttatttggatatccttttgtgcaaagtgtttgttcatatttttaagaacaaatttttctattgcttctttgactttaattttgggtttgaaaacaggtgagatttatgtctgcttgaaaagcagatttgattgtaaccaaattgtagatatctatggaaatttgagcaactccatatggaaaattacattttaagtttgaagttatatgaaaaactgctaataaagagga

SEQ ID NO: 182046 - DNA, 368 bp, Homo sapiens
ttgtctttgtcacttccttgatatgtaccctgccatataattacttgaaaaaaatatcatataacccactgttagagaaatgttaatgctgttaaacttctaatatatgtcttggatgctccaactgcttcacaaatgaaattcttgcatgtcattcattgtatgtctgcctcaaaamcagttgtttcacatcctgccctatcacttctttactttttccgtggtcactaaggaacgttaatggtacctgaaaaaagtcatgggcttcacagaagatctctacttcattcttcatcttagaaaatgttttgtgtgcacttcagcaacaaacttccagtttcaaatcttgactccatctcattgttagg

SEQ ID NO: 182047 - DNA, 470 bp, Homo sapiens
tggaacttgcgacataagacattttactccatttcaaattatatctagtacctactttgtcattccccccaaacaaatatgccaatgtagtgaatgtctttatatcataacatagagatgtgatttcaatgtagtgagtttatttttatgattgaattagaatagatttattttcaagttcacaagaagycctgagtcaattctaaggccatgaaaactgtttaggcaatcaccacattaagattataatatttattgttaagaatgtgttaattatctaaatttttattgcccttttacaaatacattaactaagacaggctgctgaagtgatgtagttaaaaacatgcatagttaaaaacaaatctaaaataacttttttttctgaattctgtctcattttcaattatactcagtaaggtgggagtgtataatttatgcttatagaatttgatgtaaaagtaaatgat

SEQ ID NO: 182048 - DNA, 454 bp, Homo sapiens
gtgaataccaaaagtccactctccacatctgcaggtctgtgaattccctaaatactctattttcaatcctgattggttgactcctaggatgctcaatcaacaaatgcggagggctgaccttgtaattacataattttctttattcagaggctacatattttcatttattttttaaatttataattattatataattgcacatatttatgaaatacaatgtgatatttcaatgcatgtatacatycagaggttatatagttttctgaaaattatttatgtgtttcattgtttttcacaatctgctcatatttaaataaccaaccaaactcacaaaaggaaagggaatatccattgtttttagccacttttagtagtttttatcagtaaccacagctacgattttgttaatgctatttttcaataaatttgtaaatgggattctaaaaatattgta

SEQ ID NO: 182049 - DNA, 366 bp, Homo sapiens
agtaagatcttagttttccattaccatacagagcttgtacataactgaaagcaaattaatttttctccacaaattttgctgttaagaacacatttttgttcttaacatagcaaaagattttaacacagtttttcttggaagaaatttagtaagaggcaatgcttctagcttgtgtaaatctctaaactctatyatgtctgtgcccaattttgataaaaattgaaagcactcaaatcaaatttctaaaatatctagaattttaaatgaaactttaaacagagaaaacatttcaaataaaaggtagattccataacaaaattgtaatgagcatttaaagtatcttcatttgaatactgaccatgtttc

SEQ ID NO: 182050 - DNA, 394 bp, Homo sapiens
ctgtctaatattgacactgtgttattgacatccccaactattattatattggagtctatttctccctttatatcaaataatagttgctttatatatatatttgtgctccattgtttcatacatatttagagttgttataccctcttactgaattgatccctttttcattacataataaccttctttgtctctttttactatttttgacttaaagtctgttttacctaatataagaatagatacacctgctgcttttcgcttctgtttgcatggaatatcttttttcatccttttttttttctgtctacatgtatctttagaggtgaagtgagttycttgtagacagcatataattagatcattaaaaaaactattcagccagtcctaatttttc

SEQ ID NO: 182051 - DNA, 552 bp, Homo sapiens
caatcttaaagctccaaaatgatctcctttgactccatgtctcacatccaagtcacattgatgcaagaggttggttcccatggtcttgggcagctctgctttgcaaggcacagccccacctcccggctgctttcacaggttggcattgagtgtcttgcttttccaggtgcattgtgcaaactstcaatggatttaccattccgaggtctggaagatggtggccctcttcccacaactccactaggcagtaccccagtggggactctgtgtgaggactcacaccccacatttcccttctgcactactttagcagaggctctccataaagcctctgcccctgcaacacacttctgcctggacatccaggtgtttccatacatcctttgaaatctaggcggagattcccaaacctcaattgttgacttctgtgcacccacaggcccaacatcacatggcagctgccaaggtttggggcttgcaacctctgaagccatgacctgagctgtactttggcttgttctagccagttctagagcaggtggaatgcagagt

SEQ ID NO: 182052 - DNA, 609 bp, Homo sapiens
tgggcagctctgctttgcaaggcacagccccacctcccggctgctttcacaggttggcattgagtgtcttgcttttccaggtgcattgtgcaaactgtcaatggatttaccattccgaggtctggaagatggtggccctcttcccacaactccactaggcagtaccccagtggggactctgtgtgaggactcacaccccacatttcccttctgcactactttagcagaggctctccataaagcctctgcccctgcaacacacttctgcctggacatccaggtgtttccatacatcctttgaaatctaggcggagattcccaaacctcaattgttgacttctgtgcacccacaggcccaacatcacatggcagctgccaaggtttggggcttgcaacctctgaagccatgacctgagctgtactttggcttgttctagccagttctagagcaggtggaatgcagagtaccaaatccccaggctgcatacagcaggggggctctgggcccagtgcatgaaaccattttttccctctaggcctctagacctgtgatgggaggkgctgctgcaaaggtctctgacatgccctggagacatttttctcgttgtc

SEQ ID NO: 182053 - DNA, 564 bp, Homo sapiens
gtaccaatttaatgtatcagtctgtactcatgctgctaataaagacacacccaagactggataatttataaagaaaagagattttaatggactcatagttccacrttgctggagaagcctcacaatcatggctgaaggtaaatgaggagcaaaggcatgtcttacatggctgcaggcaagagagcatagagagcatgtgcaagggagctcccctttataaaaccatcagatcatgtgagatttactcactatcatgggaacagcatgggagagaactgcccccatgactcaattatctctcactgagtccctcccatgagacatgggaattatcatagctacaattgaagatgaaattttggttgagacacagctaaaccatatcactctgccacactgctgggttcattcagcaatgtgtggctgaagtgttctgggtggctgtaaaggtaagtcattgaggctccagggatatggagaggaaggggctatttggccccaggtcagtatatagtctagtgggaactggactctcaaaatgacaaatggcatcatactgcagct

SEQ ID NO: 182054 - DNA, 564 bp, Homo sapiens
gtaccaatttaatgtatcagtctgtactcatgctgctaataaagacacacccaagactggataatttataaagaaaagagattttaatggactcatagttccacgttgctggagaagcctcacaatcatggctgaaggtaaatgaggagcaaaggcatgtcttacatggctgcaggcaagagagcatagagagcatgtgcaagggagctcccctttataaaaccatcagatcatgtgagatttactcactatcatgggaacagcatgggagagaactgcccccatgrctcaattatctctcactgagtccctcccatgagacatgggaattatcatagctacaattgaagatgaaattttggttgagacacagctaaaccatatcactctgccacactgctgggttcattcagcaatgtgtggctgaagtgttctgggtggctgtaaaggtaagtcattgaggctccagggatatggagaggaaggggctatttggccccaggtcagtatatagtctagtgggaactggactctcaaaatgacaaatggcatcatactgcagct

SEQ ID NO: 182055 - DNA, 620 bp, Homo sapiens
gatttcataggcatatacttaccttcaaactcattaagttgtatacattaaatatgcatagctttttgtatagcaataattcctcaatacagtgaatatatatagttgagaaaaaacagttctaatatcttaagtagtttaaatagaaaatacttctttaattccaacccacttttctgctgaagcctatttctcaccagctcctccatcacactccagaagcagccatattaaactttttttggattctcaaatgcagyaagttttctttctcttcggagcctttatgtatgttctccctgcagcacttatttctgccttcaactggctaactcctgctcatgtttcatgtatcagacatatcttgtttcaagaagccttccctatctacaaaggaggtgccactcctatgagttccctaagaagtctacttcccatgtcagcctggcaacaaaaccataggttttcactctgttatccaatccatgatggatagaggcagcaactatttagttcactgccatgtaacacaggacctgatatgtactggctgctcaagaaaaatttgcagaatgaatgaataattgaataagtgaatggacaaataaatgtcctggctg

SEQ ID NO: 182056 - DNA, 555 bp, Homo sapiens
taatagcataatccttgctctaaaggctcatggtatatcctgctgtaccatttagaggttcatagtccctaatttttattgagaacataaatcaaaaataattccaaataaactgggtttttttccttgtaaagtgaatatttcattaacattcgrattcttttaaatggaagtgttttggctaaatttccgatgagttaaatctcttcctgtggttacccaaatgtgataattgccatttttttcaaattacatttaagttgttcataatattctgttatatacccaaatatcacatttgggtaaccatgtgtggttttcacataaatttttaatataaactttttcatataaaatttttttccttatgcttagattccattattaaaacaatgaagggacttctattttgtaataccgttttctgtgtaatttaaattaggtccagtagaactacaaatgttataccaagtttatacttttgattcatgtaaaaaaaaaaaaaagattccactctaatcctgattagaaatagtggaataaaatgatttttca

SEQ ID NO: 182057 - DNA, 462 bp, Homo sapiens
ctgtggttacccaaatgtgataattgccatttttttcaaattacatttaagttgttcataatattctgttatatacccaaatatcacatttgggtaaccatgtgtggttttcacataaatttttaatataaactttttcatataaaatttttttccttatgcttagattccattattaaaacaatgaagggacttctattttgtaatacygttttctgtgtaatttaaattaggtccagtagaactacaaatgttataccaagtttatacttttgattcatgtaaaaaaaaaaaaaagattccactctaatcctgattagaaatagtggaataaaatgatttttcagtattcaagaatctattaatttaaacagaatatttcttttaaatttctatttaattacctaaactcacatagtttccaacaaaataaatatttctcatcataaaatggttctaatt

SEQ ID NO: 182058 - DNA, 407 bp, Homo sapiens
tgttcataatattctgttatatacccaaatatcacatttgggtaaccatgtgtggttttcacataaatttttaatataaactttttcatataaaatttttttccttatgcttagattccattattaaaacaatgaagggacttctattttgtaataccgttttctgtgtaatttaaattaggtccagtagaactacaaatgttataccaagtttatacttttgattcatgtaaaaaaaaaaaaaagattccactctaatcctgattagaaatartggaataaaatgatttttcagtattcaagaatctattaatttaaacagaatatttcttttaaatttctatttaattacctaaactcacatagtttccaacaaaataaatatttctcatcataaaatggttcta

SEQ ID NO: 182059 - DNA, 585 bp, Homo sapiens
taaaacttgactgcatatatgctcagatatcaggaaaacaacctaaatattatgagaaccaatggaaaatgtacctttttaatatttttagtcttttatgtaatatttgcctataaaaattttgttaactacagaaagcatcaggtrtaacaatgaaagttaagtcattttttacataaatgctattaaaaaactattcatgatagtgttatcacaaatatattttgggctcagtaatttctaaaaaattattaaatcatagtttaagattcaatgtaccttttgataagatgggatcactgtgttatttaatgtaatatttgctaatagaaaaaagtttaagtgtattgtatgtagtttcaataaaacttacagaaatttccaaagtctttaccttttccaaagtcttgacacactcacacagacagagatttcacaaacatgcaatgcctaggatatattaggtatagaaagagatgcaaaaaatgtgtagatatggttcctgccctcagcaaaactgatgtgtacatggtggagtgcttaatggcagaacataggtaataaggtgatggtgagatcattgga

SEQ ID NO: 182060 - DNA, 491 bp, Homo sapiens
ttttttttttaagaaaataatccatttatttcaaattgcagtttattctgcctataaaaagtaaaggattttttttttgtacttttagccttccagctattgtcagatagttattgtcaggaattccctgctaccaacaagaagccttgtactttccatcccatagagctatttttcttctctcttcctctaactctccctctctctgtctctgtttctctctcayacactcacatacatatcttctagtgaaaatagatttggatctccagtttatccaaatatttttggacaacaatcctattttaaagaatttccagctgggcgcagtggctcacgcctgtaatctcagcactttgggaggccaaggcaggaggatcacttgaggtcaggagtttgagacaagcccggccaacatggtgaaaccccatgtctactgaaaatacaaaaattacctgggcacagtggcagtgcctgtaatcccagctact

SEQ ID NO: 182061 - DNA, 509 bp, Homo sapiens
gaaatgcttttgaggagcctaaaaaatacaggctcaacaaccaacgtttttttctttattgggaacacttgaccctaaaagacaatagggtatctttttcaaattcctcattaaaaattttgatcctagaaatccwtccctaactgttcgctagagattctctcaattcagcagaaatataactctagtggtttaaaaagagttttcacttaacaagatgtttcatattaaggcaacccagagctgatgcaacaatttctcaatgccattaatatccagtaagctccttctatccaaggatcactatcctttggatgtgatttttaccttcacaaggcatctaatggccatgggatgactggccattctttcacatctgcattccaagaaggaggaagaggaaaataatgggacagcagttgtgcctatattggaaactatattcaatactgtggctatactgaaaggcaaactttcctaaacatgcccagatctgcacctacaactgt

SEQ ID NO: 182062 - DNA, 510 bp, Homo sapiens
ctaaaagacaacttaatgtcatatgtacatgcatggcagagtatagaatttatttatttcaaatgtatttttttggttctcccaggaaattctagatagggtagctcattttgatgtattttctttcatatgtatacacagatttttatttttatttttccaattaacatattgagaatgttgtccatgttattaaatgttcattaaaatttcattttgatagcaggaaaatattctactcttgattaaattttaagttatttaattctatataatgagtattcaggttatttcagtgtttgcttgtacatggaattagataaactttattctttgctatgacttattgggaagcaacagmccaatagagaagtgatgctgctatctcagtcatattaccttcaagggtttatcaagacccagacataaagagaaactaccagctaagtcagatggaaaagggcatgctactgtcacagttgtgatcatttaaatattattgagcagaga

SEQ ID NO: 182063 - DNA, 515 bp, Homo sapiens
gtgtaaccagcagcatactgtcttggcctacagtgggatataaaatcacactttagttgatttgttatagcttggccaaaggctataggtaaaaggaactttcatcaatataaaaagcccgaacatttcagacaaatctggaaaaggtttgtggccattggagctgctaggtggtgaaataaaaaaatacaatattcagatggggaaaatacagagatgttggcaagctgaagaatattcccaaaagactagaaaaaataaagatctcaccccatcaaaccaaaattaagcaaatggataagtaattttgcccctgaataaaggcaaattgtagcaatctttgattgtgttccctgtattccccaactcccctgactctccttrccaagcccacctgccctgttagaggttggaaatgccaggcacagcccactgggaaagctggcagctatggcaagacatgaaaccaatgctgaccaactgggacctgagtggaaggaggctttgggttaatg

SEQ ID NO: 182064 - DNA, 591 bp, Homo sapiens
aaatgagccaagtagagcatttgtaacaatctctctataaaggatattctttatacaatttgaaaaggaattaaaattacaaatgcaaaattgagcatagggtcttgtaagaccaaattcaagtgagagaccctgatgttttaccttyagatgttttaccttcattagcttcagggtataactatctctgataatcagtttttaattaaaaaaaaaagtcaaaagcctcagtctattctttagatatcgatatcaaaattcacatcacaggttccaatcatgaaaagccaaaataaataccattaacttcaaaacctgatctgtagcataaaggttattgggtgaaacgggctcaaggcaatcttccttctttttctaaaactgtgccccacaatttttttcctataatgtcttctatctgaagtttagtcataaagtctgttcccgacaggggagagaaatgaggacataatggtatgatctatgcttcctgccaagcccgctgcttcggtgatggaggtgctttgtacactgggttattggattatggcctctgttcctgcctgcatccaccagggagccaagcgctct

SEQ ID NO: 182065 - DNA, 553 bp, Homo sapiens
taatggggatctgtccttgccaaaattcattatattacctagagctgtcttgatttgtctattttagattctcctatttgggagagtggtggaccacttgactctgacgaaagctaaaaatgctgtctcatgagaatgcacacatacacacagacacacatacacacagacacacakacacacagacacacatacacacagacacacatacacagacacacagacacgcttaattgagtttcaggaagtgctcagactttctaaaacttagctatcgaagaaggtacagtgtacttcaggtaaagagcccttcatgatgtttgaattttctacattacaagttaaataaatgatggtctatgaaatctagaaatgatttggagaaacagacttagtctccctccttacatattccacatcctaaattaacttttgactgagggttgaattgtggcctccactccactccaaatatattgaagtcctaactctggtacctcagaatgtgaccttatttggaaatagggttgctgcagatataattagttcgatg

SEQ ID NO: 182066 - DNA, 574 bp, Homo sapiens
gaagagaagaagagaagaaacaattggatagaaacaaagtgtctagagcagtgtggatcagcaaatgttggttgattaaatgaataaatttattagtcaaggagattgtggacgagtataaccataactaacccactgctgaggaatgcggtgttctgtttgattggaatttatttttattgttattattttgtaattctgtattataactatatgcctaattgttgtacaccatctcacaatcaagccttgtgagattttccaaattttatcttgatcaaactggtttgcaaattatttttcagggttttyttaaaaaaaaaaaaaaaaacccaaactttataagatcctggctatcctgtggatttttaggcccttgtatttgttcttttttatagcaacatcagagctggatctagaaatggaagctcttaaaaccgtgtataagtcaggggaaacgattgtggtcacctgtgctgtttttaacaatgaggtggttgaccttcaatggacttaccctggagaagtggtaggtaccctcaaaacgtgcaatggcttggagcagagcaacagg

SEQ ID NO: 182067 - DNA, 594 bp, Homo sapiens
ggaatgaccacttcagaagggcaccctgggtaagatttctctttctgtttttacagctatgttattttatcttttgaaaacaatggtgactacatggacatgaagcaggctgatactacacagtatgtccccatgctagaaaggaaagaggtttctaaatattccgacatccagagatcactctatgatcgtccagcctcatataagaagaaatctatgttaggtaaaagtgtctatactcactctgggtgttgggactttccagtggtttaatatgatacttaaagtatttagagggaagtgtatagggatggtaagtgaacctggcagcccacgtggtctctaaatgcaggtctgcacaaccagttctgtgacatgtttccaggtttgtggcctgtaaattgaaaagaataaaagctgacaatgtaacaaattttttaaactttaaatttaatagttttaaagaattttcttggtgtgttcctgcagtaaacattttwtaaaaaaaataattatttattctgatataatgaacttccttttttattgctgtctttttcttttttaatgaaaatatggtgattgatttttttt

SEQ ID NO: 182068 - DNA, 594 bp, Homo sapiens
ggaatgaccacttcagaagggcaccctgggtaagatttctctttctgtttttacagctatgttattttatcttttgaaaacaatggtgactacatggacatgaagcaggctgatactacacagtatgtccccatgctagaaaggaaagaggtttctaaatattccgacatccagagatcactctatgatcgtccagcctcatataagaagaaatctatgttaggtaaaagtgtctatactcactctgggtgttgggactttccagtggtttaatatgatacttaaagtatttagagggaagtgtatagggatggtaagtgaacctggcagcccacgtggtctctaaatgcaggtctgcacaaccagttctgtgacatgtttccaggtttgtggcctgtaaattgaaaagaataaaagctgacaatgtaacaaattttttaaactttaaatttaatagttttaaagaattttcttggtgtgttcctgcagtaaacatttttwaaaaaaaataattatttattctgatataatgaacttccttttttattgctgtctttttcttttttaatgaaaatatggtgattgatttttttt

SEQ ID NO: 182069 - DNA, 585 bp, Homo sapiens
tcactcacttttgcaaggatagcaccaaggggatggtgctaaaccatttgtgagaaattcacccccatgatccagtcacctcccaccaggccccacctccaatactggggattacacttcaacatgagatttgggtggggacacatatccaaactatatcattgcgtgtgtgtgtgtgtgtataatttttaaaccagatatatgtttctgcatatctctttcctttctttcattctttctwtcttttttttttttttttttttttgagacagagtctcactctgtcacccaggctgcagtgcagtggtgtgatcttggctcactgcaactcattgcaacctcctcctccctgattcaagcaattcccctgcctcagcctcctgagtagctgggattacaggcacatgccaccatgcctggctaatttttttgtattattagtagagatagggttttaccatgttggccagactggtctcaaacttctgacctcaggcaatccacccacctcggcctcccaaagtgctgggattataggcataagccaccatgcctggcctatatatctattttctaagatagaat

SEQ ID NO: 182070 - DNA, 585 bp, Homo sapiens
tcactcacttttgcaaggatagcaccaaggggatggtgctaaaccatttgtgagaaattcacccccatgatccagtcacctcccaccaggccccacctccaatactggggattacacttcaacatgagatttgggtggggacacatatccaaactatatcattgcgtgtgtgtgtgtgtgtataatttttaaaccagatatatgtttctgcatatctctttcctttctttcattctttctatcttttttttttttttttttttttgagacagagtctcactctgtcacccaggctgcagtgcagtggtgtgatctyggctcactgcaactcattgcaacctcctcctccctgattcaagcaattcccctgcctcagcctcctgagtagctgggattacaggcacatgccaccatgcctggctaatttttttgtattattagtagagatagggttttaccatgttggccagactggtctcaaacttctgacctcaggcaatccacccacctcggcctcccaaagtgctgggattataggcataagccaccatgcctggcctatatatctattttctaagatagaat

SEQ ID NO: 182071 - DNA, 617 bp, Homo sapiens
aggattttattgttttcccagacactgaaaaaatctgctcattcaattggaaagcagtgcgccattttctttttagtcagtatcttcaacatagtgaagtaagaagagcctccgctgaaattttaggaagaaaggagcagcgggaaaccacacaccaaatagacagcaacatattctctgcagaatagcaagaggatctgtgacgaggaaaccaagagaacagtcttaacaacatattccaaacttcctgcagttgtttatatcttcagacagatgagaagtttctatatatagctgtgctttagcaaaatacttttcagctcaggctctatccaaaggatgttaggtaaagcacaatggactttttgcaaatgaagaaaatggtttttttttcagtttgataaatcagatatgcaagtcattcaagtgtcagtttcttctccaaactatgccttcctcytccgtgtggtgaaatcaaacattgaataattaaggcaaatatgaactcataaataattcaatacagacccaaggctgtggacatcagagacttggctctggcccattgctttgattctaaaggtccagagacatcctgttgacctctctgataggaa

SEQ ID NO: 182072 - DNA, 631 bp, Homo sapiens
caatgaactcaattctgatgtagtgcaggactcaggtctgagccaagggtgtgggggcatggagagggcttctggcaaaaatgtgggtgcttcatatttagcaccgtaagtcagggaaggatcggaaagctgggtccagccctagagaaaaggggctggaagaagatgagaaggtcaaggcgccagctgaccaggggtctgagacacctgggagtcccagaggaatttggaatggaacctgggacaggaggatggactgaaagctaaacaagtgacgggccaagcactctgctagtgtagggaggaaggcaggctgcagcgaatttaatgggaaaggggtgcccttccctggccctctgggtgtcccgctctcctgtataaatagggatgaagccagctcctgaccctgaagtcttrgatctcattggcttagaagattctgagctcaggaagtgatcccagtaagcagaagtgagggagtagaggaagtgatttgggaagagaaaagtccatgaagggcacattattgagtgacctgctgctgtgggccagtgggctccgtccgccaagggttccatggggaagcttgtgcagccttcacagagtcacctattggctccgaagattcttg

SEQ ID NO: 182073 - DNA, 523 bp, Homo sapiens
cacctttatctcagatgtagcatttcttagtacagcatgtatataactacataattcatcatataaaattatgttgttgtatgggcttaggtatctcatagaccaagaaattccccagaaatagcaataattcttcaacgaccaggcccagcatgagctagtcttggtcctatatgtgacactargttcctgatttcttattaacgtgctctgatgaggaagttgattgagttatttcaggaaaagaaagaggtgaactaaatctgcccttctcttacatttaaacattcattttctacattttattgtaaataaacacataaacatatacacacacaactagttttagaaattatcaaaatacagaaagtagaaggaagaaaactagcctctcataatcctatcacctcgaaacaaccactatgaacagcttggaatatttatttccagtgtttaaaattttttcctatacctaattggaactgcaaatacataaacagaagacactcatataaaacctaag

SEQ ID NO: 182074 - DNA, 523 bp, Homo sapiens
cacctttatctcagatgtagcatttcttagtacagcatgtatataactacataattcatcatataaaattatgttgttgtatgggcttaggtatctcatagaccaagaaattccccagaaatagcaataattcttcaacgaccaggcccagcatgagctagtcttggtcctatatgtgacactaggttcctgatttcttattaacgtgctctgatgaggaagttgattgagttatttcaggaaaagaaagaggtgaactaaatctgcccttctcttacatttaaacattcattttctacattttattgtaaataaacacatawacatatacacacacaactagttttagaaattatcaaaatacagaaagtagaaggaagaaaactagcctctcataatcctatcacctcgaaacaaccactatgaacagcttggaatatttatttccagtgtttaaaattttttcctatacctaattggaactgcaaatacataaacagaagacactcatataaaacctaag

SEQ ID NO: 182075 - DNA, 553 bp, Homo sapiens
aggatttcttcttggtttggatccattgctggtgaactagtgtgattttgggaggtgttgaagagccttgttttgtcctattaccagggttggttttctggtttcttctcatttgggtaggctctgtcagagggaaggtatagggctgaaggctgttgttcagattcttttgtcccactgggtgttcctttgatgtagtactctcccccttttcctatggatgtggcttcctatgagctaaactgcagtggttgttttctctcttctgggtctagccacccaattagtctacccagctctgggctggtactgggggtygtctgcacagagtcctgtgacgtgaaccatctatgggtctctcagccatgtataccagtgcttgttctggtggaggtggtggacagtgcaatggactccatgagggtccttagtcttggtggtttaatgctttatctttgtgctggttggcctcctgccagaaggtggtacttcccaggaagcatcagctatagtagtgtggagaggaaccagtggagggcggagccctagaatt

SEQ ID NO: 182076 - DNA, 553 bp, Homo sapiens
aggatttcttcttggtttggatccattgctggtgaactagtgtgattttgggaggtgttgaagagccttgttttgtcctattaccagggttggttttctggtttcttctcatttgggtaggctctgtcagagggaaggtatagggctgaaggctgttgttcagattcttttgtcccactgggtgttcctttgatgtagtactctcccccttttcctatggatgtggcttcctatgagctaaactgcagtggttgttttctctcttctgggtctagccacccaattagtctacccagctctgggctggtactgggggttgtctgcacagagtcctgtgaygtgaaccatctatgggtctctcagccatgtataccagtgcttgttctggtggaggtggtggacagtgcaatggactccatgagggtccttagtcttggtggtttaatgctttatctttgtgctggttggcctcctgccagaaggtggtacttcccaggaagcatcagctatagtagtgtggagaggaaccagtggagggcggagccctagaatt

SEQ ID NO: 182077 - DNA, 594 bp, Homo sapiens
agctaacaagtagattataccagactgaagccagtatccctgggaggctataatgggtcctgacacgttctctggactgggctttgcatagtcattagattcaaatsccaaaaatactataaaagaactggaacagatgataagacatcaacttggaccaccaagttttatttcttcaggccaaagaacacatttatggcccacagtgtcctataatggacataccatgttgcatattgtcttcatctcctagggctgccataacaaagtgccacaaaccatatggctgacttacaaaacaaaatgcactgtctcacagttctggagactagaagtctgagatcaagttcttggcagggctggatccttctgagggctgtgaggaagaatctaatccacacttctctcctagcttctggtggtttgctggcaatctttggcatccctgggcttgtagaattctgccttcatcttcatatggcatatcccctgtgttatctctgtgcacaaatttcccttttttataaagacacaaatcatattggattgggggcccaccctattacagcatgacctcatcttaactaattacat

SEQ ID NO: 182078 - DNA, 594 bp, Homo sapiens
agctaacaagtagattataccagactgaagccagtatccctgggaggctataatgggtcctgacacgttctctggactgggctttgcatagtcattagattcaaatcccaaaaatactataaaagaactggaacagatgataagacatcaacttggaccaccaagttttatttcttcaggccaaagaacacatttatggcccacagtgtcctataatggacataccatgttgcatattgtcttcatctcctagggctgccataacaaagtgccacaaaccatatggctgacttacaaaacaaaatgcactgtctcacagttctggagactagaagtctgagatcaagttcttggcagggctggatccttctgagggctgtgaggaagaatctaatccacacttctctcctagcttctggtggtttgctggcaatctttggcatccctgggcttgtagaattctgccttcatcttcatatggcatatcccctgtgttatctytgtgcacaaatttcccttttttataaagacacaaatcatattggattgggggcccaccctattacagcatgacctcatcttaactaattacat

SEQ ID NO: 182079 - DNA, 496 bp, Homo sapiens
ccattttgcaggaaacaggaatccatcatcaggccgtgatgcacgggatgtttcttttctctgtggtttcgctctcgttgtctacgtgaaaacgaaygagatgaacacaactgcgtgtgtgagactatcacggcaactgtgacacccaggcgttggcaatagagttggcagcctgatcctgggacaaaggtactgatggacatccagacacaccccaccacaatcactagcaaacccactcccaaacacacagacacacacgggcgcacgcgcgggaacacaagcacacacacagacacacaaagacacagacaacttgaaggagagcaagggacagagggatgagaaatagaaacggaaggagagaaacagcgatggagagagagacagagaggaactggggagattgagagagagagagagagagagagcaaggtggagagggaagtagagaaagggaaagggtgagggagctagagagggagagcaacagagc

SEQ ID NO: 182080 - DNA, 483 bp, Homo sapiens
tcgaggcggatagtcccatccacacaggagtcacactcaggccaactgaagcgtgattctggattccacgtttctttgccctctgtaaaggtgcctgttgctcaagtttctgccccccgaaagcgtgaccatgttgactgtttcgcgagctctgtggggccccagaaacttccaggaatgcgtggaagaccagcatcgtgtcggtgctctcctttccagttttcaaacaggctatattggagactccccattttgcaggaaacaggaatccatcatcaggccgtgatgcacgggatgtttcttttctctgtggtttcgctctcgttgtctacgtgaaaacgaacgagatgaacacamctgcgtgtgtgagactatcacggcaactgtgacacccaggcgttggcaatagagttggcagcctgatcctgggacaaaggtactgatggacatccagacacaccccaccacaatcactagcaaacc

SEQ ID NO: 182081 - DNA, 496 bp, Homo sapiens
ccattttgcaggaaacaggaatccatcatcaggccgtgatgcacgggatgtttcttttctctgtggtttcgctctcgttgtctacgtgaaaacgaacgagatgaacacaactgcgtgtgtgagactatcacggcaactgtgacacccaggcgttggcratagagttggcagcctgatcctgggacaaaggtactgatggacatccagacacaccccaccacaatcactagcaaacccactcccaaacacacagacacacacgggcgcacgcgcgggaacacaagcacacacacagacacacaaagacacagacaacttgaaggagagcaagggacagagggatgagaaatagaaacggaaggagagaaacagcgatggagagagagacagagaggaactggggagattgagagagagagagagagagagagcaaggtggagagggaagtagagaaagggaaagggtgagggagctagagagggagagcaacagagc

SEQ ID NO: 182082 - DNA, 496 bp, Homo sapiens
ccattttgcaggaaacaggaatccatcatcaggccgtgatgcacgggatgtttcttttctctgtggtttcgctctcgttgtctacgtgaaaacgaacgagatgaacacaactgcgtgtgtgagactatcacggcaactgtgacacccaggcgttggcaatagagttggcagcctgatcctgggacaaaggtactgatggacatccagacacaccccaccacaatcactagcaaacccactcccaaacacacagacacacacgggcgcacgcgcgggaacacaagcacacacacagacacacaaagacacagacaacttgaaggagagcaagggacagagggatgagaratagaaacggaaggagagaaacagcgatggagagagagacagagaggaactggggagattgagagagagagagagagagagagcaaggtggagagggaagtagagaaagggaaagggtgagggagctagagagggagagcaacagagc

SEQ ID NO: 182083 - DNA, 361 bp, Homo sapiens
attaatgtccttttcttcctgattgaagtactccctttagcattcctttaggacaggtatggtattcataaaatacttcagcttttgtttgtctgaaaaagtcagtattctttttttttgaagaacattttcactgtayattctattctaaggtaaaagtttctttcctttagtactttaaatatttattgcttctctctcccggccagtagagtttccactgtaaagtctgctgccagacatgttggagctccccagtaggttatttgtttcttttctctttcttgcttaagaacttttatctttgacttttggaagactattgaatgcttcgaagtagtgttttttgggttaaatctgc

SEQ ID NO: 182084 - DNA, 484 bp, Homo sapiens
agcagtgaggatttttttttacctttaggtgatcatttattactcattaatgtccttttcttcctgattgaagtactccctttagcattcctttaggacaggtatggtattcataaaatacttcagcttttgtttgtctgaaaaagtcagtattctttttttttgaagaacattttcactgtatattctattctaaggtaaaagtttctttcctttagtactttaaatatttattgcttctctctcccggccagtagagtttccactgtaaagtctgctgccagacatgttggagctccccagtaggttatttgtttcttttctctttcttscttaagaacttttatctttgacttttggaagactattgaatgcttcgaagtagtgttttttgggttaaatctgcttaatgttctataacatttttgtagttggatatggatgtctttctctaggtttggaaagttctctgttattatccctt

SEQ ID NO: 182085 - DNA, 495 bp, Homo sapiens
gtgatcatttattactcattaatgtccttttcttcctgattgaagtactccctttagcattcctttaggacaggtatggtattcataaaatacttcagcttttgtttgtctgaaaaagtcagtattctttttttttgaagaacattttcactgtatattctattctaaggtaaaagtttctttcctttagtactttaaatatttattgcttctctctcccggccagtagagtttccactgtaaagtctgctgccagacatgttggagctccccagtaggttatttgtttcttttctctttcttgcttaagaacttttatctttgacttttggaagactattgaatgcttygaagtagtgttttttgggttaaatctgcttaatgttctataacatttttgtagttggatatggatgtctttctctaggtttggaaagttctctgttattatccctttgaataaatttttctacccctgcctctttctctacatct

SEQ ID NO: 182086 - DNA, 495 bp, Homo sapiens
gtgatcatttattactcattaatgtccttttcttcctgattgaagtactccctttagcattcctttaggacaggtatggtattcataaaatacttcagcttttgtttgtctgaaaaagtcagtattctttttttttgaagaacattttcactgtatattctattctaaggtaaaagtttctttcctttagtactttaaatatttattgcttctctctcccggccagtagagtttccactgtaaagtctgctgccagacatgttggagctccccagtaggttatttgtttcttttctctttcttgcttaagaacttttatctttgacttttggaagactattgaatgcttcgaagtagtsttttttgggttaaatctgcttaatgttctataacatttttgtagttggatatggatgtctttctctaggtttggaaagttctctgttattatccctttgaataaatttttctacccctgcctctttctctacatct

SEQ ID NO: 182087 - DNA, 495 bp, Homo sapiens
gtgatcatttattactcattaatgtccttttcttcctgattgaagtactccctttagcattcctttaggacaggtatggtattcataaaatacttcagcttttgtttgtctgaaaaagtcagtattctttttttttgaagaacattttcactgtatattctattctaaggtaaaagtttctttcctttagtactttaaatatttattgcttctctctcccggccagtagagtttccactgtaaagtctgctgccagacatgttggagctccccagtaggttatttgtttcttttctctttcttgcttaagaacttttatctttgacttttggaagactattgaatgcttcgaagtagtgttttttgggttaaatctgcttaatgttctataacatttttrtagttggatatggatgtctttctctaggtttggaaagttctctgttattatccctttgaataaatttttctacccctgcctctttctctacatct

SEQ ID NO: 182088 - DNA, 546 bp, Homo sapiens
agaagtaaaaacctgggctggtatagcataattaatgtatcagtaaagtatgtacattgtagaagtggcaggaagacagcatagagagtgagacctgaccaaaagctttaaggaaagttctatacccttaaacgagattaaagtggactcaggaaaacatgggccacatgaggggaaggacacatgttccagaygagccaaagctcagagcatctctaccttctccaggaggaaaggggaggcaaagcagcaggcagaagacagcacggccaggtcagcacagggcacccaggccaagccaggtgggctccatcatacaggtagtgaggagtcactgccaggtgggctttattcattagtttgttttgtttcttttagtaacgaagacacatgatcaaagttgacctttgtaagtgttgctgcagctgaacaaaaagatggataagaccagtgttttaaaaattatgttgtatagagcactagcctcagtgagatattagtagaacacacaggcacacacacacacacacacactcacactaagcc

SEQ ID NO: 182089 - DNA, 546 bp, Homo sapiens
agaagtaaaaacctgggctggtatagcataattaatgtatcagtaaagtatgtacattgtagaagtggcaggaagacagcatagagagtgagacctgaccaaaagctttaaggaaagttctatacccttaaacgagattaaagtggactcaggaaaacatgggccacatgaggggaaggacacatgttccagatgagccaaagctcagagcatctctaccttctccaggaggaaaggggaggcaaagcagcaggcagaagacagcacggccaggtcagcacagggcacccaggccaagccaggtgggctccatcatacaggtagtgaggagtcactgccaggtgggctttattcattagtttgttttgtttcttttagtaasgaagacacatgatcaaagttgacctttgtaagtgttgctgcagctgaacaaaaagatggataagaccagtgttttaaaaattatgttgtatagagcactagcctcagtgagatattagtagaacacacaggcacacacacacacacacacactcacactaagcc

SEQ ID NO: 182090 - DNA, 546 bp, Homo sapiens
agaagtaaaaacctgggctggtatagcataattaatgtatcagtaaagtatgtacattgtagaagtggcaggaagacagcatagagagtgagacctgaccaaaagctttaaggaaagttctatacccttaaacgagattaaagtggactcaggaaaacatgggccacatgaggggaaggacacatgttccagatgagccaaagctcagagcatctctaccttctccaggaggaaaggggaggcaaagcagcaggcagaagacagcacggccaggtcagcacagggcacccaggccaagccaggtgggctccatcatacaggtagtgaggagtcactgccaggtgggctttattcattagtttgttttgtttcttttagtaacgaagacacatgatcaaagttgacctttgtaagtgttgctgcagctgaacaaaaagatggataaraccagtgttttaaaaattatgttgtatagagcactagcctcagtgagatattagtagaacacacaggcacacacacacacacacacactcacactaagcc

SEQ ID NO: 182091 - DNA, 594 bp, Homo sapiens
gtcttatgagagaagagagagaggtctaagactttttgtgtataaatttatgggttccaagtgtaattttgctgtaagcatggatggcatagtggtgaagtcagggcttttaggtatccatcaccagaataatgcacattgtacccattaagtaatttctcactgttcaccccttccatcccctcaccctgctgagtctccattatcattccactctctacgtcaatatctacacatcttttagcacccrcttatgagtgatacaatatgatgtttactctgtgtctggcttgcttcacttacaacaatggcctccagttccatccatgtgtctgcaaaagttataattctattgttttttatgcctgaatggtatttcattgtgtatattttctacattttctttctccaatcatttgttgatgggtatttagtttcattttatgtctgtgctactgtgaatagtgttgcaacaaatacacaagtacagttatctttctgatacattgatttcttttcctttgcataaatactcagtggtgggattgctgaatcagacagagccaatagatgatcagtaatggtggccaatca

SEQ ID NO: 182092 - DNA, 421 bp, Homo sapiens
ctcttgggagccagcactttccctctccatcacatggcatacttgccattatttgttgtgtaaaatattgtccttagttttcacctttcctaggagacacaggcagagcctgtgacactacarcttctggcacacagtaggtaggtgcatcacaaacatctgctgagttcacacactcttgccttctcaaaacttcttgtcaagtcttcagtgaaaaggaattgctgattgagcaagaattaaacttctagagactcctggatccactgaagtttgagacaaggtgagatttgtttactgtcatattcctagctcataacatattgtagtcacttaaaaaagtttgttgaataagtgagtaaattgattcatacgtcatacttagctatatattttctgagtagaattgataaagttaata

SEQ ID NO: 182093 - DNA, 421 bp, Homo sapiens
ctcttgggagccagcactttccctctccatcacatggcatacttgccattatttgttgtgtaaaatattgtccttagttttcacctttcctaggagacacaggcagagcctgtgacactacagcttctggcacacagtaggtaggtgcatcacaaacatctgctgagttcacacactcttgccttctcaaamcttcttgtcaagtcttcagtgaaaaggaattgctgattgagcaagaattaaacttctagagactcctggatccactgaagtttgagacaaggtgagatttgtttactgtcatattcctagctcataacatattgtagtcacttaaaaaagtttgttgaataagtgagtaaattgattcatacgtcatacttagctatatattttctgagtagaattgataaagttaata

SEQ ID NO: 182094 - DNA, 491 bp, Homo sapiens
tttgagaagtgtctgcttatgtcccttgtcaatgttttaatggggttgttttcctaatgtccaacatcactaatcatcagagaaatgcaagtcaatgwgagataccatctcatattagtcagaatggctactattaaaaagtaaaaaaatgacaaattctggttagacttcagagaaaatgaaatgcttatacactgttggtgagaatgtaaattagttcagccactgtgaaaagcagtttggagatttttcaaagaatttaaaacagaagtgccattcaaccagcaattccattactgagtatatatccaaaagaaaattaagaattccacaaaaaagaaaccccacatgcacttgtatatgagtcatattctattcacaatagggaaggcatggaattaacttatgtgtgaatcaataaattggatagaaatatgtgccacatatacgccataaaacactatgcacacattaaaaagaatacaattatg

SEQ ID NO: 182095 - DNA, 491 bp, Homo sapiens
tttgagaagtgtctgcttatgtcccttgtcaatgttttaatggggttgttttcctaatgtccaacatcactaatcatcagagaaatgcaagtcaatgagagataccatctcatattagtcagaatggctactattaaaaagtaaaaaaatgacaaattctggttagacttcagagaaaatgaaatgcttatacactgttggtgagaatgtaaattagttcagccactgtgaaaagcagtttggagatttttcaaagaatttaaaacagaagtgccattcaaccagcaattccattactgagtatatatccaaaagaaaattaagaattccacaaaaaagaaaccccacatgcacttgtatatgagtcatattctattcacaatagggaaggcatggaattaacttatgtgtraatcaataaattggatagaaatatgtgccacatatacgccataaaacactatgcacacattaaaaagaatacaattatg

SEQ ID NO: 182096 - DNA, 491 bp, Homo sapiens
tttgagaagtgtctgcttatgtcccttgtcaatgttttaatggggttgttttcctaatgtccaacatcactaatcatcagagaaatgcaagtcaatgagagataccatctcatattagtcagaatggctactattaaaaagtaaaaaaatgacaaattctggttagacttcagagaaaatgaaatgcttatacactgttggtgagaatgtaaattagttcagccactgtgaaaagcagtttggagatttttcaaagaatttaaaacagaagtgccattcaaccagcaattccattactgagtatatatccaaaagaaaattaagaattccacaaaaaagaaaccccacatgcacttgtatatgagtcatattctattcacaatagggaaggcatggaattaacttatgtgtgaatcaataaattggatagaaatatgtgccacatatacrccataaaacactatgcacacattaaaaagaatacaattatg

SEQ ID NO: 182097 - DNA, 491 bp, Homo sapiens
tttgagaagtgtctgcttatgtcccttgtcaatgttttaatggggttgttttcctaatgtccaacatcactaatcatcagagaaatgcaagtcaatgagagataccatctcatattagtcagaatggctactattaaaaagtaaaaaaatgacaaattctggttagacttcagagaaaatgaaatgcttatacactgttggtgagaatgtaaattagttcagccactgtgaaaagcagtttggagatttttcaaagaatttaaaacagaagtgccattcaaccagcaattccattactgagtatatatccaaaagaaaattaagaattccacaaaaaagaaaccccacatgcacttgtatatgagtcatattctattcacaatagggaaggcatggaattaacttatgtgtgaatcaataaattggatagaaatatgtgccacatatacgccataaaacactatgcacacrttaaaaagaatacaattatg

SEQ ID NO: 182098 - DNA, 290 bp, Homo sapiens
ccacatatacgccataaaacactatgcacacattaaaaagaatacaattatgtcctgtgcagtaacatgcatacgtctggaggccattatcataaggaaattaatacaggaacagaaaaccaaataccatatrttcttgcctataagtaggatctaaacatggggtactcatgaatataaagatgacaacaatagacactgagaactaccaggtgaatgagggaaggaggagggcagagggtgaaaaaccataggtgctatgcttactgcctaggtgatgggatcaatta

SEQ ID NO: 182099 - DNA, 549 bp, Homo sapiens
gtaatccctgcatcttggcgggggcagaggcaggaggatggcttgagcccaggatttgagactaacctgggcaagatagcaacacttcgtctgcgtaaraaacaaaattataaataaaaataaagggaggaatagagaccaccaccaaaatgataggagactttaataatggagaggacaacctgggagaccaaatgaagacagaggattgagcaaggagtgattccaccaaatccaacagacttttagaaacggtcttctcaacaacagaatgcgcatgattctggtgtgcacatggaacattcttgagactatatcacaaatcggaccacaaagaaatcaattcaagaaaattaaaatcatacgaagtatcatttacaactaaaatggaatggaactagaagtgaataccagaagaaaaatttaaaaatttgcaaatacataaaaatcaagtaacatgctcctaaacaacattatgggttaaagaagaaatcacagtgaaaatttcaacataactggagacaaagcataacaaaattattgaatgca

SEQ ID NO: 182100 - DNA, 419 bp, Homo sapiens
gagactttaataatggagaggacaacctgggagaccaaatgaagacagaggattgagcaaggagtgattcmaccaaatccaacagacttttagaaacggtcttctcaacaacagaatgcgcatgattctggtgtgcacatggaacattcttgagactatatcacaaatcggaccacaaagaaatcaattcaagaaaattaaaatcatacgaagtatcatttacaactaaaatggaatggaactagaagtgaataccagaagaaaaatttaaaaatttgcaaatacataaaaatcaagtaacatgctcctaaacaacattatgggttaaagaagaaatcacagtgaaaatttcaacataactggagacaaagcataacaaaattattgaatgcatctaaagcttgtattcaattgtagta

SEQ ID NO: 182101 - DNA, 549 bp, Homo sapiens
gtaatccctgcatcttggcgggggcagaggcaggaggatggcttgagcccaggatttgagactaacctgggcaagatagcaacacttcgtctgcgtaagaaacaaaattataaataaaaataaagggaggaatagagaccaccaccaaaatgataggagactttaataatggagaggacaacctgggagaccaaatgaagacagaggattgagcaaggagtgattccaccaaatccaacagacttttagaaacggtcttctcaacaacagaatgcgcatgattctggtgygcacatggaacattcttgagactatatcacaaatcggaccacaaagaaatcaattcaagaaaattaaaatcatacgaagtatcatttacaactaaaatggaatggaactagaagtgaataccagaagaaaaatttaaaaatttgcaaatacataaaaatcaagtaacatgctcctaaacaacattatgggttaaagaagaaatcacagtgaaaatttcaacataactggagacaaagcataacaaaattattgaatgca

SEQ ID NO: 182102 - DNA, 419 bp, Homo sapiens
gagactttaataatggagaggacaacctgggagaccaaatgaagacagaggattgagcaaggagtgattccaccaaatccaacagacttttagaaacggtcttctcaacaacagaatgcgcatgattctggtgtgcacatggaacattcttgagactatatcacaaatcggaccacaaagaaatcaattcaagaaaattaaaatcatacgaagtatcatttacaactaaaatggaatggaactagaagtgaataccagaagaaaawtttaaaaatttgcaaatacataaaaatcaagtaacatgctcctaaacaacattatgggttaaagaagaaatcacagtgaaaatttcaacataactggagacaaagcataacaaaattattgaatgcatctaaagcttgtattcaattgtagta

SEQ ID NO: 182103 - DNA, 419 bp, Homo sapiens
gagactttaataatggagaggacaacctgggagaccaaatgaagacagaggattgagcaaggagtgattccaccaaatccaacagacttttagaaacggtcttctcaacaacagaatgcgcatgattctggtgtgcacatggaacattcttgagactatatcacaaatcggaccacaaagaaatcaattcaagaaaattaaaatcatacgaagtatcatttacaactaaaatggaatggaactagaagtgaataccagaagaaaaatttaaaaatttgcaaatacataaaaatcaagtaacatgctcctaaacaacattatgggttaargaagaaatcacagtgaaaatttcaacataactggagacaaagcataacaaaattattgaatgcatctaaagcttgtattcaattgtagta

SEQ ID NO: 182104 - DNA, 419 bp, Homo sapiens
gagactttaataatggagaggacaacctgggagaccaaatgaagacagaggattgagcaaggagtgattccaccaaatccaacagacttttagaaacggtcttctcaacaacagaatgcgcatgattctggtgtgcacatggaacattcttgagactatatcacaaatcggaccacaaagaaatcaattcaagaaaattaaaatcatacgaagtatcatttacaactaaaatggaatggaactagaagtgaataccagaagaaaaatttaaaaatttgcaaatacataaaaatcaagtaacatgctcctaaacaacattatgggttaaagaagaaatcacagtgaaaatttcaacataactggagacaaagcataacaaaatwattgaatgcatctaaagcttgtattcaattgtagta

SEQ ID NO: 182105 - DNA, 396 bp, Homo sapiens
caactatggcgttattttttgtacrtactgctcagaataaaaacacttgaaatgtggaagattttaagtttgatttcagtccaacaaatatacataataatttatagacaccaagcagtccccatagccatataaaagatgccaattctataaaatgaagctgccgagttttaatctttgcatataactggagaatgtccaaattaaaatactaactatatataagtcgcataaattgccttcaaagggcttttaacaaataatagtactaataaccatgataatgacatatactgacacttcccaaagtttgcaaaccataggtgtggtagagtttgtggtgagatgtgttaagaacaaaaatatggggatgagacttctgagaaatgtccccaa

SEQ ID NO: 182106 - DNA, 396 bp, Homo sapiens
caactatggcgttattttttgtacatactgctcagaataaaaacacttgaaatgtggaagattttaagtttgatttcagtccaacaaatatacataataatttatagacaccaagcagtccccatagccatataaaagatgccaattctataaaatgaagctgccgagttttaatctttgcatataactggagaatgtccaaattaaaatactaactatatataagtcrcataaattgccttcaaagggcttttaacaaataatagtactaataaccatgataatgacatatactgacacttcccaaagtttgcaaaccataggtgtggtagagtttgtggtgagatgtgttaagaacaaaaatatggggatgagacttctgagaaatgtccccaa

SEQ ID NO: 182107 - DNA, 538 bp, Homo sapiens
aaaatattctttaatggctgattatacaaagacagcagtgtaactgacctccaaaccagacattttgagtactggtttctgaagcaaaattagaagtsccagtcctcagtgtcctcaaacgcttttgtgtaatcttggtttaatggaagagatgattaaaatgctgctatctgaaattccaagtgagaaagatggaaaaataatttgtgtctgatgctagtccatacactttccaagtcccacaaaactctcacaaaaatgtatataagctaaatattacaaaatgataacaacttgttttatttatagatgtaaaaaacaatgtgaaagcttttaatctcttaataccattaagcctccagtaagagcctcatataatgctctactattccaaacaactaaatagtaaaacaaactaactttgcacatcagattatctgaaaaaccttcaaaaatactcagttcagggattactattatacaaaagtctggggtttttttaagagaataaaatggcttaggtcaactttcccctttc

SEQ ID NO: 182108 - DNA, 538 bp, Homo sapiens
aaaatattctttaatggctgattatacaaagacagcagtgtaactgacctccaaaccagacattttgagtactggtttctgaagcaaaattagaagtcccagtcctcagtgtcctcaaacgcttttgtgtaatcttggtttaatggaagagatgattaaaatgctgctatctgaaaytccaagtgagaaagatggaaaaataatttgtgtctgatgctagtccatacactttccaagtcccacaaaactctcacaaaaatgtatataagctaaatattacaaaatgataacaacttgttttatttatagatgtaaaaaacaatgtgaaagcttttaatctcttaataccattaagcctccagtaagagcctcatataatgctctactattccaaacaactaaatagtaaaacaaactaactttgcacatcagattatctgaaaaaccttcaaaaatactcagttcagggattactattatacaaaagtctggggtttttttaagagaataaaatggcttaggtcaactttcccctttc

SEQ ID NO: 182109 - DNA, 657 bp, Homo sapiens
tcctgtgtccaagtgttctcattgttcaattcccacctatgagtgagaacatgcggcgtttggttttttgtccttgcratagtttgctgagaatgatggtttccagcttcatccacgtccctacaaaggacatgagctcatcattttttatggctgcatggtattccatattctttccacacattttttttactgtcttttccctatttcttgatagcagtatgctgtttccatgataagaacaaatagtgtttgccaatcatagaagaacagcctctgtattacattgagaaaatgagatttatccatggattggaagtagaacagcctgcctccaccctcctttactcaaccacccaacttaaaaggctctaggaaacacagcacactccaagctaccttctgtactgtgcccttagacctcagcttcctcagtcattctctgcatctcctggggcttaacccagtcttagcctgtgttgaggctgctgacagttgtgttccaatcatttgccatggacattatcccttctacatccacattaaacatgccagcttctcttgggtgtctgcagagctgtgcctttttctttcagtgacagttacataatcactgacgtccatgacactcacacatggatccatgtgctgacttca

SEQ ID NO: 182110 - DNA, 657 bp, Homo sapiens
tcctgtgtccaagtgttctcattgttcaattcccacctatgagtgagaacatgcggcgtttggttttttgtccttgcaatagtttgctgagaatgatggtttccagcttcatccacgtccctacaaaggacatgagctcatcattttttatggctgcatggtattccatattctttccacacattttttttactgtcttttccctatttcttgatagcagtatgctgtttccatgataagaacaaatagtgtttgccaatcatagaagaacagcctctgtattacattgagaaaatgagatttatccatggattggaagtagaacagcctgcctccaccctcctttactcaaccacccaacttaaaaggctctaggaaacacagcacactccaagctaccttctgtactgtgcccttagaccwcagcttcctcagtcattctctgcatctcctggggcttaacccagtcttagcctgtgttgaggctgctgacagttgtgttccaatcatttgccatggacattatcccttctacatccacattaaacatgccagcttctcttgggtgtctgcagagctgtgcctttttctttcagtgacagttacataatcactgacgtccatgacactcacacatggatccatgtgctgacttca

SEQ ID NO: 182111 - DNA, 597 bp, Homo sapiens
aaaagaaaaaaacaacatcttcctagaaactgattgcataaaggtaagaggaaacgagaaaacaaaactgagacatcacaggcagtggggatgtatgaccttcttatggcagagtttagcagaggatgggtccccaagactgaaagatgtcagtaagcacttagcaatggtgacagtgagagtcacacccactacacaccctactctctaaggtcaattcagcaggctggcasggatgtttactattttattttatttattttattttaaatcttaagcctgtatttttagtagaggtggggtttcatcatgttggccaggctggtcttgaactcctgacctccttgaactcctgtaatcccagctacttgggaggctgaagcaggagaatcgcttgaacctgggaggtggagatacatttttcctgctgcccactcttcaccctgctgcagtcccctttctcctgagcacatgtctggttatagctctggcctttcaagactatagctcctgctgactggtgacttacaggtgtgcatatctcgtgacctctggaataatggctggcagtcttttatgtctacacctttgcagaat

SEQ ID NO: 182112 - DNA, 581 bp, Homo sapiens
aaaaagaaaaaaacaacatcttcctagaaactgattgcataaaggtaagaggaaacgagaaaacaaaactgagacatcacaggcagtggggatgtatgaccttcttatggcagagtttagcagaggatgggtccccaagactgaaagatgtcagtaagcacttagcaatggtgacagtgagagtcacacccactacacaccctactctctaaggtcaattcagcaggctggcagggatgtttactattttattttatttattttattttaaatcttaagcctgtatttttagtagaggtggggtttcatcatgttggccaggctggtcttgaactcctgacctccttgaactcctgyaatcccagctacttgggaggctgaagcaggagaatcgcttgaacctgggaggtggagatacatttttcctgctgcccactcttcaccctgctgcagtcccctttctcctgagcacatgtctggttatagctctggcctttcaagactatagctcctgctgactggtgacttacaggtgtgcatatctcgtgacctctggaataatggctggcagtcttttatgt

SEQ ID NO: 182113 - DNA, 483 bp, Homo sapiens
tagcagaggatgggtccccaagactgaaagatgtcagtaagcacttagcaatggtgacagtgagagtcacacccactacacaccctactctctaaggtcaattcagcaggctggcagggatgtttactattttattttatttattttattttaaatcttaagcctgtatttttagtagaggtggggtttcatcatgttggccaggctggtcttgaactcctgacctccttgaactcctgtaatcccagctacttgggaggctgaagcaggagaatcgcttgaacctgggaggtggagatacatttttcctgctgcccactcttcwccctgctgcagtcccctttctcctgagcacatgtctggttatagctctggcctttcaagactatagctcctgctgactggtgacttacaggtgtgcatatctcgtgacctctggaataatggctggcagtcttttatgtctacacctttgcagaattc

SEQ ID NO: 182114 - DNA, 483 bp, Homo sapiens
tagcagaggatgggtccccaagactgaaagatgtcagtaagcacttagcaatggtgacagtgagagtcacacccactacacaccctactctctaaggtcaattcagcaggctggcagggatgtttactattttattttatttattttattttaaatcttaagcctgtatttttagtagaggtggggtttcatcatgttggccaggctggtcttgaactcctgacctccttgaactcctgtaatcccagctacttgggaggctgaagcaggagaatcgcttgaacctgggaggtggagatacatttttcctgctgcccactcttcaccctgctgcagtcccctttctcctgagcacatgtctggttatagctctggcctttcaagactatagctcctgctgactggtgacttacaggtgtgcatatctcrtgacctctggaataatggctggcagtcttttatgtctacacctttgcagaattc

SEQ ID NO: 182115 - DNA, 471 bp, Homo sapiens
ggaacttgcagcttgaatatgacaaggtcaattgcttctaaaacaaaaatagcatccatccgcctaatattttatgaagacccaggcctcaaarcttaatgtccatgacgcaatccaaaattacaaaaaaaacagataaactgcaccccacatgagaaaagacaatcagtactaagtagctaccaatactgagaagaaacagaaatttgaattacatcacaaggattttaaagcagcttttataaaaatgttccaacaagtggtcgcaaacactttttttctctcttgggacggagtctcactctgtcacccaggctacagtgcagtggtgcaatctaggttcactgcaacctcggcctcccgggttaaaacgattctcctgtctcagcctaccaatgagctggaactacaggcatgcaccaccacgtccagctaatttttgtatttttagtagagaaggggtttcaccat

SEQ ID NO: 182116 - DNA, 471 bp, Homo sapiens
ggaacttgcagcttgaatatgacaaggtcaattgcttctaaaacaaaaatagcatccatccgcctaatattttatgaagacccaggcctcaaaacttaatgtccatgaygcaatccaaaattacaaaaaaaacagataaactgcaccccacatgagaaaagacaatcagtactaagtagctaccaatactgagaagaaacagaaatttgaattacatcacaaggattttaaagcagcttttataaaaatgttccaacaagtggtcgcaaacactttttttctctcttgggacggagtctcactctgtcacccaggctacagtgcagtggtgcaatctaggttcactgcaacctcggcctcccgggttaaaacgattctcctgtctcagcctaccaatgagctggaactacaggcatgcaccaccacgtccagctaatttttgtatttttagtagagaaggggtttcaccat

SEQ ID NO: 182117 - DNA, 588 bp, Homo sapiens
tttgcagctgtaatgaaacttttagtcatttccctcaagatcacaatatgttctcttaagttattagtactttggccacttcccaaagaatgcaagatccttacaagtttacttccatgtatttgtgtatctctcacccttgtgccattgttgtaatacacttttttattgcattttatatttctacaagatattattattattgtagttttaaaaagctttcattactatttactcatgtttgccctttctctgcacttcatttattcttgcattcccccctgctgcttttgttttctagtttttgattgccaataagagctacagaaaatcatgaaatatttcttttgtttctatatttaatgtttaattgtttttgtgcttattgttagtaactttttgaaacacctttcattcctttaagtagagaggctcttcagccaaatttttattcattaatatttcctttttcttccagacattttgttgttgatgagagcagaaaagatttycctttttggaaaacattatcaagcaaaatattttatgggccaatgcttccataacctgaaacaattgaaagaattc

SEQ ID NO: 182118 - DNA, 588 bp, Homo sapiens
tttgcagctgtaatgaaacttttagtcatttccctcaagatcacaatatgttctcttaagttattagtactttggccacttcccaaagaatgcaagatccttacaagtttacttccatgtatttgtgtatctctcacccttgtgccattgttgtaatacacttttttattgcattttatatttctacaagatattattattattgtagttttaaaaagctttcattactatttactcatgtttgccctttctctgcacttcatttattcttgcattcccccctgctgcttttgttttctagtttttgattgccaataagagctacagaaaatcatgaaatatttcttttgtttctatatttaatgtttaattgtttttgtgcttattgttagtaactttttgaaacacctttcattcctttaagtagagaggctcttcagccaaatttttattcattaatatttcctttttcttccagacattttgttgttgatgagagcagaaaagattttcctttttggaaaacattatcaagcaaaatattttatgggccaatgcytccataacctgaaacaattgaaagaattc

SEQ ID NO: 182119 - DNA, 596 bp, Homo sapiens
tatttgcatggagtatctttttccataccttcagtttcagtctgtatgtgtcctcactagtagagtgagtctcttgtagrcagcatatggttctttaaaaaaaaaaaaaattattcagctgtcctaagtctcttggttggagaatttaatctgtttacattcaaagtaattactgataggtaagcacttgctactgctgttttgtcattcattttctgaattttttgtaagtccctgtttctttatttctctcttgttgttttctttttgctttgtggttaccatgaggcttacgtaaaatgtgtgagctttataacaagctacattaagctgataataattgaactttaatctcatactttcactccccccttttataattttgatgtaaattttttatttgtttttgtaatttgtattccttaacaattgcagctacaattgcttttaatagtttttccttttaatcatcacagtaaggatacgattgctttatgtatcacccatacagtgttagagaatgagtttgattatgtattacttaataccattgagttactgagatttttacatgcatttttttgttgttgttaagt

SEQ ID NO: 182120 - DNA, 596 bp, Homo sapiens
tatttgcatggagtatctttttccataccttcagtttcagtctgtatgtgtcctcactagtagagtgagtctcttgtagacagcatatggttctttaaaaaaaaaaaaaattattcagcwgtcctaagtctcttggttggagaatttaatctgtttacattcaaagtaattactgataggtaagcacttgctactgctgttttgtcattcattttctgaattttttgtaagtccctgtttctttatttctctcttgttgttttctttttgctttgtggttaccatgaggcttacgtaaaatgtgtgagctttataacaagctacattaagctgataataattgaactttaatctcatactttcactccccccttttataattttgatgtaaattttttatttgtttttgtaatttgtattccttaacaattgcagctacaattgcttttaatagtttttccttttaatcatcacagtaaggatacgattgctttatgtatcacccatacagtgttagagaatgagtttgattatgtattacttaataccattgagttactgagatttttacatgcatttttttgttgttgttaagt

SEQ ID NO: 182121 - DNA, 608 bp, Homo sapiens
gaagccagcagctcttgtttctctgtgtgwttctgtgaggaaccaccaaattgttttccacggcaagtgcatcattttctattcctagcagccagttcatgagggctccaatttctccacctccttagcaacattgattttctgtgtcgttgttatgaaagccttactagtggatgcaaagtggtatctcatttgggttttgtcttgcattttattaatgaataacagtgtttagcatcttttcttatccgtcttacacatttgtgtatcttcttcggagaaatgtctattcaagtcctttgcctattttttaattgggatgttagaaattctgatgttgagttgtgggatattaagcttttatcagatacgcactttgattttatcagatacatattttctcacatactatgggttgtcttttcactcccttgatagtatcctttgatgcataaaggttttttattttgattaaatctaatttacgtgtattttcttttgttatctgtgcttttctgtcatatttcaaaatacacttaaaactcaaaggtcataaaggtttaccttgtgttttcttctaagagttacatactttagtccttacatgt

SEQ ID NO: 182122 - DNA, 425 bp, Homo sapiens
taatatgcccacttggaggaaattgccagcttaggccaaccagggtgaaatgcatgcacttataaactcataagcccaataataattttcagaaggaggcactcattcacttcggcttataaacttgcaaatctgtagattcattagtctatcacttacatggaaagacaaaatttatatttaattgttgagacttgacttcaaaattttcaagaatatcaacatttgtttttgttgtgcacctctctgtcaaaagataaatacgtagtacakaatcattattatttattaataatatactctgcatggtcttacatttcacagttcatgcattgtttattcattaatataacctgttaacgttaatatgcaccacattaccgagagcccttgtcaactcctcagaagcaactaactcccaaggt

SEQ ID NO: 182123 - DNA, 516 bp, Homo sapiens
cctttgtggataaagcatgggtactcagcaattaggaataaacccttcagctaatgtctaagttgctttcattgttactttatctgtttgatttcttgtctaaagtttgataatggcaactaacccatttttaagagaaattaaaatggataacatgcatgtgatattctgtgaaaattgcatgacttcttttaattaatttaaggaaactatagatgtgtagttagggctttaaaccaaactggtgcaatttattttctgctaaattacaaagttatttgattgaaytgacaagtaatattgctttgttttatttttaattcgttactgtgcaaattcacatttggggaatggaagattatataggaaaccttgaaccacctttaaataactatatttttatttattaagccacaaacagtttagttatgttgttatgagcaaatatatttactattttttctctgcaataggaatagagatttcttttgctcttctatctcaactgaaaagcat

SEQ ID NO: 182124 - DNA, 516 bp, Homo sapiens
cctttgtggataaagcatgggtactcagcaattaggaataaacccttcagctaatgtctaagttgctttcattgttactttatctgtttgatttcttgtctaaagtttgataatggcaactaacccatttttaagagaaattaaaatggataacatgcatgtgatattctgtgaaaattgcatgacttcttttaattaatttaaggaaactatagatgtgtagttagggctttaaaccaaactggtgcaatttattttctgctaaattacaaagttatttgattgaactgacaagtaatattgctttgttttatttttaattcrttactgtgcaaattcacatttggggaatggaagattatataggaaaccttgaaccacctttaaataactatatttttatttattaagccacaaacagtttagttatgttgttatgagcaaatatatttactattttttctctgcaataggaatagagatttcttttgctcttctatctcaactgaaaagcat

SEQ ID NO: 182125 - DNA, 602 bp, Homo sapiens
acagggtttcgtcattttggccaggctggtctcgacctcctgacctcatgatcygcccaccttgacctcccaaagtgctgggattatgggcgtgagccaccatgcccaacctagacagacatttttaaaaagtaaaaatacagtacttcatgaccacagatgcaaaaaaatcttaacaaagtttcaaaaaattgacttataccagtaattcaagtttagtttaccataataaaatcaaccaaagcaatttggcataaagacaaacattctgcaaaacaatttggcagtttcttaaatgttaaacagatatctaccatatgacatagctattcttgtctaggtatttacccaagagaaatgaaaggatattttcatatgaccatctgtgcataaatggtcatagtagcttatttataacagatgaaaactggacacaattcaaatgcccatcttcaaatgaatgaacacacaaattgagctatattcacacaacgagatactactcagcaataaaaaggaatgaattattgatacatattacacattaatgaatttcaaaataattctgctgaaagaaaaaagccagataaagaaaagtaaat

SEQ ID NO: 182126 - DNA, 604 bp, Homo sapiens
tctgtgcataaatggtcatagtagcttatttataacagatgaaaactggacacaattcaaatgcccatcttcaaatgaatgaacacacaaattgagctatattcacacaacgagatactactcagcaataaaaaggaatgaattattgatacatattacacattaatgaatttcaaaataattctgctgaaagaaaaaagccagataaagaaaagtaaatactgtgtggttccatttatatgacattctggaaaatagaaactaatcatgagagagatcagatctgtggttgccagggatttgagggaagcagggaggttatgggggaggggttatcaagagggaggagaatattttgctggggtgatsgatatattccttattttaattgtgatgatagtttcatggttgtatacatatgtaaaaatttaacaagtcctgcactttaagcatgtgtgttcatcatatgccaataaagcctcaatatggctgttaaacaaaaattaccgaactgctaaatatgtgtatcactctaggaaatgaaagacacctcttcaactgcttttgtgtcttgacttttttcccaaaggaagacctatatttt

SEQ ID NO: 182127 - DNA, 631 bp, Homo sapiens
tggggtgatggatatattccttattttaattgtgatgatagtttcatggttgtatacatatgtaaaaatttaacaagtcctgcactttaagcatgtgtgttcatcatatgccaataragcctcaatatggctgttaaacaaaaattaccgaactgctaaatatgtgtatcactctaggaaatgaaagacacctcttcaactgcttttgtgtcttgacttttttcccaaaggaagacctatattttgcttcatttctttctactctacatttctttttactctgcttgcatttagtttaaaagaaaaagctctctgttggtgatttctaatctattttaaagtaaataattgtactgtccaattagagactgagataactcatgaattatcacacaggttgttctcctgtacaatatatatgattttgagtactaatattacacagtgaattcagaattgtgtgtatgtacatacataccatagtcttataaataacttcaacttgcaataattaacttgcagttaattcttacagtagtatgagtttgggcctcttaaaaaaagaactaaaaccaactccctgcctgagaatagaaacacacacacacacacacacacacacacacacacc

SEQ ID NO: 182128 - DNA, 631 bp, Homo sapiens
tggggtgatggatatattccttattttaattgtgatgatagtttcatggttgtatacatatgtaaaaatttaacaagtcctgcactttaagcatgtgtgttcatcatatgccaataaagcctcaatatggctgttaaacaaaaattaccgaactgctaaatatgtgtatcactctaggaaatgaaagacacctcttcaactgcttttgtgtcttgacttttttcccaaaggaagayctatattttgcttcatttctttctactctacatttctttttactctgcttgcatttagtttaaaagaaaaagctctctgttggtgatttctaatctattttaaagtaaataattgtactgtccaattagagactgagataactcatgaattatcacacaggttgttctcctgtacaatatatatgattttgagtactaatattacacagtgaattcagaattgtgtgtatgtacatacataccatagtcttataaataacttcaacttgcaataattaacttgcagttaattcttacagtagtatgagtttgggcctcttaaaaaaagaactaaaaccaactccctgcctgagaatagaaacacacacacacacacacacacacacacacacacc

SEQ ID NO: 182129 - DNA, 497 bp, Homo sapiens
gtgttgtcttttttttcagatacctgggagagaggatttttcatgttaccaacacaaagaaatgataaaggtttgaggtcatgggcatgctaattaccctgatttgatcattatacattttatacatctactgaaatatcccactgtaccccataaatatgtacaattattatgtgtcaartaaaatatgaatatatatagtaaataaataaatgaagtaatttgccattacttaacatttcattaaatgtatgtttccaaaattatatttgttcttgagaccttttgagtgatcacagtttctgctattctccataaggcctcagtttgacagggtgatgaaatcttgaataaaacacaaaggaatgtgtttgtatttgcagtgcttcccttgcaggtgaaatggccaccagacccaggctttctggaatgcattcattttctgcagttgaaagggacaatcccggatctgaaagaaagagccacagtgactccaa

SEQ ID NO: 182130 - DNA, 346 bp, Homo sapiens
cctctgtggaaaggcaaatcgaatgaaagtttgaggtgcacctttttttcaagcgaattctctggagagatggtgtcttgacaccatggagatcctcaaagacacctggggtcccttgacaccagtgggtggtgccagtgatgcaggcgaggcttcaaagctcagctgctgacagggtggggctctgttgctgcatgagttcagtcttccaagaattgactggcagggcaaccctgtcacagaatatsctctccatttttggagaagtggctgagacttactgaagttctcaaagtgttcatcgagctcttatgtttatatgtattttgaaatccagtggttgagg

SEQ ID NO: 182131 - DNA, 593 bp, Homo sapiens
ttcaagcgaattctctggagagatggtgtcttgacaccatggagatcctcaaagacacctggggtcccttgacaccagtgggtggtgccagtgatgcaggcgaggcttcaaagctcagctgctgacagggtggggctctgttgctgcatgagttcagtcttccaagaattgactggcagggcaaccctgtcacagaatatgctctccatttttggagaagtggctgagacttactgaagttctcaaagtgttcatcgagctcttatgtttatatgtattttgaaatccagtggttgaggtcagtaactcacatatgatgggtctgatgagttttgacattgcattctttttccccccacgagacggtgtcttgctctgtcacccaggctggagtgcagtggcctgatctcagctcactgcaacctctgcctcctgggttcaagtgtttctgctgcctcagcctcctgagtagctgggattataggcrcacgccaccacacccggctaattttgtattttcagtagagacggggtctaccatgttggccaggatggtctcgaactggctactctcaaactcctgacctcatgat

SEQ ID NO: 182132 - DNA, 525 bp, Homo sapiens
gagttaatgagaaaattaaattataaaaatattatggcaatgaggtggatcatcgcagtgttcaagctacagataaaaatatgacatgccctccaactttcattctcttttatttttcagtaatattcaaaatatttattgcaaaagttagcatttcaatgatgaaattaagatgcctttcagttcaagtttggcaattttacatatttcatgtgaaactctgatttgaaatgttgctkagggtctttagtattgcatatgaataataaaaatcaaatttgccacatattggaataagatatacagtattttatatggcaaatgtttctcttccttttaagagaagaagagaaatattaaggtggttattactcaagtgaatcctacttaaaagtaactttctaatagttgagaagtcacttatgcatacctacgtgaggaagaaagttgaattgactgtcattcattcagcccagtgggacatcaaactctccaaacctttcacagtaggaaaacaaagccagg

SEQ ID NO: 182133 - DNA, 525 bp, Homo sapiens
gagttaatgagaaaattaaattataaaaatattatggcaatgaggtggatcatcgcagtgttcaagctacagataaaaatatgacatgccctccaactttcattctcttttatttttcagtaatattcaaaatatttattgcaaaagttagcatttcaatgatgaaattaagatgcctttcagttcaagtttggcaattttacatatttcatgtgaaactctgatttgaaatgttgctgrgggtctttagtattgcatatgaataataaaaatcaaatttgccacatattggaataagatatacagtattttatatggcaaatgtttctcttccttttaagagaagaagagaaatattaaggtggttattactcaagtgaatcctacttaaaagtaactttctaatagttgagaagtcacttatgcatacctacgtgaggaagaaagttgaattgactgtcattcattcagcccagtgggacatcaaactctccaaacctttcacagtaggaaaacaaagccagg

SEQ ID NO: 182134 - DNA, 525 bp, Homo sapiens
gagttaatgagaaaattaaattataaaaatattatggcaatgaggtggatcatcgcagtgttcaagctacagataaaaatatgacatgccctccaactttcattctcttttatttttcagtaatattcaaaatatttattgcaaaagttagcatttcaatgatgaaattaagatgcctttcagttcaagtttggcaattttacatatttcatgtgaaactctgatttgaaatgttgctgagggtctttagtattgcatatgaataataaaaatcaaatttgccacatattgraataagatatacagtattttatatggcaaatgtttctcttccttttaagagaagaagagaaatattaaggtggttattactcaagtgaatcctacttaaaagtaactttctaatagttgagaagtcacttatgcatacctacgtgaggaagaaagttgaattgactgtcattcattcagcccagtgggacatcaaactctccaaacctttcacagtaggaaaacaaagccagg

SEQ ID NO: 182135 - DNA, 503 bp, Homo sapiens
cgttttgtttggttttgcttttgttctttgctttgcttttgtttaacaatgagaatctatccaagctattattaacatttgattacttagatgccaagttttgcttttagttcataaggaaacrtagtcgattttatcactggatactactggtagaaactttgaattgatatttcggtgaaaacctattttcattgaattgtcaaaccacaaatgctatatataatagcaatttagaacaagaaaaacaacctgattttgattaaaatgaggatacataatgaaaagtcaccacaaaataaactttactctgttactggcttttgaagaaaatcatttagatattaaatctatagatagaacatttctctgcctcatgtaatattttattcttagttaaaagttttgaggtataaagtaatgcattgtatttctttgtagatcctcccagttatagatatcctatgaagcaaagtaaattgggaaaggagataacaggtgga

SEQ ID NO: 182136 - DNA, 536 bp, Homo sapiens
agcctttacatttctacacaaatgtgactatgtattggcaatgcacttcatacacaatgactaatctatactgtgatgatttgactcaaaaggagaaaagaaattacgtagttttcaattctgattcctattcaccttttgtttatgaatggaaagctttgtgcaaaatatacatataagcagagtaagccttttaaaaaattttctttgaaagataaaatacatgagtttctaacaattagaaaggaaaaaatkaaaatatgaaataacaaaagtaaacaaaagatactttcaaagcagtgaacaaaacattttgacataagccataatataaattataatataaaaacataaaaaccatagtataaattgtcagtctttgagttggccacaaattcaatttaatgaaagaagagaagggatgctggaggtaaataaattcttagagtttctatctcatagagtttgctcttctggttctctagactgccaaagaacataaagatgtacaaggggacctagctgtagtaaaagca

SEQ ID NO: 182137 - DNA, 543 bp, Homo sapiens
ctttctatactagattattagtattattagctaatggtcttctgcattttttggtttttgatttgtattgagatatagcctttacatttctacacaaatgtgactatgtattggcaatgcacttcatacacaatgactaatctatactgtgatgatttgactcaaaaggagaaaagaaattacgtagttttcaattctgattcctattcaccttttgtttatgaatggaaagctttgtgcaaaatatacatataagcagagtaagccttttaaaaaattttctttgaaagataaaatacatgagtttctaacaattagaaaggaaaaaatgaaaatatgaaataacaaaagtaaacaaaagatactttcaaagcagtgaacaaaacattttgacataagccrtaatataaattataatataaaaacataaaaaccatagtataaattgtcagtctttgagttggccacaaattcaatttaatgaaagaagagaagggatgctggaggtaaataaattcttagagtttctatctcatagagttt

SEQ ID NO: 182138 - DNA, 536 bp, Homo sapiens
agcctttacatttctacacaaatgtgactatgtattggcaatgcacttcatacacaatgactaatctatactgtgatgatttgactcaaaaggagaaaagaaattacgtagttttcaattctgattcctattcaccttttgtttatgaatggaaagctttgtgcaaaatatacatataagcagagtaagccttttaaaaaattttctttgaaagataaaatacatgagtttctaacaattagaaaggaaaaaatgaaaatatgaaataacaaaagtaaacaaaagatactttcaaagcagtgaacaaaacattttgacataagccataatataaattataatataaaaacataaaaaccatagtataaattgtcagtctttgagttggccacaaattcartttaatgaaagaagagaagggatgctggaggtaaataaattcttagagtttctatctcatagagtttgctcttctggttctctagactgccaaagaacataaagatgtacaaggggacctagctgtagtaaaagca

SEQ ID NO: 182139 - DNA, 612 bp, Homo sapiens
agatctttactacttcgtaggaagggattctggatgtgttagctggcaatgaccctggacgggcagascttggtgtcaggttctctagttgggctgtgtcacttcctgagccctaaggttgaatggtactgctaactggactctgcagttcactctgatcaggcaggatcgtaggctgtctccgctggttggatggtattgttgtttagaatctgtagttgaacaggcctctgggctgagctctatggtcacctaaagactctggtgttgttgctcagctacacagggctgattagggctagaagccattatgccccacacatatgtgcggacttgatcttgtctcctggcctaaggtaggcttaaacaaagcttagtggagttcctggtcagctgctggtgctgggtggggaccagatgtaccctctgcagagaagtgctgactttcacttgccttctagcctgggcaatgctgtagaaagcaccaggtctatgtaggaaagctggcgagggatgctagctgggtacacctgtgagctgtacttcctgcggtacaatgctgttggctaatctctctcatatgatgcctccattagccagaatgcagactaa

SEQ ID NO: 182140 - DNA, 582 bp, Homo sapiens
tagctggcaatgaccctggacgggcagagcttggtgtcaggttctctagttgggctgtgtcacttcctgagccctaaggttgaatggtactgctaactggactctgcagttcactctgatcaggcaggatcgtaggctgtctccgctggttggatggtattgttgtttagaatctgtagttgaacaggcctctgggctgagctctatggtcacctaaagactctggtgttgttgctcagctacacagggctgattagggctagaagccattatgccccacacatatgtgcggacttgatcttgtctcctggcctaaggtaggcttaaacaaagcttagtggagttcctggtcagctgctggtgctgggtggggaccagatgtaccctctgcagagaagtgctgactttcacttgccttctagcctgggcaatgctgtagaaagcaccaggtctatgtaggaaagctggcgagggatgctagctgggtacacctgtgagctgtacttyctgcggtacaatgctgttggctaatctctctcatatgatgcctccattagccagaatgcagactaactacacgct

SEQ ID NO: 182141 - DNA, 590 bp, Homo sapiens
aaaaagtaagtatgtcttgagagattatgaataggttgtagctacttttcttgtttttatatatctttttttataggaagaaaatatattgtgcttgaataagattaacatacatggtatttagagaaaattatttttatttatatatgatatcgttttatttggaaggaactcttgtaaaaaagaatgaaatgatagtgtggacagagttatgctgataatttttaggactctgctgatgtaactcagtttagtaagatgaaggagyttcagaatatttatatttctttgacgacaagaatgtggaaagcaatgcacatatttacataattctgaaaatatgaacagggaaaggtcagtatgtgttctagttagttcaaccttaagaaactgtttcttgggaattggaaagggtatgggtgtataaatatgtaatgatttgaaaggggaatcaggaacttaaaagacaatgaataaatgagcacgcatacataaaaactatttggcattgctaatttgatcaggatgatttttaaaattgtctcacaactttttcacatcacttgttctactcactagccattgggaga

SEQ ID NO: 182142 - DNA, 351 bp, Homo sapiens
ctccgttacccaagctggagtgcagtggtgcgatctcagatcactgcaacctctgtctcccgggttccttktttcttgtgcctcagcctcccaaacagctggaattacaggcacaaacctccattcctggctaatttcctttgtatttttagtgaagatggggtttcaccatgttggccaggctggtctagaattcctgacctcaagtgattttcctgccttggccccccaaaatgctgtaactacaggcatgagccaacacacccggcctatttgagtattttatatgattcccttttctttcctcttttagcgcatcaattatgcttctttaaaaaatttttagtgatt

SEQ ID NO: 182143 - DNA, 266 bp, Homo sapiens
tcactgttctggacctcaaggatgcctttttctgcattcccctgcactctgactcccagtttctctttgcctttgagggatcctgcagaccacacggcccaacttatgtggacagtcttgcctcaaggttttagggatagctcacatctgtttggtcaggcactggctcaagatctaggccacttctcaagtycaggcactctggtccttcagtatgtggatgatttacatttggctaccagttcagaagcctcatgccagcaggc

SEQ ID NO: 182144 - DNA, 526 bp, Homo sapiens
aaatcaatcctaggattgtttagcttaaaaacaatgaactaaattagtagtcatctaagagattgtagttatttcaaattagaattagcttttagcagggcagtaggatcaggagttgtgttcctgtagactctgtgccctattcttccttctgcaaagccctgttaaagtgatagagtctgtagyccacagtgtgagaagtactgttttaaagaaatatattacaatgggtctatattttgctgtagtgcttatcatgatcactagctaccaggtttaaaatttgtaggaggcttttctgtcttgaggcacttatttaaagtaacatttttttttattgctgctcacttatataactttacgaaaatttcaaaatatttaacattcatgtagcctaccaggaattgatagaaaggttatcaatcatgacaattcccaattatcatttatcaagtgcaacaacacgcattgaacacatctgttttgtgatatattaaaggaattatcatatacattattaggttcc

SEQ ID NO: 182145 - DNA, 526 bp, Homo sapiens
aaatcaatcctaggattgtttagcttaaaaacaatgaactaaattagtagtcatctaagagattgtagttatttcaaattagaattagcttttagcagggcagtaggatcaggagttgtgttcctgtagactctgtgccctattcttccttctgcaaagccctgttaaagtgatagagtctgtagtccacagtgtgagaagtactgttttaaagaaatatattacaatgggtctatattttgctgtagtgcttatcatgatcactagctaccaggtttaaaatttgtargaggcttttctgtcttgaggcacttatttaaagtaacatttttttttattgctgctcacttatataactttacgaaaatttcaaaatatttaacattcatgtagcctaccaggaattgatagaaaggttatcaatcatgacaattcccaattatcatttatcaagtgcaacaacacgcattgaacacatctgttttgtgatatattaaaggaattatcatatacattattaggttcc

SEQ ID NO: 182146 - DNA, 526 bp, Homo sapiens
aaatcaatcctaggattgtttagcttaaaaacaatgaactaaattagtagtcatctaagagattgtagttatttcaaattagaattagcttttagcagggcagtaggatcaggagttgtgttcctgtagactctgtgccctattcttccttctgcaaagccctgttaaagtgatagagtctgtagtccacagtgtgagaagtactgttttaaagaaatatattacaatgggtctatattttgctgtagtgcttatcatgatcactagctaccaggtttaaaatttgtaggaggcttttctgtcttgargcacttatttaaagtaacatttttttttattgctgctcacttatataactttacgaaaatttcaaaatatttaacattcatgtagcctaccaggaattgatagaaaggttatcaatcatgacaattcccaattatcatttatcaagtgcaacaacacgcattgaacacatctgttttgtgatatattaaaggaattatcatatacattattaggttcc

SEQ ID NO: 182147 - DNA, 526 bp, Homo sapiens
aaatcaatcctaggattgtttagcttaaaaacaatgaactaaattagtagtcatctaagagattgtagttatttcaaattagaattagcttttagcagggcagtaggatcaggagttgtgttcctgtagactctgtgccctattcttccttctgcaaagccctgttaaagtgatagagtctgtagtccacagtgtgagaagtactgttttaaagaaatatattacaatgggtctatattttgctgtagtgcttatcatgatcactagctaccaggtttaaaatttgtaggaggcttttctgtcttgaggcacttatttaaagtaacatttttttttattgctgctcacttatataactttacgaaaatttcaaaatatttaacattcatgtagcctaccaggaattgatagaaaggttatcaatcatgacaattcccaattatcatttatcaagtgcaacaacacgcattgaacacatctrttttgtgatatattaaaggaattatcatatacattattaggttcc

SEQ ID NO: 182148 - DNA, 470 bp, Homo sapiens
tttggactaagattcctttgaatcytaggttgctaaactgttctaacaaccatactggtttaagtgtttaacaggactcagactgaccttggccctattttcttttattttcttcttctttttttaaaactaaatattgctttaaattctttcagtcaacatttttttagaaccacaaactaagcaactataaattatatttagttatttacagaatgcaggttacgccattattaggaatacatgcatttgtgagtcactcatatttgctatcaaattgctaatatgatatatatataaatagtatgatttatatctcctgtgcatttgttacatgtgtgtatgttcagtaaaatgtaaaaatttatttaaaaatatcaatttattgtgttcataaattgaaagactcaaatagtacatatatattagagtaacaggagaactgctgacaattccatgtgctgacaaga

SEQ ID NO: 182149 - DNA, 378 bp, Homo sapiens
tttgcttggagaaacttaccgaaagaacataacgaaaatattttaaaatgaagagttacttataaagttcaatatatggaagacaaaaaatccactaataatgtctcatcatataaatgacagtacatatttcagaaaagattaaatatgcataaccatttattgtgaacaccttttaacaacacgggcaccacacacacattcacatgcgcatatgctccccccsaccccccctggacacacacacaaacattaccatgagattacagagacattatgagcattattactgtgattatttctatctaaaatattcatgtgtcacccgtagaacaataagaaagaataaaaatagtcatatgaacaagtgttatccaa

SEQ ID NO: 182150 - DNA, 378 bp, Homo sapiens
tttgcttggagaaacttaccgaaagaacataacgaaaatattttaaaatgaagagttacttataaagttcaatatatggaagacaaaaaatccactaataatgtctcatcatataaatgacagtacatatttcagaaaagattaaatatgcataaccatttattgtgaacaccttttaacaacacgggcaccacacacacattcacatgcgcatatgctccccccgaccccccctggacacacacacaarcattaccatgagattacagagacattatgagcattattactgtgattatttctatctaaaatattcatgtgtcacccgtagaacaataagaaagaataaaaatagtcatatgaacaagtgttatccaa

SEQ ID NO: 182151 - DNA, 354 bp, Homo sapiens
ataagctcactttccaagactgcttaagaagctctcaaattccacagtattaatcttagtttgatgattttgacttgttacagaaatttacatcatatttcccagaaatgttcttatcactcataccctatgaatattaaaaatgtctaaagccttgacatttttatttgcattgtttctactttgacacaaatattaatgtttctttggttattatgtagaaaataataactgtatgtgatgctcaaacataactakagacttgaacccaatttgtacagatgattgcctgaaaggaatagaggtgttaacgaatacaagctaaagtcatacagcttccaaaatgttttacca

SEQ ID NO: 182152 - DNA, 478 bp, Homo sapiens
aaccaaaaaaaaaaaaaaaaaaaaaagatcctgagtagccagagcaatactgagcaatacggacaaagctacaggtatgacattacctgactttaaaatatattgcaatgctacggttatggaactggtataaaaatagacccatacacaaatggaacacaatagagaacccagaaatcatgccgcatacttacaaccaaataatttttgacaaagctgacaagaacttccattggggaaagtacatcttcttcaatgaatgatattggaaaaactgggtaattataatacatgcagaagaataaaagcgaacctaatctcttaacatatatgaaaaacttacctcaaattggattaaagaattaattgtaagatgcctgcagaaaacctagggaaaactcttaatgaacattagtttaggcaaaaaatttatgacaaagacctcaaaagcayaggcaacaaaaacaaaaataaataa

SEQ ID NO: 182153 - DNA, 404 bp, Homo sapiens
cagaattctgtccctaagaccctggctggtgttgctggagctcctacagggagaccccggctagtgagaagggatgggtcaccgtccgtcctaaagaggcagtctggccactgtctgccacagcaggtgtgctgtgctgtgggggatatctcttgggaccaagctgtccagtttccctggctccagcaggggaaaagcacagcctggagctatagtgctggctgcagctcctcccccagggagttcaggcggcttagggagcaggcagcagcagtgatgccagccaaccctcccttggggagctcagttttcttaggcggccacagtgatggttgccacccctcctccaggaagctcagatggcttggacagcrggcaactgcagcaaagacggacgcccctcc

SEQ ID NO: 182154 - DNA, 613 bp, Homo sapiens
cctcaaaaaattaaaatcatataatatattgctggatatatacctagcaattctactacttagcatatatgttaaggaaaggaaatcattatattaaagagatatctgcacttctatgttcactgtagcattttttttttacwttagccaaaacatggaatcaacatacatgtccaccaaccgatgaatggataaagaaaacgtggcatttattcacaatggaatactcttcagccttaaaaacaataaaatcttgtcatttgcaacaacatggatagaagcaaaggacattaagtgacataatccaggcacacaaagtcaaataccacacgatctcacttatatgtaaaatctaaaaatcttgaactcatagaaacagaacatcaaacagtggttacaagaggattagggggattagggagatggtcaaaggacacaaagttttagttaggaggagtaagttcaagagatttattgatcctccttcctcatcctcccaagtggctagcactctcaaatggttctgaccaagttgaaacatgccaccatatctggctaacatatataatttttacttgttaattttaaaaataaacatatatatatatttatg

SEQ ID NO: 182155 - DNA, 650 bp, Homo sapiens
cagtctgctagtattgttgagtatttttttttgtctatgttcattagtgatacaggcctgatgtttccttttttcattgtgtctctgccaaattttggtattagagtgatgctggccttatagaattagttaggaaaggagcccctcctcctcaatagtttggaatagtttcagtaggatgggtaccatttcttgtttttttgtctggtagaattcaactgtgaatccatttagtttgaggctacaaagcactgctaaaagaaatcagagatgacacaagtaaatttgaaaacatttcatgctcatggattggaagaatcaatattkttaaaatgaccagacttccataaataatttacagatgaaatgctgttcatgtaaaaataccaatgccatttttcacagaattagaaaaaaaacttttctaaaattcatatggaacaaaaaaaacaaagatatctaatacccaaagcaatcctaaccaaaaaggataaagccagagtcatcacactatccaacttcaaactttattataaggccatagtaataaaaacagcctggtactggtacaaaaacagacacatagaccaatggaaaagaatagaaacctcagaaataaagccacacacttacaaccatctgatctttga

SEQ ID NO: 182156 - DNA, 543 bp, Homo sapiens
tcagttttcttaaagctcttgattcaacagagtaaacaaggtttaagcacaaacctaaaggacagcttaatcttacaatcatttccccttatgcttcaggcttacattttagctttattcattacagccctaaagcttctgctttctaaatgtataggttagagaaagtaccttggagctcacctgctcaagattaataatatcactccaagaagattagagctatcactcttcctgacctgatccaaatggtacaaacgggattttaaggatgatgtctgtttagagatccaatggagtgatgaggtacaagggatagctaccctgaggaatcaggaagatagactgccagggttgtaccaatgatacaccattagctttagctattatccaaagaaaagattatggctataaataaattcatccaggcctttaatacaatggacaggcacaccaatggatggamaggccaggaacataaccattaattttttttaaaaagagccttaagataagttcttatttcaatagcagaattgcagg

SEQ ID NO: 182157 - DNA, 620 bp, Homo sapiens
ataaaaaaacaaagtgacacggagagacctggagaatgagacaccaggcaaaaagagaggccagagagtcttaaagaatcaaaaatatgaaagacagagctatcttggaagtagagacttcatccttagctacgtcagtagatgcctggtaggtcagtcagaaaccatgtagatgagcctttctatgaaatgccaagcaaaatcatgggttgatttaagccctaagttttgggtagtttgttatgcagcaatagataacagaaacaacccctcctttctcaggcaactaacagttatctgaagctatactcatgatctgatttacacttttacatgacataattcatctgtactttgttcttctttctcagagatctattttatgattgttcaaggttacttaagtcaccttccacttatacaaatatctttgggacataawgttgggagataattttttataattttagccattttgcaaatcttctgggaaaaagggtattacaagaattattgcataacagaaagctttaaaagttataaatagtgtctccctaaagatagacacctgagaatatgataagccatagagccctacttttctctccttggaaatattt

SEQ ID NO: 182158 - DNA, 599 bp, Homo sapiens
ggggtctttctgctgcatcacaaggggtgtgtgtacagaccaattattgtgcatcagcttccaggaagaatctgatggccaggggagaccaaggaccactactaacgctgatcttgctctgtttcttctctatgtgagtaaagcttgttccatccagagattatctgtgttgtgtctttcttggtaattccattattaagatgataaataaatctccagaaaaccaccctaatgaaatggagacatatgatttacttgacagagaattaagaattaccattataaagtactcaacagtgtcaggagcacaatgtataaaataagcgaaaatttcagcaaagagaaaatatgaaattgtrccaaagagaaattaagaatcttaaaaatacaataattaaacagaacaattcactagaagggttcaacagaagattatataaagcagaaaaagaattagtgaactttaagacaggaaactggaaattattcagtcagaggagctaaaagaaaaataacaaaaaagagtaaaggaagattaagaggcttatgtgacagtataagatggattactatatgcattatgggtatcccagaagaag

SEQ ID NO: 182159 - DNA, 634 bp, Homo sapiens
taacaacatgatgacaggaacaaatctgcacacatctattctaaccttgaacataaattggctaaatgcctgaatcaaagggcacaaggtggcaaattggaaaaagaagcaagacccaatggtatagtgtctttaaaagagccttctcatatacaatggcacccataggctcaaagtaaaggaatgaagacaaatctgccaagcaaacagaaaacagaaaaaagcaggggttgagatgctaatttcaaacaaaacagacattaaaccaaaaatgatcaaaaacgaccatgaaggacactacataatggtaaagggcttaattcaacaagaagacgtaactttcccaactgtatacacacccaatacaggagcatccacattcataaagccagttcatagagacccacaaagagacttagataaccacacaataatagcgggcgacttctacacaacactgacagtatcagattaccaaggcagaaaactaacaaagatattggggacctgaactcaacacttgaccaaatagacctaatagaaatctatagaattctccrtcaaaaaataacagaatccacattgttatcatctgcccatagcacatattctaaagttgaccacacagttggtc

SEQ ID NO: 182160 - DNA, 414 bp, Homo sapiens
ggtttgttatataggtaaactcctgttatgtggattgttgtacactttatttcgtcaatcaggtactaaacctagtacccaatagttacttgagtttgctcctctccctcctctcaccctccacactcaagtaggttccaatatctgttgtcccttctttgtgttgataagttctcataatttacytcccatttataagtgagaacatgcagtatttgggttcttgttcctgtattactttgctaaggatagtggcctccagctccatccatgttcctgcaaaatacataatctattctttttttgactgcatagtattccatgctgtttatgtaccacactttctttatccagtctgtcattgataggcatttagcttgattccatgtctttgctattgtcgataatgctgca

SEQ ID NO: 182161 - DNA, 443 bp, Homo sapiens
  misc_feature (1)...(443): n = A,T,C or G
ttatcatctaggtatacttcattttatatatctgtttgtcagttgagaggcatgtaggttgtttctattttttggctattatgactaatgttgctatgaacatttgggcacaggattttgtgtggaaacatgttttcattacatatatatatagtgtatattcactgaattataaggcacmtctatgtttaatcttttgaggaactaccaaattactttccaaaatggctgcaccattttatattccaactagaaatgtctgaaagttccaattgctcacacccttgtcaacacattatggtctgtcatttttataacagccatcctagtagctatgaagtggtatttcttttgctgtggtgaattgcatttttcaaatggctaatgacattgagcatctttttagatgtttattagccatcagnnnnnnnnnnnnnnnnnnn

SEQ ID NO: 182162 - DNA, 626 bp, Homo sapiens
gcctggcactttattgagtgttaagcattcaaaaactaataatatatggcccaagtatgcttgtgtaactccttgtctagtatgaaagggcagatacrtaataaattgtataacaatacaataaattgtaacattgaattgtgtactgggaaaaaaaagaggaattgatttgagtgagttagagaggatttcacaaaggccaggatacttaggcagtcccttcaagaatccataaaaaatgctcacatgtaaagaagatggggagcaaatctggttagaatgaaagcatgtgcaaagatatggatatatggaaaagaatgaggtatttggagaagtgtgagttttaaacgggtgtaggttagagtatctgtagtagtgatatatatagagaagagggaattatcatgtatagattgggaaaataagaatttttttttaaaaaaagaaaaacacagtcacatggggaatgtactgcaggagagatcactttctccatctaaaagacaactagctacatgctgtcaagcttcagtaaatggctttcaatcaggaatgcaggcttatttttacctgatcttctgattcatcaaaaagtaaaagaaacttatactttatatatgcattta

SEQ ID NO: 182163 - DNA, 455 bp, Homo sapiens
agctgggcatattggcaagcacctgtaatgccagctacgtgaaaggctgaggtaggaggattgcttgagcctgggtctttccaaatctgggagagatatgaacttccaggtacttcaagctcttagtctacaaagaggttcaatgtaaagaagtattcaccaagatacattataatcaaactgtcaaaaaacaaaaataaaatgagaattttgaaarcagcagaagagactcatcatatatgaggaccttcacccacaagactatcaacctaattctcagaggaaatcatgcagccaagtagaaagcgggatggcacatttaaaatgatgaaaaaaaacttccaaccaagaaaacttggaaaagttgttcttcagaaataaaggcaagataaacatttgttcaaaaaaacaaaacccgagggagtttgtcaccactaaacctgtcttacaagaaa

SEQ ID NO: 182164 - DNA, 503 bp, Homo sapiens
aaaaaaagaaaaagtaaaaaaaaaacccaaaaacctgtagctatctaatttgttaatgaatatataataaaaacatrtaaaatatgacatcaaaaatataaaatgtagggaaaggaagtaaaaggggaaagtttttatatgcaataaaatttaagtggttatcagcttaaaatagactcttaaaactgtaaaatattctatgtaagcctcatggaaaccacataggaaaaatcctctagtgcaggggtccccaacccccaagccatggaacagtatccgcaggtggcctgttaggaatggggctgcacagcaggtggtgaagggtaagcatgcaagcattactacctgggctctgcctcctgatagatcagtggtggcattagattctcataggagcgcaaaccctattgtgaactgcgcatatgagggatctaggttgtgcacttgtttttttttgttttgttttgttttttgagatggagtcttgctgtcaaccaggttgg

SEQ ID NO: 182165 - DNA, 575 bp, Homo sapiens
ttaatataaaaattttaaaatatcatttaggtggttggagatatcaggatatgatgcaaaatgtgccaaatcaactaactctagtataaatgtatgaaacaaacttactaaagtgaacaggtaagaaaggaactgacatagggtagatatagatcaagagaatttaattgaaaatytgaaatcaaccttaatatttaaggttaattatttattttctttctttctttctttttttctttttttttttttgtgagacagagtctcgctttgttgcccaggctgaagtgcagtggtatgatcttggctcactgcaacctccgcctccaaggttcaagcaattctcctgcctcagccttctaagtagctgggactacaggcacccgccaccatgcccggctagtttttttttttttttccttcgtatttttagtagagacagggtttcaccttgctgacgaggcttgtctggaactcctgacctcaagtgatccacctgcctcagcctcccaaagggctgggattacaaatatgagccaccgcacccagtccaatttattttcaacaagggggaaaac

SEQ ID NO: 182166 - DNA, 575 bp, Homo sapiens
ttaatataaaaattttaaaatatcatttaggtggttggagatatcaggatatgatgcaaaatgtgccaaatcaactaactctagtataaatgtatgaaacaaacttactaaagtgaacaggtaagaaaggaactgacatagggtagatatagatcaagagaatttaattgaaaatttgaaatcaaccttaatatttaaggttaattatttattttctttctttctttctttttttcttwttttttttttgtgagacagagtctcgctttgttgcccaggctgaagtgcagtggtatgatcttggctcactgcaacctccgcctccaaggttcaagcaattctcctgcctcagccttctaagtagctgggactacaggcacccgccaccatgcccggctagtttttttttttttttccttcgtatttttagtagagacagggtttcaccttgctgacgaggcttgtctggaactcctgacctcaagtgatccacctgcctcagcctcccaaagggctgggattacaaatatgagccaccgcacccagtccaatttattttcaacaagggggaaaac

SEQ ID NO: 182167 - DNA, 483 bp, Homo sapiens
tctcttttttcgtagtctagctaaagctttgtcaattatatcttttctttttttaacttttattttagattcagggggtacacgtgcaggtttgttacatgggtaaattgcgtgtcatgggggtttggtgtacagattattttgtcacccaggtaatgagcatagtatctgataggtagtttttcaaccctcatcctcctaccaccytcccacctctcaagaagtccccagtgtctatcattaccatctttgtttccacatgtattcaatgttaagctctcacttataaatgagaacttacagtatttggttttctgttcctgtgttaattcacttaggataatggcctccagctccatccatgttgctgcaaagaacataatttggttgttttttgctttgttttgcttatggctatgtagtattccatagtgtttatgtaccacattttctttattcaatccacggttgatggccgtgtag

SEQ ID NO: 182168 - DNA, 493 bp, Homo sapiens
aaaaaaaaaaaaaaaaaaaaaaagtaaaagaatggtttgtgtctgagttagagatgaatgtttaaatgttgtgactgaataattctgattttcccagaccttgctacaaatgattcatcatcactcattatgttaacgtcaccaccattaggtaaaatatyccaaatgtctgtgtacacctaatactatttagaagcagaactaaaaaataaagatatataatcctgactctccaaaagctacaaccctgtatatacctcataattaaaataaatacagtttcactggattacattttaatgtgaaactcgctagctttaattgaagaaccatataagaaaatgagtaagtttttgcaccttttgaaataaaagtattgagagtctgggactttgcatattatttttttaactataaagtcaggatggatttgttgtgaggattaaatgaagtaaactataaaatacttgacaaaataatattaattcttttg

SEQ ID NO: 182169 - DNA, 616 bp, Homo sapiens
gtgcacacttgatatggtgtgatgaaaatcttacttctgtgaygaaattttacttctgtcatctttttctccaagcctcctaaccctaatataaacatgaaaaaaagcacaaaagaaattccaatagagagtcatattacaaaatattcaaccagtacgcctcaaaattgtcaaagtcattaaaaaacaaggatgttccctttccctcattcttgcaaataaatagaaaaaggaaagtctgagaaactgtcatagcccagaggactctaaagaaatgtgataactatatgtaatgtaatatcctgaacgtgaccctggaacagaaaaaggaacattaggtaaaaactaagataatctgaaaaaagtatcaattttcattaatgataatgtatcaaaatttttcatttattgtaataaaataccatatgaatgtaaaataataatatcaaaaactaggttcaggatatatagaaactctgtgtactatcttctcactttttctgtaaatctaaaagtgttataaaatctgtttaaagtaaatttaaaaatgagaaaaagattccttgcaaacattaatttttaaaaagcaagagtgactatactatattacataaag

SEQ ID NO: 182170 - DNA, 548 bp, Homo sapiens
gaatttgacatgattgcttaaataattggcttgcagagtcagtgctcactggccattttgttttgtctctatgaaagtggcatacatgagttgcttctagtctgccattttgacccaacctcatccaattgttttcttaagctattacaaaaaatagaaagaagaagaaaagaaaaacaaaaatgtcagagaaagccttcagaagatgggcaaagctccctaattgtacaggtatataggtgtagttacctcttgatactcttgcgatcactcttgtgatcaaaaccactgtacgaccctgcacaaaagaaaaggtaagcaaatcttcttttattcttttagcacactatatttgagtttaattttattaaggatatattaacctatcttgactcataccaaaattgactatcattcctcaatgtcatgggggatttgttytaagacctcttgtggatgccaaaatcttcagatattcaagtgtatggtataaaaatcaagtaattgcacaagacctgtgtatatcctcctgtatatcttaaatcatc

SEQ ID NO: 182171 - DNA, 364 bp, Homo sapiens
aaccatagaggagacaaaggaaaccatgtatttttaaaattattaatagttgaaagctatttcaattatgtttattttttcagagtatttctacatttcaaatgatatatccaacagcagaatttttaaaattaggttttgcatttcaaacaaagctcaaagatgttgagaaaataaaggaaacaaaaccaacctcagatacccagatactgttcyttcttccagcaacacaaaaactgagtcttattcaagatcactggcattcttccctgtgcgacagaggactgtgaggttcaagtccatacatggctgtcattcaaaggatgagcatggaagagtggctaagaagaaaactgttgtaaat

SEQ ID NO: 182172 - DNA, 606 bp, Homo sapiens
catgccagggcagggcaggccaggggccctggaagggtgtggccaacaccaagcagacatttcagagsattcacactaatcttaaccccggctggccttgggtccccaaaggtgtcactctgagagctctgcttacagagattctttctgctgtcactcaatttccctcccatcacctcaactccagccagggaggaatagatgctggttgtcaggacagccacatgccttcctgttctatatcacctagtaatctcaaagcgaaggtttgttgtttaatttattgattgttcagccttttgttttgttagcttgtttcctagttacctccagctgaccatactaccagagtgaggcagtacttcacatcctgggagatatgccctcggaacccatgaatgttattttgtattattttattttcatgatatgtattttttctatgtaaaaggaaaatgactgtaatatttgccttcaagatggttcaaacacaaaatattaaatgagctgtttcttaaaagaggtccttaaacaaatagacatgataagaatgcttatagacccaaatggaatagacagaatacttaattcataatacatggaatt

SEQ ID NO: 182173 - DNA, 481 bp, Homo sapiens
ggaatttattcaatacacactgtaaaatagttattttcactatgttyatggaaataaagcactgaatgtaaaaacatcagcaaataactgaaaactataaaaatacaccaagatgttgaaattaaagagctgagaaagataaccaaaattaagaacataaatggatttaacagcagctgaagaatatcagtgaacttaaaatatttcagaagaaactatgcatctgatttttcagtttagtccttatgatttgcagaacaaagaatataagattgctgcctttggaagatgaaagatcatattcggaaaaatacagaatagagggtaagagacacaaaggatacagtgagaagtgctaacataatttagttggagtctcaaaagaggagacagaaacttgggtataggcaacactggaaaaaatgataggtgaagatttcccagaaccaatgaaggaggtcagcccactgattctagaaag

SEQ ID NO: 182174 - DNA, 618 bp, Homo sapiens
ttattgctctgtggtacttgagtgtggtcagtatatttgtagttttttttttttaatttgttgaggattgttttaggtctggttctgtgatggattttagaatatgtgccatgttcagatgtgaaaaatgtatattttgttgattttgagtgaagatttctgcagatatctgttaggcccatttggtcaagtgccaagttcaggtcccaaatatctttgttagttttctgcctagataatctttctaatactagtggggtgttaaagtctctcactattattgtgtagttgtgtaagtctcttcataggtctctaagaagttgttttattaatcttggtgctcctgtgttgggtgcacatatatttaggatagttaggtcttctggatgaattgaacgtttttccattatgtaatgccctgctttgtctttttttgatggttgttggtttgaattcagctttgtttgaaattaaaatagyaacccttgcttttttctgtttccatttgcttggtagatttttctccatccctttactttgattctatgggtgtcatttgtgtgtgatgggtttcttgaaaacagcatacagttgtatcctaattcgttattcaacttg

SEQ ID NO: 182175 - DNA, 582 bp, Homo sapiens
aaatagcatgaggtattcatcactttattataaaataggctttgtgttagatgatttgtcccaattgtaggctaatgtaggtgtctgagcatgtgtaaagtaggctagactaagctaagctatgatattcagaaggtcaggtatattaaatgcattttcaacttactatgttttcaacttacaatgggtttattgggtcttagtcccattgtaagttggggaatattccatctctagtggrcaattacaggatatagataagttaagtgaaaaatagcaattcgataagagaaagagggtagaattagaataaaccttttatatggtgtctacactgcctgtgaagctgtgtggtattgaaattgaacttaggttagtttaaatgtttattgcaaactccaggaaaactactaaaaattttattaaataaatataaatgatacactaaaagcggagagaaaaaggaataatataaaatgctcaagtaataccagaaaagaaagaaaaagaaacaatgaaaaacaaacaaattacaagtatgataaatagaaaactatttttaaaattgtagatattaatcca

SEQ ID NO: 182176 - DNA, 582 bp, Homo sapiens
aaatagcatgaggtattcatcactttattataaaataggctttgtgttagatgatttgtcccaattgtaggctaatgtaggtgtctgagcatgtgtaaagtaggctagactaagctaagctatgatattcagaaggtcaggtatattaaatgcattttcaacttactatgttttcaacttacaatgggtttattgggtcttagtcccattgtaagttggggaatattccatctctagtgggcaattacaggatatagataagttaagtgaaaaatagcaattcgataaragaaagagggtagaattagaataaaccttttatatggtgtctacactgcctgtgaagctgtgtggtattgaaattgaacttaggttagtttaaatgtttattgcaaactccaggaaaactactaaaaattttattaaataaatataaatgatacactaaaagcggagagaaaaaggaataatataaaatgctcaagtaataccagaaaagaaagaaaaagaaacaatgaaaaacaaacaaattacaagtatgataaatagaaaactatttttaaaattgtagatattaatcca

SEQ ID NO: 182177 - DNA, 582 bp, Homo sapiens
aaatagcatgaggtattcatcactttattataaaataggctttgtgttagatgatttgtcccaattgtaggctaatgtaggtgtctgagcatgtgtaaagtaggctagactaagctaagctatgatattcagaaggtcaggtatattaaatgcattttcaacttactatgttttcaacttacaatgggtttattgggtcttagtcccattgtaagttggggaatattccatctctagtgggcaattacaggatatagataagttaagtgaaaaatagcaattcgataagagaaagagggtagaattagaataaaccttttatatggtgtctacactgcctgtgaagctgtgtggtattgaaattgaacttaggttagtttaaatgtttattgcaaactccaggaaaactactaaaaattttattaaataaatataaatgatacactaaaagcggagagaaaaaggaataatataaaatgctcaagtaataccagaaaagaaagaaaaagaaacaatgaaaaacaaacaaattacaagtatgataaatagraaactatttttaaaattgtagatattaatcca

SEQ ID NO: 182178 - DNA, 541 bp, Homo sapiens
agatgtttcccaggactattaattaaagatatatatatatgaataattttattgatatatatatgaataattttattaagcccattgattgccaactaacaaaaagttgaactaccaccaaggtaaattctgcatttattccttaagaaccctttctctaaacacatttttttctggtttcatctttatatgcattgattaaaaaaactttctacccaatgacattaagatatccctcttataacttcctaatattttatatttatctctttaattttattaggtagatttgaaaacatcaaaaacaaaaaatgttaaagaggtgaacagtcttrccatgcttgttctccacccactaaaattctatgcctcttaggaagtagtatttttgttagctttctgcctttcttcttgagatttctttgcaaatatatatccattcaaacagatattatttccaggctttttgtacacaaattataacatgatttttgtacattgtgtatgttatttttcatttaatgataaattccagtttggc

SEQ ID NO: 182179 - DNA, 556 bp, Homo sapiens
  misc_feature (1)...(556): n = A,T,C or G
nnnnnnnnnnnnnnnnnnnnnnnnnnnnnnnnnnnncagtatctattgttgtagatggtattatcatctcaaaatagtagaacttttgttttaatgataagactttcggcttgtgcctatttcatcatctagtaactataactggggacatgtacctgtcatgaaaagaaagaccaattcagagcagtactggtaaacagatattagtgtagagccatcattttcttgtctttcaggaaatcaaacaraatcagtatataaaataaatacttatgcagaaactattttaatgaaactatgtgatacatgaaagtctaaacaataaaataattgaaagagctaccactgctttcaaaagcaaggacatgaactggagaaaaaaaggagtcacggagagggtactacacacagatttcagataaagtcaccttcaaagtatatttctagataacaaaatgtgcatcttgagatttaaaaagcttgaaatctccttttgaaacgctaggctgatgataaaaaccttccatcaacctacttgggtttttaaaagcaatat

SEQ ID NO: 182180 - DNA, 612 bp, Homo sapiens
gtgagaaattaatgttcactggtgacaacaacaaagatttggagggttgcctgttatgcaacatagcccagcaaaaattactaatgcatcatggcaattatccaattattataaccttgcttaaaacttatgtgttttattatgatgtagctctatgttcatgtattttctatggccattatttcagacattttcmtcacaagtagcacttgaggcttcttcatgaaaagtatagattatagagactatattctgcttcattatgtatggactgggtcctagtatcttaaattttaacaaaaatcccacaactttctgatatatgtgttttgagaacatgattttgagaagaaaaatgactgtcattctattagttctcatgagaacatttacttctgtaaaattgctgtgctttgtaaatgcaaaataaagttgatcctgaaaataatacatattttcttaaatcagcattaactgtgattatcataggtttgatagtattagtagaaatttcagaacttaattttgcatatattatattttaaaaactgctcaaaaataaataatataggaagctaatatcttcagctccatccaatccttctttaattt

SEQ ID NO: 182181 - DNA, 394 bp, Homo sapiens
tgctttttcattcttttcaacatggcccagggtgagaatttttcaatcctttaagtcctatttctcttttaattataaattctgcttttattcatttctctgttcttgcrttttagcataaacattcaagaaagctaagccactccctcaatactttgcttagatattttttcaccaaatattttattgctcagagttctactttccacagaacaataggacacaaatactattcagacaagttctttgccacctcctaacaaagactgccttttcttcagtttccaataatatgttcctcatttgcaactgagcccatatcaaaatggcctttatcatccatgtttccacacattctgattataacaacttaggtaatcactaagaagattgg

SEQ ID NO: 182182 - DNA, 435 bp, Homo sapiens
ctttctcctcaaaacagtcagatgctgttttggttacctcatgtcatgcagtggcctgataaccaacttcatacagtaaactaaagcaatggtagaaatgttgtttacatctctttcctcatagatcacaatcctgcaatgtcaattgtctaatatctgaaatttttatgtaatttttatgatttttggttgcttatgaccttaagacaattgtcatgggagttaaaaaagaatgtggggctggacaaatacttataatcctaaacacattttgttttacaaaacagaagatgagagaacactgaacaactcatttatataactaccatcaccttgataccaaaaccrtatgaagacattatacaaaatttattctgtataaatcatttattgtcttatgatcctgaccattgtgttaaacctagaaaaagaaat

SEQ ID NO: 182183 - DNA, 605 bp, Homo sapiens
ctttgcttgtaaacataactttttaaattcccatgacacaattttaaagttgctgaatatagaattgttcagagtgccttagtaacttagaacttaatgcaatgaactacctataaaaaaattattttacttctcttatcttgccccaaagcaacctgattataaaatttccactttcccactgtccttggataataacattattagccataactacttagttggctgtccaaaagaacatagtatgagtaatttggtaaatctataaggcattatattaccagcccatttttcaaatgcaaagttaggcatgacagaattagtgaaatatagaagcacttcaagatttctttaacctgtaaagatcatatgtttttgtaagtttatkttcagccagagttcatccatctactattatagtatacatttcatcattttttgttgttaatattattaatttctaaaagttatatatatcattgcattcacttagactacttataattatatatagtcatgcattgaaaaattatgtaacataaatattctgcaggaagacaaagtctaataatagatattaaatcataataaaagctctatttgta

SEQ ID NO: 182184 - DNA, 568 bp, Homo sapiens
ataggccctgtgagatttatgctttaaggaggttctattttggtgtattttgagggtttgtttcaagatttagaactccttttagcagttcttgtactactgacttggtagtggcaaatcctctcagcatttgtttgtctgaaaaagactgtatctttccttcatttatgaagtttagtttcactggatacaaattcttggcagataattcttttgtttataaaggctaatgaaaaaatcccaatcccttctagcttgtatggtttctgctgaaaaatctgctattaatctgataggtttttcctttatatgttacctgatgcttttgccttacagctcttaagagtctttcctttgtctggctttagataacctgatgactaygtgcccaggtagtcattttttgcaatgaatttcccaggtgttctttacgcttcttgtatttggatgtctagatctctagcagggccagggaagttttccttgattattcctcaaataagttttccaaacttttagatctcttctttgggaatagcagttattcttaggtttggtcatttaacat

SEQ ID NO: 182185 - DNA, 333 bp, Homo sapiens
tgaataaactaattacagtctgaaatgaactcttgcacactagctatctcctgccatagatcaaggagagaactttattcccacaactatctactaatttgcattagccayaaaaagtgcaccagagcatccttccctactccaactgggcaaccagagctgcattggtagcatactacaccattggtattaattcctcacagttcaggtttgcagcaataaatttgccactgccacaacaatcctcaagtacaaatgcagctaggaagctattgatttacttgagttgggtggcagcactgatataattgtaagtttcactgcattaaattt

SEQ ID NO: 182186 - DNA, 497 bp, Homo sapiens
caatgccatttcatctctaagtacttcagtgtatrtttctaacaagggataagagttcctattagcctaagaataatactatcaatacacctaaaaatgaacaattcctccatgttgtcagtgttcaaatttctctgaatcataattagaattgcagatgctctttgacttacagcagggttatgtcttggtaaatccatcatatgttgaaaaggttgtaagtcaaaaacgcatttaatacacctaatctactgaacatcatagcttagcctagctatgtgcttaaatgtgcttagaacacttacattagcctgcagttgggtaaaatcatttaacacaaagcctattttatagtggtgtttaatatctcatgtaatttattgagtactgttctgaaagtgaaaaacaggatgtggttgtatgggtactcaaagtatggtttctactcaatgcacaccaaaaaattgtaagtcagggatcacctgtagtttgattcg

SEQ ID NO: 182187 - DNA, 497 bp, Homo sapiens
caatgccatttcatctctaagtacttcagtgtatatttctaacaagggataagagttcctattagcctaagaataatactatcaatacacctaaaaatgaacaattcctccatgttgtcagtgttcaaatttctctgaatcataattaraattgcagatgctctttgacttacagcagggttatgtcttggtaaatccatcatatgttgaaaaggttgtaagtcaaaaacgcatttaatacacctaatctactgaacatcatagcttagcctagctatgtgcttaaatgtgcttagaacacttacattagcctgcagttgggtaaaatcatttaacacaaagcctattttatagtggtgtttaatatctcatgtaatttattgagtactgttctgaaagtgaaaaacaggatgtggttgtatgggtactcaaagtatggtttctactcaatgcacaccaaaaaattgtaagtcagggatcacctgtagtttgattcg

SEQ ID NO: 182188 - DNA, 594 bp, Homo sapiens
atgacttgttctgtttggctctggaagatgactgaaacacacctctgcccatggagaattgagaggtgctgaagaacgagaaaacagaaatagtataaaagaaaaagctttggtttaaatatstggctgctatagaactcctggaggtatgtggttgggtgggaactgtctctccttttcaggctggtgcaggattatccttgctcactccccaacaccctcaggtgtttagatttggtctgactccagtcatttctgacctatatttgttgtgagactgatagagccctctatcaatggtgacaaaggggtgaccttgtctagaattctttaatctcaccgagtatcaaacacagagcagatctggacctctgcagatagggagaactgagactgagccaaagtttaggggatggggtggatctgatctggccagagccaagagcctgtgcatttacttgtcccagtttcctctcatgtggactgttaggatggtgggccagtccaagaaggggtggaagcaatgaaatgcaaataaaattggtatttgcctcacgtcccttctgggtgatttttttgatctttaggtttccc

SEQ ID NO: 182189 - DNA, 496 bp, Homo sapiens
acctaaactatccttggtttcatccagcagaatgtatagggtacaaacaggaaagaatgtcagccagttaggggtttaataatgcatgatttttattctcttgctctgagaacttgtataaaaaatttaaaccaaggaaaataactcaagatgtatggacttcttgtgctttctgaaagaaaaaraggtacccactaatttgctcagatatagcaggcttaatggttctatattttgaaaagactttaagaatggtttctaatacaggagagggaaaacatccactatcccttttcagaatttaaatggagggcggtaaacattctttacacccaaaacctgtggcagcagttcaaatttgaccaaggtaaatatagaatggagatgctctaaacacagctaggactcagcaagtctaacacactaaaatcatatgattacattttaaaagaaaatacacaaaaaccaaatagaaattttgagatttttttcattt

SEQ ID NO: 182190 - DNA, 564 bp, Homo sapiens
ttatgaatttgtgttgggccacattcaaagctgtcctgggccacatgcagcccacaggcggtgggttggacaagcttgttttaaatgatgatcacaaaatacttgtgtttactgagcaaaacccattgtcttcatttgggttctctgtgacatttggttcycctgccactcattctctcaacagaccccatggcaacaattcaaatgcaataagattctagaggaggcacaagaagcactacctccagtaggtgagtggaaagtgagagaaggaaggaaaggctacaaataaaggctgtgtcctcaagcagttaccactgggagtgaatggagctgaatcctatgggaaaggggaaatggtataaaacacctacctagggtgtctgcccagagaggcaagggggcttgggtatttgtcctcagactcccatcactcattggttgagggctcctccctggagggattaatttctgagcatttccagtctagcacttccagtttgctgtggacaggtcactaattccagcttactaggttcaatgcacattgcctcacaacagttc

SEQ ID NO: 182191 - DNA, 564 bp, Homo sapiens
ttatgaatttgtgttgggccacattcaaagctgtcctgggccacatgcagcccacaggcggtgggttggacaagcttgttttaaatgatgatcacaaaatacttgtgtttactgagcaaaacccattgtcttcatttgggttctctgtgacatttggttcccctgccactcattctctcaacagaccccatggcaacaattcaaatgcaataagattctagaggaggcacaagaagcactacctccagtaggtgagtggaaagtgagagaaggaaggaaaggctacaaataaaggctgtgtcctcaagcagttaccactgggagtgaatggagctgaatcctatgggaaaggggaaatggtataaaacacctacctagggtgtctgcccagagaggcaagggggcttgggtatttgtcctcagactcccatcactcattggttgagggctcctccctggagggattaatttctgagcatttccagtctagcacttccagtttgctgtggacaggycactaattccagcttactaggttcaatgcacattgcctcacaacagttc

SEQ ID NO: 182192 - DNA, 456 bp, Homo sapiens
cagtccccatccatggaagcttttcgtcattagaatatgcattccatgaaggcagagatctgcrtctgtgtgtggaagtatccaagctcccagcacagtgctggtacacagtagcgcctcaatgcttgtgggttgaacagaccgaggtccttcagctgaagtccaggctggctgatggcaggctgcttctcactagacttcctccctcttttctcagtcttaagacatctaagcagacttcttgggaaactccacaagctctctggatgtcctgatgccaagtgctaccagaatccggtctgttgctgtaattttcagattgtgtgccttggctgccagacgaggccttctggcagcacctgcaaggtgtgtgtgttggcatacaccagctcatgggccggtttccagcccctcccagtctgcctctgccttattaggctgtgttaattggtttga

SEQ ID NO: 182193 - DNA, 585 bp, Homo sapiens
gtagaactgtccctcctaccctcttcaatgcatcttttcatattatgctacaaccaggtactatgatctctcacttggtttcctcagctcttaagaaggtattttcacgcatggatagttgttcaaattaatgtttctgtggagagatgatcactggcgagtcctattcttccatctgccccctctccacagcctatagcttaataactttttaactctgagagtctcaaaacttgagactcaaagttttatgttgctcaaaaaacccgacctttttaaaaaataaaaatgtgaatagagccwtaagaaagtggtatagaaatggtaagagatgtcatgacaactgataatgaaccttgcaaactatttgttctgttttggttttccaggagggacattagagtgagaatatctgtgaattaacagcctgatttactttaaactttcatgaagaagcctgaaacaacaatgaagacataagttttcctaagagattaagcactgtcaccccaatatcctgatttctctacctcatcttacagaatatagacatatatccacaaggagcaatatgaaattggagtg

SEQ ID NO: 182194 - DNA, 585 bp, Homo sapiens
gtagaactgtccctcctaccctcttcaatgcatcttttcatattatgctacaaccaggtactatgatctctcacttggtttcctcagctcttaagaaggtattttcacgcatggatagttgttcaaattaatgtttctgtggagagatgatcactggcgagtcctattcttccatctgccccctctccacagcctatagcttaataactttttaactctgagagtctcaaaacttgagactcaaagttttatgttgctcaaaaaacccgacctttttaaaaaataaaaatgtgaatagagccttaagaaagtggtatagaaatggtaagagatgtcatgacaactgataatgaaccttgcaaactatttgttctgttttggttttccaggagggacattagagtgagaatatctgtgaattaacagcctgatttactttaaactttcatgaagaagcctgaaacaacaatgaagacataagtyttcctaagagattaagcactgtcaccccaatatcctgatttctctacctcatcttacagaatatagacatatatccacaaggagcaatatgaaattggagtg

SEQ ID NO: 182195 - DNA, 567 bp, Homo sapiens
agagatgtgcaatgcctgtgctaggacagtggtggcagagacagaaaacagaagagagaaatcaggaaccatttaggaaataggatcagctgggcttggtgatgaaattcaggagatgatgtcatgggtgactcctagttggttcttggagttgtgataatgcccttcactcactggttcatttgctgaaaaaaaaaaaaaaagaaaasaaaaatgacaaaaccctagctcaggcaccaaacacatagagcacactctcttctctttgacagccaagctagttctaagtagcatctagatgcctggtatacaagtcctaagtgcctgcagagctggccctcagctgagaagtgcctatcacacacacacacacacacacacacacacaagtaaagagaagccaacaggctacattagattcaggataaatgagctagcccaaatgacttcttctatttcaactccactatcattgcatttaactggtcacacctacaaagcaatcagcaaactgggtgactcattaggattttcttttcaagagagcaaagaacctaaataaagatc

SEQ ID NO: 182196 - DNA, 521 bp, Homo sapiens
taccagtaatgtgtttaatattccatatagagaaaaatgtagctagagcttggttagtatagactggggcattatctgttttaatagaagctggaatgcccatcaccacaaaacactgcaaaaggtgatgtttaacacaggcagaaggctctcctgattggcatgtagcctggacaaagtgagaaaaggtgtccacacatatatgtacataagctagtctcccaaacgagggaacacgtgtgacatccatttgccaaagagaagtaggttctaatcctcgggaattaactcctcctgtaaaagatgaggaatgtacaatttgccaagttgggcatcactggataatagctttagctcctttccaggtaatgytgtatctgcttttgagaccagaggcattaacatgggttgaattgtgaaagcaagcgtctagcaatagatattgcagtagcaattaggagatcaggcatttgattccctgcagtcaaaggtcctggaagaggtgtatgagccctaatgtg

SEQ ID NO: 182197 - DNA, 284 bp, Homo sapiens
aagcttgctatatttgtgccttcatgagagggacaataatttttccaggataatatccatgtaatttaacaatccragttctcccatttcctatcatagtaccgatttgatccaaataaggaattagagtctgtgaattagtatgtggaagaaaaagccactctgcaagatcttgctcttgaaaaataacacaagtaggtgaatgctgagttgaaaaagttagcaaatctggagacttctttggacacattatatttatttgagccttatggactttctttttg

SEQ ID NO: 182198 - DNA, 438 bp, Homo sapiens
gaattcccctacattagtgtatgacatgatttgaaatttatactgaataatattcaatcagagccactctttccactatcatctgagtatccatttgaagttagtaattatttctctttagctattctacatatgctttaatatttatcccaaatctggtttaatttacagaggcacaaacagccacatatttttcaggaggaaatgcaggcagaataagttcaaagacagtacttttatataattcattgtaccccattttccatgggaaattgtctgtcccactgacgttttgatgtgctcctacttaaagcattttctttcctagctcctctggaaagtaaaatactgaaattttaaaatgtcaaatacttttttcagttttcatgcctcttagttrtttttcaaaaaccggacaatatgcatttaaaaataaaa

SEQ ID NO: 182199 - DNA, 631 bp, Homo sapiens
gccaatcataacattccatttttcttcattgggattgttttggatatatgaaaccctggggaggatctgccagatggtagctgagaatacgtccctgactcttataaaagagactctagaggtgaaaattcctttcctttgtctgatattgtgcaggaaacatttaattcagcattcctcaattaatcaaatactgtacatttccaataagggcctgttctcaagattggctttggttggcttctggttactgagctctgagcccttggaatgttctccctgataagagttttttgtatgcctgaggccttgggctgttctgtaccaacttgacaggatggttagttaacagtgggatttatggtgaatacctgtttctgctccgggggtctggagtctgagaaggtagcgtcagtcatgttggtgtgcatggcctacataaatgacccccaataagatttcttgacacaaagccacattggcaatgcttagagtgtatygttacttatttgtaccaagaaaattaaacacattatgcagccccaaagagagaaaacacctagaagcttgtacctgatgtctgccagattgtgccccatgtgcatttttcctttgctgatttcaatatcat

SEQ ID NO: 182200 - DNA, 623 bp, Homo sapiens
aaagaccaagctgatggggaaaaaaaaagtatttggaaaaattgaaaaataagctttcaacattttgaaatacacccacatcttgataagcaaactaaccaactccaccttgggagataattctccatgggtaatttctccattgtctttctgtgcaatgttattatgcacagagtcacttgtttgggactgttttttcaaggatgtctatattacacatgtccttggaaaatggagacagtgtgtccctgcaggaagcaaatattgggcaggtctgcttacagcccaayagagaagattaacattaactgtccttggtgttgctcaggtgtgatgcaaactcactgagtgaacagattccacctagaattctctgtcttgcccctatagaatttgaggagcaagaaaaactggtgtgaatgtaaagcttaggctgcttgctgtgccacaacgataaagtccttttatctaaatcaggattgtcatgtcttctaatttcatcagtgagatttcggacttactacactgtaagtgttcgatatggtaatatctcagatccctcataatttttgacaatgcagcagagcctaaggtaacatttttaccttagtaattgtatctgt

SEQ ID NO: 182201 - DNA, 623 bp, Homo sapiens
aaagaccaagctgatggggaaaaaaaaagtatttggaaaaattgaaaaataagctttcaacattttgaaatacacccacatcttgataagcaaactaaccaactccaccttgggagataattctccatgggtaatttctccattgtctttctgtgcaatgttattatgcacagagtcacttgtttgggactgttttttcaaggatgtctatattacacatgtccttggaaaatggagacagtgtgtccctgcaggaagcaaatattgggcaggtctgcttacagcccaatagagaagattaacattaactgtccttggtgttgctcaggtgtgatgcaaactcactgagtgaacagattccacctagaattctctgtcttgcccctatagaatttgaggagcaagaaaaactgrtgtgaatgtaaagcttaggctgcttgctgtgccacaacgataaagtccttttatctaaatcaggattgtcatgtcttctaatttcatcagtgagatttcggacttactacactgtaagtgttcgatatggtaatatctcagatccctcataatttttgacaatgcagcagagcctaaggtaacatttttaccttagtaattgtatctgt

SEQ ID NO: 182202 - DNA, 623 bp, Homo sapiens
aaagaccaagctgatggggaaaaaaaaagtatttggaaaaattgaaaaataagctttcaacattttgaaatacacccacatcttgataagcaaactaaccaactccaccttgggagataattctccatgggtaatttctccattgtctttctgtgcaatgttattatgcacagagtcacttgtttgggactgttttttcaaggatgtctatattacacatgtccttggaaaatggagacagtgtgtccctgcaggaagcaaatattgggcaggtctgcttacagcccaatagagaagattaacattaactgtccttggtgttgctcaggtgtgatgcaaactcactgagtgaacagattccacctagaattctctgtcttgcccctatagaatttgaggagcaagaaaaactggtgtgaatgtaaagcttaggctgcttgctgtgccacaacgataaagtccttttmtctaaatcaggattgtcatgtcttctaatttcatcagtgagatttcggacttactacactgtaagtgttcgatatggtaatatctcagatccctcataatttttgacaatgcagcagagcctaaggtaacatttttaccttagtaattgtatctgt

SEQ ID NO: 182203 - DNA, 636 bp, Homo sapiens
ctgtctgtgcagaagcttttcaatttgaggtaataccatttgtctattttcacttttgttactagtgctttgggagtcttctgatttcttctctggcctaaacttaatgtagaactctcatgctaaatgaaaacaaatctttcactttatccatttatcttttttatttctctttctccagttcaagcataactttttttccttcaattatttgtaataacttattttaattcccgcyagtataagccaatgagttgtctattgaatagtataaattatacatatatacttcatatttatacacatacattgtattactatacacacaggctatatctatttttgccatttgattcaaagagtatagtttctctcccagtttccaatttccttttagaagagctctgtgctttctctttattttttgcgaatcctattcaataaaatggtaggtacttagaagatgcttgaaaatacttttaaatatttgtaaattaatctacttggtgacttagtatttgattgtttgaaagaagtaaatgcttaaatgataacttgctagtatcaaagagtttagagtctcctacaaattaatttgctatagtttgaatgttttttttttgaagactaggcatt

SEQ ID NO: 182204 - DNA, 584 bp, Homo sapiens
atttttgctcttgccaaatccccaatgtctttatttatcattctctgcttcctgtaagcaatacggttactccattctcaaagtcactgaacaaattcctgcaacttgaaaccacaggcatcggggaaaaaataatctgaaagtccacatgtaaaatgtgctttacctacttaattagttcccataagcataatttgtattgtgttagtaagatacatagattaatttacctcgacttatttttccaatagaagygagaatgaggaaataaacagtatcttgtttttaagaaagaaagaaaatgattctaattttattcatgagctcgagtcacattgtttctggaatgtcaaacttgaaagacataaataccataagaacaatacactattctataatttaacacctgtctcccataaataggctatggcattttcatgcttctgtgttaatgcaatatgttgctttttttttctttttgctactaccatgaaatgtctggaacagagctatgagcattttaaacttggctgtagcatgcctgctctgaggctctctgtgcattttttttccctatcagactc

SEQ ID NO: 182205 - DNA, 590 bp, Homo sapiens
tgctagattcagatgcagcggaatatggagggcatcagagactggaccacagcactgactttttttctgaggcttttgaacataatgggcgtccctattctcttttggtaagtaagtttctcaacatatttcctgctattttaatttactcttttattatagtaatgtttttgttcaaataaacaactcttcaaataagcaacatggaaaaaaagcatgaaggaaaggggttagggagaggggactacgcttggccagatgtaatgtgtgtaaaaattgggttttggaaaaactaatagtaaaggatatttaggggacaattggcaaaaattaaatattaataggattcaaaactgtttctcaagaaatgagcagaaggcagttttttatttttctttcaaytatgaacatttctattctttatgcaacatttcactttccttctgttcttgttttctccataacattttatattaagcagatttctacattattgactagcagatgaagtttaatttaaaacaccttaaaggagtcaatgaaaaatgtatctttcttttctttcatgtagtaaattgaaggctgaattc

SEQ ID NO: 182206 - DNA, 374 bp, Homo sapiens
acatacaaatgacaaacaggtgtatggaaaggtgctcagcatcactgattgtaaaagaaatgcaaatcaaacctacaatgagaaatctcaccccagttaaaataacttttttccaaaagacaggcagtaacgatcctggtgaggatgtggagcaagtagaaccctcatacactgttggtggggttgtcaatcagtacagccagtatggagaacagtatggagattactcagaaaagctaaaaatataactaccatatgatccagcaatcccactgctaggtatacacccaaaagtaaagaaatcagtatatggagcagatrtttgcgctcctcttttattgtagcactgttcactatagccaagatttggaatc

SEQ ID NO: 182207 - DNA, 461 bp, Homo sapiens
actataaactcttgccctcatggatcttacactataacagggagtaggggagtagctaattggatagtaaatcatatagtaaatgcttaatgtgtaattgttgaatcgaatcttaagctaaggaatttgaattttctattgttggctattgaaatccattgaagggcagtaataggagcggactgtctcataagatatgaatttggcagcagttagtataaagagaaggtagagatggggaatgccatttggatatggtctaggcaagcagtaatgaagattaaataagattgtggttgtggtaatggagcaaaggaaagtaacttatttgaaagatattgtggaattagaattgataatacttagcacatattttcctaaagttgtcttaatatcttttgttacatctgggtccctgtaccwatctttgaaacccatttttaaattacttttatttattt

SEQ ID NO: 182208 - DNA, 389 bp, Homo sapiens
gaattctttgagttatagtcacagttccttagaaatgatttgaagagaaaattgtcctttggctggcagcaaaaatcattgacatcagagtctgttgtttgggagtaataacccgggagagggagaaatggcacattcaggcttgccaacatttgaaatacatggaaaagggacagtggcagtgccattgaactctattgaaatccactggattaagaagcttttcagaaatagggaaatgggaaagtggttagcattgcgttaacaatgagtgcctattttgtaaacagaaatagttggcatgtgtaggagatgagtcccactcattgtttttagaagttgagcagctattgctagtttatgagtcrtctgtgatgcatctgataagg

SEQ ID NO: 182209 - DNA, 426 bp, Homo sapiens
tactcactggcttatagcaagggggctcatatttcagtaatctttttatttacaatttcaattccttggggacaaggaccatacatctcaaaggtctagtatatggtgacagtaaacacatgttaccaataaaaatgaggactaaatttaaaaagaaagctatgatcacctgcctgcagacaatatattcagtgagcatcacaracaccatcttcccatggaaaacaaaacaaaaatgggaacatgaagcaatgtggatagccctacctcatagttttcattaagtttaccacctgatctcctttacatttgatctgggcgtgtgggatttatgtaaaaatgcatttagtattgtaaagaactatataaacggaaggtatttatcattactgtcccagccactatgcttggaatgtttaagaattc

SEQ ID NO: 182210 - DNA, 510 bp, Homo sapiens
acaatacattcttaaacaaccaatgcattgaagaagtgacaagggaagttagaaaaaacttagagattaatgaaaatgaaaggacaacatactaaaacttatgagattcagtgaaagcagtgctaaagggggaaattatagctatcaatttttttcatttwaaaaaaagaaagacctcaagccaacaacctaactttaaaacttaaagaaccacaaaaagaagaacaaactaaacccaaagctaacagaagaaatgaaattgtaaaaattaaagcagagataaacaaaatagggaggaaaaaatgacaaaatcaacaaaaccaaagttagttttttgaaaagatcaacaacattaacacacctttagccagataaactaagaaaatgagagcgaagatttaaattactagactcggaaatgaaagtgaggacattactatcaattctacataaatataaaggattataagagagtaaatgaactattgtagggcagaagaaattggttac

SEQ ID NO: 182211 - DNA, 593 bp, Homo sapiens
ttatactagaattaaatccccaggagattagggtccttttctgcatgttccccattcctggcacagagtcagagcttaataattattgaaggaagagaatctgttctttcttagaaaagtaaayaatagttcataacaacattctgtcatgtattcccagtcctgtggctacagtggaatccacatatcaaggtaaattccttttttgcacagtaacttgtatgaaggggatggcaggcaatgcttacgtgggaacacagagggaaaatggggtcctaagccttatactttgatgaatagtcaagtcccttttggatttgtcttttctgagttaggggcatatgcaacaggctgctctctattgctgtgggattgagtgggtttctgaacacactgactcattcctccatacatgtgaaagcaccattcgaaggacttgagacatattggtgagcaaacatagacccctatcctcatgaagcttttattgctgctggtggagacagaaataataaatgaaacaaataagtatgttacatgttatacggtgataggattaagaaaaaaagagaagtagagcaagatagggaaag

SEQ ID NO: 182212 - DNA, 493 bp, Homo sapiens
tgttcatcagcagccagaatagcagcagcagcaataaacatccatggactgtctactggacatggggcactgtgtgaggtcctgaaggaagaaaggtataaagttctatccttatcttcaacatctggtcaggagaactacccttgctgatagaattttcttttctagggagtagattttttataccagagaacctaccagactttactaccatatgaaaaggtttaaggaagttttctgagtaattatttggtacccagatatgcctaaaaaccataaggtaggcagacttctaaagatatctccccragagttccacactctggctattcaatcaaacattagtataggtaccactgtgaagagatggtattagggttactaatcagctgtccttaaaatagagaggctatcttggattatctgcgtaactccaatgcaatcacataaatccttaaaagcagaaactgagacagaagactcagtcagagag

SEQ ID NO: 182213 - DNA, 460 bp, Homo sapiens
aaaacaaaatcaacagatgtcaatcctgmgatgacccagatatgggaatcagacagaatttagagcagttactataattgtgcttctagaaggaaccacttttgaaatggataaaaaaatagaagtgctcagcagagaagcaggagctacaaatacagaatcaaatggtgattttagaactaaaaaatataatatctgaaatataaaatttactggatggactcaagggagataatagaggagtcagcaagcaagtatagatcaataaaaattattcaatctgaagaattcagagggaaattattttaaaaaacagagctccagagacctagaggaaaatattcaaaagtctaatattcatatcattgaaatcccagaaaaagatgagagagagattggcacagaaaaaaaatttgaagaaataatggcttaaaatatgtaaattatgaaatgaaaaaca

SEQ ID NO: 182214 - DNA, 555 bp, Homo sapiens
gactctcatggaaaacaccatggaacctctgctaaaatgagtgttgttcttcacccaaagcactgtctctcctctcgggagcctggcaggaaatagaattatgggaagtaaactgctatcagcctaacagtctaacctagagcaaccggattgcaggcttttgtgggtttgggatcacgtgttcttcacttttacttatgctgaataataatcyttccacatggtgggaaatccatataatttttaactggtccagtggtatctggaacagatctgagagagtggattcattcataaaccaacatttatcaagtttcctgctagtggcgaggctttgttctagatctacatattgcggatggaagaagaacaaaataaatccctgtctcagggagactgccttttagtgggagaatcagaggataaccaaccaaccaaataaatataataccatggcaggcagtagtaagtggtataaagagaaagataagtggaagagactagtgtaggctgaggccaaacaatgatcactagtgatcaacagtagtcgtaggc

SEQ ID NO: 182215 - DNA, 555 bp, Homo sapiens
gactctcatggaaaacaccatggaacctctgctaaaatgagtgttgttcttcacccaaagcactgtctctcctctcgggagcctggcaggaaatagaattatgggaagtaaactgctatcagcctaacagtctaacctagagcaaccggattgcaggcttttgtgggtttgggatcacgtgttcttcacttttacttatgctgaataataatctttccacatggtgggaaatccatataatttttaactggtccagtggtatctggaacagatctgagagagtggattcattcataaaccaacatttatcaagtttcctgctagtggcgaggctttgttctagatctayatattgcggatggaagaagaacaaaataaatccctgtctcagggagactgccttttagtgggagaatcagaggataaccaaccaaccaaataaatataataccatggcaggcagtagtaagtggtataaagagaaagataagtggaagagactagtgtaggctgaggccaaacaatgatcactagtgatcaacagtagtcgtaggc

SEQ ID NO: 182216 - DNA, 548 bp, Homo sapiens
tgagagtaagttacaaacatgatactctttacatctaaatacattagtgtacagtttatgtcacttagccacattacaataaacaaaatcaagaaactaacattaataacattacagtctaacttagaagccatattcmaattcagccatttataccactaatattctaaaccaatccaggatcccatgttgcctgtagttctcatatctttttattttcctttactctagaacagtcagtttttctttgccattcatgacagttactttttttttaaagaatacagaccagttattttgaacaatgttcctcagtttgggtctgtctgatgtttccttattagatttaagccatgtatttttggcaggagtacaacaggagtgatgtgtttttctcagtgcagcatgttgtctttagtgaacagtaatttaactgtccatttggtaaaggtggtgtcagccaattttctttaatgtaaagttaccatttttgtctttgtaatgaataactatcttgttgtgagctactttgagattatataatcatc

SEQ ID NO: 182217 - DNA, 422 bp, Homo sapiens
gtctttgtaatgaataactatcttgttgtgagctactttgagattatataatcatcctgtttctcactatacttttatgcaataattctttgatgagtcttgcctgaaataattattactagcatggtttccaaatagtgatttttctatttctatcgttcgttctacctttgttagttggaattttattgtaaagaagagttttactttctaccctgctaaacttcttttctgaggtctctgcattcatctatctgtccatccatctattttcttttttatttatcctttgcttcatttcatatgtactaaatgtatagtcttatttcatttctctgacttaattagattttcataaaagactcccttagtgatgttcctgytcactactttatttatgtatcattacatgtgcctactac

SEQ ID NO: 182218 - DNA, 589 bp, Homo sapiens
tgtccagaactaaaatattttcataactataagataatattgttctttttaaagttttgtttttcagggttttagcatttcatatacataatttccttttcccaactgccctcacctatttccctggcatactactggtatttacctgagacttaactcaagtttatttttgcctatataaagcttattctgtctttgcaaccctgctccaccccaactcacagaattgaacactctctttttatgtgcaagcactgaagttggcaccagtctctgggatctactctaatatctgttatcacaacacattgcacattgtattaatgttttcytcatcattagactgtaatttatttaagagttaagtctgtgttttcttactctttgtgtcctttcttcctgtggtgatgacatagcaactgcccaatacatactcatggaagttaacttatgaataaataagtgagtggctttcaactgcagatgcaactttgaatgagacggcatctgtttccacaccaaaaaaattttaaaacataatatttagatttctttcaataattaattatttataaagtccttttgcata

SEQ ID NO: 182219 - DNA, 612 bp, Homo sapiens
ggaacaaatgtatatcttacatatattgattgaggtctcatgtatccgtaaaataaataaaaccaagctgtttcccaaccatgttgggcacatgttgtcaggacctcctgaggttgtgtcacaggtgcacatccttaaatttggcaaaataaactacctaaattgactgagacttgtctcagctatttagggttcacaaagtgttggcgagctagtcagaaaaatggggctctctacctgatggtcttgccattttatgaaagccaaagaaagatatttcaaagagaagggctggggagtctgtgagtcactattactctgtttctcagtggtccgagagtactaatatttacgtagctgcagctgagtcactgatgtgcagcccactgggtccctgcatggtgccccctgccataatgggttgacaggaccatgaggtagagcttgggagggaggcttgggggccgcagggcatattaaaacttcaataaaatcactcttgtaaagcgactgagcccgaaggtagtacagctgtttctgttcctcttgcaatatgtcaatcagactgcctcrcctgcaaaagtacctttcaattttatttcttccatctcc

SEQ ID NO: 182220 - DNA, 573 bp, Homo sapiens
gtttggggacatagctctcatatatctgcatggttaactcattcaagtcttttttttttttttttttttttttttttctgagacagagtttcgctcttgttgcccagggtctctggctcaccgcaacctccgcctcctgggttcaagcaattctcctgcttcagcctcccgagcagctgggattacaggcatgtgccaccacacctggttaattttgtatttttagtagagacggggtttctccatgttggtcagggtggtcttgaactcccaacctcaggtgatctgcccaccttggcttctcaaagttctgggatcacaggcatgagccaccgcgcccagctcaagtcttttgttttaagccaataaaaatccactatggtggccaggcatgaggaaagatgtgaaagtgtaaattggactactaagcattttaaaacaagatttcakaaaaaaaagaaatgaaaaggcagagtattggatgatcaatgtagatacaggccatgcgatgtaatagaagaaggggaaaaaatgctctaagaacaaaacagtaagtgacaactgttatttggc

SEQ ID NO: 182221 - DNA, 609 bp, Homo sapiens
tacttaaaacagaacaagagaatcttctctggtggaaggggaggcagggactctcacagccttcacctctgggttccctcttcaccacacataaatttagaccgtttaycttgaaacttctaagaatttggagaaccaaagttcataaaacactgggttataaagaaaaaaaatgaaatagcatagcaagaatgagagcttgccttagaaagagacataatggaggaatcacactgacatatgtttgctttctaaatgggctaggtcgaggactctttgagtcacttcctctatattgtgatataaaggggagagggtgagcaaatatcctatatatataaggagtttatggagactaagtttaagaagaaaatataaaatatatgttacaattgggggataaagatatttttagacataaactattcagattgaggtaaggactgctctgaaggtaataagaaaaagtatgatgttatttagtgtattgttaaaaaccaagatagaaatgtggaaagtttgttttcactggttatggaagaagaattaaaaatataggcataaatatatttttctttcataataaaaattatggtaattataactgaa

SEQ ID NO: 182222 - DNA, 609 bp, Homo sapiens
tacttaaaacagaacaagagaatcttctctggtggaaggggaggcagggactctcacagccttcacctctgggttccctcttcaccacacataaatttagaccgtttaccttgaaacttctaagaatttggagaaccaaagttcataaaacactgggttataaagaaaaaaaatgaaatagcatagcaagaatgagagcttgccttagaaagagacataatggaggaatcacactgacatatgtttgctttctaaatgggctaggtcgaggactctttgagtcacttcctctatattgtgatataaaggggagagggtgagcaaatatcctatatatataaggagtttatggagactaagtttaagaagaaaatataaaatatatgttacaattgggggataaagatatttttagacataaactattcagattgaggtaaggactgctctgaaggtaataagaaaaagtaygatgttatttagtgtattgttaaaaaccaagatagaaatgtggaaagtttgttttcactggttatggaagaagaattaaaaatataggcataaatatatttttctttcataataaaaattatggtaattataactgaa

SEQ ID NO: 182223 - DNA, 609 bp, Homo sapiens
tacttaaaacagaacaagagaatcttctctggtggaaggggaggcagggactctcacagccttcacctctgggttccctcttcaccacacataaatttagaccgtttaccttgaaacttctaagaatttggagaaccaaagttcataaaacactgggttataaagaaaaaaaatgaaatagcatagcaagaatgagagcttgccttagaaagagacataatggaggaatcacactgacatatgtttgctttctaaatgggctaggtcgaggactctttgagtcacttcctctatattgtgatataaaggggagagggtgagcaaatatcctatatatataaggagtttatggagactaagtttaagaagaaaatataaaatatatgttacaattgggggataaagatatttttagacataaactattcagattgaggtaaggactgctctgaaggtaataagaaaaagtatgatgttatttagtktattgttaaaaaccaagatagaaatgtggaaagtttgttttcactggttatggaagaagaattaaaaatataggcataaatatatttttctttcataataaaaattatggtaattataactgaa

SEQ ID NO: 182224 - DNA, 527 bp, Homo sapiens
tttgttgtgtcacacacggttattccaattgcactttacgggaacttggagaggaggcatatgaggtagtggaaaagtaccaggaaggaaagttgcgtctcaggtctgccattctgtggattttggaaaatctactaacttccttgggactctgattcctgatgtgtaatatgaagtggctcccaggaaagatggagtagaatttaccaccatctgagcgattgctggaaatccggagggatattttgacaactttgtttgtcactgtgactatgagagccttctgatgcctgtttccctcagaatgggaatgctacacatctccaaagcacaatgaagaattttcccacttcaagtgtcaggagtacccctaccacaaagcaaaacaaacaaacaaacaaaaaacctcgaacattgytatggtctcttccagctgacaagatctcacaaagtaaagttgttggtgatattgaccaatactaacatttacaaagcaaattttctttttaaaagaaaattgtaaatcc

SEQ ID NO: 182225 - DNA, 417 bp, Homo sapiens
caacacttttatccgctaatttgctgtagttcattgctctacttttgtttacttaaatatttaatctaggttctttatactttgccagcacccaaaggcacacttttctcttggtgcattccagtttccatagtactatttgctggcttgattctytaagagacagtccttttattgaattacaaaaattctagatttaacccaagataaatgttgaatattgcttggggtcctggaaaacattagatgctctgtaaaagagtggccctacctccaagttaaaagcagcctgtttgaactttcaaatacacattccacttcagtgtactctgtcaccataagatttctgtaccctgggctcaccttgacaacctaaatcctatgcttactggatcagctgctttcctctgggaattc

SEQ ID NO: 182226 - DNA, 416 bp, Homo sapiens
gaattctggtaaatcctttccacttacaacacttttatccgctaatttgctgtagttcattgctctacttttgtttacttaaatatttaatctaggttctttatactttgccagcacccaaaggcacacttttctcttggtgcattccagtttccatagtactatttgctggcttgattctttaagagacagtccttttattgaattacaaaaattctagatttaacccaagataaatgttgaatattgcttggggtcctggaaaacattagatgctctgkaaaagagtggccctacctccaagttaaaagcagcctgtttgaactttcaaatacacattccacttcagtgtactctgtcaccataagatttctgtaccctgggctcaccttgacaacctaaatcctatgcttact

SEQ ID NO: 182227 - DNA, 524 bp, Homo sapiens
ttccaaataagttttatatattttttctaattccgtgaaaatgtcattggtagtttgataggaatagcattgaatctgtaaattgctttgggcactttagccattttaacaatactggttcttgctacccataagcatggaatgtttttscctttgtgttgtctctaatttcttggagtagtgttttgtaattctcattgtagaggtctttcacctccctggttagctgtatccataaatattcttttgtttgtgggttttgtgaatgggattgcattcttgatttggctgtcaacttggatgttatttgtgttagaaatgctactgatttttgtacattgattttgtatcctgaaacttagctaaagttgtttattagatctaggagtctttgggtagagactatgggattttttttaaggtatagtatcatatcatctgtgaagacaaatagttttacttcctctcctcctatttgaatgccttttattttcttctcttgcctgatactctggctagtgctt

SEQ ID NO: 182228 - DNA, 323 bp, Homo sapiens
ctgggtgatgggttgataggtgcagcaacccaccatggcacacatttatctatgtaacaaacctgcacatcctccacaagtaccccagaactttaaaataaaataaaayaaaataaaataaaaacttttaacactgctttattgttctggtatgttgtatctttgctttcattagtttcgactaatttattgatttctgccttaatgtcatggtttacccaaaagtcattcaggagcagattgtgtaattttcatttaattgtatggttttgagagagatatttggtattaacttctctttttattgcactgtgttccaagag

SEQ ID NO: 182229 - DNA, 323 bp, Homo sapiens
ctgggtgatgggttgataggtgcagcaacccaccatggcacacatttatctatgtaacaaacctgcacatcctccacaagtaccccagaactttaaaataaaataaaataaaataaaataaaaacttttaacactgctttattgytctggtatgttgtatctttgctttcattagtttcgactaatttattgatttctgccttaatgtcatggtttacccaaaagtcattcaggagcagattgtgtaattttcatttaattgtatggttttgagagagatatttggtattaacttctctttttattgcactgtgttccaagag

SEQ ID NO: 182230 - DNA, 540 bp, Homo sapiens
tagtatttgacagcacaacaggatgattacagtcaacaaaaatttattgcacatttaaaaataacagagagaatataatgggaatatttgtaacagaaagaaatgataaaggcttaaagtgatagataccccatttaccctgatgtgattattatgcattatatgcctgtactaaaatatctcatgtaccccacaaatatacacacctactatgtacccataacaaattttagatttaatttaaaaaatgaagtgggctgggatgatgtgacatatagcatcaagtatttgcattaggctctgtccatgcttgagtttttgttttccaccatgaaaatagcatgttcmagagagtgggtgcttcttcagtctagatcccagaatggtaagacacgaagaataccatcaagctgagtcctgttgagcgtagcagagatgaagccagttcacattctcatataatataagcaaaaactaaatgtgttatgctacagggtggaatgttgatgtccccccaaaaatttaaatcttcacccccaa

SEQ ID NO: 182231 - DNA, 594 bp, Homo sapiens
tctagatcccagaatggtaagacacgaagaataccatcaagctgagtcctgttgagcrtagcagagatgaagccagttcacattctcatataatataagcaaaaactaaatgtgttatgctacagggtggaatgttgatgtccccccaaaaatttaaatcttcacccccaaggtgatggtattcggaagtgtggactttgagaagtgattaggtcaaggggtcagggccttcttaaataggattagtgtgcatttaaaagagacccaagagagacacctcaacccttttgccacgtgagggtagagtaagaaggctgtagacatcaatatctgccaatgccatgatcttgaacttcccagcctccagaactgtgagaaataaagtttctgttgttgtaggccacacagtctatggcattctgttgcagcagcctgcacagactaagatgtcataaaccactgataacttagagttgtttgtcattgcaccaagatttgactaataaattaaccatgatttaagttgaggatcctatggatttattatcttattctttctatttcttttttggtgccaaaagaaatcagtagaaa

SEQ ID NO: 182232 - DNA, 453 bp, Homo sapiens
gaccaatttctccctggcacctgtaactagcaaaatcctaagtccttacataacagttaatctcaaaatctagtttccaagccagtgctctctcaaaggtctgttgttctgtttccaaaattagcaatgaaacatgatgcaggtatttctgataagaggaggatttcataataaaattactcagaaaagtatctcaattatcaattttgtttcagcacagaagacagagcctgaatgatctttgccaagtccctcaacttagtgtttacaaaacttcaaaatgtttacttaatataataatgacaaatccyagagagttttgtgaagaataacataaaagtcagaagggcttgctttgttaatgctaattaacccatttgtgcctgaagctgcaattttttgaatttttgcaatcagatcttggtgatgaccttgagcagcaggatataaata

SEQ ID NO: 182233 - DNA, 617 bp, Homo sapiens
gttcctattcagggcatttctgagggtgataatttaaaaagcaytgttttaaaaaaaccttaggttcggcacagtggctcatgcttgtaatcccatcacttttggaggctgaggcagaaggactgcttgacctcaggagtttaaggcccgtttgggcaacatggtgagaccacatctgcacacacaaaaattttttttaattaggcaggtgtggtggcatgcacctgtgttcccagctaccccagagtctgaggtgggacgatcacttaagcgcgggaggtaggggtgcagcgagccatgactgcgccactgcactcagcctcagtgacagagtgaaactctgtctcaaaaaataaaaaatacaaataaattagccactaggtctgaaatgcaaatatgctctgcaggatgattccacaactcaaggcacactgacctccaacagaaggctgtatgtagagttcacatctcaaaatcatgagacccaagaaaataacataccataagggacagtcaactgatgcatcaaacacagacagaagaattaccattctgttacttgagctacgataatgacttgaatgtgattttatataaagagtatgttttaaatcaga

SEQ ID NO: 182234 - DNA, 617 bp, Homo sapiens
gttcctattcagggcatttctgagggtgataatttaaaaagcattgttttaaaaaaaccttaggttcggcacagtggctcatgcttgtaatcccatcacttttggaggctgaggcagaaggactgcttgacctcaggagtttaaggcccgtttgggcaacatggtgagaccacatctgcacacacaaaaattttttttaattaggcaggtgtggtggcatgcacctgtgttcccagctaccccagagtctgaggtgggacgatcacttaagcgcgggaggtaggggtgcagcgagccatgactgcgccactgcactcagcctcagygacagagtgaaactctgtctcaaaaaataaaaaatacaaataaattagccactaggtctgaaatgcaaatatgctctgcaggatgattccacaactcaaggcacactgacctccaacagaaggctgtatgtagagttcacatctcaaaatcatgagacccaagaaaataacataccataagggacagtcaactgatgcatcaaacacagacagaagaattaccattctgttacttgagctacgataatgacttgaatgtgattttatataaagagtatgttttaaatcaga

SEQ ID NO: 182235 - DNA, 537 bp, Homo sapiens
caatagctaaaaccaaggtggtgaatgaggcagcttagggaatactatgattagaaaataaaatgctggaggcatcagatggaagaataggagatcctgatgaaagctgagcaagggctggcagaaacgtagcccaagaaaaataatttataatctgtttttaaaatctaacgtagatggtttcaagtcggatggggtgaaaaaacaaatgagatattggtgaaggaacttgaaatgtaagggctgagaacagaaaattggaatttgccatcagtaatttttttttttttttttttgagacagggtgtcactctgttgccttggctagagtgcagtagcatgatcagtaggtcgatcactgcagccttgacctcctgagcccmggtgatccatccactttagactccctagttgctgaagactataggtatgcaccaccatgcctggctgatttttgtattttttgtagacatggagtttcaccatgttgcttaggctggtcttcactcctgagctcaagcgatctgcctgcctagg

SEQ ID NO: 182236 - DNA, 539 bp, Homo sapiens
gctggtgaagcggcactgaaggaatcctgtagcaattaggctcatccaggatcacyggaaaggtgagagcagacctctttcactttcattgcagaggcttcttgtcctcagatttttttttctgaaaacagatgagacaccagacctctgtcagccagttaagagtgaatagtgcagctaccagttctacaagactcagaggacaggcttgccagagaggactttgtcaatcctccatcaccctcaggtgttggaaatgttggctttgttccaatctggttacccttcacagcagcctagccatcgcctaggattagaaggaagttctggggcagttgagggtatctggctgaggctgcacttcggcgttacccaaagataccaggactgactccagtccctgacagcccattatggtgtcagcactagaacctccagtctttcctttcacattttctttcattctttcttttgcagctgtcatggctcctatctcttctttatatacatacaatgttaaaggtgttgctgcaaaccag

SEQ ID NO: 182237 - DNA, 581 bp, Homo sapiens
gtttgaagtatgacagtttacttgatattttgtttcccctccatggaagaggcacatttcagctgcgtctagtcagcaacctttaattcttctgagcccagtggttcttcttagggcaatcttttcctcttttttcgatgtccttcttattggaaatcaagaaatccttttagctattcccgaagtagtactaagtaccttctaagtaaaatcttggaagtgtttcttagtagtaactaatgaattttcctgcatctacagctctttgggaaaackgttgatcttgattttgaatttgtttgctccttcagtatataaaattggtcagtagttcttaccccaagatgcccatagtccaatgaggaagaaagaaaattagacttagttgataatgactgcaacagagtaagtgattaaagctctgggtactcaaggaggggcatctcaacacctagaggggtgacagagacttctttggtggaggcaatatacaatctgttatctaatggaagagaagggattaatcaacatgagaacaaagaaaggcctcttaggtagtaagaataatgcagaagtacagt

SEQ ID NO: 182238 - DNA, 544 bp, Homo sapiens
catgcaggggtacaaggatctctcccaccacaccagacactacatcacaatgaaaagccttatttcagagccaaactgctgattgtagccttacctgtctgtgctgaattaggaaaggaaacaatagtggatggtaacaggaattttagcttggagatgtaggaacataaaagtcattaacatagatgtcttaaatactagggggttataagtgcttaaggwcaaggaaaaagagaataaagactaaaattaagtggtccaaagacgtggtagttacgtatactgttctaggaatcttactatttaaaatacatgatccatgcaccatctctaagatattcactatattttgtgtagatgcagagaatgagttgtgttcctcattttgatacagactaacttgtactattcaacacagatggtaacaacaaaggaaaataaccaaaatattaaacttttaagacaataaaagtttaatcaatcatttaaatactatatcctttattctttctcatcaagatagccttgcagaagcatagaaaaa

SEQ ID NO: 182239 - DNA, 537 bp, Homo sapiens
tactcttacatatgattgtatcatgtttattttccttgaactgtattcacttggattaatccatggcttaacttatttttgctctcttcattatacctagtcttaatctaaagaaaatcctgcatccgcctttataccattggtagaagcttagcaaatctattccctaactcattcctttctactgacgtatggttttataatgkgatttttttcaccaaatacggggtctgaaaactacaaccattatatcatagtgaagcatgtattctaccatgaggatcaggtatttttggagatagatagcactagataacaagtagatcagtaaaagaacattgtctaccaaattgcaattcactttgtaaatcttggtttcctgctttcccatagacatcagagtcattttcatgcgattaccagatctggagttaaaatatccctgagatttgcagtccatgacaatattggtactttttactatggctatgataaaagaaagacaatgaatatccagatttttatttccttaaatta

SEQ ID NO: 182240 - DNA, 537 bp, Homo sapiens
tactcttacatatgattgtatcatgtttattttccttgaactgtattcacttggattaatccatggcttaacttatttttgctctcttcattatacctagtcttaatctaaagaaaatcctgcatccgcctttataccattggtagaagcttagcaaatctattccctaactcattcctttctactgacgtatggttttataatgggatttttttcaccaaatacggkgtctgaaaactacaaccattatatcatagtgaagcatgtattctaccatgaggatcaggtatttttggagatagatagcactagataacaagtagatcagtaaaagaacattgtctaccaaattgcaattcactttgtaaatcttggtttcctgctttcccatagacatcagagtcattttcatgcgattaccagatctggagttaaaatatccctgagatttgcagtccatgacaatattggtactttttactatggctatgataaaagaaagacaatgaatatccagatttttatttccttaaatta

SEQ ID NO: 182241 - DNA, 364 bp, Homo sapiens
acttcaaccttcatttatcatctccaattgccttttactttacaaagcttacattctaattggaaagaaagcctataaagaaatagaacgcaaacaacaacaaagtttttaatattaactacaggcagcaaagaatttttaaaaagaaaaacatatatcattgacaactggtgcttaactatcttgtaaattgccaygaaaagagttctttaagagtttaaggggaggcaatattgtcaccatgatttggttatgtattctcctggaattgaacactgaaacttagtgtattaggtatgaccccaaactagagcctctgtttctataaattctgtaaatcatagttacttgtgatttttttaag

SEQ ID NO: 182242 - DNA, 639 bp, Homo sapiens
agaataattcacacatttttccatttagagatttttgaccaaaaaaagtatatttatactgatggactaaacaagttgcattataattgtgacagttacaaacttttytgaaacatgtgtatagttttttttttttttaattttaaaagtagatgtcacacctaaaatgggtaggtccatttcattttataaggaaagcacccagaagggtccatatgtatttgtgctcgaaaaggaagtaattgtgtgtgtcatttccgccccctttttatcaatattgcctaatatcaaggagaatcagtaataatagaattattaatagcagtaatagaatcagtagaataagagtggtagagttagtactcatcagtgaaaaactaatcaaccttattactttgaagggaaatctgggaagaaagagaatagaatgaggtacatgttagaaatggaaatggcgaagtaagtaatttttctgattttcataattctgtttcactagttaaatctattttccacttttcttcccttcctttatctggctcggttctcactttagaaggcaaaattttgattatttgcaagagtgctcccaactcaagtctcttagtcaacatttccttccctcaggcttcagtctat

SEQ ID NO: 182243 - DNA, 558 bp, Homo sapiens
tagaatgatactcaaaaaaacacagatgggtttttgcatwtgtcacagttgattcaagaagttcgtcatctcaacagactgctttcttcaaatcttcaaatgcaccccacagtaacttaacccagaacaggtgacagaccctgccctagccagaaactatgtccttcagttgatttaacttatttacaaaggctgatgacggcaacctaatactcttacattagaccccaggttaccaagtaagaaaggaattagctgtgacttagcaagatcctcgtttaaatttcacagctctgattttaaaattacatattctggttcaaatggtgttacggttttgacaagctatatgacactctcagctacttgcccagcaacatgatagtcacattaaagctcaggatgaaataacatgtctgacaaaatggataacccgtgacaaaacaactcattgggaaatgtcacattgagcttatgaatcacctatcatcagacatgcttagtacccaggaggctagtggtatcaccagaagaacattcccaaccaggaataattag

SEQ ID NO: 182244 - DNA, 558 bp, Homo sapiens
tagaatgatactcaaaaaaacacagatgggtttttgcatttgtcacagttgattcaagaagttcgtcatctcaacagactgctttcttcaaatcttcaaatgcaccccacagtaacttaacccagaacaggtgacagaccctgccctagccagaaactatgtccttcagttgatttwacttatttacaaaggctgatgacggcaacctaatactcttacattagaccccaggttaccaagtaagaaaggaattagctgtgacttagcaagatcctcgtttaaatttcacagctctgattttaaaattacatattctggttcaaatggtgttacggttttgacaagctatatgacactctcagctacttgcccagcaacatgatagtcacattaaagctcaggatgaaataacatgtctgacaaaatggataacccgtgacaaaacaactcattgggaaatgtcacattgagcttatgaatcacctatcatcagacatgcttagtacccaggaggctagtggtatcaccagaagaacattcccaaccaggaataattag

SEQ ID NO: 182245 - DNA, 558 bp, Homo sapiens
tagaatgatactcaaaaaaacacagatgggtttttgcatttgtcacagttgattcaagaagttcgtcatctcaacagactgctttcttcaaatcttcaaatgcaccccacagtaacttaacccagaacaggtgacagaccctgccctagccagaaactatgtccttcagttgatttaacttatttacaaaggctgatgacggcamcctaatactcttacattagaccccaggttaccaagtaagaaaggaattagctgtgacttagcaagatcctcgtttaaatttcacagctctgattttaaaattacatattctggttcaaatggtgttacggttttgacaagctatatgacactctcagctacttgcccagcaacatgatagtcacattaaagctcaggatgaaataacatgtctgacaaaatggataacccgtgacaaaacaactcattgggaaatgtcacattgagcttatgaatcacctatcatcagacatgcttagtacccaggaggctagtggtatcaccagaagaacattcccaaccaggaataattag

SEQ ID NO: 182246 - DNA, 558 bp, Homo sapiens
tagaatgatactcaaaaaaacacagatgggtttttgcatttgtcacagttgattcaagaagttcgtcatctcaacagactgctttcttcaaatcttcaaatgcaccccacagtaacttaacccagaacaggtgacagaccctgccctagccagaaactatgtccttcagttgatttaacttatttacaaaggctgatgacggcaacctaatactcttacattagaccccaggttaccaagtaagaaaggaattagctgtgacttagcaagatcctcgtttaaatttcacagctctgattttaaaattacatattctggttcaaatggtgttacggttttgacaagctatatgacactctcagctacttgcccagcaacatgatagtcacattaaagctcaggatgaaataacrtgtctgacaaaatggataacccgtgacaaaacaactcattgggaaatgtcacattgagcttatgaatcacctatcatcagacatgcttagtacccaggaggctagtggtatcaccagaagaacattcccaaccaggaataattag

SEQ ID NO: 182247 - DNA, 601 bp, Homo sapiens
ttgctaatgattatcttcaaaaatgctcccctactctctatagacatggccagcaaagatatttagaaccaagcaatgacaatttaaattaattatttctaattttttaaacagaccaataaaagacagtcaaggttaatttagttaacatctcatgaattcagggctgcaagaagctaaggtggaattttatggagggtttgttttctgtaagaaatccattaaggcttctgaagtttgcctatttcttttaaatggcatcctaaaagcaatttttttaaagaaatcctttttattcaaatataagcaccttccaaagaagactagcttgctaagaatttacctattcatatctgaaaatacttttctgacaaaaattcttgaattyaattaccataaatttaacatcctgatcacttatgctggaggatatttgttataatgctaacaaacagtgtcctgtgtactcctacttatctttcttgcttttaaggaaggtattcagcttaaatagcaactctgttagctttagagataagtaatcattcaagacaggactgacaattgatcctatggtttatagaaaaggcttttacaagcc

SEQ ID NO: 182248 - DNA, 579 bp, Homo sapiens
attctgagtgaaaaggcaagttagaagactttcctcccctccttactcactgtcggcatttttgcagttgcctagaccaraccctccccacatttgagttgaagccacttcatcccaattgcagaagctgttgggttgcctggttcaatttctgactaaaatttatctgtatttaagcccctgtccttttataaagctaactccccaaatagcttcagctgtgagtattttgttttgcttatttctcttgttcaacctctcactcaacaagggagctctacctcaacctctggtttcaagcaaacagcatgaatgtctctggtcccccaactcatgtggaagatactttgtttcctccttttaccacaggaggctgaagttttggccacctgtgttcactgtgggcttagccctgcagctccacttgccgatttgcatttctctgctgattttcagtcattgagttttcattctgttcttaagcctggatttgtcttttggatttttttattcttatactttatttacattgccatgtgtttgaagtggaaataatattttaaattatgaatgctgtac

SEQ ID NO: 182249 - DNA, 524 bp, Homo sapiens
catgtgtgcatctcttcctgaaccatgccctcatgtcacttgaaattagccacggcgaaggtaagtccatgtggaaatctgcaaatactatagaggatttcttctccctcccttgtcccttccccttctcgtctttcctgcatttcttcctttcttcttcttcttcttcctcctcctccagttccttcttttctcttttttttttacaacattatatatacttatttattgtttataagcaaagttgttgataaacacttaccagcacatctcagaagagacttttagaagtgtattgcaaccatttatgtaaaagatggtggtggcttagactagcatggtaacaaaggaggtgataggaagtggtgagattctgcaaggaatcttcaaaggaagcackgacaggttttactgaatgactaagaaaacggtggagaaaacattcctcgacaaaatagtagagaaaataatgagtgaagcctggcttccaggttttcatcttagtatctaaaagaatagttatc

SEQ ID NO: 182250 - DNA, 463 bp, Homo sapiens
atagaattatttgtcaaatttaattaaatggaaagaaaaattatgttttggaggaagaggmaattcaaatttttaatttttctttctacctaccagaattaaccttcaattagagtaagtctgtattaaagcaaatttgatttttatagttcattacatatttatgttctgatcatagtgccaactatcccatgtgtaacataatttttacttgagtaatgctaacgtatttctttttcttgtattacttatgttaatataaatacttgtttataattttattcatttcagccatattcaatatatgtttgtgtttttcatctccatttctatgtggaatggctagtgaataaaatgtatacatttatgaaatgattagaaaattgtaattgacagtaatgaagtaccagattgtacagtacacaccaaataacacaagactttgacagaagtttagaagcag

SEQ ID NO: 182251 - DNA, 636 bp, Homo sapiens
gtcatgggcagtgaaaaatcagtgacacagaacagagaattcaaaagtagatcagtatatataatgactcacaacactaggtagctatataggcagttataaacccaagaaaaagaaaaaatggtgtggtgtgtgtgtgtgtgtgtgtgtgtgtgtagaagattcgtgttctgaaagatacagttggaaggaaggaggacactgactccatctctcaatggtgaggtatgtggtgctgaaaacattcagtttcaggtgagatacactctgggkactatccctgaaggtgccaaggtgggaaaactctcatagaggttgagaaacttactcaccatgtgccaccaatattagcaggaaaacagtggaaagcatcaggagtagtacagagaagagaagatatgaggaaacagttgggtcagggacaagcaagaagaatgagagaatgaatgaaattgaatgaataaaataaagatggagctcaccatatgcaaagttaattttgatttcattcagtgtttaaattttagagacagtttttagaatggttcatacttatggaaatgaacagatcctgttgatgcattacgtgagaaaacaagttatagattcagacgttatgattgttttaagcaattt

SEQ ID NO: 182252 - DNA, 636 bp, Homo sapiens
gtcatgggcagtgaaaaatcagtgacacagaacagagaattcaaaagtagatcagtatatataatgactcacaacactaggtagctatataggcagttataaacccaagaaaaagaaaaaatggtgtggtgtgtgtgtgtgtgtgtgtgtgtgtgtagaagattcgtgttctgaaagatacagttggaaggaaggaggacactgactccatctctcaatggtgaggtatgtggtgctgaaaacattcagtttcaggtgagatacactctggggactatccctgaaggtgccaaggtgggaaaactctcatagaggttgagaaacttactcaccatgtgccaccaatattagcaggaaaacagtggaaagcatcaggagtagtacagagaagagaagatatgaggaaacagttgggtcagggacaagcaagaagaatgagagaatgaatgaaattgaatgaataaaataaagatggagctcaccatatgcaaagttaattttgatttcattcagtgtttaaattttagagacagtttttagaatggttcatayttatggaaatgaacagatcctgttgatgcattacgtgagaaaacaagttatagattcagacgttatgattgttttaagcaattt

SEQ ID NO: 182253 - DNA, 478 bp, Homo sapiens
aacatattatgatatatagctttctaggattactctagctggacaggcactgttatagtcagaggccccagttcacacgctaatccaaaatctaagagacaagtaatgtattttaaatttaaatgctgtgttttgtacctaaaattctaacttacaaatatatagagtgtcttagtccattttctgatgccataacagaatcccagagactgggtaatatattaataatagaagtttatttggctcatggttctggatgtttggaagtccaagaggatggcactggcatctggcaagggccttcatactgcatcatgccatggcagaaggcagaaggcagaagggtaagcaaatacrtgagacagaaagaagaaatcaggcagaactcatccttttatcaggagcctaatcccaagataactaacctggtcccacagtaatggcattaatgcattcatgaggtcatcacctcttaaag

SEQ ID NO: 182254 - DNA, 417 bp, Homo sapiens
taaaatttttatgaaattttctgtctgatatgagtgcagggaggggaaaagaaaacaactttagacaagtcagatgataaaaatccttactgtgcattgaattttcttgcagtttatggtcaatagtgcaattataaagatatcatcactgttgaaatcaacacagaaaaactgaatggttacctrtttctctaagtatatgatattctccctgttttcaaaaagaaacatgagtcacaaaggcatcatgatgggtgttaggtcttttgtgtattgggttatgatttattcatctgcgtatgtccctagtgcctttttgtatttaataaatacatgaaaagcctacttttgatagaggttttggtcaccattctctctctggaatcttatgacagattgtgaatctttaatcagttt

SEQ ID NO: 182255 - DNA, 395 bp, Homo sapiens
tctttctaaaagagagttggaccaggagagggattaggggtgaatggataggtgtggagggatagaacacatctaaaaaacacttgtatatgtggagttgcttgataaaataaaagcttattctgagaaaaataaatgaaagattagtaattcactgtgcaattctrtatttccagtgatttatatgttccctgtttattttaatagtagtttactatcattatttgctaaactagttctcatatagaaaataataccaaatggcattagcttacttaatgacattaacctaatatataggttaaataaacctaatggatttttaaaatgtttcataatatcttctacatttatcccagtaaaataagtgacttgtattatataatgtccctatt

SEQ ID NO: 182256 - DNA, 514 bp, Homo sapiens
gtctaaatatggcaatataaacaaaaattatttttctagataacatgtttttacagctagaatattcaaattgatcaaaagaaacactaataaagttagtaagaaaattcgataaggtggctgaaaacaaaataaacatacaaaattgcatagcttttcagaataccagtcttaaataattggaagtatagtggtccctgggtagccatggcggattggttccagaaccttcttcagatatcaaaatccatggatgctcaacttctttgtataaaatggtgtagtatttgtacattgcctacacatcttctmctgtatgctttaaataatctctagattacttataatgcctaatacaatataagaccatgtaaatagttgttatactatatgatttagggaataatgacaagaaaatagtgtgtgtacatgttcagtacagacatagccctccattttttccaaatattttctatcctcagttggttaaatctttggatgcagaactgttcca

SEQ ID NO: 182257 - DNA, 301 bp, Homo sapiens
acaatggcaattatttttcagttggttatttttgactacctgaaaattagccctatttarggaaatggagttagaagaaggcttagtggaatatatagagcttgggtacgagtgataagcctcaaagaagtattataaaaattattggctaagagtaagggtaaatcataaagtcaggagttggaccaagactcttcagattccatgcttattatctttcatctacacatactttctcttaagtgaaaacagattcatagactaagtccctatttttagcactaacattattatcatgctc

SEQ ID NO: 182258 - DNA, 649 bp, Homo sapiens
tatttttgactacctgaaaattagccctatttagggaaatggagttagaagaaggcttagtggaatatatagagcttgggtacgagtgataagcctcaaagaagtattataaaaattattggctaagagtaagggtaaatcataaagtcaggagttggaccaagactsttcagattccatgcttattatctttcatctacacatactttctcttaagtgaaaacagattcatagactaagtccctatttttagcactaacattattatcatgctcaacacaagactgcccaaatatatttctaggagttaggcatgttgcaaaaaagtgaaaatgacagatatggtgtgctgcttccagactagctattttcttccatctccgtcatgggacataatttctatatatgggcaaagcctatctttgtatacagtccatcagaagcagctcagctagtcatcaaagctcataagctaaagagacaacacttacacaagaacaattcatggttcagagctgattaatcacacctaattagctggcctactaattgatcccggaggctgtcaccatttaacctctggtaaacgggctcaatactttcaaactcttctggagatgaatgagtagaaactccattggttgaaacc

SEQ ID NO: 182259 - DNA, 649 bp, Homo sapiens
tatttttgactacctgaaaattagccctatttagggaaatggagttagaagaaggcttagtggaatatatagagcttgggtacgagtgataagcctcaaagaagtattataaaaattattggctaagagtaagggtaaatcataaagtcaggagttggaccaagactcttcagattccatgcttattatctttcatctacacatactttctcttaagtgaaaacagattcatagactaagtccctatttttagcactaacattattatcatgctcaacacaagactgcccaaatatatttctaggagttaggcatgttgcaaaaaagtgaaaatgacagatatggtgtgctgcttccagactagctattttcttccatctccgtcatgggacataatttctatatatgggcaaagcctatctttgtatacagtccatcagaagcagctcagctagtcatcaaagctcataagctaaagagacaacacttacacaagaacaattcrtggttcagagctgattaatcacacctaattagctggcctactaattgatcccggaggctgtcaccatttaacctctggtaaacgggctcaatactttcaaactcttctggagatgaatgagtagaaactccattggttgaaacc

SEQ ID NO: 182260 - DNA, 620 bp, Homo sapiens
gatctctcagcattaagagaagcccattagcacaacagagcttctgtgactgtcagaaccactagatgcctggccatgcctgcgtgctctgctgagcctggctgtcagggagctggcgatgcctttgagatagatcaaagttaagttatatgactccactcactccgacttctcgagaaaaggagctttatgcaggctaggtgcacataataggaatcattcaatggctttgtagcttctctttggtgcatcattagactgtcccagaaaatgtactaaataggagagagattcagaataataaaaatcagtatggctcaggaatcagccaatcttaatgagtgcagcccattgacctactggtgcagcttcccctacaatgaaggcaggggagaaactcccaggagacaacataagtaaccctcagcctgacctggtacaaaatggtcagtggyaagataaacaatgtgacacttagtaggtacaatctgctccctattttctggactcgtgttcatattgtctttttcggtgtggactctagaacctgtctccctcatacatcttctgcaatacactctaaatgctctaagtttccgtcagcatcttcccccaaaaca

SEQ ID NO: 182261 - DNA, 581 bp, Homo sapiens
ttcctaccaggcctgcagaatcgtgagccaattaaacatgttttccttataaattatccagtctcaggcatttctttatagcaatgcaagaacagcctaataygcaactcatcttttattacctttttggtctcctccctcagtaaccttgcctctacttagtaaaactcacctgcatacaagaggaaggaagctgtatttgtaatgaacaaggatgacaatcactaacaaaattaaaatcctccatcttaagataatttcctaagaattttatatgaataaactcactttatttaattctgtcaacacacaatctgtgaagaaactagtattattagccccatggcaattcatgaatgtgttggatcatgaacccaaacctgtatgacacacttagaaaatataaattagagaagcatttatcttgctattggctggctctattttttacaaaacaaaactaagcaagaaattgttccaggcgagaagacactatttgaggtttgaataattgacatcgttatctgtcaggtggcatgaataagtccagcagccattataaggtcgttaggaaaagggaa

SEQ ID NO: 182262 - DNA, 581 bp, Homo sapiens
ttcctaccaggcctgcagaatcgtgagccaattaaacatgttttccttataaattatccagtctcaggcatttctttatagcaatgcaagaacagcctaatatrcaactcatcttttattacctttttggtctcctccctcagtaaccttgcctctacttagtaaaactcacctgcatacaagaggaaggaagctgtatttgtaatgaacaaggatgacaatcactaacaaaattaaaatcctccatcttaagataatttcctaagaattttatatgaataaactcactttatttaattctgtcaacacacaatctgtgaagaaactagtattattagccccatggcaattcatgaatgtgttggatcatgaacccaaacctgtatgacacacttagaaaatataaattagagaagcatttatcttgctattggctggctctattttttacaaaacaaaactaagcaagaaattgttccaggcgagaagacactatttgaggtttgaataattgacatcgttatctgtcaggtggcatgaataagtccagcagccattataaggtcgttaggaaaagggaa

SEQ ID NO: 182263 - DNA, 533 bp, Homo sapiens
tattaatagaaattaatgttgtatcttagtactgatgttactggacataaaatggtatgtgatcaagtacaaaaagcaataagtacatcatcgaaaggtgaataagatgacacatgagacttgatattgtctttggggaaatggttagcatagttttgtttacaggaaggatatttgcatcttgttgggtagaagcaaaattttgtcagtattttcatttgaaarttatgtcagttaacagagatatataaggacggaaagaggacaagactgggttgtggtggttttgtgctgtgttaacttggctaagctataattaactttcctaggatttctctggccacaagaaaaaaaatctgtggtatttgggttgcagaaatgaaacacccagcctttgaaatctgaaggttgtctttataattgttgaaacctggaagcaatgaagatgccttttcatagttgaatgaataaacaaactatggtacatccatacaatgtaatattatccagcaataaaagaaaatgagatatta

SEQ ID NO: 182264 - DNA, 533 bp, Homo sapiens
tattaatagaaattaatgttgtatcttagtactgatgttactggacataaaatggtatgtgatcaagtacaaaaagcaataagtacatcatcgaaaggtgaataagatgacacatgagacttgatattgtctttggggaaatggttagcatagttttgtttacaggaaggatatttgcatcttgttgggtagaagcaaaattttgtcagtattttcatttgaaagttaygtcagttaacagagatatataaggacggaaagaggacaagactgggttgtggtggttttgtgctgtgttaacttggctaagctataattaactttcctaggatttctctggccacaagaaaaaaaatctgtggtatttgggttgcagaaatgaaacacccagcctttgaaatctgaaggttgtctttataattgttgaaacctggaagcaatgaagatgccttttcatagttgaatgaataaacaaactatggtacatccatacaatgtaatattatccagcaataaaagaaaatgagatatta

SEQ ID NO: 182265 - DNA, 533 bp, Homo sapiens
tattaatagaaattaatgttgtatcttagtactgatgttactggacataaaatggtatgtgatcaagtacaaaaagcaataagtacatcatcgaaaggtgaataagatgacacatgagacttgatattgtctttggggaaatggttagcatagttttgtttacaggaaggatatttgcatcttgttgggtagaagcaaaattttgtcagtattttcatttgaaagttatgtcagttaacagagatatataaggacggaaagaggacaagactgggttgyggtggttttgtgctgtgttaacttggctaagctataattaactttcctaggatttctctggccacaagaaaaaaaatctgtggtatttgggttgcagaaatgaaacacccagcctttgaaatctgaaggttgtctttataattgttgaaacctggaagcaatgaagatgccttttcatagttgaatgaataaacaaactatggtacatccatacaatgtaatattatccagcaataaaagaaaatgagatatta

SEQ ID NO: 182266 - DNA, 451 bp, Homo sapiens
actatatttgtaaggatgctaagtcaaccaagctcaactaattgcacttggctttgggggcagtaccaccatggagatgagatatacaagaaggaaggagacctatgaaagagaagaaaatcaaagccaataaaagwtgagtgacaaattctggtagtatataggtctatctatctatctatctgtatatgtatattaaattaggattagatcacccatgtggacaaatgggcaagagtttggatttaaaagaagatactatgaaattttcatatatacttaatcctaaaatgtatagcatgaattgaaaactctagtagaatatgaagtagtataatataatgaacctggtaatatagtataatcatcattactataataagcaatgtagtataatttactatacgtgtgacttaagttctccaagcctcagattcctcttttattgcag

SEQ ID NO: 182267 - DNA, 454 bp, Homo sapiens
  misc_feature (1)...(454): n = A,T,C or G
tgttctcattctttacaaaactaccttggtcttctcttggtggctaagcggttcctgtggtagagaagacaatccccagtgcacaagcacatttcaattaacacttattaaaatgytattagctgagacacatcacatgattatacacaggtttaatggataaagaggtagactttaactgtgatgaaagaaaaagcaaagtcaatttttcttcaaaagtaaacttatcttttaatgaactttatttcttagagcaatttccatttcatgggaaaatcaaatagaaagtagggtttccatacactcactctcccccaggccttgctcatggaatcatctatagtgatatattgcattagtgtggtatgtgtgtggttacaattgatgaaccaatattgatatctcattatcaaatacagtgcatatctttcattagagttaactttatnnnnnn

SEQ ID NO: 182268 - DNA, 454 bp, Homo sapiens
  misc_feature (1)...(454): n = A,T,C or G
tgttctcattctttacaaaactaccttggtcttctcttggtggctaagcggttcctgtggtagagaagacaatccccagtgcacaagcacatttcaattaacacttattaaaatgctattagctgagacacatcacatgattatacacaggtttaatggataaagaggtagactttaactgtgatgaaagaaaaagcaaagtcaatttttcttcaaaagtaaacttatcttttaatgaactttatttcttagagcaatttccatttcatgggaaaatcaaatagaaagtagggtttccatacactcactctcccccaggccttgctcatggaatcatctatagtratatattgcattagtgtggtatgtgtgtggttacaattgatgaaccaatattgatatctcattatcaaatacagtgcatatctttcattagagttaactttatnnnnnn

SEQ ID NO: 182269 - DNA, 645 bp, Homo sapiens
ctctattcctttgatattggaggacagattatgtctatcatttgacagttacaaattatcttgtttaaggaaatacagccatgttttgctctaggaagaattctgacatggtataaaaattaaacaactaccgttctacaaaatatgtttaaagatcactgtcatgattgaggtgaacttatcatttgaggtgaaactttgcaacaattgggtacttgggaaaagatgggtgcaaagcttcaaggagagmgattaggttagccatgtgtaggatttttcctttttacggaaaaagtggaaactagacctttttgtttttcttctctgagttatatatgtctatttcctccgctgtataagattctcaaacacagggatgatatcatattcacattggtacacattaaatgaatgtttaatgcattgaatttgttgaagtgggagaaagaaagagggagcaaaatgctagagatgtaaaagctagttatatttacttgaactgtattcctaattggcttccactattgattctgtgtgttcaaatggggctttcagtatcttaagtttaaaatagattgatgtgtttccaaatatatctgagctggctgatctggtggtcacttgactttaatacttgtggccaat

SEQ ID NO: 182270 - DNA, 584 bp, Homo sapiens
tttgtatgcaagctcctcctggaaggaagcttgaagctgaatgaagcaatttcattcagctaaggcaactctcaaagagaactgacatctaaaggaatcatccaagagtgagaaataaatccttcactctgaagggtgatctgaatgacacatcatagcatccactgcatgaggtgatacatttcagctggagatacatctttcaaaytgaggatggaaacaaacaaaaaaagtgacaaaataatgtaaatagttcttattgttgttggtttttaaatgtgactaggagaggaaaatcatttaaagaagaaggacactcgtctgttattcgcctatttcttgaaacacaacttattgagcaaaaaatcttgcattttaagtatcgatgggatttagatgtgaataagagataaagctctacactcatgaagattatacctacagaagggtcagattataccctacagaaggggtcagatagtaaatacattagcaaatatatatggcaatttcagataatttagtaataagcatattttagtttgataatttagtgcattttattgggcaccagcttcatgcat

SEQ ID NO: 182271 - DNA, 590 bp, Homo sapiens
tataacacagtgtatttcatgtgtggatacaaaattcatttgtttcagccacttgtctcaaataaaacaaccaggttttgttgcctataagatccatagtcagcatrttgccactccttaactggtttaagggttaactaggctggcttttcccagttcatcccctaacacctctgccccaaagcaatgtccaaaattctggaaggtggcaaagcatgcatatgtgcaatacatcatccctgctcagaaaaccagtcaaaacacacgaccagttgatcatggcctggcagtgacaccttttcattggtagtgtcacatatttagcttactactctgatttctatgactttttgtctcctatatttgcatattaaactgagtctgataatacaacaaagaaagaaagggcagtagcccaactaatcaaatgagctattctccaaatctggctttcaagaaaaaaatacaatcaattttgagttttttgttctttagtttaaaaaaaaaataaaataaaatccttgtggatagggatgatgtcttacatttagaatgtcattaacatttgctcttacaattaccatagcaga

SEQ ID NO: 182272 - DNA, 556 bp, Homo sapiens
ttggtattcaacatagtacttgaaatcttagctgaaaatattaggcaaggaaaagaaataaaaagcatcttcatttgaagggaagaagttaaattgtctctactcgcagatggcattatcttatataaagaacaccctaaagactataccaacaaatctgttaaaacctaatttagtgaagtttcagaataaaaaagtcaacagacaaaaatcagttgcatttcaatacactaacaacaaactatccagaaaagaaattaagtcaggtagcatgatgcctccagctttgttctttttgcttaggattgccttgtctatttgggctttttgttgttgttgtttcttatgaattttaaaaataggttttttttcctagttctgygaagaatgtcaatggtagtttaataggaatactattgaatttctaaattgctttgggcagtatggccatttttacaatattgtttcttcttatccatgagcacaaaatgtttttctatctgtttgtgtcacctctgatttctttgagcagtgttttgtggttctccttgtaggg

SEQ ID NO: 182273 - DNA, 551 bp, Homo sapiens
tcttactctcatacaatgtatttttttcttggattctatatttatgatatctacatgtttgatttgaatcttttttatatcttccattttttctttatcacatttgtgttttcctctacttttttgtacatatgtagtatacttacaataactttgtaatgtccttgtctactagttcaaaaacatctgtgtcctttctggtctgtttctattgattgatttttctcctggttayggattaggctttgctactttatcacatgcctgataatgtttaattggttgctggactttgttaattatatgtcatgtgatgcttgcttttgttatattcttttaaatattgttgatcttttctctaggacaaaattagcataccagtataattctttttagacttgtttttgagtttgacagagaagctttacttaagtaatcatttcacgcctccattaatgcaatatgtttctgaagaccctaaacagtgtcctatgtatacataggttattcactttaggtggtgagaatagcaactaattccagatatgtgt

SEQ ID NO: 182274 - DNA, 551 bp, Homo sapiens
tcttactctcatacaatgtatttttttcttggattctatatttatgatatctacatgtttgatttgaatcttttttatatcttccattttttctttatcacatttgtgttttcctctacttttttgtacatatgtagtatacttacaataactttgtaatgtccttgtctactagttcaaaaacatctgtgtcctttctggtctgtttctattgattgatttttctcctggttacggattargctttgctactttatcacatgcctgataatgtttaattggttgctggactttgttaattatatgtcatgtgatgcttgcttttgttatattcttttaaatattgttgatcttttctctaggacaaaattagcataccagtataattctttttagacttgtttttgagtttgacagagaagctttacttaagtaatcatttcacgcctccattaatgcaatatgtttctgaagaccctaaacagtgtcctatgtatacataggttattcactttaggtggtgagaatagcaactaattccagatatgtgt

SEQ ID NO: 182275 - DNA, 608 bp, Homo sapiens
tcttggtttgatagcattgaatttactatgtctgaaaattatgtggaaagaccttctagaaacagctgtgtttttgtgaatcaaggtgaagatgtatattgagtgcctcctctctctctcatgtaatgtaccaggcactgtaagaacagtaggaagagatacaaaggaagatgcaacmtgatctctgcttccaggacatttgtattacagagtgactaatattcatttccatcctctaaatctcagctgtttttataaaattatttttaatggaaaaagagtatttggactatggggttgttaattgcatagagaacctgcaaaatttattattaattgctattttccttctattccccaaatttaaaataaacatgcttatgtgtatcttcttttcaccattgtcatgtatacataataatgtattaaagaagcaatgaagtttagttaaaattttattagtacaaacagaaatttcacaaaatttcataatagctttatataagttatatggcatgtaaaacattcagctctcttaattcttggattgtgtagaagagatacagatggtagctttttagacaagaacaaaaatatattttatgtgt

SEQ ID NO: 182276 - DNA, 608 bp, Homo sapiens
tcttggtttgatagcattgaatttactatgtctgaaaattatgtggaaagaccttctagaaacagctgtgtttttgtgaatcaaggtgaagatgtatattgagtgcctcctctctctctcatgtaatgtaccaggcactgtaagaacagtaggaagagatacaaaggaagatgcaacctgatctctgcttccaggacatttgtattacagagtgactaatattcatttccatcctctaaatctcagctgtttttataaaattatttttaatggaaaaagagtatttggactatggggttgttaattgcatagagaacctgcaaaatttattattaattgctattttccttctattccccaaatttaaaataaacatgcttatgtgtatcttcttttcaccattgtcatgtatacataataatgtattaaagaagcaatgaagtttagttaaaattttattagtacaaacagaaatttcacaaaatttcataatagytttatataagttatatggcatgtaaaacattcagctctcttaattcttggattgtgtagaagagatacagatggtagctttttagacaagaacaaaaatatattttatgtgt

SEQ ID NO: 182277 - DNA, 570 bp, Homo sapiens
ccatttgtcctaaagtccaattaaagttcaatgttgccttgttgattttctatcttatctgtctaatgttgtaagtgggatattaagcttcyctaccatctgttaattggtgtctctctctctctctctttaggtctagtaacatttgttttataaatctgggttctctggtgtggtgtgtgtataaatttaaaattgttattttttttctaaattgatccccttgttatataatgacattccttgttgttttttactgtttttgaatataattctgttttatctgatataaatataactacttctgctcttctttggtttccacatgcatggaatatatttttcaactactttactttcagtctagttgtgtctttatagattagttcttataagcagcatatagttgaatgatttttttaaaatattctactaatctacatcttttaaatggaatgtttaatctatttacattcaaggttaatattgatatttaaggttttgtttctgtcatattattaattgtattctagttgtttcatagatcctttttttctctgtggtttgggg

SEQ ID NO: 182278 - DNA, 427 bp, Homo sapiens
aacaaggggaagaagtgaggacagctcaacaacctaacaggaagaggatgaccacctgcaagttaacccaaggtaataaagacaactaaactatttaacgactgtgttctagctattactaaaaagtaacattataaaacaagtgagaaaatgacaatcttctacagctccaaatcatatacaattcatagaccacagatgaagcactataaaacaaaacccaatatcagaactataacatgaacaatgcacagagtatataaatttcgtgataggctaaagtgagaaagtattcacattctaaactagtcatttctgtcatatgtatgcaaagtcaatcccattagtactgaactgtacayatacaaattattaagaaggcaaattttgttatatgtattttagacaaataaaggaaaaagaataa

SEQ ID NO: 182279 - DNA, 574 bp, Homo sapiens
ggccaggtgtggaatgacatggttttgctctgtgtcctcacccaaatctcatcttgtatggtaatcctcacatgtaggagtagggacatggtgggaggtgactggatcatgggggtggttccctcatgctcttttcataataatgagtgggttctgatgagatctgatggtttcaaagtgtgtggcacttcccccctgaatctctctctctcatgccatcatgtaagacatgcctggcttcccttttactttctgccatgaatgttagtttcttgaggcctcatttgccatgtggaattatgagtaaattaaaacttttttctttatcaattatcctgtctcrggttgttctttatagcagtgtaaaaatggactaatacagatgttaaggataagtttttttttattttacaatatcaacatccaattgacttgacaccatgtattaataagatcaactatcctttacttaatttcatgaattatttcttgtaactaagatgtctatatatttgtggatctgattctggactctattctccttccttgtctttttttttctttcttttgccag

SEQ ID NO: 182280 - DNA, 604 bp, Homo sapiens
agtgttgcatgagcaaggtagataaaaaacaaacaaagaaacaaacaaaaaaacagctagtagctacagaaatatgagagataaaaaagactttatttcattttattttgcagtagatcccccttatctgagatttggctttccatggtttccattacctatagtcaaccatggcccaaaaacwctaactggaaaaatccagaaagaaaaaaattataaatttttaaattgcatacttttctaagtagcatgatgaagccttgtgccatcctgctccatcctgctcagaatgtgaattaccactctgttcagctactccatgctgtctatggtacccctcctttagtcatttagtagtcatctccattatcagattgattgtctggtatttcagtacttgtgttcaagtaactcttattttactttataatggccttgaagtgcaagagcagtgatattcatatagttaaaattgttctattttattattagttattgatgttaatctcttactgtgcctaatttataaaattaaactttattgtaggtatgtattatgtatagaaaaaatatatactatacataagaatcaatattggtggtg

SEQ ID NO: 182281 - DNA, 648 bp, Homo sapiens
gtttcaggcattcactgggaatcgtggaatgtatccctacatactactgtattttttaagattataggattaacaggatgtttgcatactaatgagaataatccagtagaggaaagtttgataattaagagaagtgggaatattgctagagtgatatgcttgagtagtttaygttacatgggctagagtgcacaagtggagtatctggtcttagaaaggagaacagaatagttgaacatagtaatgttaaggaaaggtagattatatttgaatagatgcagatagatgtggtgagacatgaaggaatgtctgaaaattaccctaagaatgcaatatgggatgcctgggcaatgatgaagctggttctgctgatcaacttcatctcccagcaggatgggctgcatttgaactcagttcacaggtgactgaagctttcttttccattctgtaactcaaacagaaggggctacatctttgcaaagatgtagatacgaggcagttccctttccaagatacctctttcaaactgttgtcacctaagcctagacatcttggcactccagtagtctgaatatattttcattagataaggtgtctctcatgtttagtgccacttaacaaattaccactcacttagaaggttaaaac

SEQ ID NO: 182282 - DNA, 648 bp, Homo sapiens
gtttcaggcattcactgggaatcgtggaatgtatccctacatactactgtattttttaagattataggattaacaggatgtttgcatactaatgagaataatccagtagaggaaagtttgataattaagagaagtgggaatattgctagagtgatatgcttgagtagtttacgttacatgggctagagtgcacaagtggagtatctggtcttagaaaggagaacagaatagttgaacatagtaatgttaaggaaaggtagattatatttgaatagatgcagatagatgtggwgagacatgaaggaatgtctgaaaattaccctaagaatgcaatatgggatgcctgggcaatgatgaagctggttctgctgatcaacttcatctcccagcaggatgggctgcatttgaactcagttcacaggtgactgaagctttcttttccattctgtaactcaaacagaaggggctacatctttgcaaagatgtagatacgaggcagttccctttccaagatacctctttcaaactgttgtcacctaagcctagacatcttggcactccagtagtctgaatatattttcattagataaggtgtctctcatgtttagtgccacttaacaaattaccactcacttagaaggttaaaac

SEQ ID NO: 182283 - DNA, 454 bp, Homo sapiens
caatcagagcttcctctctccatcttcaaagccagcaacgttgcattcatctatgcctttttttctgtagctacattttcctctggcctcctcttctgcttccctcttccacttttaaggactcttggaattacactgggcttacccatacaatccaggtcctatttcaaggtaatctgattagcaaccttaattccatctgcaaccattaactcccctgtgctatgtagcctaatatatttacaggttctgggatttgaatattggcatctttagggtgaggggcattattctgyctaacatgctacttttgctcttgagatggcttgttatgtgatttacaaaataaccataaaatttgaaaatttatcttggagtgctagagactttaggctcactcatttcacaaagagtattttttcattacttaccacagatttgatgaaagaccacc

SEQ ID NO: 182284 - DNA, 602 bp, Homo sapiens
attaggttaaatatgtattwggcaaaaaaaccacacttacttttgcaccaagctaatgtattttacttccttaaagtcattcacaagagactaaccatttatatgtcctacatcaagagggtgtcgtggcatttacctgcctgaagttgagagagaagcatacttttggtaactggatagtaacctcacaagcataaaataaaactacttgttaggtcagcaatatgcatcagactcaggccaggaaagtctattatctgcagagttttttctttttctctttcttccattatttacagcgtgaacttcttgtgctgccatccattgaattttcataaacagaactgaactatgctgttattccatcaaggactggtgtggatgatctgaaaaatgcaagtggttgatgcatgtgtagaatggagggtatatgttctcagggaaaatgaaactgtctgctgtcagttcattcctaagtactcgtgataattaaatagcgttttgtgaccatttcagttttagccaacgttttccactcttcaacttagatttgcacattctttctacttaaatatgttcctgagccccagttgtttggtgtc

SEQ ID NO: 182285 - DNA, 449 bp, Homo sapiens
atacctttgaccatggttggacatagaatatttctgaaattgagccagaatagcagaaggaggaagaggaaggagaggaaagtctaagcaaggatgttctgaaaatgggggataaagagaaggatgagcagacaaaggaaaagaaatttcaggagtctgtgttcaattcagaaattattttagacaattttttgtttctcttacaaaggaatgactttatcagaacctcttttagaggtttctaagtaccactgaaaatagctctaccacttgtgttttgttttgttattttagagcgaactttttctaattgagcatgcagataaactagtttatgtatttcaaaggtacaccattctggccactgtaatttggagtcattgcaagttatgtgtgaccaattttctaaacatttgcatgaagaggtgccrtaattattaaacatgaat

SEQ ID NO: 182286 - DNA, 544 bp, Homo sapiens
ttatcaactgccttcaaaaatcttccccctataaccatcaaacattgctcttacatttagaaaaggaaatgacaaagaaaagataatactaaatgaaacctgtgtagggaggaataaacaaactcagtttctcccattatactctcaaaacactcttctgacaccagattcatgggaatttctccccaatagcaaacaagcactcaattctgcagtggacatcagctgggtgtcttctaattaaatacagttttgacatgatctacctggagacagtatcagatcctgcagtttgagagttcggtcccacaagactgcycccatccatttcctaggcccaatgcaggccccaggttgttttacctatacttctgactggccagcaatagatcgtgattcccatgatcccctccttgggattattaatttggtagagtgacacatagaactcagggaaacacttatgtttactggtttattacaaaggatgttacaaaggatacagatgaaggaaaatatagggcaaggcatgtgagaagaggca

SEQ ID NO: 182287 - DNA, 430 bp, Homo sapiens
gtttttactatttaattgaaattttgtaacctttgaccaacatctccccaatctgctcccccaccactaccttatctcctgatgatcaccattttactttctacttcttaagatcaacttttttagattacatatatgaatgagatcataaagtatttgtttttacatcctggcttayttcacataacataatgtcttccaggttcacccatgttgttgcaaatgacaagatcttccttttttatggctgaataatgttccattgtgtagatataccatattttccttatccatttctctgttgatggactgttaggttgattctatatcttggctgttgtgaataatactgcaataaacataggggtgcagatatctctttgacatgctcagttcatttcctttgactatatacctccaaatgggatgg

SEQ ID NO: 182288 - DNA, 587 bp, Homo sapiens
ggctaataatttgatcttttctgtacagctgtttccctaaataacttaagaacaaaattgttactccagatgattttgctttaatgtcttagcaatcacacactggaaaattaatcaaagagaaaggatgattggtatttgaaaaggaaggcagagtccacaaagagactagttttgaacaatctgccatggaattctgctgcttcactccacctggaggttgctataccctgggaagaattatcaaaatgcataacccctagcttttctggtagtctttaaaggtgacttggaatcttttgtgtttgcgacatttttagacatttctgagagatcctgatgactttctgaggtcactttgtggttccataaaatactcatcttagcccagtgtttcttatcaatgggacaggtcttctgtcgtcacaggcttcaccacaccagcctgtttttcayatttgtgtaactccctggtccctgcaaccattttattgcacaactgctgaaaggccaaaacctagctgcaattgccacttcttccagagcagtttctgagaaagatatatgtacaaaagaagaaagtagac

SEQ ID NO: 182289 - DNA, 518 bp, Homo sapiens
tagtattttgaggtcatcaaggataagtgattttacaattaaaaggaagccttagcaatatacatatgtacattacaaaactgctgaaaatcctataaaatgcctttctttagagcaagaagttgctgatttagtgactgcaagaactgctacaacctctactgtcttaaatattttgggaaactaagtgcagaagacatctcctctgacattaaaacatttgttgatggagaagactatccctgtatcacagttttaattttgatgaaatcagccactcacaaaataaaaacaagctagataacctaaaaggaaatattttaaacccatcaaatacttaaagtcttaaagtaacataatgaattaaagtatgagaaatgcccagtcctcttaggagatacmgaaaccatggatgttttcatctttggtaaagtagcagggagaagaggaaacttccatagacacagcaggaagaaaacaggtgaacttttaaggatttttaaaggctgagtacaggc

SEQ ID NO: 182290 - DNA, 205 bp, Homo sapiens
ctcttagtaccctcaagtctagcagaaggcagagagcaaatctagatgtttgacctaatacaatactttctccactcctctggagaagtgattctcaattctggcagcacattaagacrtttggggagctttgaaataatattaatagaacctgaaaacaaaatgttggtagaagaggaatcatttcttaatctccctgaatcgc

SEQ ID NO: 182291 - DNA, 381 bp, Homo sapiens
gtagcaatattaaaatactgactgttctcgccttaacaaaggcttcccttcctttgccacccacacagtaattttaatcatttccccagctgcattctctctgtgacagaatgtctccatcctctagtgctgggttcaccgccctcccacaaaacaatcagggacggctaagcatggtcacaagagcttggatttcagtgaagtgtgctctcttttcacatgagtgatcttgctgtttccttttyccattattaatagagtcatttctactcaacaatatttcagtagattttatttacctagtgtctgaagacagacatcaggcaggggaccttcccgtaggacaattatacatcccttgccaagagcagcttgtgaatt

SEQ ID NO: 182292 - DNA, 591 bp, Homo sapiens
gatgattctaatgagaatctggagttgggaccagttgcaaatctaaagagatcacttcactttcagacttcagaagtggcagcacttcctctgcagactttggaagggagagcatttcttcygcaggcctaggaagtgaaaggattgcattcatcctggttccacattgctgactgaagtcagcggagcttggtaagtaatttgcagtgtactttcaactcgaggtgtaaaccaaaaataaaatcctaggccccccaacagactgaatggattccctcctggccaagaagaccccagataaacctgaaaagctaaattccaggacataatgagaaggaaagttagacaggcctcattataccccctcccttttggaatttaggcacaactgttgaatcattaacattgaaacagagatcataagacgggcaaaaacgattctgcggcaataagataccaaattccaacatcactgtcgtacagcatcacatgacaggtagcagaccctgaaaaaatcaacatattttacaccaaaatacatttctttgacatattttgaaatggccttcaaagctaccttaagtggaaaaa

SEQ ID NO: 182293 - DNA, 591 bp, Homo sapiens
gatgattctaatgagaatctggagttgggaccagttgcaaatctaaagagatcacttcactttcagacttcagaagtggcagcacttcctctgcagactttggaagggagagcatttcttctgcaggcctaggaagtgaaaggattgcattcatcctggttccacattgctgactgaagtcagcggagcttggtaagtaatttgcagtgtactttcaactcgaggtgtaaaccaaaaataaaatcctaggccccccaacagactgaatggattccctcctggccaagaagaccccagataaacctgaaaagctaaattccaggacataatgagaaggaaagttagacaggcctcattataccccctcccttttggaatttaggcacaactgttsaatcattaacattgaaacagagatcataagacgggcaaaaacgattctgcggcaataagataccaaattccaacatcactgtcgtacagcatcacatgacaggtagcagaccctgaaaaaatcaacatattttacaccaaaatacatttctttgacatattttgaaatggccttcaaagctaccttaagtggaaaaa

SEQ ID NO: 182294 - DNA, 591 bp, Homo sapiens
gatgattctaatgagaatctggagttgggaccagttgcaaatctaaagagatcacttcactttcagacttcagaagtggcagcacttcctctgcagactttggaagggagagcatttcttctgcaggcctaggaagtgaaaggattgcattcatcctggttccacattgctgactgaagtcagcggagcttggtaagtaatttgcagtgtactttcaactcgaggtgtaaaccaaaaataaaatcctaggccccccaacagactgaatggattccctcctggccaagaagaccccagataaacctgaaaagctaaattccaggacataatgagaaggaaagttagacaggcctcattataccccctcccttttggaatttaggcacaactgttgaatcattaacattgaaacagagatcataagacgggcaaaaacgattctgcggcaataagataccaaattccaacatcactstcgtacagcatcacatgacaggtagcagaccctgaaaaaatcaacatattttacaccaaaatacatttctttgacatattttgaaatggccttcaaagctaccttaagtggaaaaa

SEQ ID NO: 182295 - DNA, 591 bp, Homo sapiens
gatgattctaatgagaatctggagttgggaccagttgcaaatctaaagagatcacttcactttcagacttcagaagtggcagcacttcctctgcagactttggaagggagagcatttcttctgcaggcctaggaagtgaaaggattgcattcatcctggttccacattgctgactgaagtcagcggagcttggtaagtaatttgcagtgtactttcaactcgaggtgtaaaccaaaaataaaatcctaggccccccaacagactgaatggattccctcctggccaagaagaccccagataaacctgaaaagctaaattccaggacataatgagaaggaaagttagacaggcctcattataccccctcccttttggaatttaggcacaactgttgaatcattaacattgaaacagagatcataagacgggcaaaaacgattctgcggcaataagataccaaattccaacatcactgtcgtayagcatcacatgacaggtagcagaccctgaaaaaatcaacatattttacaccaaaatacatttctttgacatattttgaaatggccttcaaagctaccttaagtggaaaaa

SEQ ID NO: 182296 - DNA, 493 bp, Homo sapiens
catttatggtgggatttcattcatcattctcaatgcatgttttctgtttgcataaaagctttcccatgcaagagggctgataaaacagtagctaaagaattataaggaaacatgtttttctcatgggacattcctggagaaatatccagtgatagaagtacctgtttcactgggcaagtttaaaacagttaaataaggtgttacacattctatagcatttggcaactctaactgaattgactggattgctttggtcaaatgtattgaaaattaatgacgatcagattcacttccagtgtaaaacataaattgacatcttataaagtagtcactgaagggcatgtgcccctaacaatagggcytcatgtattttccaatactaaattctgatataactcaatgctgcaaagttttaatgcttgattttttaatgctactgatttttatatgttgatcttctattctgcaactttatggaattcatttattagtt

SEQ ID NO: 182297 - DNA, 423 bp, Homo sapiens
aatctgcattttaacaagttctacagctaatctgtatgcacatctgagcttgtaaatactggtataatatatccgaagttactgcctggaggaagtacagatgcagtgcttcccttggcctccaagtgctgcattaatgatgggcactagttcccgcccttgagaatctcttgtctagaatcattcataagggkttttggtgtgctagagaaagattaaaaagtggatgctaaggtaacatgaaatcttggtaattcaccatgagattctataaggagattaattttatttacataggtagcttccaatttactcttcatttttcaactggaccactaatcttagggtggagttcatcagggaatagggccagcaaaacacttgcatttttctggaactaatacttacatatgtgaaaagcag

SEQ ID NO: 182298 - DNA, 575 bp, Homo sapiens
gccagcaaaacacttgcatttttctggaactaatacttacatatgtgaaaagcaggtgcagctggaaggcagagcacctagatctccagaaattaaggatcaatttttacaatgactcctatgtacagactgaagagtgtacactgactatgtacactgactcctttgtccagggctgaggcaaaagcccaagagggaaatgyaatggggcggggcgatggaggacttccacagtgcaccttgctgcaaggtcaatgcaaccttaatcagcccactctgtgatcaacccatcccccatgggagtctaatctcttaataccaagtgttcccacagcctccaagtatccaaacagcaccttttaaatctagacatacaaagaaaccagtagcccccctgcagtaattaccattaccgtaactgctgtcagctgcctccaaaaccacagcacttgccggtgatttgtcagccattgcacacccaaaggagagtgctgtctcacagcacaaagtaattcctggtaccttcaaaagcccaagagatcagggaactcaatgcaaaagagaatagaggtttg

SEQ ID NO: 182299 - DNA, 575 bp, Homo sapiens
gccagcaaaacacttgcatttttctggaactaatacttacatatgtgaaaagcaggtgcagctggaaggcagagcacctagatctccagaaattaaggatcaatttttacaatgactcctatgtacagactgaagagtgtacactgactatgtacactgactcctttgtccagggctgaggcaaaagcccaagagggaaatgtaatggggcggggcgatggaggacttccacagtgcaccttgctgcaaggtcaatgcaaccttaatcagcccactctgtgatcaacccatcccccatgggagtctaatctcttaataccaagtgttcccacagcctccaagtatccaaacagcrccttttaaatctagacatacaaagaaaccagtagcccccctgcagtaattaccattaccgtaactgctgtcagctgcctccaaaaccacagcacttgccggtgatttgtcagccattgcacacccaaaggagagtgctgtctcacagcacaaagtaattcctggtaccttcaaaagcccaagagatcagggaactcaatgcaaaagagaatagaggtttg

SEQ ID NO: 182300 - DNA, 283 bp, Homo sapiens
actgtacgtatcactcaattccatttayagataggtgaaaaccatacaaatcatgattatactgaggatggtggctactgactggaaagaggcacagaaaaagtttctggggtgttggtgatgtactctcttgatatcagagttctgatgacatgctcattttcttaaaatgtatcaaactttatacctgtgactggagtacttttgtgtatgttatgcttgaacaagaggttcacttaaaaaaattaactaccaggttccaccattccaagagataatgggg

SEQ ID NO: 182301 - DNA, 603 bp, Homo sapiens
ccaaagtttaagcctggctgtctaaaagagtaataatgctattgttaaaaaataggaaagttagaaatgggagctaattttttcaaggaaatgataagagctgcaatggataaagtacatttttgtatttgagaagctggagaagaattatctggaacagccgcccagagctcctggaggcatccatagtgccattcacagcccacccagtaagatgtacataggtttgagtaaaattaataaaaatggttgtattagttacgttctgtttatatgtattttaaggtataataaattggcttgatgggtaggtatagtacttataaagaaatcaaaggcatacttaacagtgagtagaaagaccactagaaccatctctaatataaatagcaagaaacattttttaccacaaccacttgatgtaaataatagaataaataaaaagtaaatagaaagtagttcacrttttctttttacttatgaaagtaattaaatttagttgtggaaatttcaaagataagcaaaataatactgtgaatgtgtttgtgtgtgtgtgtgcatacacacaatgctgtaacttttatctcatggaatatatttcag

SEQ ID NO: 182302 - DNA, 521 bp, Homo sapiens
ccttctcttcaatcctacttctgcctcatcccttctacaggtgtgaatgcttaaaaatatcctacacactaaactctttctcagcatctgcttccagagagccaaatctgcaatgtacattcaaattargctcattcgaggaggatttaataaagggactctgtacaaagtgtaggcaacatgaaaggcagccacaagggatagtgcattagcccagggatattaacaggaactgttactactccttggctcatagggagtaaaggaagaagaggatacaggaacccagaagaagagagttgtcatggaacaaaggctgagaggagtgggcttccaggtggagggattcagccagagttgaatagctctgcaaagagtattagggaaacagtattgaaaacaaaattttcttccaacatagaaaacctctctggagggtaacagaaaaagaaaacagttttattgttgaataagcattgagccagaacacagtatacatctcagataataaattacaaagg

SEQ ID NO: 182303 - DNA, 521 bp, Homo sapiens
ccttctcttcaatcctacttctgcctcatcccttctacaggtgtgaatgcttaaaaatatcctacacactaaactctttctcagcatctgcttccagagagccaaatctgcaatgtacattcaaattaggctcattcgaggaggatttaataaagggactctgtacaaagtgtargcaacatgaaaggcagccacaagggatagtgcattagcccagggatattaacaggaactgttactactccttggctcatagggagtaaaggaagaagaggatacaggaacccagaagaagagagttgtcatggaacaaaggctgagaggagtgggcttccaggtggagggattcagccagagttgaatagctctgcaaagagtattagggaaacagtattgaaaacaaaattttcttccaacatagaaaacctctctggagggtaacagaaaaagaaaacagttttattgttgaataagcattgagccagaacacagtatacatctcagataataaattacaaagg

SEQ ID NO: 182304 - DNA, 588 bp, Homo sapiens
gtccaactttccagtttttcaaagagctacagaacggagcttttgtttttgttatgcctgtcttcgagcaatgatggtacacaacatactcttgagatctgggagctgctaaaaataaagacagtggattggattaccacaaatatttgagaggcctgcacattctctggctgagccgattaatgagggtcttctgtgcaagacctgtctatgaaaacttagaaagatggttgttttctctaattcaaagacaccaatacaaaaattcaagaagagtgaagaaatagggaatcatattccaaatgaaagaacaagataaatctccacaaactgaccttaatgaaagagaaatatataattacctaacaattcaaaataatcatcataaakatgttcaaagaggtcagaacaacgcaggaataaagtgagattttaacaaagagacggaatttattttaaaagaaactaacaagaaaccttgaagcttaagaatacactaactgaattgaaaaatttactagaggggattaacaacaaaatagagagagtagaagaaagaatcaacaaacttaaagacaagtccttgga

SEQ ID NO: 182305 - DNA, 588 bp, Homo sapiens
gtccaactttccagtttttcaaagagctacagaacggagcttttgtttttgttatgcctgtcttcgagcaatgatggtacacaacatactcttgagatctgggagctgctaaaaataaagacagtggattggattaccacaaatatttgagaggcctgcacattctctggctgagccgattaatgagggtcttctgtgcaagacctgtctatgaaaacttagaaagatggttgttttctctaattcaaagacaccaatacaaaaattcaagaagagtgaagaaatagggaatcatattccaaatgaaagaacaagataaatctccacaaactgaccttaatgaaagagaaatatataattacctaacaattcaaaataatcatcataaagatgttcaaagaggtcagaacaacgcaggaataaagtgagattttaacaaagagacggaatttattttaaaagaaactaacaagaaaccttgaagcttaagaatacactaactgaattgaaaaatttactagaggggattaacaacaaamtagagagagtagaagaaagaatcaacaaacttaaagacaagtccttgga

SEQ ID NO: 182306 - DNA, 493 bp, Homo sapiens
agatctgcaagagggttgccttcaactattcagctgagtacttatcagtggacatatgtgaggaaaatatctaaggctgaggaaaacacaacccaaaaggattaggagaaacaatactaatacctcacacaggctgagagtaaagcctatttccaacaggcaggctggaaaaaggaaacttgtatatccagcaccttccacagtttctttgtgtgtgttaagagcacctaaaatgtgttcaacaacacagcgggataggaggtcctaggctttactactttattagtccattctcacactgctataaagaactacctgagactgggtcacttataaggaaaagagatttaattggctcayagttctgcaggctatacaggcttctgcttccggggaggcctcaggacacttacgattgtggcggaaggtaaagaggaagcggggacatcgtcacatggctgacaggaaagagagagtgcaaagggggaggtgc

SEQ ID NO: 182307 - DNA, 503 bp, Homo sapiens
gtcaacatggcaaaaccccatctctactaaaaatgtcaaaaattagccaggtgtggtgccatgcacctgtaattccagctacttgggaggctgaggcaggagaaacacttgaatctgggaggcaaaggttgcagtgagctgagattacgccatgcactccagcctgggtgacagaacgagacttccatctcaaaaaataatttttttaaaaaaggcaaaactatcaaaaagaacaakaactacaacaattggttaagggataagcaatataaaaatgttaaagtgtatttgttattttttttttctttgtggtcaaagttaagttgttatatatcccttagaattactgtaggtagtgttatttttaatagttttgtcttttcaactttattcaagtattctatcattttccccagcatacagaaagctcctaaaatggtagttattattaatatcaggtgttattttatatctattttatattaagcacacatatattatag

SEQ ID NO: 182308 - DNA, 592 bp, Homo sapiens
aatctgtttgcagatggtgcccgactccagccaggacattcttctgagcagatgcctctaactgtagttcccatgggtttctcaagctcaacatgtcaaaaggtaatctcagctcaacatctttcaccttatttctcttgggttcctcctcatctttgtcaatggtgccaccaagcatccagtaacatgctaaaagctgggggtcaccgtagactcccctgcacacctccacatccagggaactacaaaattatctctccattctagtcctactttttcactccatagcacaattctaatcatttcctctctggattcttgctgtggccacgtgatgcattttcattcctctaagactcccccttttctcccctacccccaccccaatccagccgtcttgaatgtgaagccaatgctgactccaagaagcacggctttcagaaaagctacctccagcccactgcacccagcctgagggcctctggtgattcacaggccttaaccctgtcaggagccccacccaacctcatttccttatcctctcaccccrgcaggatactctcctcctgcctcttgatcctaccgtctaacc

SEQ ID NO: 182309 - DNA, 540 bp, Homo sapiens
taaagaggtaagtctctgtaaggccttgttatgttcccattgggggcagtattgtttgggatgaaggtacaacattgagttttaattataatgcaaactccacctttttcagctaacatcatgtctagggccattctgttttcccaaaccatctggctagtaggccctaactggtcagctattactttgatggcatctctagtgtaattaataaatcattgctgtttataatagatgtaatttatccaatttacatttttattaatagttactcatggaaatactgattcaaatcctgcagctatttggtctgggctttgaatttatcaggtactcccygtgggactctaattgcatctaaataaacttgagagtcaaaagacccataaggggcttctcttattttatggtgttgcattttttctttttctggttgatgaaatgccagggtgaaagggatagccaattagacaagagcataagtaccactccagttacttgacagagtgtccagtaagggtctgccacaataccaccaca

SEQ ID NO: 182310 - DNA, 163 bp, Homo sapiens
aaagacccataaggggcttctcttattttatggtgttgcattttttytttttctggttgatgaaatgccagggtgaaagggatagccaattagacaagagcataagtaccactccagttacttgacagagtgtccagtaagggtctgccacaataccaccaca

SEQ ID NO: 182311 - DNA, 163 bp, Homo sapiens
aaagacccataaggggcttctcttattttatggtgttgcattttttctttttytggttgatgaaatgccagggtgaaagggatagccaattagacaagagcataagtaccactccagttacttgacagagtgtccagtaagggtctgccacaataccaccaca

SEQ ID NO: 182312 - DNA, 496 bp, Homo sapiens
aacggctattatcatttttgttttaaagttaacctatgaacaaaatctctcccatagttagctttgcctatgcctaggaatgagcaaagacagcttgtgaagttagaaacaagatggaatcagctatgtcagctctctctcactgtcataatttttgcaaaggcggtttcaaaatatgtctctttggcatattgattattgkaagctggttatcttgagaaacttcagacataggagtaattctgcaaagttgcccttccataaggaaacttacatctataaaggaaacatttatttgaaaggatatctccctctcttcaccagcaagagaaggactaaatcgctagagattcttatccatgaagaaggcatcaatttaaatctgcacaacaaaccttacctcttttacagcacgggcgttcaaacttttggcttccctgggccaaactggaagaaaaattgtcttgggccacacgtaaactacactaacgacagc

SEQ ID NO: 182313 - DNA, 467 bp, Homo sapiens
ccacagcagcctggaccaccagctgcagagcacagccacactcaatatgattctgtccttgatggcccagttctgtttcttgtccatgctgaaagacgtcagatcttccaagcattgtttccatagctctatcctctgtcctgggctctgcatctggtacattacaagtaagattgcttacttcctaagtttttcactggaaattaggattattaagatttcttttattttgcatgactcctgtacacattactgcacttacatgcattttctttattaatctgccttttgtccattgacttttcarcaaaccataagaagtcaaagggaaagttttctcctggtccctgcactgattaccagtagtataactctgacaatgaaagccaatagagtatcagcagatctcattctttcattgagaatttttgcaaggcagggtccatatcttactcattaaacctacc

SEQ ID NO: 182314 - DNA, 433 bp, Homo sapiens
gagaggaataggagttattgtttaatggttatagagttcagttttccaagatgaaaagaataatggagatggatggtagtgatggctacacgacattatgaatgtacttaataccactgaactgtacacttaaaaatggttaatacagtaaatttcatgttatatgttttttaccacaataaaaataatttttaaaaatgccataggctgggtggtttaaacaacagacatttatttatcacagttctggaggctaggaagtcaaagrtcaaagtcattggctaattcagctcccggtgaggcccatcttcctggcttgcaaacagctgcattctcacaaggcttttccacgatgcatgtgggtagaaataggaaaagggcacaagctctcagtgtctctttgtttaagggcactcattttatcgtaagggtc

SEQ ID NO: 182315 - DNA, 478 bp, Homo sapiens
aatggattaaagactttaatctgtgacctcaaactatgaaactactacaagaaaacattgggaaaaatctccaggacattggtctgggcaaagayttcttgagcaatactccacaagcacaggcagccaaagcaaaagtagacaaatgggatcacatcaagttaaaaatcttctgcatggcaaaggatacaatcaacaaagcgaagggataacccacagaattggagaaaatatttacaaactacccatctgacaagggattagttaccagaatatataaagagctcaaacaactctacaggaaaaaaaaaatctaataatcctatcaaaaaatgggccaaagatttgaatagacatttctcaaaagaagacatacaagtggcaaataggcatatgaaaaggtgctcaacatcattgatcattagagaaatgcaaaccaaaactacaatgagatatcatctcatgccggttaaaatgg

SEQ ID NO: 182316 - DNA, 557 bp, Homo sapiens
tgcttggcttaatgctctcaccctttgggtttgtgacccacgtgggctccaggcagaggcaggcaggtgctggtctcctgaagtcagacygactagtaagggccaaggggatacaggtggagctctggaagtgtctgctatagtttcaaagctagcggggctggaaagaaaattgttacaatgtcaatccctccatttttttatagtgaatgaagactcattctgatagtgtggcaagtttcttttgactacttcaagattctagaattttccctgtatttcccttccttttgacactatcccaatgttctcatttctaattatttgttaatttaactctcactttcacttttcctattctaagtccccaattttttatttattcaattattactcccaaccacatcagcccttctgaagaagcaccatttttcccatcaagttcttacttgtgtttggactggcatctccttccaaattgtcttgaattttgtctagacaaagactcactgtgctcatgtctcctggctatcaaataggagaaaattccatgaacc

SEQ ID NO: 182317 - DNA, 557 bp, Homo sapiens
tgcttggcttaatgctctcaccctttgggtttgtgacccacgtgggctccaggcagaggcaggcaggtgctggtctcctgaagtcagaccgactagtaagggccaaggggatacaggtggagctctggaagtgtctgctatagtttcaaagctagcggggctggaaagaaaattgttacaatgtcaatccctccatttttttatagtgaatgaagactcattctgatagtgtggcaagtttcttttgactacttcaagattctagaattttccctgtattkcccttccttttgacactatcccaatgttctcatttctaattatttgttaatttaactctcactttcacttttcctattctaagtccccaattttttatttattcaattattactcccaaccacatcagcccttctgaagaagcaccatttttcccatcaagttcttacttgtgtttggactggcatctccttccaaattgtcttgaattttgtctagacaaagactcactgtgctcatgtctcctggctatcaaataggagaaaattccatgaacc

SEQ ID NO: 182318 - DNA, 557 bp, Homo sapiens
tgcttggcttaatgctctcaccctttgggtttgtgacccacgtgggctccaggcagaggcaggcaggtgctggtctcctgaagtcagaccgactagtaagggccaaggggatacaggtggagctctggaagtgtctgctatagtttcaaagctagcggggctggaaagaaaattgttacaatgtcaatccctccatttttttatagtgaatgaagactcattctgatagtgtggcaagtttcttttgactacttcaagattctagaattttccctgtatttyccttccttttgacactatcccaatgttctcatttctaattatttgttaatttaactctcactttcacttttcctattctaagtccccaattttttatttattcaattattactcccaaccacatcagcccttctgaagaagcaccatttttcccatcaagttcttacttgtgtttggactggcatctccttccaaattgtcttgaattttgtctagacaaagactcactgtgctcatgtctcctggctatcaaataggagaaaattccatgaacc

SEQ ID NO: 182319 - DNA, 439 bp, Homo sapiens
tttacctatttgtatcccacaagtcaatactcgtggttctgtcrtggtcatttgtggacatatgcagaatggtaaaaaagggaaggcaccagatgtgtacaatcccaactgaggtcgaacagggtgatgccctgccttcttggttcagctctcattccataaacgtgttcttttcacagtctattcagtgacacgtttttctaactcttatgctttttgttggtgatcttgtttaagacatccctcaagcatggtggtgaagtgctgccgtgttccttagagcaagaaggttgtgatgtgcctttcagagaaaacacatgtgttagacaagcttgattcaggcatgagttgcagtgttgttggtcataaattcaaaggtgataaatcaaaaaataagatgtctttaagcagaaacagacataaaacaaagttttatatt

SEQ ID NO: 182320 - DNA, 493 bp, Homo sapiens
  misc_feature (1)...(493): n = A,T,C or G
attcatccaaacatttatgtaatccacataatgggagaagaaaraaattaatagtgtttgggatcactaagtagcttttggaaattgtgtgtgtgtgtgtatgtgcatgtgtgtatacgtgtgtgtgtgtgtgggtgtttgcttttttcacaaagaacatggtatagaaaaataggataggaaacctgggttctacttctaggcctgcaataaacctgctacgtgactgtgtgctgcctaatagccctctctggactccagttgtttccatttggaaaatgaggggattgaaccaaatgatctgtaaagtcctttcccactctaaaattttatggctctaggagaaaggcatctatagttgcataaatgggcaagttaaatgaggcccaaaagtagttcaggcaaatcagtgttcattgttgggatggagcacttatacttatgtgtgtggagtggtcttcatagtancactagcaagcctgggctgcagttt

SEQ ID NO: 182321 - DNA, 493 bp, Homo sapiens
  misc_feature (1)...(493): n = A,T,C or G
attcatccaaacatttatgtaatccacataatgggagaagaaaaaaattaatagtgtttgggatcactaagtagcttttggaaattgtgtgtgtgtgtgtatgtgcatgtgtgtatacgtgtgtgtgtgtgtgggtgtttgcttttttcacaaagaacatggtatagaaaaataggataggaaacctgggttctacttctaggcctgcaataaacctgctacgtgacygtgtgctgcctaatagccctctctggactccagttgtttccatttggaaaatgaggggattgaaccaaatgatctgtaaagtcctttcccactctaaaattttatggctctaggagaaaggcatctatagttgcataaatgggcaagttaaatgaggcccaaaagtagttcaggcaaatcagtgttcattgttgggatggagcacttatacttatgtgtgtggagtggtcttcatagtancactagcaagcctgggctgcagttt

SEQ ID NO: 182322 - DNA, 421 bp, Homo sapiens
ttctaggtcccatgctgcccttgggtgcctgaattatcaggtcaattcagactgaacaaatattattgaacacagatatgtgccagctgcttccacctaccctatttcatttgatctcttccttagctttctattttccagctgaggacagtcggacccagcgaggctaaacaacttgatcatggcaacccatgaatagaaagaaccttgagtttcagagacctacctcattgctcttggacctatatcagggtgctgtctctttaaacatgtaygtgcctgttattctctgttgccacagccatccactaggctatcttattagaacataagagctcttgaattgctgacataaaagttacaactgagaccaaaatcaaaatggaatcctggaaaggaattggggaaggaagcgctggtc

SEQ ID NO: 182323 - DNA, 563 bp, Homo sapiens
ctggctggcacatagtaggtgcttaataaatatttcttaactgaatgggtgcattggaataatttgttgagaaaaggaatcaggattaaagtgattttctaggtcccatgctgcccttgggtgcctgaattatcaggtcaattcagactgaacaaatattattgaacacagatatgtgccagctgcttccacctaccctatttcatttgatctcttccttagctttctattttccagctgaggacagtcggacccagcgaggctaaacaacttgatcatggcaacccatgaatagaaagaaccttgagtttcagagacctacctcattgctcttggacctatatcagggtgctgtctctttaaacatgtatgtgcctgttattctctgttgccacagccatccactaggctatcttattagaacataagarctcttgaattgctgacataaaagttacaactgagaccaaaatcaaaatggaatcctggaaaggaattggggaaggaagcgctggtctaagattccagacatttgagtttttgtctttcctgtgtgactctgg

SEQ ID NO: 182324 - DNA, 563 bp, Homo sapiens
ctggctggcacatagtaggtgcttaataaatatttcttaactgaatgggtgcattggaataatttgttgagaaaaggaatcaggattaaagtgattttctaggtcccatgctgcccttgggtgcctgaattatcaggtcaattcagactgaacaaatattattgaacacagatatgtgccagctgcttccacctaccctatttcatttgatctcttccttagctttctattttccagctgaggacagtcggacccagcgaggctaaacaacttgatcatggcaacccatgaatagaaagaaccttgagtttcagagacctacctcattgctcttggacctatatcagggtgctgtctctttaaacatgtatgtgcctgttattctctgttgccacagccatccactaggctatcttattagaacataagagctcttgaattgctgacataaaagttacaactgagaccaaaatcaaaatggaatcctggaaaggaattggggaaggaagcgctggtctaagawtccagacatttgagtttttgtctttcctgtgtgactctgg

SEQ ID NO: 182325 - DNA, 534 bp, Homo sapiens
gaaggacaatttgaatcagattttaatcctgatccaagcccagcacttgttaagaaccctagcagctttgcaagatgttctcccctcccacaagaacacggaactgtgacccaaagcttccagtttctgctttgcaactaagcagtcatggagccttgagaaagtctcttaaccactctgcatttaaactcctcccattagtatcagcctcataaatatttatagaataaatggattaattacttaatgaggaattgaattctttggttatttttgtgctttgattttctcctttatacaattaatactcacccaaatgaccttgagtgattgttaagcagaatggaataayggataatgtgtgtgaaagtactctgaaagatatagagcactatacacatttaagcatcaaagatgatgcaatgtagtatttaggttggtgcaaaagtaactgcagattttcccattaaaagttaatgacacaggctctgcagtcagacagaccagataggagtttaaagcccagctctagtg

SEQ ID NO: 182326 - DNA, 570 bp, Homo sapiens
cctccttccaacccatttcagttcaggtacacctcacagcatcctgatgttcttcctgtcatagcatccatcataccctttgccaccgtggttatgtgttcccatttcccctaggaacctatgagttccttatatacaggcaccaatttttgaattatgtttctcaccctagcacttagcattatgcctggcaaagtaatggggcctcaaaaaatgtttgttgaatgtagaacttcttccttttgtcctcttcccttcctccctcctccccttcctccctcccttccttctttgtttacttccttcatcccttcctccctcccttacttcatttcttccttcttccctttcttccacaaatacttattgagcatccactatgttctaggcactgttctaggaactggggagaaaacagggaacaaaatagaccaaastccccactttcatagagctcgtattctaacagaaggtgacaaactattaataactaagtaagtctaaaatatgtccagcaatgtaagtgtcatgaagaaaactaaagtagggaaaggggatagagagatatga

SEQ ID NO: 182327 - DNA, 570 bp, Homo sapiens
cctccttccaacccatttcagttcaggtacacctcacagcatcctgatgttcttcctgtcatagcatccatcataccctttgccaccgtggttatgtgttcccatttcccctaggaacctatgagttccttatatacaggcaccaatttttgaattatgtttctcaccctagcacttagcattatgcctggcaaagtaatggggcctcaaaaaatgtttgttgaatgtagaacttcttccttttgtcctcttcccttcctccctcctccccttcctccctcccttccttctttgtttacttccttcatcccttcctccctcccttacttcatttcttccttcttccctttcttccacaaatacttattgagcatccactatgttctaggcactgttctaggaactggggagaaaacagggaacaaaatagaccaaactccccactttcatagagctcgtattctaacagaaggtgacaaackattaataactaagtaagtctaaaatatgtccagcaatgtaagtgtcatgaagaaaactaaagtagggaaaggggatagagagatatga

SEQ ID NO: 182328 - DNA, 527 bp, Homo sapiens
actgaaatgaaagcaactgcaagcagaaggacactgacaaatgaccacaattaacatttctgatagcctaaaggaactaacacagcatgataaaatgtggaacacagaaggtacaacaggtgagagctacaggcttcaatacaggattgagacctcaatctagataaaggctctacatacagtgccttctggatgttggcaacaccaacatcccttaacaaagaagaatttgtttaaactttacacggatttatatcacataattttctgcacttaactaagattaactttactagctaactgtgtctgtgtgcatacacacagacacamaatgtagattctctcaaaaaaattttgatgatttaatcttcaaataaatattggaaagattgccttcaagcattgttagaaagatatagtttaaaaagatgaaaccacatgtatgtagtattcaatattcaggtgttaaataagataggttaggaagtacatcacagacagaaaggcaccatactattagtccattg

SEQ ID NO: 182329 - DNA, 546 bp, Homo sapiens
caccaggtccaatggtatctcagcagaacatacaacagtatagcactctggcaccatgaagttattcaggatggctccgaagaatatgaggaagaggaggggtgagagtaggacaaaaaagcaaaatgtacctttaggtaagcagaggcaaggctgtaaacagctgtgaagccttgccaaggtgttagaggttttcctatagccagtagtgggctactgaagaatcttaatcagggaaatggtatgacacgatcagaactgctttttaaagccatcactctggtgacagtggcagtaaatggtaacagtaaatgtcayaattatgatggcgatgtgataagagatgatttaatttttcttttttaccctagagttctcagatttttgacactgaatctgttacttggtaatataaatagatgtgttctttgagtgaaaaagatgacttacatctaattgtctactttttccaatagaaagcaagcataatcaagactgagcataaatacatataattatgatttgccaattaaaaatattaacaga

SEQ ID NO: 182330 - DNA, 456 bp, Homo sapiens
gcaacaaaaacaaaaattgacaagtgggatctaattaaactaaagcttctgtacagtgaaagaaactatcaggagaagggatgaggggaagttgagagtgaccttctctttcctsttgttttttcaaatgccagggtgccatatttggggttagtatgtcctaaactccatcaacattttaattaaaacactttagggggatgagattttttcatgctgagtgtatgtatgtatgtgtgtgcacatgtttctagtttatataagtaaatgtacatttcttgtgtttctgagtttatgagcttgcacaagtcacctagtgacagtctctaaatgttagaattgccaacggtttccttaaatattctatttttgattctctgtcattagaacaaaccagtcttcatcttgtagagtacatgatagtgccagacttagaagtaggcagcgacaaaactt

SEQ ID NO: 182331 - DNA, 456 bp, Homo sapiens
gcaacaaaaacaaaaattgacaagtgggatctaattaaactaaagcttctgtacagtgaaagaaactatcaggagaagggatgaggggaagttgagagtgaccttctctttcctcttgttttttcaaatgccagggtgccatatttggggttagtatgtcctaaactccatcaacattttaattaaaacactttwgggggatgagattttttcatgctgagtgtatgtatgtatgtgtgtgcacatgtttctagtttatataagtaaatgtacatttcttgtgtttctgagtttatgagcttgcacaagtcacctagtgacagtctctaaatgttagaattgccaacggtttccttaaatattctatttttgattctctgtcattagaacaaaccagtcttcatcttgtagagtacatgatagtgccagacttagaagtaggcagcgacaaaactt

SEQ ID NO: 182332 - DNA, 489 bp, Homo sapiens
agtgtagggcactatcccctctcttcttatggtgtttttctcctcaagccatactagtttcctcaggcattctcacaggtcaccagaacagctgagaaggaacgtgtacagatctctggagtgctcttctctcattctctctcactctccctcaatccccacctcccctcactcttttctctccgcagctctcccctctctgatatccttctcctgcaaactctagcccagtggcctccctgtactcccagctctttgactgtgtcccctgtcctcagactagggcctggaaactctctcaataagctgggacagtggtagggtcttcatttgtttccctccataattgtctctcartgtttctcaatttaatattcaatggcttgactaccattgtgttgagtatttttgtcctcattttttttcagctatttcaagcgagaagttagaactgatatctcttccttcatttggtgaaaagtagaattc

SEQ ID NO: 182333 - DNA, 586 bp, Homo sapiens
ataaagcatcagaagggtttgaaagttttactgtgggtaaaatgctatcaaacagcatcttacactacaaaaaaaaaaaaaaactatttcatgaaaggtagtgtcagttggtgggggaaacttcattactgtcttcttttaaaaaattaccttagccaccccaaccttcagcactcaccaccctgatcagtcagcaactatcaatatcaatgcaagagttccaaccagcaaaaacattaggactcactgaagactcagatgattattagcactttatggaaaaagtatactaaggtatatacactatttattagacaatgcacatttaatagactatagaatattgtaacataacttttatataaacacagaaattaaaaattttgtgactcccattattgcaatatttgctttatttgcagtgacctggaattgaaccctkaatatctttgtagctaatatactattcagttgaacagacattatccccttcagtttgccaaagttgtgttatcctgtgagatgggcggtgggtcattgctttgatcaatagaacaaggcagaagtgagtgtctgcctgttcaag

SEQ ID NO: 182334 - DNA, 586 bp, Homo sapiens
caagcttccatttttaagggctttgaacctaatatcatatatatacatatatatatatatayacacacacacacacacacacatacacacacacacatatatacacacacatatatatgtatatatataactctacaagtccctgaattcgtggaatgactttatttcctttaattactgattgtaagctaattactttctgagctcattctcttttctctaatgcattgctaaatacagaaaacatcaaaaattagcatttggtagactaattcttcctccaaagctacaggttcattaattctatagaagaatgcccaacttaaaagaggtgacaacttcaccaaatgcttgtccattacataagacaagttataatgcatcttgtctcctataacaattttctcactattattgtctattcagccaaggacattttttctcagatttttctattacagcattcttcttttagatatcatttttaggagtccaaataaactagtttagtaaaaaacttcaatatatcagttgtttaaaataacaaatgaatattatttacttacattttgcatccattatagac

SEQ ID NO: 182335 - DNA, 610 bp, Homo sapiens
caagacagacatggaggcaggtatgactataattcaaataacatactaaatgttaacaagatagtattcatataaagaaagggaartaaaggacattcagactttgcctcttttggaaatgctacattcacagataccttggggaatacggtatggaggctacaacaaggttatttgagatccatttgagattatgtcaaccgacaattatgctgagggattgacaagataaaaaggcactattttttcccatatccaattcctctgatatgcttcactaaatgcataaagacagagacaaaacatgaaggaaaaatatttatacatttttaggtttgtgaatagtttcaagggagagaagagacatcatgaggtcatctggtatgccttcataaatactttagagtattattcactgtgcacaatttgcagtgcccttggcaatccaaatacatttcctttcttttgctgaagaccaagcaggtctgcctggctctgaggggtaccttacatcagggtgttttatgcatgagattcctgattgaaaagagccaatagaataaagctgagcagaatccttgaaagagtgagaactccaaaggtcacattc

SEQ ID NO: 182336 - DNA, 460 bp, Homo sapiens
atggctcttattaaaatcacgtggcattttaaccatgcaatcctaactatcatggatgctaaaagatggttagaaaacagaaaaaaatgctgggaaaatcagcttagttcttcagtttttctgttgttgtttttataactttcattattattattatwattattacagaattcaggattctatagtcagtcagataacatgaaaccacttaaaatgagtgttagaaatctggctggcacctccctccccctgatgtgatgtttgtatttatagattcacatgcacatcatatgcctactgatatggtttggacatttatcccctccaaatctcatgttgaaatgtaatccccagtgttggaagtggggcctggtgggaggtgtttgaagcatgggggcagatgcctcatgaagtaccctcccttcagtaacaagttcatgcaagatctggttgtttaaaa

SEQ ID NO: 182337 - DNA, 574 bp, Homo sapiens
ttatttattttcctgtctagacaatgtcatcctgagagaagaatgttcttgtctttgaattctccttctcggaatggtagctggcacctaatgggcattcatgggaatgcacatacacctygcttttccccaggcattctgggtcatgttgtcatcaagatctattctaggtttctctaaataatatttcatattttggagtctcactgattctcttcctatcaccctaagctactttcttggggtagacagactgaggtggtcccatgctcccttcttctggatattcaggtctttgtgtgatcctctccccttgagtgaacagaacctgtgaattgctcctaaccaatagaacataaaaatattatgaaatattgctcccttgactaagttatatcatataaaactctctcatgacagactcacttgcaattctgccaacaacctgagtaggcttgaagcagattcttccctattcaagtctgtgaataacaatgaagcctggctaatagcttgattgtagtcttgtagatccctgagcagaggtcacagttaagctcttcctgtagtcctc

SEQ ID NO: 182338 - DNA, 574 bp, Homo sapiens
ttatttattttcctgtctagacaatgtcatcctgagagaagaatgttcttgtctttgaattctccttctcggaatggtagctggcacctaatgggcattcatgggaatgcacatacacctcgcttttccccaggcattctgggtcatgttgtcrtcaagatctattctaggtttctctaaataatatttcatattttggagtctcactgattctcttcctatcaccctaagctactttcttggggtagacagactgaggtggtcccatgctcccttcttctggatattcaggtctttgtgtgatcctctccccttgagtgaacagaacctgtgaattgctcctaaccaatagaacataaaaatattatgaaatattgctcccttgactaagttatatcatataaaactctctcatgacagactcacttgcaattctgccaacaacctgagtaggcttgaagcagattcttccctattcaagtctgtgaataacaatgaagcctggctaatagcttgattgtagtcttgtagatccctgagcagaggtcacagttaagctcttcctgtagtcctc

SEQ ID NO: 182339 - DNA, 601 bp, Homo sapiens
agttgagtacttggaaatttagtgaatctactctcaagggtaattagaggagaatcaaataagaattgggaatatcaaaagagtcaacatagaggtggaactgaagtgtttttgcttgtttgtttgttttttgtaataaagctttgggcaagattaaaaaaaaaaaaaagtagaagcctctgtrtgctgagagagagagccctaaggctaagtatgaaaactttgacctgaacttctcagtagccaagctcggaatacaaccttggtgtctgaagtatgcccagctacttaccaatcacccagaactttttccatctcaaatattcatagttcctatgtgttttcgaaattttgaaatattgtcatcataaaaacagaaagacattaccatttatgtgaaggaaagtcacaaaaccaaatgcctcttgcccttcatcatgcccataaaacaaatgtacaaggctatcctagaggctgcaagggagttgaaaccctgaaacttccaaaagttagtaaatgaaaattaattgcacagaggccattctaatttagcatgcataaaatatcattagtgctatctatattgagtgttctgttttta

SEQ ID NO: 182340 - DNA, 601 bp, Homo sapiens
agttgagtacttggaaatttagtgaatctactctcaagggtaattagaggagaatcaaataagaattgggaatatcaaaagagtcaacatagaggtggaactgaagtgtttttgcttgtttgtttgttttttgtaataaagctttgggcaagattaaaaaaaaaaaaaagtagaagcctctgtgtgctgagagagagagccctaaggctaagtatgaaaactttgacctgaacttctcagtagccaagctcggaatacaaccttggtgtctgaagtatgcccagctacttaccaatcacccagaactttttccatctcaaatattcatagttcctatgkgttttcgaaattttgaaatattgtcatcataaaaacagaaagacattaccatttatgtgaaggaaagtcacaaaaccaaatgcctcttgcccttcatcatgcccataaaacaaatgtacaaggctatcctagaggctgcaagggagttgaaaccctgaaacttccaaaagttagtaaatgaaaattaattgcacagaggccattctaatttagcatgcataaaatatcattagtgctatctatattgagtgttctgttttta

SEQ ID NO: 182341 - DNA, 601 bp, Homo sapiens
agttgagtacttggaaatttagtgaatctactctcaagggtaattagaggagaatcaaataagaattgggaatatcaaaagagtcaacatagaggtggaactgaagtgtttttgcttgtttgtttgttttttgtaataaagctttgggcaagattaaaaaaaaaaaaaagtagaagcctctgtgtgctgagagagagagccctaaggctaagtatgaaaactttgacctgaacttctcagtagccaagctcggaatacaaccttggtgtctgaagtatgcccagctacttaccaatcacccagaactttttccatctcaaatattcatagttcctatgtgttttcgaaattttgaaatattgtcatcataaaaacagaaagacattaccatttatgtgaaggaaagtcacaaaaccaaatgmctcttgcccttcatcatgcccataaaacaaatgtacaaggctatcctagaggctgcaagggagttgaaaccctgaaacttccaaaagttagtaaatgaaaattaattgcacagaggccattctaatttagcatgcataaaatatcattagtgctatctatattgagtgttctgttttta

SEQ ID NO: 182342 - DNA, 534 bp, Homo sapiens
ctctggtgtatgacattctcctgagggaaatattttaaattttgtgtgccttaagtaatttttttttcactcttggcaagcactcgcttacaattttgggtcaaaaaaaatacttttactatagaaagtatctgagagaaattaatgttcattactaatatcaatcctttagaatatgtcacctcctttgacattttcagaaaactgcctcaaataagccccaaatgcaaatgtgacccatatgccaatgccatatatctggctgtgtacacactgcattaaaaagctctctcaagctagaattttttatcattcctgcatgaactaactctcatgaaataattaggaggtacacaaactaatgataaatgttagcttttggaaatgggttttgatgaaattatcataatctgattatgcagcttcaaagaacctttcctaagctcgatttttcctcrtctgatccaatctgcaactgtctatggccagaacagcctctgcatgaggatttatgatgagggcttagaactgcca

SEQ ID NO: 182343 - DNA, 507 bp, Homo sapiens
ctggaataaaaacctttgcttcttctggaacttccctgttttggttctcaaatataaattattcactgagtacaygtcttctcattaagttctttattgcctcgaaagaattttgggctgctgtctctaaatgatgacaaacaattataatatcaggaaattgtggtagatgattggtttattttactgatgttcccactggcaccatcactactgccaaaagtatgatttcttgtgaatttgctgcatttctcttcatttgggacaaaagtaatataggcttccaaaagtcacatattctatcactaaagacatgcttttaaattccagtctaaggaaatcatttgaaaagacctaatccttttaatttactggctcaactaaagggatccaattgaaaattttcttatattccacaaatgcagcttgctctgagtacgaagacctgcgctcagccctgggaatgtagacataaataagacatgatcctgacctcaagaaagacat

SEQ ID NO: 182344 - DNA, 395 bp, Homo sapiens
attaaatagttaatttacaaatttttctcccattctgtggattttctttttactttcttggtagtgtccactgaaacatggaagtttttattttattgaaattcaatttgcctgttttttcctttgtcacttttgcttttggtatcatgtctaagaaggcttggcttaactcaaggtcatgaggatttactcatatattttcttttccaagttttgtagttctrgctcttacatttaagtctgtaattcaatcgagttaattttttgtgtatatggtcaggggaggagttcaatttcattcttttgcatgtggttatccagttgtcccaaaactatttgtcaaaaagatcattcttttccctgtgcaattatcttggtaccctgcttgaaaatca

SEQ ID NO: 182345 - DNA, 610 bp, Homo sapiens
aaacttacttactgcattccatttatgccttagcttttttctgtattttctattcttttgtctctctaagctttagactctatattttctattgacaaatcatttagtttacaaattttctcttcagttctgtttggtctaataattttattccyaaacattaaatccataaaatttccatattattagttttagaattctatttgcttcttctttaatagttttgccctacttctcatctgcctttttttttttttttaagcataataagcccactattctaaaatctactaactcaattacctgggtttcttatgggtctgtttctattgtctgctgtttctcttggattttgattccatcgtattttctgcttatatccttgctttcttttcgtccattctttgagtgttgacactataaatgacgcattttagagatctttgaggtacaggaagatgtttaacttggtttctgcattatagctaggggaaccaccaatcctagattctttaatgcaatcagagatgggtaacattgaaagttgggcttcagacactataagctggtctatttacttctttgagttccacctgcatcagtcatgtgg

SEQ ID NO: 182346 - DNA, 556 bp, Homo sapiens
atacctgttaacgtggaattctctatctaatcaaagcaatattataaatgaaggtgaataaaagatattttcagatagacaaagtagtttatatttatctgctgagatttcctatttgttcataatgcatatttaattttttgttcctgagaagttatagcagctgctttaaaatctttagcaattccaacaactatgtcatctcagggtactctctattgattgtgttttcttgagtttgggtaacatctttctgtctctttstgtgtcttaatatatgtatggtatcctgatgatacattgtaaaaactctagattctgttatgttcctctgaagagcattttgtgtttagttttaatatacattaaattatcctgactcagaattcaatttatgtttccctgtggatacatgacattttccttaggttttctagatttagctagacttcttggagtctgctctgaacatccatagtttagatataatcagaaatttaaatagtttttattcacataatttggcactgtttctcccttaatgtggaacttcttc

SEQ ID NO: 182347 - DNA, 415 bp, Homo sapiens
ctggccctcctgaagcttctgtgagttacccactaacctttgataagtccttgtaacttgattagctctagtgggttctgctgtctgcgacaaagaacccagcctgctacccatccaatgagcaggctactgggattattaagcagactccaaaccgtgtgagacccatccacatgcctctttcatcatgactttgaacacagctcctgctctctccatgccttgatttttccccttcactgccctcaaggagggacctactctagttttaaagagtcctacccagtgctctggactggaagttgctaagaaagttcaaagttttgaatgytgagtagtgaagacaacagggctcagacctttatgttccttgtaatcttcccctcaaagcaatcttcctaattgctttgaattc

SEQ ID NO: 182348 - DNA, 527 bp, Homo sapiens
agacaacgcactttggagcaagaggatcatgagtcatggtttggctatttctctgaattctagtcttgatcaagttactgaagctccctgtgcctcacttttttcatctgtaaactgggactgatggtatgtattrtctacctgacgtggttgttgaggagataagagcaaatgggagcaggcatacaaaagcccaggagtgacggcagattgtgctagagggctgggacacagcaacatgtcccacagggccctgaccacagcagggaatatagacccatgaccagccccacaccccagaagaaagtcagatgaaaactgagatcacttattttctaaggtccttctttccttgaggagtgtctatttgcatggccagtgtaagagtgaatggattcaaacaggataatgggaacaactgcggaagcttggtccaaacaacttgagttgacctccttaagtgtagcctcctgtggtgacagcgcacaggaaatgaggggaattgttgcctctttgtccagttagag

SEQ ID NO: 182349 - DNA, 527 bp, Homo sapiens
agacaacgcactttggagcaagaggatcatgagtcatggtttggctatttctctgaattctagtcttgatcaagttactgaagctccctgtgcctcacttttttcatctgtaaactgggactgatggtatgtattgtctacctgacgtggttgttgaggagataagagcaaatgggagcaggcatacaaaagcccaggagtgacggcagattgtgctagagggctgggacacagcaacatgtcccacagggccctgaccacagcagggaatatagacccatgaccagccccacaccccagaagaaagtcagatgaaaactgagatcacttattttctaaggtccttctttccttgrggagtgtctatttgcatggccagtgtaagagtgaatggattcaaacaggataatgggaacaactgcggaagcttggtccaaacaacttgagttgacctccttaagtgtagcctcctgtggtgacagcgcacaggaaatgaggggaattgttgcctctttgtccagttagag

SEQ ID NO: 182350 - DNA, 570 bp, Homo sapiens
atgagtcagtgcaggatgggtggctgatgaagactccacctgaaagacgttggtaattactgcctccaaagttgtccatctgccggtgtggatcagagtggggtgtggaattaggaaaggaccccagggacaagaggccagaaataaagaatacttggaaaggtagggacagggagctttctttcagcccatctggctaagagccactagtgccattarggagagatgaaaagtaattcatctgtgggatatatgtagcttttgtatgtataatttatacttaatgttgaacaaatggtacctatttcatctcttagcatggttcagggactcacaataagcctttcttgtttatatatcttactgaattaaatgcaaaacatctatctcacaaagaacttggatctaggatatgtgaagaattcttaagactcaattacaagaagacaaataaaccaactttaaaaaaatgggccaaaggtttgaacacactctcctcaccaaagaagataaatgaaaggcaaaataaacacattaaaagatgctcaacatcattagtcattagagaaa

SEQ ID NO: 182351 - DNA, 565 bp, Homo sapiens
atctgtgggatatatgtagcttttgtatgtataatttatacttaatgttgaacaaatggtacctatttcatctcttagcatggttcagggactcacaataagcctttcttgtttatatatcttactgaattaaatgcaaaacatctatctcacaaagaacttggatctaggatatgtgaagaattcttaagactcaattacaagaagacaaataaascaactttaaaaaaatgggccaaaggtttgaacacactctcctcaccaaagaagataaatgaaaggcaaaataaacacattaaaagatgctcaacatcattagtcattagagaaatgcaaacgaaaatcacattgagataccaccacacacctagtagtggtaacactttagaaatggacgataccatgtgttgacaagtgggtggaggaactggaactcttctacgctgctgctaacaatgtaaaatagtacaactactttggaaaatagtctgacagtttctgcaaagctaaatatacagccattccacttctaggtatttactcaagagaaataaaagcatctgtc

SEQ ID NO: 182352 - DNA, 565 bp, Homo sapiens
atctgtgggatatatgtagcttttgtatgtataatttatacttaatgttgaacaaatggtacctatttcatctcttagcatggttcagggactcacaataagcctttcttgtttatatatcttactgaattaaatgcaaaacatctatctcacaaagaacttggatctaggatatgtgaagaattcttaagactcaattacaagaagacaaataaaccaactttaaaaaaatgggccaaaggtttgaacacactctcytcaccaaagaagataaatgaaaggcaaaataaacacattaaaagatgctcaacatcattagtcattagagaaatgcaaacgaaaatcacattgagataccaccacacacctagtagtggtaacactttagaaatggacgataccatgtgttgacaagtgggtggaggaactggaactcttctacgctgctgctaacaatgtaaaatagtacaactactttggaaaatagtctgacagtttctgcaaagctaaatatacagccattccacttctaggtatttactcaagagaaataaaagcatctgtc

SEQ ID NO: 182353 - DNA, 269 bp, Homo sapiens
tcactaaaaagaaacacctttaagagcaggcacccctgcctgattcagtcagcagtaagccatcagcagatcttgcccagttatagcctggtccamctgtttgtaataagcatagtgagaaggacagaatcacagctaggtggttggcaggttgagttgagactgaccacagggtgtgtttggtttctggatggggctggggtccttctgagcgtgagacaatagatgacactcagccacaggaggctgggcccagcagggcctccggc

SEQ ID NO: 182354 - DNA, 577 bp, Homo sapiens
ataagtttaaatattgtttttaataaaacctctttaatacccacaatattcagcacttgcttctggtcaccaaatgtgtgtggtttttcccacaccaagcaagtctccaattctctgtggactccagctgggtatcctaccattcaattcaatgctgacgctgtctgtacgtagaattaatgcagaccctayaggttatgggctcagttctgcaaggctgcccacccccattaattcagacaccagccacaagtccagttgacagctgggcttctgatgaaccagctataatttggaagatccccctcacctccttcccaggttcaataatttgctagcacagctcatagaaaacaatttacttactaaatcacaagtttattataagactacaactcaggaacagccagatagatgagctgcatagggcaaggtattggggaggggtgcggtgctttcatgcattctcctgggtgtgctaccctcccggtatgtggatgtgtttaccacctggaagctctgtgaacctcattcttttgggtctttagggaaattttattgattgcatcattggcca

SEQ ID NO: 182355 - DNA, 577 bp, Homo sapiens
ataagtttaaatattgtttttaataaaacctctttaatacccacaatattcagcacttgcttctggtcaccaaatgtgtgtggtttttcccacaccaagcaagtctccaattctctgtggactccagctgggtatcctaccattcaattcaatgctgacgctgtctgtacgtagaattaatgcagaccctacaggttatgggctcagttctgcaaggctgcccacccccattaattcagacaccagccacaagtccagttgacagctgggcttctgatgaaccagctataatttggaagatccccctcacctccttcccaggttcaataatttgctagcacagctcatagraaacaatttacttactaaatcacaagtttattataagactacaactcaggaacagccagatagatgagctgcatagggcaaggtattggggaggggtgcggtgctttcatgcattctcctgggtgtgctaccctcccggtatgtggatgtgtttaccacctggaagctctgtgaacctcattcttttgggtctttagggaaattttattgattgcatcattggcca

SEQ ID NO: 182356 - DNA, 577 bp, Homo sapiens
ataagtttaaatattgtttttaataaaacctctttaatacccacaatattcagcacttgcttctggtcaccaaatgtgtgtggtttttcccacaccaagcaagtctccaattctctgtggactccagctgggtatcctaccattcaattcaatgctgacgctgtctgtacgtagaattaatgcagaccctacaggttatgggctcagttctgcaaggctgcccacccccattaattcagacaccagccacaagtccagttgacagctgggcttctgatgaaccagctataatttggaagatccccctcacctccttcccaggttcaataatttgctagcacagctcatagaaaacaatttacttactaaatcacaagtttattataagactacaactcaggaacagccagatagatgagctgcatagggcaaggtattggggaggggtgcggtgctttcatgcattctcctgggtgtgctaccctcccggtatgtggatgtgtttaccacctggaagctcygtgaacctcattcttttgggtctttagggaaattttattgattgcatcattggcca

SEQ ID NO: 182357 - DNA, 354 bp, Homo sapiens
ttcccaaatcgtcacataaaaacagagcaactaggtagcaaaaccagaaagctataaacaacacttacaacaaagctagtttgcaaggtatccccacagattccaaaatacaaattgggtgacagcaaaccactgacagctgcaagacstgcaattatctgcacctgtgcaggagaacgcagcgggaaggaatggacctgagaggaagaaccaaaagctagtcagcaggtttgcactgcaaagtgtgctggcccatgtgagaggagaagctgaagtttacagggttttcacctgctgaaactagtgactgcagtgacccagcccatggtgagctctgaaggggatgctagcccc

SEQ ID NO: 182358 - DNA, 604 bp, Homo sapiens
ataaaaacagagcaactaggtagcaaaaccagaaagctataaacaacacttacaacaaagctagtttgcaaggtatccccacagattccaaaatacaaattgggtgacagcaaaccactgacagctgcaagacctgcaattatctgcacctgtgcaggagaacgcagcgggaaggaatggacctgagaggaagaaccaaaagctagtcagcaggtttgcactgcaaagtgtgctggcccatgtgagaggagaagctgaagtttacagggttttcacctgctgaaactagtgactgcagtgacccagcccatggtgagctctgaaggggatgctagcccccgtgatttctcaaaactgaccagtcaggtgtccccttccaaggcaggaccctatattgaagagaaattgctggtagctgaatcagaatggagaaggttaagatgaatagaaacaaagcaaagagaaggtccaaataaaagagagagagggaaaaaaggcrgaaattttcagaaagcaactcactatatttttgaacatataagaaaccaagagagtctgggcgcagtggctcatgcctataatctcaacactttgggaggccaaa

SEQ ID NO: 182359 - DNA, 558 bp, Homo sapiens
ttggcaatgttttttaacatgctaccagttctttctgtttcttactaagtccagctcacattgacctaacacactaacctctttcctgtctcaggccctttgcccttgctgttacctctcttagaacatcctttgttgctttgcatagcccattcctcctcattcttcatttctcagcttaaatgccacttcatcagagacgcctttttcaaaaactttacctaagtttttatttgtttttctttttycctgagctgataggaagacaactctgttatctttaggatttcagatgcttttagaatcaaacctggaaaggatacaaaaagcagaagcaaaaccaacatttgggagaagaacagattaaggtgagaaaacctctcttgaacctttcaactttctaacaaatacgataaattctgaagccactagggatctggcaggtaactaaaatgaatgtgatgaactatgtgtaggaagcttgagagtagtgaactagaaaccaagtgcccatgtaaagatatccaatatctaaaacattgttcatgacaagctaaa

SEQ ID NO: 182360 - DNA, 598 bp, Homo sapiens
ttaatgaataaatgaatgattaaattgcaaaaaaaaaaaaaaaaaagagattacaattacatttttccaaagcagcagagagaatctgctaagtgacaaatgagcaaggtatcatctattggaaagcttgaaagggttatgtataacatctcttattcatctccttttcatttcattcagcatttgtatccttgagaagtttattaaatttaagtttagattcaaagcacctgcccataggctcaagtacttaaaaaacacttttgaatcaataatctcattatttaatatgcattcattaarcacctactatgtgctaagcacaggaagtgccatcacattatcttcaagcagttcagaatctatctgggtagacagatcttataaatgactaaaaatagcaataataagacaaatgcttcacttgaagaacattccagcttcatttgaagaatacaccaaaaatgctgctatgggaagttagaatggccaattctggaagaattaggaaaggcatggaagagcaggggatgttcaacttgaaagacgtgtgcaggtagcagacacaatgtggggttgagggcacttagaaagggaa

SEQ ID NO: 182361 - DNA, 538 bp, Homo sapiens
agcaagctttgggatctgaaaatggtaggatttactttttgctgcaattcacacctttcccaaagaaattccttagaaaccccagtaattggtaaatgatgttttcttgaattggtctcccaaattgccactaggagagagtgagatattgctatacatcttaccagcagcctactgttgatactctatttaaaagggtccctttagactataaacgaaaagtgtgtccgtgaagagttgctccaaggctcttcttggagaagaatatctttcttctccttccatttctttttgcccttgtgtcacctcctgcacctcccttccagaaacccactcatatacatattggacacacacacacacacacacacacacacacacacacactctctctctctctctctcacaaaagtatttaaatggagcctgaagaatatatttgttaagagcataarctcaggagtcaggttgcctgtattctccatttaacagctgtatgatcctaagcaagtcatgtaacctctctgtgcctcagttt

SEQ ID NO: 182362 - DNA, 549 bp, Homo sapiens
ccaacctttcattaatagaagatctttttcatttttatgaggtctgatgcctgaagtggagaaaggagacagagatgtcagtgaactccctatgataatgcttggtgaagtgattgcatggaaatgtgtggattttttttttttttgcttatattttgagcttctaccagccagcattcattcattcatttatttacttactcattcactcactcatgcattcagacttctggttcatagtgtcagctaaaagttaaagtcacagccattggccagaaaaaaagagagctgtgatactggctaagagatcaactgtgactcccaatgagagaaattcctctagagatctctaaacactgtcctctkggaaacataggatgtagagaatagctgtgcactcagggacatcaatttataggcaggaagctttgcttatgagacttagaagtttctgcaagttatagattgatggtcaggactttggctgctgctgggagaggagaaaggcaatgagattccagaagctgactgggaaatcaactgtttatg

SEQ ID NO: 182363 - DNA, 326 bp, Homo sapiens
tgttgagtcatgcacacatgagaactgacaattgttagccatgtctgtggggtatcatcattgcaatttggaaatcacttattcaatgtgagggcaaaaaataaattaattaaaaactaatttgtcaatgcrtgtcttttaaaatactcatttctatcttttataaaactatattattaagctattcataatcactatataattttataacactatattatgaagcaatttataatcactatgtaattcagattggccagaaatataaaatgaagaaaatgcaggtttctcaccttcttagtatcttccctttctttcttagtatc

SEQ ID NO: 182364 - DNA, 564 bp, Homo sapiens
taagttcctccttaaaagccctatctccaattacaatcacattagggtttagagctttcatatatgaatttggggcataatttattccacaatacctggtgtggcaggcagcatatttaaatgtcccctaaatttccttccccctgatgaacatgcttcctcactttaaagatgatggatttttttttttttttgacagagtctccctctgtcgcccaggctggagtgcagtggtgcgatcacagctcactgcaagctctgcctcctgggttcacgccattctcctgcctcagtctcccgtgtactgggactacaggtgcccaccaccatgcctggctaatttttttgtawttttggtagagacagggtttcaccatgttacccaggatggtcccaatctcctgaccttgtgatccacccacctcggcctcccagaatgttgggattacaggcgtgagccactgtgcctgggctaaaggtgatggattttatactcctgtgactcagttacactatatgacagactatacctccagatagtgagattatccaggtgggccaagc

SEQ ID NO: 182365 - DNA, 564 bp, Homo sapiens
taagttcctccttaaaagccctatctccaattacaatcacattagggtttagagctttcatatatgaatttggggcataatttattccacaatacctggtgtggcaggcagcatatttaaatgtcccctaaatttccttccccctgatgaacatgcttcctcactttaaagatgatggatttttttttttttttgacagagtctccctctgtcgcccaggctggagtgcagtggtgcgatcacagctcactgcaagctctgcctcctgggttcacgccattctcctgcctcagtctcccgtgtactgggactacaggtgcccaccaccatgcctggctaatttttttgtatttttggtagagacagggtttcaccatgttacccaggatggtcccaatctcctgaccttktgatccacccacctcggcctcccagaatgttgggattacaggcgtgagccactgtgcctgggctaaaggtgatggattttatactcctgtgactcagttacactatatgacagactatacctccagatagtgagattatccaggtgggccaagc

SEQ ID NO: 182366 - DNA, 636 bp, Homo sapiens
cagccaacatctagtgatgttatcaatcatgcctgataaactgtgtcataaagataatttattcagttattctataactttttcaattgaatgcaagtttaagcctctaggatttgctatctgtgaattggaattccatcacagtacaaagttcattttgagataatctagactctacttggttaaggtgtatggttggaaagagaatgagaaaggaagaatgtgggaagccaagtcactaagtgcttgagccaggatgaagccatacatatatcattcaacagcttccttagaaagtaacactgagtctattaggyataataatctagaaatctaaaagaggggcattctggaaatacagtgacccaaatgcagccatttgacttcctcaccaattccaacctgttagtccccacttaactgatatgggacaatcttctttatctgagtgagcatctggagaccagctctgtagaaccccaggaaataatttaccttgtgaaggttggtgaactccaaggagaaggtcctcattggcctttcatgagagtaccaggtatccctggtttccaagaggccaaggagtttaacaggaggacaaagtattaaagagaacaaagagactggggagcaaaa

SEQ ID NO: 182367 - DNA, 441 bp, Homo sapiens
aaaaatgggtaaaggacctgaataaacatttctcaaaagaagacacctactggtcagtagatgtacaaaaagagacttcaataatcattagagaaatgcaaactacacaatgagatatcacttcacctgttagaatggccattatcagatggacgaaagataataagttttggggaggatgtgaagaacagagaaccctagtatgctattggtgggaatgtaaattactatagtcattatggaaaacagtatataagttccacaaaaaaraaaaaaaaaaaaaaaatagaactgccttataatctagcaatcccacttgtgggtatatatgcaaaggaaatcaaatcaatattccaaagaaatatgtgcattcccatgttcatttcagcattactcacaatagacaagctatggaatcaacctaagtgttcataacagata

SEQ ID NO: 182368 - DNA, 430 bp, Homo sapiens
aaaaatgaagattcattctgatgccagtagtccgaaggctacactatgtgaaaaagccatagaattcttcagagaccaattaaataacctggggatatgttttcaatttctataaatgatcagcacttagatggacctggaacattggctaagtattttatgttcacgaactcacttaattctttcttttcctaaatttttattttttaaaaggtaataaattcacatggttaaaagtcaaaatartataaaaagagagatattaaacagtattgttcccactattctcatccattttatttccagctctgtgtcctgtaaggaatactatttctattatcttcttttggatattaaaaatatttctttctgaaaatatagcaaatacaaatatattctctcccaccaacttctcatctttcttacttaa

SEQ ID NO: 182369 - DNA, 555 bp, Homo sapiens
atgttgcaatggtgttgagtctaaaatataaattattttatgttcatttcttatatrattaatttacttatatctagttcttgaagtacctcacacttggtgagagattggttttagataaatgaacaaatgaatgaatgagtgaatgaattaaaagcgtgcatcatctgtcagaactaattctatctgtacttcttctctaaagctatatagtcatgtaccatgtaacgatgttttggtaaatgatggaccacatgcaactgtggtcccataaggttataatggagctgaggaattcctattgtctagtgatatcatagcaatcataacgtcatagcacaatgtattactcatgtgtttgcaatgatgctggtgtaaagaaatctatgctgccagtcatacatgtatagcaattttgtagagcacataatacttgacaatgataataaatgactattagtgatttatgtatttattatataatttattattattttagagtgtactccttctacttattaaaaaaaagttaactgtaaacagcctgaggcaggt

SEQ ID NO: 182370 - DNA, 555 bp, Homo sapiens
atgttgcaatggtgttgagtctaaaatataaattattttatgttcatttcttatataattaatttacttatatctagttcttgaagtacctcacacttggtgagagattggttttagataaatgaacaaatgaatgaatgagtgaatgaattaaaagmgtgcatcatctgtcagaactaattctatctgtacttcttctctaaagctatatagtcatgtaccatgtaacgatgttttggtaaatgatggaccacatgcaactgtggtcccataaggttataatggagctgaggaattcctattgtctagtgatatcatagcaatcataacgtcatagcacaatgtattactcatgtgtttgcaatgatgctggtgtaaagaaatctatgctgccagtcatacatgtatagcaattttgtagagcacataatacttgacaatgataataaatgactattagtgatttatgtatttattatataatttattattattttagagtgtactccttctacttattaaaaaaaagttaactgtaaacagcctgaggcaggt

SEQ ID NO: 182371 - DNA, 577 bp, Homo sapiens
catctgtcagaactaattctatctgtacttcttctctaaagctatatagtcatgtaccatgtaacgatgttttggtaaatgatggaccacatgcaactgtggtcccataaggttataatggagctgaggaattcctattgtctagtgatatcatagcaatcataacrtcatagcacaatgtattactcatgtgtttgcaatgatgctggtgtaaagaaatctatgctgccagtcatacatgtatagcaattttgtagagcacataatacttgacaatgataataaatgactattagtgatttatgtatttattatataatttattattattttagagtgtactccttctacttattaaaaaaaagttaactgtaaacagcctgaggcaggtctttcagcaggtagtaacaatgccacaagaaggcattgttatcataggtgacagctccatgtgtgttattgcccctgaagactttcactgggacaagatgtggaggtggaagacagtgatcttgatgatcctgaccctgtgtgcctaggctaaactatgtgtctgtgtcttagtttttaacaaaaa

SEQ ID NO: 182372 - DNA, 577 bp, Homo sapiens
catctgtcagaactaattctatctgtacttcttctctaaagctatatagtcatgtaccatgtaacgatgttttggtaaatgatggaccacatgcaactgtggtcccataaggttataatggagctgaggaattcctattgtctagtgatatcatagcaatcataacgtcatagcacaatgtattactcatgtgtttgcaatgatgctggtgtaaagaaatctatgctgccagtcatacatgtatagcaattttgtagagcacataatacttgacaatgataataaatgactattagtgatttatgtatttattatrtaatttattattattttagagtgtactccttctacttattaaaaaaaagttaactgtaaacagcctgaggcaggtctttcagcaggtagtaacaatgccacaagaaggcattgttatcataggtgacagctccatgtgtgttattgcccctgaagactttcactgggacaagatgtggaggtggaagacagtgatcttgatgatcctgaccctgtgtgcctaggctaaactatgtgtctgtgtcttagtttttaacaaaaa

SEQ ID NO: 182373 - DNA, 525 bp, Homo sapiens
cataatgctttcagatgttgcctatgacaagttcaacctcatccttctgttccttcatgaattgtagcctgcccaactaatcacatatgtcctcagcctctttaatgcctttgctcaaaatccagagaatgatctgattggttcattcatatggaggcatgggaaaattacattcttatggacaagagaattcctatttgatktaaagcaagaaaagagaaaaaaaaatgtatatattaactggggaaagcttttggaggcctgccaaagacctatacagagatattactccaaaaacctgctcaggtaaaaagagctaacctttgatatgtttctccattagggacttccataaggaacagacagatttttgatgtaccatgatatacagatacagtataagtaaaatgttaaagtggaagaagtggagtagactatgggattggaaggttttattttctatgttggaaaacaagacaattatatcaattaggattcttttagctgcaaataatagatccccaa

SEQ ID NO: 182374 - DNA, 525 bp, Homo sapiens
cataatgctttcagatgttgcctatgacaagttcaacctcatccttctgttccttcatgaattgtagcctgcccaactaatcacatatgtcctcagcctctttaatgcctttgctcaaaatccagagaatgatctgattggttcattcatatggaggcatgggaaaattacattcttatggacaagagaattcctatttgatgtaaagcaagaaaagagaaaaaaaaatgtatatattaactggggaaagcttttggaggcctgccaaagacctatacagagatattactccaaaaacctgctcaggtaaaaagagctaacctttgatatgtttctccattagggacttccataaggaacagacagatttttgatgtascatgatatacagatacagtataagtaaaatgttaaagtggaagaagtggagtagactatgggattggaaggttttattttctatgttggaaaacaagacaattatatcaattaggattcttttagctgcaaataatagatccccaa

SEQ ID NO: 182375 - DNA, 499 bp, Homo sapiens
atgtttagatttgcattttagaaatttattctggcagctgtgtaaatggtgaattagagttaggcaagactgggaaaaaaggagccaacaagaaaagagaggagacaattacaatagtcctatagaacaagaagaggacataaactatggcagaagaagagggctagagaggatggtttgataacaaaagttgtatcagtgggattcatgattgataggaattccaataaaggaatttacaatttttcccaggatctagtttagtctattaaatggtttctagtgcaactgattgagtctaagtttattggtccagtgcccacatatggtcattagcttggattaatctctctggtcacagaccacaccacttatcagacttcarttataaggggcactgggtgacaccggatgtttctggacaaatcactgcctctgatagggaggaacatccaaaatacatattaaaatgtaagcaggtctgtcagatcagtagaat

SEQ ID NO: 182376 - DNA, 431 bp, Homo sapiens
catcatggacactttacagtacttgctagaaagttactcaagattcctaatcrtggcacactcagtgtgaaagagtgaccaaactaaatagttattgagcttaacaaattgtacagtcttttctgtaaacctttgctgaaaccatatccccatacgagcccagaatcttgcctaagatgtaaataaactcactttcttggtgattgatttcaattttcgtaattttttaatagaagtgataatgagcaagtttgacctgccaaaaaaccctcacagaaaaacaggaaatgatggcaattctcagatgtctatttcagtattcactagtggagactgttcttcttttctaaaggaacaaattccctgggggtctgaagatgacttagaaagtgcacaaataacttaccttgagattaaatgtacaatggctg

SEQ ID NO: 182377 - DNA, 478 bp, Homo sapiens
acaaatggagaaacatcccatgctcatgaattggaagaattaatgtagttaaaatgaccatactgcctaaggcaatctacagastcaatggaatcctatcaaaatgccaatgtcattttcacagaatcaggaaaaaaaaatcctaaagttcatatgaaactaaaaaagagcctgaacagccaaagcaaccctaaaaaaaaaaaaaaaaccaaacaaagctggaggcatcacatcacctgacttcaaattacattacaaggctatagtaaccaaaacactatggtactggtatgagagacacatagatcaatgaaacaaaatagacaacccagaaataaagccacatatttatagccaactgatttttagcaaagctgataagaacatacattggagaaaggacatccttttcaataaatagtgctaggaaaattgaatattcatatgcagatacgtgaaaatagacttatctctctca

SEQ ID NO: 182378 - DNA, 353 bp, Homo sapiens
atctcctttgactccaggtctcatatccatgtcacactgatgcaagaggtgggttcccatggtcttgggcagcttcatccctgtggctttgcagtgtacagactcccttttggctgctttcacaggctggcattgagtgtctatggcttttccaggtttgtggtgtaagctgtcagtggatctaccattctggggtctggaggatggtggccctcttctcacagctccactaggcagtgccccagtagggactctgtgtgggtcctctgacctcatgtttcccttctgcattgctctagcagaggttctccatgagagccctgccyatgcagcaaactgttgcctgggcatcc

SEQ ID NO: 182379 - DNA, 471 bp, Homo sapiens
ctcaactcatgtcatcccttaacagagacagggacaacataatttggaaataacaaggccagacaagagcaatcctagatcacatgggagttctgtactctcagaagtatgttgtgggagtaactggcccgatgttctctcagcctctctcagctgagaacagcatttaagatttccttatcatctaaaaaaataaataatttatcttttgttagcagaagaatgaagtaaacacagtgactaacttttcctaatgcagtagttttatacaataaaacagtttcttaagaaggttatactgttattttggaaacaagccacccagtggatttggcctccaggaatactgaccacacattttgaaaattkataccggccaatcagttttgacacttccatcctgccctactggtttgctttacttcatctcatttagcaccgtgtctgtatgtcaatcagctgcatatatcg

SEQ ID NO: 182380 - DNA, 597 bp, Homo sapiens
ttttgtagtaatcttaagcaagaagaaatcttgttagaaggatatggagatctccaggaatcaatgaaagactgcaggaaaattttgacgaaagggcaagaaccagggcagctacagagcaaaaggatgcctggctagtcaatggtgattttgccacgacactatcaccattactgtggctgtgaatggattctgactattttgttttctttgtgttacttatttataactcaaaggcttgagcaagaacatccagttggcctacctgaatctcttgcttgtgttgtgactgccagggtaggagcaaagacgatggctgggagggattggcttccttcatgttccctagcaggtaggatgttcatccatcaagactgccctggcaagggctcttctggctttccaatatccacacgcatacttcttcccacacttacagtgatgagacaaatattctcatttaatgtaatgcctgaaaasaaactcatcctctcccactgggacaagaattcctgactttcttcacttggagactaacccagtggctcactttttcacttcatttcctcaaaaaaggaaatgctacaattttctttc

SEQ ID NO: 182381 - DNA, 596 bp, Homo sapiens
tatgaaaagcccacaactaaaatcataatcagtggagaaaaaaaaatggaaagattttcctctaagatctggtacaaggaaaggattcctactcaacagagtactggaagatctagcaagagcaatcagacaaaaaatacaagagagaaggaggtgaagcaacatggctgaatagagacctccagtgatcatctcccaccatgagaacaccaaactgaacaattattcaaatttttaaaaaaaagcaccttcataagaaccaaaaatcaggtgaggaaacacagtacctggttttaacatcataataaggaaggaggccttgaaaggtgtggaaaagacactctaaaataacctacaccacccctcccccatcccccagcagtgatcatgtggtgcatagaaagaatttgtgcacttgggggagagaaagcacagkgattatgtgactttgcattggaactcagtgctgccctagcacggtggaaagcaacatggagcagaacttagccagcactcataaaggcagcatttagaccagcccttgccagaggtgaattgtccatcccagcagttggaacctgagttatggtaagccc

SEQ ID NO: 182382 - DNA, 625 bp, Homo sapiens
ttctgtcacccctccccaactccaggcagcacagcacacagctctaaaaaagactccttcttccactaaaggagaggagagcgagagtaaagaggacttagtcttgcaacttggataccagctcagccactgtacaataggacaccaggcagagttctgagggcccccatcctagaccctagttctcagtttacatttctggacacaccctgggccagaagggaacccactgccttgaagggaagaacccagtcctgacagaattcatcatggactggctaaagagctcttgagccctgaataatcaccagtggtcaccaggaagtactcactgtgggtcctgggtgagactcagagtcatgctggcttcaggtgtgacccaccacattcccagctgtggtggctacagggagagtctcctgcaagatgatacatcaatgagtttgcaactgcaatagcatttgtgggtttagggtgctccctaaggcagagatggatgyagtgatcaaagacttaggtcacaaaccttttgaatacctcaaaagccttcccaagaaggataggtacaaacaagcccagactcccaaagatcaaggataaaaaaggattctaaaagcagcaaaag

SEQ ID NO: 182383 - DNA, 593 bp, Homo sapiens
ttcatgtgtagccaccagtaaagaggctccttttatttttatttttatttatttattttttttgagacagagtttcactcttgttgcccaggctggagtgcaatggcrcaatctcggctcacgggttcaagcgattctcctgcctcagcctccagagtagctgggattacaggcttgcacccccacacccgggtaattctgtatttttaatagagagggggtttctccatgttggtcaggctcatctcgaactcccgacctcaggtgatccgccggcctcagcctcccaaagtgctaggattacaggtgtgagccaccacgccctgccaaggctccttctttttcttcctaattaactcatctaaggaaacttcctctgcaatcataggcaagagtttagcagagatgtggctgtacagcaaaagttggcatcttgggagtgagaactacctgcttagtcaactagatttggttttttggagctaaaatataccatttcaatttcatgttaaagggccgctgaaccactctagtttatggcttagtttcagatattacctagtctttgatgggcagtacagatcctatgaaca

SEQ ID NO: 182384 - DNA, 583 bp, Homo sapiens
tatataaaatcacaatacacacagaatagccaaagccaccctaagggggaaaaatactggaggaatcaaattatctgacttcaaattatactacagatctatagtaatcaaaacagtatggtactggcataaaaatagtcacattgaccaatgaaacagaataagaactcagatataaattcatacatctacagtgaattcatttttgacaaagttgccaagcacatacactgggaaaagaacagtctcttcaacaaattctgatgggaaaactggatgcccatatgcagaatgacactagacacctatctctagccatatacaaacatcaaatcaaaatggaytaaagacttaaatctaagatctcaaactatgaaactactaaagaaaaacattggggaaactctccaggacattggtctcagcacaaatctattgagtaacaccccacaagcacaggcaaccaaagcaaaaattgacaaatgggatcacatgaagtcaaaaagcttcttcacagcaaaggaaacaatcaacaaagcgaagagacaatccacagaatgggagataatatctgtaaactatc

SEQ ID NO: 182385 - DNA, 583 bp, Homo sapiens
tatataaaatcacaatacacacagaatagccaaagccaccctaagggggaaaaatactggaggaatcaaattatctgacttcaaattatactacagatctatagtaatcaaaacagtatggtactggcataaaaatagtcacattgaccaatgaaacagaataagaactcagatataaattcatacatctacagtgaattcatttttgacaaagttgccaagcacatacactgggaaaagaacagtctcttcaacaaattctgatgggaaaactggatgcccatatgcagaatgacactagacacctatctctagccatatacaaacatcaaatcaaaatggattaaagacttaaatctaagatctcaaactatgaaactactaaagaaaaacattggggaaactctccaggacattggtctcagcacaratctattgagtaacaccccacaagcacaggcaaccaaagcaaaaattgacaaatgggatcacatgaagtcaaaaagcttcttcacagcaaaggaaacaatcaacaaagcgaagagacaatccacagaatgggagataatatctgtaaactatc

SEQ ID NO: 182386 - DNA, 583 bp, Homo sapiens
tatataaaatcacaatacacacagaatagccaaagccaccctaagggggaaaaatactggaggaatcaaattatctgacttcaaattatactacagatctatagtaatcaaaacagtatggtactggcataaaaatagtcacattgaccaatgaaacagaataagaactcagatataaattcatacatctacagtgaattcatttttgacaaagttgccaagcacatacactgggaaaagaacagtctcttcaacaaattctgatgggaaaactggatgcccatatgcagaatgacactagacacctatctctagccatatacaaacatcaaatcaaaatggattaaagacttaaatctaagatctcaaactatgaaactactaaagaaaaacattggggaaactctccaggacattggtctcagcacaaatctrttgagtaacaccccacaagcacaggcaaccaaagcaaaaattgacaaatgggatcacatgaagtcaaaaagcttcttcacagcaaaggaaacaatcaacaaagcgaagagacaatccacagaatgggagataatatctgtaaactatc

SEQ ID NO: 182387 - DNA, 546 bp, Homo sapiens
ttgaaataattcaagtatccattaatagaaaatggataactaagttcatgtattataagatggagtactatattgcaataaaatttagcaaactacaaatatatgatgagcatgggtgaatattaagcacataatgagtgaaagatgcaagacacaaaatatagtgcatgactccatttatatagagtgaaaaaaagaaggcaaaatgaaagttcattgtttggggatgcatgcttaggagagaaaactgtaaaccaatgcaaaaaggctgttgccttaaaagttagtaaagctctttctccatatggtaragaagaagtaatgtctaggaggaaacatttggggaccttctaggttctggcaatgtcctatttcatgacctttctggtggttccatgagcatttccttaacgatcattcattaggctgtacgatcttgttttgtgcacatttctatatatttgcaagttatgtttcacaataaaaatgtttaaagaagaaataacaaagatatgtagttacttcatatgatatggaagctaaagg

SEQ ID NO: 182388 - DNA, 317 bp, Homo sapiens
gtttctactgctcctgtttttttttttttctgcttcacccaatcgtcttcctatttttatctctttcattccactctggagccatgttgcttggtcaggccacccttcaaaataaatgattttttccctctttcatgttatacctgttttcttaattcttggctgttacttttctcagttaacctttggcaaatcrtaatgaaattaaatttagctggttgtagagagaaagagtcattgtagaagttgggatggtctggaagtgaattaaaaagtattttgatagccctcagaatgtggacaaaaatagtaaaaat

SEQ ID NO: 182389 - DNA, 317 bp, Homo sapiens
gtttctactgctcctgtttttttttttttctgcttcacccaatcgtcttcctatttttatctctttcattccactctggagccatgttgcttggtcaggccacccttcaaaataaatgattttttccctctttcatgttatacctgttttcttaattcttggctgttacttttctcagttaacctttggcaaatcataatgaaattaaatttagctggttgtagagagaaagagtcattgtaraagttgggatggtctggaagtgaattaaaaagtattttgatagccctcagaatgtggacaaaaatagtaaaaat

SEQ ID NO: 182390 - DNA, 554 bp, Homo sapiens
ttgttaaaccatccctgaaagcatcctgtctctttgtttgttgcttgaccttgaaatccacggggtaggcagtcagaaagcaagaagggtaaagtgagggtaaactgaggtcagcatgaatgccacatgcttggtctggaaccccacaaaaaaaagactgaaacctgtgtcagttttttatgttgttgaccctggtaactagtctattctgcagtagctgtttagacacagaaataagcactcacacctagaccagtacccagagaggtctaacaaggatctaggggaagataaaagcatstggaggctctgctacttctttcagacacaggtaagtcatcaggttagcaactgtgtgtataaattacaaaatggctgctgattcccctagccctccaaatctccaaagaatctctcgtgtttttcacccttattgaaaacataatgaaaagggaattctgggaaatgtaattcagccctctagttaccttattaaaaagtcaccatgccactccttccccattcaaagtggagggattctctttggattctga

SEQ ID NO: 182391 - DNA, 591 bp, Homo sapiens
ggtggcgcacccctgtaatcccagctacttgggagcctgaggtgggagaattgcttgaacctgggaggtggaggctgcagtgagctgagatcatgccactgcactccagcctgggcgacagattgagaccttatctcaaaaaaaaaaaaaaaaatactaatcaagcacctattacatgccaggcagactgccaggaggcagaatcgtagagcaaagcccctgctttagaagaatkcagcatagggtagggggagacacacatgtaaacagcagaagtaattttaaaaaggaaagaattgccgcttttggagtatctactactcagaaattttaaaactaaggaaaggcaagtttttgatgagagtctcactcatttatctcgctacagaagggattttttgctcagtggaaacaaaagaagaaaagacaagtgggaggtgatcattgtctgatgcaatcaatactgttttcgtcagaggaaaatcaagcgcaaacatcaaggcagtgatttgccttcatatttacataatgtgagcactctgttatcaccctgatatttaaaattcctgcaagagcaaaagcctggtggca

SEQ ID NO: 182392 - DNA, 605 bp, Homo sapiens
gcaaatgtgctttctattcagttcttctcaaaattaaaataaaaataagcttattaaagacttataagtaaaataactagaattatattccatacactatgtattatttattcatattactgaaaattactgattatatccttccatataacagtggaaaaagaattggtttggtgactcgaaggacttgatggtcaaattaattgattttggatatttcatgtattctcattttaaaacttttctttagtttcttatttattatcctgtttaatgtaggctggtattaaaatgagtcagcatttctgataattgtgtaaatgttaaatgatagcagaagccaatttaggattaaacaaaaattgttktggctcctctgctaatcacataatccaaatgtgaattgagagattattcaagaagtgatgattcaagaagttaaataatacttttaaatgacaatttttataaattgcaatgataagtaattcaataaattaatttgggtttacccagaagagcataggagtgctttcttaatatacttttcagttccatgactagttatttttatactgctatgtgaatgtgaattttgtactata

SEQ ID NO: 182393 - DNA, 641 bp, Homo sapiens
ttttgtgttttataagcacagctttggtgataaaacttgaaatgatttaaagcttattatttttaaactgaaactaggcagtattatagagcctttatgatggcttcttaatcaattggcagtgtttattaagcacatgcctgctgtccagcactgtgcaaaattcaggagaaaagagattactacatattttgcatcattttcaggcaagttactgctttgcatttgcaaactgggtgtatttaaaaatagcttgatttcaagtgtctagatattaggacaataaaaacttgattactctgaaaataaagtgtgttgtctgtgaaactctgagacacattggtagcgccctttcattcacgatatttagaytgagaaataaaaataaattacacactttactagtcagtgatgtgtcattttgaagagtaggtgttttgtgctattaatggatgcattttttgcataagttgtcaaactttttctggaatcagtgtcaaacttgttactattatatttcccagatttttataatgttgcaaaatacctacaacaaaactcttttaaagttgagagttgttaccttatatttatattagttattttttaatttaaaaaataatacataccaatgaccaaaa

SEQ ID NO: 182394 - DNA, 537 bp, Homo sapiens
cagcatgtgccttgtacggtgtcagacaggaattgcacaagtaaatgtgaacttgtaactgagatgaaggctgggaagkagagatccatggtgtagagtttataagagtggaatttaacttcatctgaggggatggggaagattttctggtggaaatggtagttgaattcagagctggagggtgacttggctataattagagcaaggggtggggtagggacgagagtgttgtgggcttgagaaaacagcacaggcaagggccctgtggcagggaacatgagagagggaggactggaggagccaccaggctttgctggtggtcactgagaaatggctatgaaggaggaacaggttgggcaggcaggtaaattctttttggtacattgagatgccgtgagccgctaggagcaaaactctagtagctgtgggacatgagagacagatttgggaatcctcttcacgtaacagtgactggagccagcagagtggacgagaagaccaggaaaggtatagagaaggcagagagcaatacagacg

SEQ ID NO: 182395 - DNA, 339 bp, Homo sapiens
gctgaagaatgagagacagatggagcagagccaagtcattcagtcacctcactctgtccaacagcaagccaaccctcaggcacatgggtaagctcacccaagatcagcagaacctctgtgaccacagacacatgtacaaaaaagcacttcttgttgtgtctgcctgaggttttggaactgctatgtgtcaaagataactgatgcatcatatataaaaacacacttggatttgatcaactttcttctgatccakttatcaccactgatacgtggggacaacttggctccccaaaatggccaaatatggacggtaagtaattgatagggcaagaaaaggga

SEQ ID NO: 182396 - DNA, 633 bp, Homo sapiens
tactgtttggggggtcgatatgttattcagtgtacttgtgcacatgtgtactaatgatgcacaagaattccggctgagaattgaactctggtttgaacactggctctaccactgacaagctctgaggccctgggcaagtgccttaatttctctgtgcctcagtttcctcaattgtaaaatgragcagatggatctacctcatacggctggttgtgaggattaaatgagttaacatatgttgagtattttgagtgtatcctagcacacagtaaatactttttaactgtttgtactgatataatcagaaacagtaaaatgtaaatatatataccttaaattcatataaaatttaatattctaaaagcagactttcacaagtcttagttcaggacagtttccatagcagtaggtgccttcgttattggctgttctttatctgggcacttgaagggttactctttgttccatccactgggaccttgcatacttttcttgtattatcatccttttttcttttcatcagtcttgttttcacctgaagggctggcccagtatcttatatactttaaaatcagctggcagggagtctaacaaacagtaagtacataataaaacagtaaatgaacaaatgaa

SEQ ID NO: 182397 - DNA, 633 bp, Homo sapiens
tactgtttggggggtcgatatgttattcagtgtacttgtgcacatgtgtactaatgatgcacaagaattccggctgagaattgaactctggtttgaacactggctctaccactgacaagctctgaggccctgggcaagtgccttaatttctctgtgcctcagtttcctcaattgtaaaatgaagcagatggatctacctcatayggctggttgtgaggattaaatgagttaacatatgttgagtattttgagtgtatcctagcacacagtaaatactttttaactgtttgtactgatataatcagaaacagtaaaatgtaaatatatataccttaaattcatataaaatttaatattctaaaagcagactttcacaagtcttagttcaggacagtttccatagcagtaggtgccttcgttattggctgttctttatctgggcacttgaagggttactctttgttccatccactgggaccttgcatacttttcttgtattatcatccttttttcttttcatcagtcttgttttcacctgaagggctggcccagtatcttatatactttaaaatcagctggcagggagtctaacaaacagtaagtacataataaaacagtaaatgaacaaatgaa

SEQ ID NO: 182398 - DNA, 576 bp, Homo sapiens
taaatgtttatagcagttttcatcagcttagatttatatatatgtaagatatatatatagatatatatatatatatatatatatatatatatattagtctacccacccactagacccttgctgagtaataaatcatttcaaaacctagtgtctaaaaacagcaacaatttatatagttcataattctttttttttttttttttttttgaggtggacttttgctcttgttgcccaggctggagtgcaatggcgtgatctcggctcaccacaacctccgyttcccagattcaagtgattctcctgtctcagcctcccaagtagccgagattacaggcatgcaccaccacacccggctaattttttttatttttagtagagacagggtttctccacgttggtcatcttggtcttgaactcctgacctcaggtgatccacctgcgtcgggctcccaaagtgctgggattacaggcatgagccaccatgcccagcccttatagttcataattctatagtttggcaattagagctgcccatagctgggtggtccctctggtctggggcaggcttggttgatc

SEQ ID NO: 182399 - DNA, 567 bp, Homo sapiens
aatgtggcatggcacctcggcagagggtgtgaaagtacagatgcacaggggaagaagcagggctctccaaacatggacagtgtgagcaaggactcagagatgggcgtgtgcatatgtattcaagagtgaggataagaaggaaatgcattcgatggactgaactgagggaatagtaaacaactagataaataaagctggaccacccttagagggtcttgagtgcctggctcagacatttatawggacaccataaacaggaccccagtggagagcctcaaactggactgtgaaatgatttttaaaacagcattctaaggttaacataaagtcactatgatagattattgatagcttgtgaaattcgaactaagcttagtataggggaggccattttagtatctaggaaaaaagggaggtgaaggcctgcattagggatagatggagaaggaaatgtgtacaggaaatagtggaagaaaatgttttgaagaatggaattcactttggcaagttggaattatgactttagcatgctgtttagctgagctcacaatcagctgatcacactgg

SEQ ID NO: 182400 - DNA, 417 bp, Homo sapiens
ttaatcagacacagggacccatatgcttgtcttgcatcagtgtgtctttgacattgataattaatttgtagagaaactgaacttatctctcaaaatcagttcctacagtctcatacgcccacctcttccacgatagttcctgggccttgaggagttgaatagctttaatttctggcccagtgtcttaggaatgcagtttrttttgattggcatcttctacctggcctgaagatggggtttaattgctgtcagtgtttaaaatttaacaggacttggtgtccttttcagacacaaaagtcaaaggcctgtaacttaatgtcacaagtaccttaaaagcacatacaaagagatacatggatgcaataaccttaatttaaaaaaaaacttttaatctcagttttttcctaagcaaaccaa

SEQ ID NO: 182401 - DNA, 536 bp, Homo sapiens
tgattaatgtatttaacacttttttttgcacttgctaggtgctagacctcatttttgattctggggattcagcagtaaacaggagtctaggtttctcctccaatggaaattggttgtatatgttgagagaggaaaaggtgttgaaaagcaggactgataggatgataggcaagtaaaaccaatgaataagttgagatttggactagttattggaaggaagtmgagagtgactggggcagcctaccctaggacagtcaggaaaggtttgtcagaagaggtcagatttacactgagttgtaaaggctgagaaagactcagcagagtgaacagaatgtacaacctgtggagggaaaaagcgtgattacacaggaaagggaagaaggccaatctgctgcagcctgtgagcagcagaagtaggcaagagatgggtgtggcgaggcaggcaggaccgagttgggtagggctggcatgctttgtaaggagtattagtcttgttccaaatgccacgagaaggcattgtgatgtgacataaggag

SEQ ID NO: 182402 - DNA, 536 bp, Homo sapiens
tgattaatgtatttaacacttttttttgcacttgctaggtgctagacctcatttttgattctggggattcagcagtaaacaggagtctaggtttctcctccaatggaaattggttgtatatgttgagagaggaaaaggtgttgaaaagcaggactgataggatgataggcaagtaaaaccaatgaataagttgagatttggactagttattggaaggaagtagagagtgactggggcagcctaccctaggacagtcaggaaaggtttgtcagaagaggtcagatttacactgagttgtaaaggctgagaaagactcagcagagtgaacagmatgtacaacctgtggagggaaaaagcgtgattacacaggaaagggaagaaggccaatctgctgcagcctgtgagcagcagaagtaggcaagagatgggtgtggcgaggcaggcaggaccgagttgggtagggctggcatgctttgtaaggagtattagtcttgttccaaatgccacgagaaggcattgtgatgtgacataaggag

SEQ ID NO: 182403 - DNA, 459 bp, Homo sapiens
tcccaggttcaagcgatcttcatgcctcagcctcctgtgtagctgggattacaagcatgccatcatgcccagctaatttttgtatttttagtagagatggggttttgtcttgttggccaggttgatctcgaacctctggcctcaagtaattcacccatctcagcctcctaaagtgctgcgattataggtgtgagccatcgcacccggccagctttttcttattaacagtgtttgagactaacttgtttataaaattctttccagccaaaatgggraggtaccaatatgcttatggatgtgagggtgctttgtgagtgatgggattctatttcagaagcacccacaaaatttgttaagtatttttactaacaagttcttgaaaactgacaggagatccactgcttaccaaaaagttaccatgtatttctgaaatactttcccaacaaaagtaacattgaa

SEQ ID NO: 182404 - DNA, 593 bp, Homo sapiens
attttactcaatgtattggcatttttgtatttacgtgttttagggtttttttttttctccactgaaatttcatatggttatatgtttgaagaatctgccttggaacagctgctttccaatagattgttattacctgaaagagttattataatttttgccrtttcacagatgtaacaaaaagtcttaatgatgctaaaaaccacatccaagattatacagttaacaagtgataaaactaagaccactgagacagataccaagataagcctcaagccattcacatttctgtaggtattgcagataaattttttttgctatattaaattgtaaatatattgtatttcaggacaatttcttattcttgtctatgtctattctattcttgattttacttttagctgatcgcaatccagggaggcaaatcattatgagaattttaattgtgtagactggggtgctactaatttattcctgtctagagaggattcaggagatttttctttaacacagtgtggatcataaaatggaataaactgtatattatatatgtatatatgttatctatgagatgtatatcagtaatataggtgtgt

SEQ ID NO: 182405 - DNA, 523 bp, Homo sapiens
agtgctacatttgcaagaagaaagaaagttaaacaaattatacttgatttctagctaattatatcaggtggcaaaaattcagaaagtttgacatatgtttatatttgatatttatcatctttagcctaaagatgagaaataaatatttaactaaacattgtatttcttatcaaaataatataatatatagtgtgtatatatgttaaacttaaaaagtaaacatgataatttgattattcccttaattattgatatttttcttctttttagaaatctgattcaatgcattccatgtataaaactacaaatcaatgttttattactccacataattgtgttaatatgttttacaaatataaaaaagtttctctgcttcatgtcttctaagaagaaaaacaagtttccatagtaaaacaaatttggaamacgtcatgttaaatacaaataaacagttttcctgaagtcatgccttataattttaatatattaaattgctttgtagatctctcttgccagtatggat

SEQ ID NO: 182406 - DNA, 549 bp, Homo sapiens
cataattaggatgttttacattgctgttgtaattccaggcaacaatgagatcaacacagaaggaaattaataggccatttttataactcctagactggaataactactttatgtatatcatagaatagaatactcacaaaaatacttcaaagcaaatattggctccattttgcagatgtgaaaattagaggtcctgaaagttggattagcttgcctaacataacttagctactaagtgaggcatcaggatttgaagctagacatgcttctgcactagawcacaacttcattgtcagcttttctaaatacaaaaatgactgaggaacaaagaatagtttttaaacattatatgaacaaaagagtgaccagagatgatcacttatactaaaaaatgttgttagatattatgcagtgaaaatgttcctttaccaagtaattttcagaaatcctgagttaaagaagtaaatcaaaatttttttttttgctataggatttcttgtagcttttaatatgaatggtatatttctgagactgtataaaggatgtggc

SEQ ID NO: 182407 - DNA, 526 bp, Homo sapiens
aacacccatgacacgactatgtaaaatctcagagatgattagaacaataaggtctcagtatgcattcctatcttattatggagtcaatgaactgcaaagaacttcagagatctgacagttcaatatactagttttacaaatagcggaaaagggaaagaagaaaaaaataagggaggaaaaaaagttggggagggggagaaagaaagagtaaaaaaggaaaaagggaagaggaaaagcaagaaaaagtaggaaaacatttaattggcataaatatctgctaggcattatattagatgcattatttatattatcacagttaatgatttcatggttaggagggagtaatttgtggattaaaaaaaaaagcagtatttcaagtacaataaataaccttccaagacctcgtctatggggcaattatcatcagaaatagttttatgtcataccrttgatcgtgatgctcaacaccattagtcttcctcaaaggtcccacactaactagtgaaagatctgaaatttgaattca

SEQ ID NO: 182408 - DNA, 526 bp, Homo sapiens
aacacccatgacacgactatgtaaaatctcagagatgattagaacaataaggtctcagtatgcattcctatcttattatggagtcaatgaactgcaaagaacttcagagatctgacagttcaatatactagttttacaaatagcggaaaagggaaagaagaaaaaaataagggaggaaaaaaagttggggagggggagaaagaaagagtaaaaaaggaaaaagggaagaggaaaagcaagaaaaagtaggaaaacatttaattggcataaatatctgctaggcattatattagatgcattatttatattatcacagttaatgatttcatggttaggagggagtaatttgtggattaaaaaaaaaagcagtatttcaagtacaataaataaccttccaagacctcgtctatggggcaattatcatcagaaatagttttatgtcataccattsatcgtgatgctcaacaccattagtcttcctcaaaggtcccacactaactagtgaaagatctgaaatttgaattca

SEQ ID NO: 182409 - DNA, 606 bp, Homo sapiens
tagttataaaatacaatgttttgaataaaaacataaattacagtatttttggaaggttcctgtgaataagctgattcgcgactaagcttatttctrccaaatgagtcaggtgagatgagaacacttatcaatttgggtggatgcatgtcaatatagctccaaaaaggtagctagtattttatgttaacaagtactggtactaaagagacatgtcctctcaaggcataaaatcacttctgtcattatatctggctacattttatccatcaacccagtgtactctcactcattcaccatcaaattacccctttctccatttacatcattttcttcctagtaactagaaaactcctgattgttagagattttggctcaacgtccaattttttatttatttatttttattttcttctgtctctctcccttctgttttccttcctttcttccttcctttttatttccttctctcctctcttctttctttgtttccctttcttttcccttccttttttctttttccccctctccttctctcttatttttctctttcttttgttcagatttgccttcccaggaaatggtctggaaagttgatgacagcaatgc

SEQ ID NO: 182410 - DNA, 585 bp, Homo sapiens
taaaaacataaattacagtatttttggaaggttcctgtgaataagctgattcgcgactaagcttatttctgccaaatgagtcaggtgagatgagaacacttatcaatttgggtggatgcatgtcaatatagctccaaaaaggtagctagtattttatgttaacaagtactggtactaaagagacatgtcctctcaaggcataaaatcacttctgtcattatatctgkctacattttatccatcaacccagtgtactctcactcattcaccatcaaattacccctttctccatttacatcattttcttcctagtaactagaaaactcctgattgttagagattttggctcaacgtccaattttttatttatttatttttattttcttctgtctctctcccttctgttttccttcctttcttccttcctttttatttccttctctcctctcttctttctttgtttccctttcttttcccttccttttttctttttccccctctccttctctcttatttttctctttcttttgttcagatttgccttcccaggaaatggtctggaaagttgatgacagcaatgcactg

SEQ ID NO: 182411 - DNA, 600 bp, Homo sapiens
agtagttataaaatacaatgttttgaataaaaacataaattacagtatttttggaaggttcctgtgaataagctgattcgcgactaagcttatttctgccaaatgagtcaggtgagatgagaacacttatcaatttgggtggatgcatgtcaatatagctccaaaaaggtagctagtattttatgttaacaagtactggtactaaagagacatgtcctctcaaggcataaaatcacttctgtcattatatctggctacattttatccatcaacccagtgtactctcactcattcaccatcaaattacccctttctccatttacatcattttyttcctagtaactagaaaactcctgattgttagagattttggctcaacgtccaattttttatttatttatttttattttcttctgtctctctcccttctgttttccttcctttcttccttcctttttatttccttctctcctctcttctttctttgtttccctttcttttcccttccttttttctttttccccctctccttctctcttatttttctctttcttttgttcagatttgccttcccaggaaatggtctggaaagttgatgac

SEQ ID NO: 182412 - DNA, 585 bp, Homo sapiens
taaaaacataaattacagtatttttggaaggttcctgtgaataagctgattcgcgactaagcttatttctgccaaatgagtcaggtgagatgagaacacttatcaatttgggtggatgcatgtcaatatagctccaaaaaggtagctagtattttatgttaacaagtactggtactaaagagacatgtcctctcaaggcataaaatcacttctgtcattatatctggctacattttatccatcaacccagtgtactctcactcattcaccatcaaattacccctttctccatttacatcattttcttcctagtaactagaaaactcctgattgttagagattttggctcaacgtccaattttttatttatttatttttattttcttctgtctctctcccttctgttttccttcctttcttccttcytttttatttccttctctcctctcttctttctttgtttccctttcttttcccttccttttttctttttccccctctccttctctcttatttttctctttcttttgttcagatttgccttcccaggaaatggtctggaaagttgatgacagcaatgcactg

SEQ ID NO: 182413 - DNA, 606 bp, Homo sapiens
tagttataaaatacaatgttttgaataaaaacataaattacagtatttttggaaggttcctgtgaataagctgattcgcgactaagcttatttctgccaaatgagtcaggtgagatgagaacacttatcaatttgggtggatgcatgtcaatatagctccaaaaaggtagctagtattttatgttaacaagtactggtactaaagagacatgtcctctcaaggcataaaatcacttctgtcattatatctggctacattttatccatcaacccagtgtactctcactcattcaccatcaaattacccctttctccatttacatcattttcttcctagtaactagaaaactcctgattgttagagattttggctcaacgtccaattttttatttatttatttttattttcttctgtctctctcccttctgttttccttcctttcttccttcctttttatttccttctctcctctcttcttyctttgtttccctttcttttcccttccttttttctttttccccctctccttctctcttatttttctctttcttttgttcagatttgccttcccaggaaatggtctggaaagttgatgacagcaatgc

SEQ ID NO: 182414 - DNA, 606 bp, Homo sapiens
tagttataaaatacaatgttttgaataaaaacataaattacagtatttttggaaggttcctgtgaataagctgattcgcgactaagcttatttctgccaaatgagtcaggtgagatgagaacacttatcaatttgggtggatgcatgtcaatatagctccaaaaaggtagctagtattttatgttaacaagtactggtactaaagagacatgtcctctcaaggcataaaatcacttctgtcattatatctggctacattttatccatcaacccagtgtactctcactcattcaccatcaaattacccctttctccatttacatcattttcttcctagtaactagaaaactcctgattgttagagattttggctcaacgtccaattttttatttatttatttttattttcttctgtctctctcccttctgttttccttcctttcttccttcctttttatttccttctctcctctcttctttctttgtttccctttcttttcccttccttttttctttttccccctctccttctctcttatttttctctttcttttgttcagayttgccttcccaggaaatggtctggaaagttgatgacagcaatgc

SEQ ID NO: 182415 - DNA, 488 bp, Homo sapiens
tttagggtcaactaatctggaaagcttgtcttcaaagtttataaacgtaagatatggacctctcctttctgttcttgtttccttttatatttatactcatgaatgtgtatccaggtaggcatacatattactaaaatagtgtattgaaatggatgcattaatacaatatttttcttcaaatttattttcataatgattttaaaagtgatgtayacttaattgttacaaatgtggaaatttcagaaaatatgagaaagaaaaaaaactaatatcatcagcactgatgaggcaaccactcttcccattttgttatataagttcccagtatttttatagtaaatattacacacttatttaaaaatattttatttttaagtctcttatctattcttccttttgtgacatttacagtttcattgcaatttaaagctctgaagtttgaatttaatgttcatggagtaatctgatgaaggagttatgcccatatt

SEQ ID NO: 182416 - DNA, 422 bp, Homo sapiens
actctaataaccctttccctcatatctagcactctattatgttcatgaaagacatgcactaatcatttctaggtaaattgcccaatataaatgttatatactatttttmttaaagttaatgagtgtcttttttccccaagagagtggattagaggcctttagtgtgtctcagccacttggaaaaagcaagatagcgcataaagataaattatgtgagccttaattcagggagaatctactggaattgtaaaggacacccctgatcctggggaggagaatgcaggcaaaaagcctgcatgatggcatctatctgataaaagcaaatctccaggcatttggagaacctacttgcatgaacttgtagcctagctgccccatacttcctgtgcggagatccttgtgcagggaggccctctgtgctt

SEQ ID NO: 182417 - DNA, 422 bp, Homo sapiens
actctaataaccctttccctcatatctagcactctattatgttcatgaaagacatgcactaatcatttctaggtaaattgcccaatataaatgttatatactatttttcttaaagttaatgagtgtcttttttccccaagagagtggattagaggcctttagtgtgtctcagccacttggaaaaagcaagatagcrcataaagataaattatgtgagccttaattcagggagaatctactggaattgtaaaggacacccctgatcctggggaggagaatgcaggcaaaaagcctgcatgatggcatctatctgataaaagcaaatctccaggcatttggagaacctacttgcatgaacttgtagcctagctgccccatacttcctgtgcggagatccttgtgcagggaggccctctgtgctt

SEQ ID NO: 182418 - DNA, 609 bp, Homo sapiens
tatgttttattctgcttggtttcctgtgacttgcttttttaactatttttctaatagatgtatatgttgacgtgtgcagctacagttctttcattctaaatattgcataatttccaatttttgaatatattacagtgtatccattctcttcttgagcatttgggtgtttgtttgcttgtttgtttgctattataaatgtgctgcctcagtcactcttgtgtttgtcttctggtgggcctgagctagagtcgctgtatagtacatacgttctataaagtgaaattgatggcctgtatattagcatgtgaaacattgcagaagatactacataattttaaaaattgtttttaataatttcacttttaccagaactgatatcacagttctcattacatcacatttttgctatctgatactatcattcaaagtttttgtcaatgtrttgggtttaagattgtgtcttattgtagttttaatttttatttccctgattcatatagaagttgaaagttttcatatattcagtcatcagatatgattattagggttatttcccaattctaatcttctgtgaaatgtactgaaattattttttagtttataatttat

SEQ ID NO: 182419 - DNA, 591 bp, Homo sapiens
actttctgttcttttacttatcacttgtcttttgamattttgcaatcagatagtctttagttttgattttttgggtcatttcctctagttcaatgaaggggaaagccatgctagttaattagtattaaactttatcagttagatgataaatagcttgtttttattaacagagctagagcaaatctcaaaatcagagtcttgagtaggcacaatgttttctaaagtttaataactaacattttttgtttgattactattttttaatattttcttttattgcacgatactggctttatttttatggtagtaacttcaagtttcttttttagatacattgatgtcagtttaaaaagtggcccattaaaaatattcagggagaaaaagaaggaacacatgcatggccaaaataacaagatggtttgtggatttagcaaaatgtacaacagagacgtgagaatggctgaaggtggcattctatcctgttccctcaatttctttgtgcataggcctaatctttgcagtgcttaagagctacaggacttccaaaaactacttttctgttttgtataacaagcacactatgattcagtg

SEQ ID NO: 182420 - DNA, 591 bp, Homo sapiens
actttctgttcttttacttatcacttgtcttttgacattttgcaatcagatagtctttagttttgattttttgggtcatttcctctagttcaatgaaggggaaagccatgctagttaattagtattaaactttatcagttagatgataaatagcttgtttttattaacagagctagagcaaatctcaaaatcagagtcttgagtaggcacaatgttttctaaagtttaataactaacattttttgtttgattactattttttaatattttcttttattgcacgatactggctttatttttatggtagtaacttcaagtttcttttttagatacattgatgtcagtttaaaaagtggcccattaaaaatattcagggagaaaaagaaggaacacatgcakggccaaaataacaagatggtttgtggatttagcaaaatgtacaacagagacgtgagaatggctgaaggtggcattctatcctgttccctcaatttctttgtgcataggcctaatctttgcagtgcttaagagctacaggacttccaaaaactacttttctgttttgtataacaagcacactatgattcagtg

SEQ ID NO: 182421 - DNA, 345 bp, Homo sapiens
aggtcatgtctctgtcagatgatactgaagaacccagggttacacatgtgtgcagttggtcaacaaccattgtttactaccattaaaagccttaggctgcctttttgtaaaagccttttctttttcgtggttgaccttgactttcacattaacctgattttgtcagtatataaacasccagcaaggaaaaagaaaaagggaagtttgaatccatgttgtgatttacctttagcccagaccatagggatgcccttgggccctgcactctctctttccacacatttgttggagaattacactggaacataaaattgcttcggtttgatttgccgtggctcaactttg

SEQ ID NO: 182422 - DNA, 521 bp, Homo sapiens
tcaatgctttaataaaagcaaattaaaaaactcaaggatgtagaagcagyagccgtatcagcaaccattcttctagggattcttttagggaagggacatatacaatccttccccaagaactttgatgctacccctctgaagagtttaagcacaaaacagagtgcttgtatcatataagcaaggacctttacagaggaaaactgtcatataaatgcattttttttttgcttttaaaggatactgcagtagaaatatattaagcaaggcctcaaatatccaacattttcccatattgcattttaaaccaaagttataagaacctgcagtctttataaagaactctcttcacagcacagctgtagttcactttaaataaaaaatgttccctttgtgctatatccttagaagtgaacataatatacagataaatgtgaagtttagattctgcatcaagccttattcaatctcaccttctgatataaacctggatacagtcaaatttgcaaagcattcacttaata

SEQ ID NO: 182423 - DNA, 582 bp, Homo sapiens
aatgtctcacattagtggtatagacaaataatgtcactgaaattgggaagggagataattgtgagatgtggtagtactgaaaagcccttatagagcacaggctttgaaatataaatagcatagattaaatttatattrgagaaggggaatattattttaggtggtgcagaacactgagaacaggaaatgtgtacaaaatttcaagtggggctaatgtgggagataataattttgaaaagtagattggagtctaattagaaaaagaactttgaatatcagataacaaaatttcaacttgattctatatccaatgcagaagcaatttttgaccaaagatgaaacaagatgaaacctataaaattactttagcagagacttttaaatgatggagccagaggtgtagaaggcagaaaccaatttggtatgagggagtctgagctcagttaagattgattcaagtagtgtaatgacaataccagcggaaatttaaaaaaaaatgtgcccctgggtctaatgaaactataacatctggcattttatttactttacacgaatttactacaatgatccagggaatactct

SEQ ID NO: 182424 - DNA, 547 bp, Homo sapiens
tcctctttggcctttcattcaatatattatggaccgggcacaaatcatctcctactaccttaaatgaatgcatacataatatgttacaaataaatttaatgtatcaaatttctagagaaaataactattacttttttttttttttttttgggtgtgaraaagggtcttgttctgtcaaccagactggagtgcagtggtgtaatcatggctcactgcagccttaaactcccagacacaagcaattccctcacctcagcctactgagtagctgagaccacaggctcacaccaccatgcccagctaatttttaaaattttcagtagagatggggtctcactctattgcccaggctggtctggaactcctgggctcaagcaccttggcttcccaaagtgctaggattacatgtgtgagccactgtgcctggaggctattacttttatattaagagaacaataaatataacaaaatacttagcatgaaaagtaccgtctattttgtctcatttaaagagtcattgaaaaatatgtatgattgtctagaatat

SEQ ID NO: 182425 - DNA, 636 bp, Homo sapiens
agcaaaaggcatgattgaatttgtgctttagacagagcattctggcaatggtgcagaaaataaactgaagggtgggatacaggagacagagatgcagtgagagtctgttataataatccaggcaagagatgataagcccttaaaattactttttatcgcttaatgcctttatggtaactagattgctaacatgtctgaagagttcctgtcgaattcattttcctaacactttttgcctagtgcagttgtagatacctaacaatatttgttgaattgaagtatttcataacaagacaaaggytaacatcgatgaaaaattaaaagtcaccttttcaaaattgtgtttcatgactgcaacataatacattgttttcgagaagacgggaaatataaaaaaaaatgccaatatcaacaaaaaaataaaaatggaccattagaccaccacttgaagatatgcagtcttcatactttggtgtttcccttctccaattattgttcacatagtttatttcattctctgtataaaattagaaaaactgaatcatgctatatcataagcattttttacatcattaaagctctcaatcaagtttatttaaaagattgcataatgtgctacaccataatttacatagt

SEQ ID NO: 182426 - DNA, 523 bp, Homo sapiens
tggactctaaggcaattacttagcctcttagcctattacttcagccacaaattggttaaactsccttctactgcatggtgttgttccatgatatcccaaaagaatgatgtatgtgaagcatgtggcctgccacctggtgtttactgactcagaatcaccttccatgcacatctctctttagaccaatgagagcacagaggggctctgatgagcaggcagagccagaggtggctgggtccccctgtggacactctacttgaggcactcccagccaagtgagaggggacaaaggcagagtcctggcaccctgtgggcaaggcaaggcccagggaggtggggatggtgctggctggggccattgcccaacaacgcaaatggaaatgcctcaacacacccactgtgtcccaaggtcaaaggcttcacaattgggtctttgttcctgagttcaaaagcctcactcaccactccttcaggttgcacaagacgcctcctctcccccaccgtcaggcctccagcttccctg

SEQ ID NO: 182427 - DNA, 287 bp, Homo sapiens
atctggggacacagaaatcaaccaaacagactaaaatcgcgcctgcatggagcttaccttccagtgagtctttcccaccctccgtgggtgcctgtgggcaggccacatgtctccctgcacctctgtctcctcacccgtagtatggggatgggaattgtgccctcatgaggacgaccctcatgagaatttcctggaacgacactcacagactyactgtacttggcccaggagccactggatctaggccttgcatctgaagctggtcgtggtgtgtgaggtttcaggag

SEQ ID NO: 182428 - DNA, 576 bp, Homo sapiens
ttctcctcatcaatattatctctaaaattctgccactatttgcttataggtctgggactggctttgccctgacataaagattatttgttctgatcatttgcccacgtgttcagcctgtgtattgtttgccacactgtgacaattgacagggtttatattttcttggcaaaaagtttggagttcaatattaaaagtaatcgtctgcccacacataatacaacagtatgaataccataatgctctctatttactctctgaacatcatttttttctctgtacagtgtgataggtttttttctctttacctatttcacattcactattatayaggcagcatttctagtatatcagcatatcctgagatctactgtatgcatcattaaagagaaagagaatattcacctgtatatttttaaacttttattgaagagtttgagaatcatgaatagtaatgctgcatgttgtttgacatctgggatgcagtactgagtattaggtgtaaagctttgaaatcgacagcctggatttgaatcttcattataccacctaatagctgttccagctccttgacttatt

SEQ ID NO: 182429 - DNA, 575 bp, Homo sapiens
gcattctttgttattcctgggtgcattcttatacagacttcaatcctcagcccttttcattttgcccacataactccatgtaaattagtatcaatttctccatgcttttaagccacttatttcttaatttatgcagcacaaattataaacaaatggtaactcagagacttcttgcgactcacactacagaccaatgtctagcaaggctgcgcctccttaaacaagracatgagctataattctcaatatttcataatttcatattcattcctaaaggtgctggacatcttttcaccatcaagcttgctcccaatgtcagttatgtcatattgggacacacacacacacacacacacacacacacacacacacacacagagagagaagcccccacccatggaattatattacagaaaaagaaaaatatcccaaatatcctccccactgtctttaaatgagagatgaaccaaacttatttctccagcagaatggcagactagatattgtgactgaccttcctactaaaaacaaataaaaattctgaataaaatctaaaacaataacttgtaaaatgc

SEQ ID NO: 182430 - DNA, 509 bp, Homo sapiens
gatcctcagaaccaagcaagattggtactagaagagaaagcatgaggtgtaagaggctaagctggagcgggtggccttgaaccaagtactgtctggtacccaagttcatatttttaagcactgtgctattttgccttccatactttgaataaaaaggttaatggataaggatcataaaaacattagtggggrttagaattgagaacacaaatggaaaaatcaagagcataaaatagttgaggatatggtttaagaatcattggattgggttagaaaggaagatattgagtaagaggatatagaaaacagatttctcatagctcttcccttgtggaaataaaaatgacattattggtattaaaaatatctgaattcaaacattcagttatcaaacaccaatcatcaaacaagtttaattacttactttttcaaaaatagctaaatgtgttggttttgttgagaaagtgctaagactcttttggcaaggagtgatatttaaaagtaataat

SEQ ID NO: 182431 - DNA, 603 bp, Homo sapiens
gttttgctgaaggttcagaacaggggatgttgyatcaggctggagtgatttaatcagtgaagtgttcaccatatatgttggatctgaactgagttttataagatgcatgggatgatgctcacatattcgtttcctgagcctgctataacaaattaccacaaactgtgtggtttagaacaacagaaatttatcatctcacagttcctgaggccagtagtctgaaaaaatatgtgggcatgattggttccttctggaggatctaagtaaaaaactgttccctgcttttatcctagcttggttgctggcaattcttggtgttccttggtttatagatgcatccctccagtctctgccttcatcttcacgttgcattcttctctgtgtctctctgcatcttctcctcttcttagaagtgaattgatgtagggctactgtaaatccaggataatttcatctcaagattcttaactaattatatatgcaaagaccctattttcaaataaggtcacattctgaggttcagtatagacatgaggggtgtgtatgtgtgtgtgtgtgtgtgtgtgtcaggggttggggggcacattattcaacccattgcag

SEQ ID NO: 182432 - DNA, 576 bp, Homo sapiens
gtgataaaaattaatctactcatctgctggcagtgaaggaattaacagatatttcactatgccataccaaacacgttttagattatcacraaaaggtaccagagaaaggtcagaaactattcagagacatttatttaatgctttagaaaactcaatgactcaaatgcaaatatgtaaaatgtatcaactcttaataaatatactcggtagaaaaatatattcttaaaagctgatctttaataaaggtctctggtacctttcaaccctaggtcatggcacagtatcctgaaaagatgctgttgttttgctctaactggtttaaaaagtgctttcacattgaataaatataataaaatgcatttatataaaaaatctgatcgtggtttactatatattcctccaactgatgacatttttcagacatttcaaaatttacatgctaaagtatttctgtttataataatgtgtgatgtaaagtaaaaacatcataacccatttcaaggtgtgtcataattaaagggcagggaggaggtaaggggacatcattgcttgcactgttttatttctaaaattctt

SEQ ID NO: 182433 - DNA, 576 bp, Homo sapiens
gtgataaaaattaatctactcatctgctggcagtgaaggaattaacagatatttcactatgccataccaaacacgttttagattatcacaaaaaggtaccagagaaaggtcagaaactattcagagacatttatttaatgctttagaaaactcaakgactcaaatgcaaatatgtaaaatgtatcaactcttaataaatatactcggtagaaaaatatattcttaaaagctgatctttaataaaggtctctggtacctttcaaccctaggtcatggcacagtatcctgaaaagatgctgttgttttgctctaactggtttaaaaagtgctttcacattgaataaatataataaaatgcatttatataaaaaatctgatcgtggtttactatatattcctccaactgatgacatttttcagacatttcaaaatttacatgctaaagtatttctgtttataataatgtgtgatgtaaagtaaaaacatcataacccatttcaaggtgtgtcataattaaagggcagggaggaggtaaggggacatcattgcttgcactgttttatttctaaaattctt

SEQ ID NO: 182434 - DNA, 422 bp, Homo sapiens
ggttgatgtgtcaagaacagacctatgaggccaagtttgtaaacagggaaactcttagcaccctggttgatgtgtcaagaagagatttatgggaccaagtttgtaaacagggaaactcttaaaataatcaagayaggagaatatgtatcttgaatcgagtttgtagcaatgggagtgggtgagaagtggagagattctgtatatatgttaaagatattacttagagcatttctggatggttttaagattgagaggagggagaaatcaagggtgactccagaaattttgagttgagcaactagaaggatggaattaacattaactcagaacttaaaaggaacagaaaattatgagaagaagaaaaaattgggaattcagttgggtacctaatagtattgcgatacttagccaaatggagatct

SEQ ID NO: 182435 - DNA, 422 bp, Homo sapiens
ggttgatgtgtcaagaacagacctatgaggccaagtttgtaaacagggaaactcttagcaccctggttgatgtgtcaagaagagatttatgggaccaagtttgtaaacagggaaactcttaaaataatcaagacaggagaatatgtrtcttgaatcgagtttgtagcaatgggagtgggtgagaagtggagagattctgtatatatgttaaagatattacttagagcatttctggatggttttaagattgagaggagggagaaatcaagggtgactccagaaattttgagttgagcaactagaaggatggaattaacattaactcagaacttaaaaggaacagaaaattatgagaagaagaaaaaattgggaattcagttgggtacctaatagtattgcgatacttagccaaatggagatct

SEQ ID NO: 182436 - DNA, 504 bp, Homo sapiens
gagcattaagggtagacaaaaatattgttcagtctgtaacattgttactgcatacactgcatggtatagtatgatcctgatcttccaccaactttcttactgcccagctgacaaagatataagatcacctcacctattaaagaagttctgtttagtaatgctttcagtaagttaattgggataattggtcatattacaatgtcacttgtacaaattaagtcttcaataaatatatttgaataaataagctaatattcttgattgagggtagtaatttgaacatgggaaggggaaagacgtaaaccagtcacccaggtatctgtygcatgtcttaatttctaatttttttctccaaatattttcagttcacactttgtgtcagtcaccattcatttattcaacaaatctttactgagcacctacgataagccaggcactatttcaagaacataggacacacaacagtgaataatagagatgataaagtttacacagtattgggaa

SEQ ID NO: 182437 - DNA, 558 bp, Homo sapiens
cattatttgcaacagcaacactggaaataaccaaaaatgcccaataatggagaactggttaagcacatttctgtacatcaaacagatggaaccctcttcctctcatcaaaacatgctttctgtaatcccagcactttgggaggccaaggcaggyggatcatgaggtcaggagagcaagaccatcctggctaacacagtgataccccgtctctactaaaaatgcaaaaaaaatagcccggcatggtggcaggcgcctgtagtcccagctactagggaggctgaggcaggagaatgacgtgaatcctagagaggtggagcttgcagtgagccaagatcttgccactgcactccagcctgggtgactgagcaagactctgtctcaaaaataaataaataaataaaaataaaaaaataaaaaataaaataaaacatgatttctacaatggcgaccacaaaaaaactttcagatattaaaataaatggtgaagagcaaaaattgaaagaggctgttacggactgaaatgtgcccgtaacccaaaatgcacgtgttgaaattct

SEQ ID NO: 182438 - DNA, 535 bp, Homo sapiens
gccttgctgagagatcctttgtcttttcttcayggcaccgattatctgtttctaacagaggaaaaaataaaggccttttaatacaaatgcacacatgcacacacacacacatctcagatgttagcttttaattaagctgacttttaacccttgagctcctttaaaaaaatctttctgaatctcattaccattttttagctaggaaaaattgctgatgtttcaaaagaagcaagtatcaaaccagaaagggcttgatttaggaagcaaacccaggctgttgtggaaaaaaaagaaggcagaaccttagctatgaaactgcagcatggggcaacagcgttgctctttcaatttggcctggatagcaaaaaagtggccttgctatgtacataaagccccttaagtactcaaaatcaaaaatctttattgttttttcttttgctgagcatttttcctcccaagccctccccaccttttgtggaaatttagccacttcagaggccttgttcctcataatttggaactttcctttagattt

SEQ ID NO: 182439 - DNA, 535 bp, Homo sapiens
gccttgctgagagatcctttgtcttttcttcatggcaccgattatctgtttctaacagaggaaaaaataaaggccttttaatacaaatgcacacatgcacacacacacacatctcagatgttagcttttaattaagctgacttttaacccttgagctcctttaaaaaaatctttctgaatctcattaccattttttagctaggaaaaattgctgatgtttcaaaagaarcaagtatcaaaccagaaagggcttgatttaggaagcaaacccaggctgttgtggaaaaaaaagaaggcagaaccttagctatgaaactgcagcatggggcaacagcgttgctctttcaatttggcctggatagcaaaaaagtggccttgctatgtacataaagccccttaagtactcaaaatcaaaaatctttattgttttttcttttgctgagcatttttcctcccaagccctccccaccttttgtggaaatttagccacttcagaggccttgttcctcataatttggaactttcctttagattt

SEQ ID NO: 182440 - DNA, 535 bp, Homo sapiens
gccttgctgagagatcctttgtcttttcttcatggcaccgattatctgtttctaacagaggaaaaaataaaggccttttaatacaaatgcacacatgcacacacacacacatctcagatgttagcttttaattaagctgacttttaacccttgagctcctttaaaaaaatctttctgaatctcattaccattttttagctaggaaaaattgctgatgtttcaaaagaagcaagtatcaaaccagaaagggcttgatttaggaagcaaacccaggctgttgtggaaaaaaaagaaggcagaaccttagctatgaaactgcagcatggggcaacagcgttgctctttcaatttggcctggatagcaaaaaagtggccttgctatgtacataaagccccttaagtactsaaaatcaaaaatctttattgttttttcttttgctgagcatttttcctcccaagccctccccaccttttgtggaaatttagccacttcagaggccttgttcctcataatttggaactttcctttagattt

SEQ ID NO: 182441 - DNA, 634 bp, Homo sapiens
agttttaggaatctgtacctataatagcaatattgttttaacatcttgaggcagaaccccagtacattttattttggattcttatatttggtcgtttatctatgtatgctatgctttagtctttttcagttatttttttcttccaaaattggatctgcatgcatacatttcagctgttacttgaataatccagtctcacaaaaatcagttgaaagatgtaagtgtagatttactgtgctactctctactcctctgcctggttggcctgcctcagggtgatggtaggcatggagagcaatccaaatggcaggctgtctcaatcattgtgaactgcatacaatgtatcaggccagtgagcatctcttcttccaacccaggtttcctagtgataagggagggggacaggaagtgctgagtagagtagggcagggtctctggcgagggctccacccttgggcctstgccgacggacctaaatgagaacagtcactcctgttttcatgcccaaatgctgcattttccaagaccactcttgtctgtcatgcctcccatcctgtgcccataaaaacccaataccctagcaggcacagacacgagtggctggacgttgagaggaacagaataacacaccaac

SEQ ID NO: 182442 - DNA, 393 bp, Homo sapiens
gaaagccttgttaaactgacacagcaacctagatactggttttgctttagtgtgcctttgatattaatggttaattcctagagaaactgagctacttttctcttaatatcagcccttacaatctcacatgcccacctsttccacgatagtccttgggccttgaggagttgaatagttttaatttctgaccctgcatctcatgaacgcagtttactttgattagcatcttctactgggcctgaagatgaggctgtaattgatgtcagtgtttaagatatagcagaacttggtgtcctttttagacccagaagtcaaagccctatagctcaatggcacaaggactttaaaagcacatacagaaagttacacagatggaagaaaacacttttttag

SEQ ID NO: 182443 - DNA, 393 bp, Homo sapiens
gaaagccttgttaaactgacacagcaacctagatactggttttgctttagtgtgcctttgatattaatggttaattcctagagaaactgagctacttttctcttaatatcagcccttacaatctcacatgcccacctgttccacgatagtccttgggccttgaggagttgaatagttttaatttctgrccctgcatctcatgaacgcagtttactttgattagcatcttctactgggcctgaagatgaggctgtaattgatgtcagtgtttaagatatagcagaacttggtgtcctttttagacccagaagtcaaagccctatagctcaatggcacaaggactttaaaagcacatacagaaagttacacagatggaagaaaacacttttttag

SEQ ID NO: 182444 - DNA, 420 bp, Homo sapiens
aacaaggggaactttgaaaattatacaaatccatagaattaaaaaaaaaaawatgctcctgaatgacccacaggtcaatgaagaaattaaaaactaaattgtaaaatttctcaaaataaatgatcatggaaacacaacataccaaaacccatgggatacagcaaaagcagtattaagagggaagtttatagctataagtgcctacattgaaaaagaggaacacctgcaaataattcatgacgcatcttaaaaaaacagaaaaataagctcaaagtgaaccccaaatcagtagaagaaaagaaataatgaaagaccagagcagaaataaatgaaagtaaaatgaagaaagtcaaaacactatcaaggaaacaaaaagttgggttttttttaaaaagctatacaaaattgagaaacctgtag

SEQ ID NO: 182445 - DNA, 529 bp, Homo sapiens
ctttaagaaagcacagcttattttgaagtcttgtagtcagaaaaattagaatttaattaaacagtagcaaataataactgaaaaacatcaggcaactctagaatttaacaagaggggtgtcatagttttggaaacataatttcctctctccactttcccatttttattaaaagacaaattatggtaggtttgctttaggatacttggcttacttatttgcatacagtgctgcaagaataattatttgttacataggccttttaaatgggctttggtggaatttggttttgtagaagcaatctgagataaaagactttttaaagccaagcccagccatggatttgtaccattaaatacctatgacttgggtgaattcctctcctcttgatgtttcaagataacttagggttcctggcctgttagaaagtgacatgttctgtttaccacagatcacaamccctgtacggggactgtgtacacaaaatatgaggccagtttttcaagggctttattggctttataagttaaa

SEQ ID NO: 182446 - DNA, 601 bp, Homo sapiens
cttcacaaccccgaccggtgccctgtcccgctgtagttgagctggtattcaagatgcaagaaaaaaaaaaacgctcctcactattccatctcctcaagtggaaggagggggtcttttatggagccgctagctgggcagtctggggctagggcaggggtgacaccagcactcacttggctgccccagctggtatctcaggaggtcatgtgcacccctccacatacccgccacaatccactgcctctgggcccaattctatgctagaactcacctacgagttagagatcttatggcctagactgcctttaaggttgtctgagaaacctggaaccgtttcttagcccttggtggcaaggtttgcagaaactcaagttctgattcctgggatgggtaatttccctctggctagaggtggtttcaatgctcccttcccagatgggagtcagctaagtttgctctggttttcctttctcctgtaagagacagcaccgaggtcagygacccacaactgctctgctcttgctcgtccagcttccagagatgctctttacaccatactgccactgcctaggatagggaaggggcggggtcagcgatttaa

SEQ ID NO: 182447 - DNA, 545 bp, Homo sapiens
ggtaaaccccttctagagagtacctcttattcctggaccctttcttcaagaactcacatgattgggtcaggcctactaagatgatctcccttgtgattaacttagagtcaacagactgagggcagtaattacaccagagaaatctcctcacctttgctrtataacgttcataatcacagagtggcgtcccatcgcccttgctgcagcctgttggctgcatcttacaggttccacccacacgcgaagggagggagtgtacaaaggtgtgggcaccaaaggatggaaccacagaggccttctgagctgtccgcctaacaatcaggtttaacagtaggaaaagaagacaatagaaatccgtgattctaccattgaaggaaaccacattttgatacatttctttctagtcattttctgagcatatttctgtttacattattacaaccatgctgtatgtaacacttgaattgattttttcagctttattaagctataatcatcaaaaatcatataaagtgaacaactcgatgttttgatgtatgtataca

SEQ ID NO: 182448 - DNA, 536 bp, Homo sapiens
tgtaactatgaaaagacataaccaagttgcctggactgtgagtcattaaacatttaggacattagcaaattaatagagctcagagtgcggagagccgaggtgttatcagaaatgttttgggtgccaaagaaagatgagaaaaggaagaagggtaaagaaaaaaagaggaaaaagttgagcatgaggaacttctgaagagagttgactggataaagctggggaggggctggggggttggagggaggcaggagggtaataaagtcccatttaccctggggtagagattccagaagaacaggtgggggacacatatcaatagtgccattttatcttgtggacccaaaaagaagttactgggtccaaatgccaaaaaaaaaaaaaaaaagcccagtaaaacaaaatttataaatgcttaattagayatcagtaaaacataacattgtcaatttcattaattgttaaatttagtatttataaatatttattccatttgaaaagaattttgtgggttagatttttttcacttcttaagaatt

SEQ ID NO: 182449 - DNA, 432 bp, Homo sapiens
ttcagtgcaagagaaatggtgctggggaaaaccagagccttgtctttctcctccccttcctcctcttcctcttcctcctctcccacttttctttcctcgcttattcttgstggaaaaaaaaaaaaaggttgccaagaaggctgcaggaatagccaaacgcaagcaaagagaggctgattattccataaaagctgcacacacactggtggcggggcgggggcggggggggatggtgcaggcagcagagaacagagctgtcatgcaagcagccagggaagccggggctgtccatccttaggagggaaaaggaaggaagtcccaggtttagtcaagtcatgttttcttgacttgtatttagaaacttggagaattctacagtgaagtgatatttatttcgtggctgctgtgcaccaggcagtaggacacagcagg

SEQ ID NO: 182450 - DNA, 547 bp, Homo sapiens
ggttatatagggcccatgcaagtccgaaatccagcggggcagtcaaattttaaagctcccaagtgatctcctttgactcaaggcctcatgtccatgtcacactgatgcaataggtgggttcccatggttttgggctgctccacccttgtggttttgcagggtacagccttcttcccagctgctttcacaggctggcatcgtgtgtctgtcttttccaagcgaacaatgcaaytggtcggtagatctaccattctggggtctggaggacggtggccctcttctcacagctccactaggcattgccccagtagggattctgtctgagggctccaaccccacatttcccctctacactgccctagcagaggttctccataagcgtcctgccccacagcaaacttctgcctgggcatcccggcatttccttacatcttcttaaatctaggcagaggttcccaaaccccagttcttgacttctgtgccctcgcaggctcaacaccacatggaagctgccaagtcttggagcttgcaccctctgaagccttgg

SEQ ID NO: 182451 - DNA, 527 bp, Homo sapiens
gttgacagcatggtttactaaatattttaagcccactgttgagacctactgctcagaaaaaaaaagattattttcaaaatattactgcttattcacaatacatgtggtcacccaagagctctgatggagatgtacaaggagattcatgttgttttcatgccagctaacacaacatccattttggagcccatgaatcaaggagcaatttcaaccttcaagtcttattatttaggaaatgcattttgtaagactatggctgccatagatactgattcctctgattgatttgagcaacataaattgaaaaccttctggaaagcattcactattctagaagccattaagaacatctgtcatccgtggaaggaggtcaaaataccaacatcaacasgagtttgaaagaagtaaattctaaccctcatggatgactttgagaggttcaagatgttaatggaggaagaaattgcagatgtggtgaatatggcaaggaaactagaattagaagtaaagcctgaaaacgtgactga

SEQ ID NO: 182452 - DNA, 405 bp, Homo sapiens
gaattccatacacgtcagatctgaaaatgtgtgtgtgtgtgtgtgtgtgtgtgtgtgtgtgtctgtctgtgtgtgtttgtgtgtgtgtgaagcagggagaaagagcaagagtgaaagtgagcaagagagagaggagagagagggagagaatcagacagatacagaaagagattgacagagctacagagacagaattraaaggggacaccaagaatattgagctgagaaactataaaatgggagttgccattaaacagaatggggaagagcaaatttggggagtttcagtggctcaatatagacatattaattttgagattcctaactgacatccacgtggataagtcagggagtgttgggtgtagtgtccagtgtttaggtgtaatatgaaatatcaggaaatta

SEQ ID NO: 182453 - DNA, 352 bp, Homo sapiens
gaattatgagttgaagcaaaccctaggttgataatgctatgattctcctaaatcaccaaagtgcatgaaatgattttaaagctccagaaatactgaagcaactttgtgataaaaattattagtcgatgcacaaggagtctataatgtcttggttttgctattgcttactaaggtgcagcaccagtttgaatttgaataccagaccaaagtggatggtgagataatccttcatctttatgacaaaggaggaattgagcaaacaatttgtacgttggwtggtgtgtttgcatttgttttactggattctgccaataagaaagtgtccctggacagagatacataaggagtcaga

SEQ ID NO: 182454 - DNA, 199 bp, Homo sapiens
taagaaagtgtccctggacagagatacataaggagtcagacctttgtttaaagcagtgacagaagatggatttttggctgtgcgttcagaagctaaaggtaatagtaaatttaygtatagattttcattattgtcttggtcgtgtgttttcttttaaattatatctgaaaatctcttagcaatccagaattttacaagt

SEQ ID NO: 182455 - DNA, 576 bp, Homo sapiens
ggcaatactccctaaactcatctacaaatttaacttcatccctgtcagaatcccggatgagttctctgtaaaatggacaagctgactctgaaattcatatggaattacaaaggactaggaatagccaaaataatcttttgaaaatgagaacaaagtaggagaactcatacttactgactttaaaacttactacaagtcagtggtaatcaggacaatataatactggcagaaggatagatgtatagaccagtgggatagaattgagagtcagatatgaacccatacatatataaccactgcttttgacaagggtgccaagwttattcagtggggaaagaagtttgagaactggcacaaggacaactagatatgtaaacatatgcaaatcctggagtaggacctttacccaacaccacatacaaaaactatggatgcaaaaaaagtggatcaaatggatccattttgagctaatccacgtaaatgtaaggactaaaactataaaatcctgagaagcaaacataggagtaaattgtcatgaccttgaatttggcaaagttttcttaaatatgagaccag

SEQ ID NO: 182456 - DNA, 551 bp, Homo sapiens
actcccttatcctgcaagctgtaggtactttcagcaaatatgagactcaataagactaaggaagggcttgtttaaattagttcccctcacagttgattctaatcttgcaatgaacagatttaatgtactagtgagttaaattttaaagtaattataaagccatttactctatcataaatgaatgaaatgtaagaatcatacttaaaacacgtctttcattttaatgaatggtatctttcatttatatacaaaggaattcacttgccagcagcatttaaatataggaatagtctcgtcttttctctagtgccttttataaagcagtgccatttctaactaggtgtatttgtytcctagctattcagtaactacactataggtatctaatagattcaagaaaagattggaaaattgagaagatttagcattttaaacatttgaaaaatgttgctacaaagcatagattatgaatgcattagtaaaataaattgacaccttatgtgagaatcattaagttggtttaattatatcacagaagtatgggctcacta

SEQ ID NO: 182457 - DNA, 590 bp, Homo sapiens
ttcaatttaaaataatccttaaaaatctctaagcgaatttactttctctgaaacaaaaaccggtatacattttgcatacagaattgtttctcttgtatctagtagtcttaatcacacatatctagcaagatattaacacttagtaacccttattttaataaaaaacctaggaagcaagaaatctggaattgtcatatagcagtatcttacatatgagaataatttcataatttagaattatgtgttcctaaaacatattttttaagatggattttcgctcttgttgcccaggctggagtgcaatggtgtgatctcagctcactgcaatctccgccccccaggttcaagtaattctcctgcctcagcctcccgagtagctgggattacaggaacccaccatcacacctggctaattttttgtattttttagtagagatggggtttcaccatgttgatcaggctggtcttgagctcctgacctcgggtgagccacccgccttggcctcccaaagtgcagggattacaggcgtgagccacagtgcctgggctaaaacataarttttaaattggaaataacccagatatttaat

SEQ ID NO: 182458 - DNA, 309 bp, Homo sapiens
aagtctgaagagatttctattttttatttttattttatcaatactttttaaattatttgtatttataaaagaactcttttgtctgggcacagtggttcatgcctgtatgccagcactttgagaggctgaggcaagaggatcacttgagctcaggagtttgagaccagcctgggcaacakagtgagacccaatctctactaagaataagataaaaaattgccaggcatggtggtgcatgcctattgtcccagctactagagaggatgaggcaggaggattgcttgagcctgggaggttgagataacagtg

SEQ ID NO: 182459 - DNA, 309 bp, Homo sapiens
aagtctgaagagatttctattttttatttttattttatcaatactttttaaattatttgtatttataaaagaactcttttgtctgggcacagtggttcatgcctgtatgccagcactttgagaggctgaggcaagaggatcacttgagctcaggagtttgagaccagcctgggcaacatagtgagayccaatctctactaagaataagataaaaaattgccaggcatggtggtgcatgcctattgtcccagctactagagaggatgaggcaggaggattgcttgagcctgggaggttgagataacagtg

SEQ ID NO: 182460 - DNA, 501 bp, Homo sapiens
ttgtctgggcacagtggttcatgcctgtatgccagcactttgagaggctgaggcaagaggatcacttgagctcaggagtttgagaccagcctgggcaacatagtgagacccaatctctactaagaataagataaaaaattgccaggcatggtggtgcatgcctattgtcccagctactagagaggatgaggcaggaggattgcttgagcctgggaggttgagataacagtgagctatgatcccactactgcactccagtctggggaacagagtgagaccttagagtgagaacttgtctcaaaaagagaaaaaaataaagaattgtttcattcttttgtttttcttcagccaagtgaccttgaattagtaacaccacagacagtaagtcttatctcaacaccagtagacaaatcagcagattcaaagtaggcagggaaaaaaaaatrgataggcaaaagaactgagactttttcactttaaggtttttaaaaatagtaacta

SEQ ID NO: 182461 - DNA, 622 bp, Homo sapiens
agttatttcacaggtaggatgtttatcagtaatttgatttacccaataagctgccttgccttttttatttgtgcttccaaatcctccagttcatttaatttcactttttcccattcccacatacggctcactcaggagctgtgctatgcgcactcctggctgtgctttccagggaacagaactaaatatcacaatttgaatttcctcattgtaatctgaatcaatgactccagtgtgtatttgtaccccttttaaacttaaactagaccttcctaaaagtaatcccattgtccctgctcgcaacrgtccacagactcctgttgggaccttttgcgggggttccccaggcagaaggctcacagcttttgtgcagcatagatctactgcagcactatgggctgtggtggggaaagataacgtatgggggtgagggaatggcctgagatggaaatgccctggtttagaacagggcctgggatgggcccctcagggagttttccaaaatcgggttcccttctttatcaaacttagagtgacactgattagcccaaagttttccttttttacattttggacatatttcaggatcagcagttttgttttttcccctatctggtggcct

SEQ ID NO: 182462 - DNA, 622 bp, Homo sapiens
agttatttcacaggtaggatgtttatcagtaatttgatttacccaataagctgccttgccttttttatttgtgcttccaaatcctccagttcatttaatttcactttttcccattcccacatacggctcactcaggagctgtgctatgcgcactcctggctgtgctttccagggaacagaactaaatatcacaatttgaatttcctcattgtaatctgaatcaatgactccagtgtgtatttgtaccccttttaaacttaaactagaccttcctaaaagtaatcccattgtccctgctcgcaacggtccacagactcctgttgggaccttttgcgggggttccccaggcagaaggctcacagcttttgtgcagcatrgatctactgcagcactatgggctgtggtggggaaagataacgtatgggggtgagggaatggcctgagatggaaatgccctggtttagaacagggcctgggatgggcccctcagggagttttccaaaatcgggttcccttctttatcaaacttagagtgacactgattagcccaaagttttccttttttacattttggacatatttcaggatcagcagttttgttttttcccctatctggtggcct

SEQ ID NO: 182463 - DNA, 597 bp, Homo sapiens
ttcatctgcctactaagttttaaattgtaagaactgagcaggagttagacaagctagagtaaaagtgtcccagtcagtaggaatcatccgactggaaacagcaacattctttaacagtcccatttcaaaaggagaacctggtccatactgatttatagcttgtttaatttttttgagtaatttaaaaggaaaaggctcaaatgtagctataatatttccctgttgatctggggggtgtattcaaacagggaactgccaagcctctaaatcccacttttrtctagcttgctgtattcctgcctgaatagaactaagagcagtcgctcaaggcgctgctcgaacagtcaccagggcaactacttttcacccagtgtcctccagaaaagaaagatctggagggtcgttttcttcaaaatagtaatgagggtgtgcagaaggatagggatgaacctctccctccttttctgctttagctttaggtgacaaataaacctggtctgtaacctctactgttactttgttatactctccttcctcctcatcatcagtgtgaaaaagttccaaggtagaacgaaccacagcccacacttgtcctat

SEQ ID NO: 182464 - DNA, 597 bp, Homo sapiens
ttcatctgcctactaagttttaaattgtaagaactgagcaggagttagacaagctagagtaaaagtgtcccagtcagtaggaatcatccgactggaaacagcaacattctttaacagtcccatttcaaaaggagaacctggtccatactgatttatagcttgtttaatttttttgagtaatttaaaaggaaaaggctcaaatgtagctataatatttccctgttgatctggggggtgtattcaaacagggaactgccaagcctctaaatcccacttttgtctagcttgctgtattcctgcctgaatagaactaagagcagtcgctcaaggcgctgctcgaacagtcaccagggcaactacttttcacccagtgtcctccagaaaagaaagatctggagggtcgytttcttcaaaatagtaatgagggtgtgcagaaggatagggatgaacctctccctccttttctgctttagctttaggtgacaaataaacctggtctgtaacctctactgttactttgttatactctccttcctcctcatcatcagtgtgaaaaagttccaaggtagaacgaaccacagcccacacttgtcctat

SEQ ID NO: 182465 - DNA, 452 bp, Homo sapiens
ggccccttcagtctggccttcactgtccatgtttttgtcagcattcttgtcacagccatttaaccagtctctaagatggtccaaaaatgttctcatytgtctgtcttctttggagccctccaaactcttccaacctctacccattacccagttccgaagttgcttccacattttcaggtatctttatagcaatgctccagtcctcatttgccatttttggtaagatttattttgaaaaagaggtttaattggctcatggttctgcagagtggacaggaagcttagtgcttctgcttctggggggcctcagaaatctttcaatcattgtgcaaggtaatgaaagagtgaattgtctcatatggcaagaggaaatcacggagagtagggagtgatatagagttttcagtggccagatctcacgagaattcactcatgattgtgaggagagtacc

SEQ ID NO: 182466 - DNA, 526 bp, Homo sapiens
aggcatccaaataggaaatgaagtcaaattatctctcttcactgatgatatgattctacacctagaaatccctaaagactgtgccaaaaggctcctagaactgataaaaaaaacttcagcaaactttsaggattaaaaaaaatcaacatatagaaagaagtatcatttctgtacaccaaaaatgtttaaactgagaggtaaatcaagagtgcaatcctgtttacaacagcaacccccaaaataaaataaaagaaaagaagaatatgtctaagcaaggaggtaaaggatatctaaaaggagaactacgaaacactgccgaaagaaatcatagatgacaaagcaaatggaaaactattccatgctcatggattagaaagatcaatattgttaaaatggctatactgccaaaagcaatctacacattcaacactattcctatgaaacaaccaatgtcgtttttcacagaattagaaaaaaaatattctaaatttcatatggatttttaaagagcccagacaaccaaagg

SEQ ID NO: 182467 - DNA, 526 bp, Homo sapiens
aggcatccaaataggaaatgaagtcaaattatctctcttcactgatgatatgattctacacctagaaatccctaaagactgtgccaaaaggctcctagaactgataaaaaaaacttcagcaaactttgaggattaaaaaaaatcaacatatagaaagaagtatcatttctgtacaccaaaaatgtttaaactgagaggtaaatcaagagtgcaatcctgtttacaacagcaacccccaaaataaaataaaagaaaagaagaatatgtctaagcaaggaggtaaaggatatctaaaaggagaactacgaaacactgcmgaaagaaatcatagatgacaaagcaaatggaaaactattccatgctcatggattagaaagatcaatattgttaaaatggctatactgccaaaagcaatctacacattcaacactattcctatgaaacaaccaatgtcgtttttcacagaattagaaaaaaaatattctaaatttcatatggatttttaaagagcccagacaaccaaagg

SEQ ID NO: 182468 - DNA, 526 bp, Homo sapiens
aggcatccaaataggaaatgaagtcaaattatctctcttcactgatgatatgattctacacctagaaatccctaaagactgtgccaaaaggctcctagaactgataaaaaaaacttcagcaaactttgaggattaaaaaaaatcaacatatagaaagaagtatcatttctgtacaccaaaaatgtttaaactgagaggtaaatcaagagtgcaatcctgtttacaacagcaacccccaaaataaaataaaagaaaagaagaatatgtctaagcaaggaggtaaaggatatctaaaaggagaactacgaaacactgccgaaagaaatcatagatgacaaagcaaatgkaaaactattccatgctcatggattagaaagatcaatattgttaaaatggctatactgccaaaagcaatctacacattcaacactattcctatgaaacaaccaatgtcgtttttcacagaattagaaaaaaaatattctaaatttcatatggatttttaaagagcccagacaaccaaagg

SEQ ID NO: 182469 - DNA, 568 bp, Homo sapiens
atttaatttagtaacacttcaaatagtagtgattgtaatagcagagctagtttgtagcataaagaaaaaataataatattaggtgacacaaataatgctagccaccatttctaagtgtcatggtaagtacagtgattattttctttttttctgactcttttttattggattttttattttttttcccataggttattggggtacgstggtatttggttcgggtccatgaataacttctttactggttatttgtgagatttgggtgcacctatcacccgaacagtgtacactgcaccttatttgttatcttttatccctcgccccccaccctattaaataatagacaaaaaataatgggtttagaataaatgagttcaaatgaattgtcaaacgtatgtgggaaaagtggaatcagtttgtgagaaaaaggaaaaaaactcaacagaaatgctgataaagcatcatcccttcatggctagagctgccaggacactagaacaccaaaatcagctagggaaattttgtagaagtcccagatgtactagatgttctgtgaatacacagagat

SEQ ID NO: 182470 - DNA, 568 bp, Homo sapiens
atttaatttagtaacacttcaaatagtagtgattgtaatagcagagctagtttgtagcataaagaaaaaataataatattaggtgacacaaataatgctagccaccatttctaagtgtcatggtaagtacagtgattattttctttttttctgactcttttttattggattttttattttttttcccataggttattggggtacggtggtatttggttcgggtccatgaataacttctttactggttatttgtgagatttgggtgcacctatcacccgaacagtgtacactgcaccttatttgttatcttttatccctcrccccccaccctattaaataatagacaaaaaataatgggtttagaataaatgagttcaaatgaattgtcaaacgtatgtgggaaaagtggaatcagtttgtgagaaaaaggaaaaaaactcaacagaaatgctgataaagcatcatcccttcatggctagagctgccaggacactagaacaccaaaatcagctagggaaattttgtagaagtcccagatgtactagatgttctgtgaatacacagagat

SEQ ID NO: 182471 - DNA, 203 bp, Homo sapiens
cttctgtctggatatcttgagtttctggattgtaaaccttattarggcccatttttcctagaattggagcctctactttgttcttgctactttagttcacccagaaagcacgatctctgcctaaatttcaaagtgttggctagtttaaatatccttttgtgagacttttgtcttcctgcggggtgattttttcatcttacata

SEQ ID NO: 182472 - DNA, 582 bp, Homo sapiens
tgttttctgctagattctatggagtctctttttatgaatgtgaaatgtagcagccatcatatatctgaatgaagtttaagtgctgattttagatttttactctgtgacattctcctctgtgactttcagttgtgtgagatktcctcccatgtcattcaaatttcccagttcttcttttctgtcagcctggaactctgtactcttattcctcaagctagtaaaactcaccgctttactcttagacatctaattttgcacagactgggaagtgtcatcaggtgtgaagttacattgatgcaaatttaaatcattgcaattttctttattcaatggtcaaatacttcatcagtggttgaatattctactatttctgcctgttttctgtttctcattaccatcaaatgtgtatttaattttttttagagttaatagtttttttccctgcatttgagttagacctgagctactaccacattttgtaattcaaactttttgtctaacaatgttttaaaaaactctttatttggagggaattctcaaatttctaaatactctacaaacattaggatcagggctcacatt

SEQ ID NO: 182473 - DNA, 582 bp, Homo sapiens
tgttttctgctagattctatggagtctctttttatgaatgtgaaatgtagcagccatcatatatctgaatgaagtttaagtgctgattttagatttttactctgtgacattctcctctgtgactttcagttgtgtgagatgtcctcccatgtcattcaaatttcccarttcttcttttctgtcagcctggaactctgtactcttattcctcaagctagtaaaactcaccgctttactcttagacatctaattttgcacagactgggaagtgtcatcaggtgtgaagttacattgatgcaaatttaaatcattgcaattttctttattcaatggtcaaatacttcatcagtggttgaatattctactatttctgcctgttttctgtttctcattaccatcaaatgtgtatttaattttttttagagttaatagtttttttccctgcatttgagttagacctgagctactaccacattttgtaattcaaactttttgtctaacaatgttttaaaaaactctttatttggagggaattctcaaatttctaaatactctacaaacattaggatcagggctcacatt

SEQ ID NO: 182474 - DNA, 582 bp, Homo sapiens
tgttttctgctagattctatggagtctctttttatgaatgtgaaatgtagcagccatcatatatctgaatgaagtttaagtgctgattttagatttttactctgtgacattctcctctgtgactttcagttgtgtgagatgtcctcccatgtcattcaaatttcccagttcttcttttctgtcagcctggaactctgtactcttattcctcaagctagtaaaactcaccgctttactcttagacatctaattttgcacagactgggaagtgtcatcaggtgtgaagttacattgatgcaaatttaaatcattgcaattttctttattcaatggtcaaatacttcatcagtggttgaatattctactatttctgcctgttttctgtttctcattaccatcaaatgtgtatttaattttttttagagttaatagtttttttccctgcatttgagttagacctgagctactaccacattttgtaattcaaacttyttgtctaacaatgttttaaaaaactctttatttggagggaattctcaaatttctaaatactctacaaacattaggatcagggctcacatt

SEQ ID NO: 182475 - DNA, 298 bp, Homo sapiens
tatttgaaagtaagaaaagtgttaagaggaactgtagatatcattttagttgatgtaaggatggaaaataaataaccaactttcactggtgaactttgtcttcaatcattgttttcccgtgggtaagtggctaattttctggcctagaggtgaaattggtgtgttggtaagaattgatttaatgataacctgcttttgtctttttaaaaattgtkaatccaccattgtttctggtcctgttttatacttatgcagtgtataatctctcatgcaaaatttagttctttgtttctcagct

SEQ ID NO: 182476 - DNA, 617 bp, Homo sapiens
tctttcttctttttaatttaagcacctgcagctataagcttccctttagcaagggtttcagatctttcttctttttagtttaagcatctgcagctgtaagcttccctttagcatgggtttgagatctttcttctttttaatttaaggatctgtagctgtaagcttccctttagcatgggtttgagatctttcttctttttaatttaagcatctggagctgtaagcttccctttagyactgcctttgttgcctcctcctgagtttgggtatgtcatggtttcgttttcatttgcttaaacattttttgtcctattgtaatataattgtgttgtttttaataaaggtaattaatgaaacacataatgaattgtgcttctgtttttataacattttaagcattcttaactcagaaatgtaaattttagaaaaaaattccaggccaggcacagtggctcacacctgtaatcccagcacttgaggaggccgaggcaggaggatcatctgaggtcaggagttggagaccaccctggccaacatggtgaaaccctgtctttactaaaaatagaaaaaaaaatatataaaagttagctgggtgtcatggcgggtgcctgtaatcc

SEQ ID NO: 182477 - DNA, 412 bp, Homo sapiens
caatgtttggcagaagtcacttgcaatggtggggagtaacctctcatgaacgtataattagaaatctgtcaaccactctaggtaaattagcgaatgaactagctgaagccatagctaccaaacaaagatctttagactctttagccaggatagtcatggatgacggaataactttaggctgcatagtggtgaaacacggagaaattcatatggcagctagctaacacattatgttgtgtttagatccatgcatcttctgaagttgaaacaaatgtaaaaaaataagacaatatgagaattaattatgacaaatcctagggaagaggctgaaagagctgtaacacaaacagggytgagtcatgccccttgcttgccacattgtgggcaaagagaaggaaacaagagctgtgac

SEQ ID NO: 182478 - DNA, 401 bp, Homo sapiens
acttgatgagtcttgcagtctacagagggggtrgggaatggcaggagttggcataggagtgagaggggaggaggcaaggtgaggggggccaggtgaggagggtggcacttgaaggggagttcaagactagcctgggcaacatggtgagaccactgcccctcaccaccgccatttttgttctcactctggtctcacacacatgcacaaattaaatttaatttaaaaattaaaaaattgttttaaaataagtgaagtatttacatggattatgtatacattcattttgtagaactatagatcccatgtaactgggaactctttactcttctaacacaacatttatttagccacaaataaaagaagaccagtgatgtagcctgtacacaaaaaagtaagaaaac

SEQ ID NO: 182479 - DNA, 432 bp, Homo sapiens
acttgatgagtcttgcagtctacagagggggtagggaatggcaggagttggcataggagtgagaggggaggaggcaaggtgaggggggccaggtgaggagggtggcacttgaaggggagttcaagactagcctgggcaacatggtgagaccactgcccctcaccaccgccatttttgttctcactctggtctcacacacatgcacaaattaaatttaatttaaaaattaaaaarttgttttaaaataagtgaagtatttacatggattatgtatacattcattttgtagaactatagatcccatgtaactgggaactctttactcttctaacacaacatttatttagccacaaataaaagaagaccagtgatgtagcctgtacacaaaaaagtaagaaaacactggttaggctggggcaggggtggggggaa

SEQ ID NO: 182480 - DNA, 401 bp, Homo sapiens
acttgatgagtcttgcagtctacagagggggtagggaatggcaggagttggcataggagtgagaggggaggaggcaaggtgaggggggccaggtgaggagggtggcacttgaaggggagttcaagactagcctgggcaacatggtgagaccactgcccctcaccaccgccatttttgttctcactctggtctcacacacatgcacaaattaaatttaatttaaaaattaaaaaattgttttaaaataagtgaagkatttacatggattatgtatacattcattttgtagaactatagatcccatgtaactgggaactctttactcttctaacacaacatttatttagccacaaataaaagaagaccagtgatgtagcctgtacacaaaaaagtaagaaaac

SEQ ID NO: 182481 - DNA, 436 bp, Homo sapiens
tttatttagccacaaataaaagaagaccagtgatgtagcctgtacacaaaaaagtaagaaaacactggttaggctggggcaggggtggggggaagagatctacaaaattaaaattttattgggaagsatcactaattagaatcagaacaattactgctttaaagtagttaagaacagagcacaaggaacccagagaagaagcagatatgattcagagcagagctcacagagcagatggtatctgagctgagactgatagaataacattaataaggacattcacagccatttattatcacttaactgcaatgcattttgtataagttatttctactcttcatatcaaccatggaaaataatacttattcttttcttttgaagttaaggaagtggtaagtggtctaagaagataaattaacatactaacaccaaatag

SEQ ID NO: 182482 - DNA, 436 bp, Homo sapiens
tttatttagccacaaataaaagaagaccagtgatgtagcctgtacacaaaaaagtaagaaaacactggttaggctggggcaggggtggggggaagagatctacaaaattaaaattttattgggaagcatcactaattagaatcagaacaattactgctttaaagtagttaagaacagagcacaaggaacccagagaagaagcagatatgattcagagcagagctcacagagcagatggtatctgagctgagactgatagaataacattaataaggrcattcacagccatttattatcacttaactgcaatgcattttgtataagttatttctactcttcatatcaaccatggaaaataatacttattcttttcttttgaagttaaggaagtggtaagtggtctaagaagataaattaacatactaacaccaaatag

SEQ ID NO: 182483 - DNA, 504 bp, Homo sapiens
ataaccctctccccatctggatattacaaactgtatcacagaggggtgtaaaccccctgggatgtggaaagtagtatcatcctctcccctactggatattacaaacaatatcacagatggtgtacacatgaggtgtttacgatattgggagtaatatcatatcycccagtggatattatgaacaatatcacagaggggtgtatacacactctgccttatagggagtaatatactcctctcccaccctggatattacgtcacagggaggtgtacatcccctgtgatacagggagtaatatcatccttttccagcctggatattacaaacaatatggcagggggcagtacaccctggcgatatgggtagtaacatcatctcctccccgcgtggatattatgaacaatattctagggggttgtacacaccctgcaatatggggagtaacatcgtcctctcccccactagatattataaacaatatcgcaaggggggtgtacacttcc

SEQ ID NO: 182484 - DNA, 504 bp, Homo sapiens
ataaccctctccccatctggatattacaaactgtatcacagaggggtgtaaaccccctgggatgtggaaagtagtatcatcctctcccctactggatattacaaacaatatcacagatggtgtacacatgaggtgtttacgatattgggagtaatatcatatctcccagtggatattatgaacaatatcacagaggggtgtatacacactctgccttatagggagtaatatactcctctcccaccctggatattacrtcacagggaggtgtacatcccctgtgatacagggagtaatatcatccttttccagcctggatattacaaacaatatggcagggggcagtacaccctggcgatatgggtagtaacatcatctcctccccgcgtggatattatgaacaatattctagggggttgtacacaccctgcaatatggggagtaacatcgtcctctcccccactagatattataaacaatatcgcaaggggggtgtacacttcc

SEQ ID NO: 182485 - DNA, 502 bp, Homo sapiens
atcttaacacaaattgcctactaccttttcaaaaagcaagttaagcctgattctaattgtgggatgaaaagttttttccctaggaagaaattttaaatatcatcaagcatgttgagaggtgctagcgagggcatggagcaaggaatcaaattccataggtgattgttttctctmtctttgtataaaaatgtccttgccccaattaaagcctccaccaagtataaaaagaaagcgtttggtgatattagcaagcaacagtttcccaaatctaccttgcccacctctttggcctaaactctgcaggtaatttattctaaaaagagaagtgtcctttgggtaacagatgtatcacttcctactctcttaaaccaaactccgatgctgcatcttagataaaagccctcaaatctggcctcctgaagtcatgctgtcatttaacttggctgcagacccctgatactcccctgcagggagagagtctgctctttgccccagcctttac

SEQ ID NO: 182486 - DNA, 581 bp, Homo sapiens
aacactgctcaccacagtatagctccagaggccctagcagtcctgctcccacggatcccacttctgacaccatctattaaaagaaaatcttcagctgaattaaatttaaaggagcttaattgagcaatgaaggattcacgaatcaggcagcccccagaatcacagcagattcagwgagactccagcacagacacatggtggaagatttatagacaataaagggaacatgatgtacaaaaatctgaagtgaggagtgaggtctagaagcaactgggtccattacagttctcagcagtgaggtccagaaacaactggactggttacagtgctcagcatttgccttatttgaacacagctgaacactcagcagtgtgtgagtggcagaagtttggctgttgggattggccaggactcagctactgttttaggcacatactcctaagttaggttttcagtctttctacctattaagttaggttgcagtttgtccacagggactcaaatctagaagtacagagtccttcccaggccatatttagttcactgtaacagttcctattatgacctcactgatagttctt

SEQ ID NO: 182487 - DNA, 429 bp, Homo sapiens
ccagtctcttacttgtttactcaactaattttcctttccttctccctcaacattatgcagcaaaacagagtacacttctctttcccagtaaaccaggttggtactccactctgaatacttgtattattggatttcttagaaaaaaatatttgggatcataatttaaatgccatcaaacaatgaacaaaaacatgctacttcgtttcccttctcttctcttgttaccagacaatagctagttttcttttctctccaaycccttttttctgtgcttctacctgatttttgaaaaaacttctacacatttccaatcttagtatagcagacatcatatatgtggtcaaactacatacgtaggaagaatagaattatataattatattcaagcattttaaaataattacccttcagtttgttttgcagttattt

SEQ ID NO: 182488 - DNA, 429 bp, Homo sapiens
ccagtctcttacttgtttactcaactaattttcctttccttctccctcaacattatgcagcaaaacagagtacacttctctttcccagtaaaccaggttggtactccactctgaatacttgtattattggatttcttagaaaaaaatatttgggatcataatttaaatgccatcaaacaatgaacaaaaacatgctacttcgtttcccttctcttctcttgttaccagacaatagctagttttcttttctctccaatcccttttttctgtgcttctacctgatttttgaaaaaacttctacacatttccaatcttagtatagcagacatcawatatgtggtcaaactacatacgtaggaagaatagaattatataattatattcaagcattttaaaataattacccttcagtttgttttgcagttattt

SEQ ID NO: 182489 - DNA, 429 bp, Homo sapiens
ccagtctcttacttgtttactcaactaattttcctttccttctccctcaacattatgcagcaaaacagagtacacttctctttcccagtaaaccaggttggtactccactctgaatacttgtattattggatttcttagaaaaaaatatttgggatcataatttaaatgccatcaaacaatgaacaaaaacatgctacttcgtttcccttctcttctcttgttaccagacaatagctagttttcttttctctccaatcccttttttctgtgcttctacctgatttttgaaaaaacttctacacatttccaatcttagtatagcagacatcatatatgtggtcaaactacatacgtaggaagaatagaattatataattatattcaagcattttaaaataattmcccttcagtttgttttgcagttattt

SEQ ID NO: 182490 - DNA, 526 bp, Homo sapiens
catgcactttatttttcacctcacttattttaaaaagaacccaaagaatggatcctataaataaacttcagttgcatccacaggatggaataatatgtgaccattgaaggtggcaatagatacagaagtatattgatgtgcgaagatgtattttgttatagctagtgagaaaaaaatcaattaagttatacatacaaacatactatggtcttgttttatcaaaaaatatgtacaaaatataaaatttgtaatttctgagcatttgtattttaagtaaagttcttttcctttttcttatctgtgattgctgcagtgagcatgtacaaaacttctagtaaagtttattaataaakaaataatccttgggaagacaggaatatgaatcttacaatattaaaaataatttctcactttctattttttatcattattgagtgtattgttatcttctttgaacttttagcctcttcagaagtaaaaagggaatatttttatctgtttccagattttattatctatatatttt

SEQ ID NO: 182491 - DNA, 550 bp, Homo sapiens
cttcatgtttacctgccctgcctgcacaagctgagagatttaaaataggaatattgggacttawtctccttgaaactttgtcacccaactttcaaacaaaagcatttttgaagttagaaaatagtagaagataagctttaactgcccactcaaaagtttatcagtcttaaatactaatattaatcatgggaatgtcttatttccatatattctgtaagcataaatattgaataaaatgagccatatgtattcatttgaatcatgagtttcctttgtcttcaatttgtttgaaaatcaaggaattaatttgtttgaaaaatgcattattattatttcagtgttctatccccatagtacctttaagcaggcggacaagccagcagcctcacccactcaaggaagcccagatggccaggttccaacagcatgagtagctgccacctgatggctgatggagcagagtcctgaggaaaagcagatggcactggggccctaactctagggcagaataactgatgtactgtgactggcagcatgtgaggttggtgat

SEQ ID NO: 182492 - DNA, 413 bp, Homo sapiens
tgaaactttgtcacccaactttcaaacaaaagcatttttgaagttagaaaatagtagaagataagctttaactgcccactcaaaagtttatcagtcttaaatactaatattaatcatgggaatgtcttatttccatatattctgtaagcataaatattgaataaaatgagccatatgtattcatttgaatcatgagtttcctttgtcttcaatttgtttgaaaatcaaggaattaatttgtttgaaaaatgcattattattatttcagtgttctatccccatagtacctttaagcaggcggacaagccagcarcctcacccactcaaggaagcccagatggccaggttccaacagcatgagtagctgccacctgatggctgatggagcagagtcctgaggaaaagcagatggc

SEQ ID NO: 182493 - DNA, 172 bp, Homo sapiens
tgaatatatttttaagtgataagacttgaaagttgaaattattctttgatccaagggcaccagaatgaatgttgggttagtaggcatgaaaacaatattcagctctttatacatctctgtaaaagcccttgagtaccagsggcattgtcattgagcagtaatactttgaaag

SEQ ID NO: 182494 - DNA, 172 bp, Homo sapiens
tgaatatatttttaagtgataagacttgaaagttgaaattattctttgatccaagggcaccagaatgaatgttgggttagtaggcatgaaaacaatattcagctctttatacatctctgtaaaagcccttgagtaccagcggcattgtcaktgagcagtaatactttgaaag

SEQ ID NO: 182495 - DNA, 429 bp, Homo sapiens
gagatgacttttttccttaaacctcaagaaacaagctcttctagcttcagacttttcttctgcagctgcctcacctctctaagtcttcatagaattgaagggagrccgggtgcggtggctgtcacacctgtaatcctagcactttgggaggccgaggcgggcagatcacctgaggtcgggagttcgacaccagtctgaccaacgtggagaaaccccgtctctactaaaaatacaaaaaattagccaggcgtggtggtgcatgcctgtaatcccagctactcgggatgctgaggcaggagaatggcttgaacttgggaggcagaggttgcgatgagccaagatcacgccattgtactccagcttgggcaagaagaatgaaactctgtctcaaaaacaaagaaaaaaagtaaaaagagagttaggcttagg

SEQ ID NO: 182496 - DNA, 429 bp, Homo sapiens
gagatgacttttttccttaaacctcaagaaacaagctcttctagcttcagacttttcttctgcagctgcctcacctctctaagtcttcatagaattgaagggagaccgggtgcggtggctgtcacacctgtaatcctagcactttgggaggccgaggcgggcagatcacctgaggtcrggagttcgacaccagtctgaccaacgtggagaaaccccgtctctactaaaaatacaaaaaattagccaggcgtggtggtgcatgcctgtaatcccagctactcgggatgctgaggcaggagaatggcttgaacttgggaggcagaggttgcgatgagccaagatcacgccattgtactccagcttgggcaagaagaatgaaactctgtctcaaaaacaaagaaaaaaagtaaaaagagagttaggcttagg

SEQ ID NO: 182497 - DNA, 429 bp, Homo sapiens
gagatgacttttttccttaaacctcaagaaacaagctcttctagcttcagacttttcttctgcagctgcctcacctctctaagtcttcatagaattgaagggagaccgggtgcggtggctgtcacacctgtaatcctagcactttgggaggccgaggcgggcagatcacctgaggtcgggagttcgacaccagtctgaccaacgtggagaaaccccgtctctactaaaaatacaaaaaattagccaggcrtggtggtgcatgcctgtaatcccagctactcgggatgctgaggcaggagaatggcttgaacttgggaggcagaggttgcgatgagccaagatcacgccattgtactccagcttgggcaagaagaatgaaactctgtctcaaaaacaaagaaaaaaagtaaaaagagagttaggcttagg

SEQ ID NO: 182498 - DNA, 334 bp, Homo sapiens
ataagtttcttgaatttttatttttctgaggaaggccttaattctccttcacttttgaagggtggtttcagtgggtacagaaacttaggttggtgggtttttttctgtcaacaktttgaatttttcatttcactgtcttcttgctttcacagtttctgcattgttgaatgcagttcttatctttgtgtctctgtaggtaaggtgttttctgccccacctctggtttctttcagagttttcctttatcttttatttcatatagtttgaaaattatatgtccaagtgtaggttgttggcatttattctgcctggtgttctcggagcttcctggatc

SEQ ID NO: 182499 - DNA, 546 bp, Homo sapiens
gcaggggccacaggagtgggattartagcccctattgaaggcaccatagagagctctctcatcccttctgtcatgtgaggacgtgggagaaacatggctgtctatgaaccacaaagcaagcccacaccagacatggaatctgctaaccacttgaccttgaattttgccatctccaaaactgaaagaaacaaattggtttataagcttcctcatctatggcattctgttttgaccccagattagctaaaaacaccaaaatatcaacttgtacaccaaattttggaaatggatgctaaaactttgatggcaaaaggtgactgatctgcctgagaaacgaagctacatgatccctcttttcacaaagctggagggagagtcaacacaagcaaaaataggtcaaattcttctaaaagccatacctgaagggttttcaatatcacttgatcagatcgtaatttaatcacacaaagagccataactaaacacacaactatcagaggttttcaatgtcaccttaaaaacatcatctacaatattagggagtga

SEQ ID NO: 182500 - DNA, 433 bp, Homo sapiens
gtgttctggaatcctatgtgaggtacaaacattcagaccctcatagcagtgttctggaatactatgtgagggacaaccattcagaccatggcagttctgaaatgctatgtgaaggacaaacattcagaccctcgtagcagtgttctggaatcctatgtgaaggacagacatttagaccctcgaagcagtgttctgcagtcttaagtgaggaacaaaaattcagaccctcgtaacagtgttctggaatccttttttgagggacagacattgagaccccagcagcagtggtctggaatccyatgtgagggacaaacattcacaccccagcaacagtgttctgtaatcgtatgtgagggacaagcattcagaccccagcagcagtgttctggaatcttatgtgagggacaaacattgagaccctcatagcagtgtt

SEQ ID NO: 182501 - DNA, 463 bp, Homo sapiens
gaattctatgtgactgacaaacattcagactccagcagcagtgttctgtaatcctatgtaagtgacaaacattcagaccccaagagcagtgttctgaaatcctwtgttaagggaaacattgagaccccagcatgaatgttctggaatcctatgtgagggacaaacattcagaccacggcaggagtattctggaatcctatgtgaggaacaaacattcagaccacagcaggagtgttctggaatcctatatgagggataagcattcagaccctcgtagcagtgttctggaatcctatgtgagggagaagcattcagagcacagcaggagtgccctgaaatcctatgttagggacaaacattcagaacctcgtaacattgttcaggaaacctatgtgagggacagacatttagaccctcgcagcagtgttctggaatcccatgtgagggtcaaacattcagatcc

SEQ ID NO: 182502 - DNA, 201 bp, Homo sapiens
tataactatttaaagtcatttccacagttaattgcttaatgrtgatgcagtttctaaaaacttcacaagcatgcaaaattttagaatagaagattcatgaaagaatgaaaaggaccatgaaaaacactcgggaacacaggtttctaataactttaatatcatgggtaaaaattccccataagttccccgatcccccaataa

SEQ ID NO: 182503 - DNA, 201 bp, Homo sapiens
tataactatttaaagtcatttccacagttaattgcttaatgatgatgcagtttctaaaaacttcacaagcatgcaaaattttagaatagaagattcatgaaagaatgaaaaggaccatgaaaaacactygggaacacaggtttctaataactttaatatcatgggtaaaaattccccataagttccccgatcccccaataa

SEQ ID NO: 182504 - DNA, 201 bp, Homo sapiens
tataactatttaaagtcatttccacagttaattgcttaatgatgatgcagtttctaaaaacttcacaagcatgcaaaattttagaatagaagattcatgaaagaatgaaaaggaccatgaaaaacactcgkgaacacaggtttctaataactttaatatcatgggtaaaaattccccataagttccccgatcccccaataa

SEQ ID NO: 182505 - DNA, 388 bp, Homo sapiens
tatttggagagtatttcaatcttttcaagtatgacaggtcactcctgcaccccagaccacactttcaggccccttcaaataaggaatatttcctaggtccttgcctgttcttctcagctgaattcacctcaaccttctgaaagttcttccaaaccttccactatcacctagtctttgcaaatcttgtgcattctagggagtagaattaatatttcctgagcgaggaaaactgggatcttcacctgcgaccttttatcctcctctgaagcaccagtgagargttagaccagagggctgttctttcaagtgcgcttcttattcatagggaaccctccctttcaaactttataacacacagtgaagactgaagtactcttaaggctgaaga

SEQ ID NO: 182506 - DNA, 465 bp, Homo sapiens
caaagaaacaaaactcttattcgtggattctgttatttgaaaacatttactgatcatttaccttacascaagtgatctccagctcgtggaaaaatatgtaaagttgcccagctgcattaagcttaaactcttctgaaggagaaaagaagcaatggagtagggacattaaagcaggagtgtggtgatatggctgagacttctacttgcacactgtggtagctgtgtggagaatggattaaaaaagggcaatgacagaagcttaaattagtatcaaatatggcaatcctgtaaatttaggtgtccttgaaataagaaaaatgtataatagttctcattatttccccaagaaatctctgcacttggccttgtgagggaagcgctatagttaccaagtggtgggggtgggaaggtgaatttgaaacaacatttggaattactacactttaaaggtaaagctgacaggaa

SEQ ID NO: 182507 - DNA, 495 bp, Homo sapiens
cttgatttttaaaagtcaatgtactctcaaagaaacaaaactcttattcgtggattctgttatttgaaaacatttactgatcatttaccttacagcaagtgatctccagctcgtggaaaaatatgtaaagktgcccagctgcattaagcttaaactcttctgaaggagaaaagaagcaatggagtagggacattaaagcaggagtgtggtgatatggctgagacttctacttgcacactgtggtagctgtgtggagaatggattaaaaaagggcaatgacagaagcttaaattagtatcaaatatggcaatcctgtaaatttaggtgtccttgaaataagaaaaatgtataatagttctcattatttccccaagaaatctctgcacttggccttgtgagggaagcgctatagttaccaagtggtgggggtgggaaggtgaatttgaaacaacatttggaattactacactttaaaggtaaagctgacaggaattc

SEQ ID NO: 182508 - DNA, 465 bp, Homo sapiens
caaagaaacaaaactcttattcgtggattctgttatttgaaaacatttactgatcatttaccttacagcaagtgatctccagctcgtggaaaaatatgtaaagttgcccagctgcattaagcttaaactmttctgaaggagaaaagaagcaatggagtagggacattaaagcaggagtgtggtgatatggctgagacttctacttgcacactgtggtagctgtgtggagaatggattaaaaaagggcaatgacagaagcttaaattagtatcaaatatggcaatcctgtaaatttaggtgtccttgaaataagaaaaatgtataatagttctcattatttccccaagaaatctctgcacttggccttgtgagggaagcgctatagttaccaagtggtgggggtgggaaggtgaatttgaaacaacatttggaattactacactttaaaggtaaagctgacaggaa

SEQ ID NO: 182509 - DNA, 467 bp, Homo sapiens
caaagaaacaaaactcttattcgtggattctgttatttgaaaacatttactgatcatttaccttacagcaagtgatctccagctcgtggaaaaatatgtaaagttgcccagctgcattaagcttaaactcttctgaaggagaaaagaarcaatggagtagggacattaaagcaggagtgtggtgatatggctgagacttctacttgcacactgtggtagctgtgtggagaatggattaaaaaagggcaatgacagaagcttaaattagtatcaaatatggcaatcctgtaaatttaggtgtccttgaaataagaaaaatgtataatagttctcattatttccccaagaaatctctgcacttggccttgtgagggaagcgctatagttaccaagtggtgggggtgggaaggtgaatttgaaacaacatttggaattactacactttaaaggtaaagctgacaggaatt

SEQ ID NO: 182510 - DNA, 495 bp, Homo sapiens
cttgatttttaaaagtcaatgtactctcaaagaaacaaaactcttattcgtggattctgttatttgaaaacatttactgatcatttaccttacagcaagtgatctccagctcgtggaaaaatatgtaaagttgcccagctgcattaagcttaaactcttctgaaggagaaaagaagcaatggartagggacattaaagcaggagtgtggtgatatggctgagacttctacttgcacactgtggtagctgtgtggagaatggattaaaaaagggcaatgacagaagcttaaattagtatcaaatatggcaatcctgtaaatttaggtgtccttgaaataagaaaaatgtataatagttctcattatttccccaagaaatctctgcacttggccttgtgagggaagcgctatagttaccaagtggtgggggtgggaaggtgaatttgaaacaacatttggaattactacactttaaaggtaaagctgacaggaattc

SEQ ID NO: 182511 - DNA, 588 bp, Homo sapiens
tctaactcctaacctcgtgatctgccctcctaggcatcccaaagtgctgggattacaggcgtgagccaccgcgcccagccctcaagtctattttttatagatgcattcgaaagcatgaaaaaaatcatgtctctattttactttaaattttaaaaacacaactaatgaatatggtaattctcttccaatytgttatcttttctctcacgaaactaatttgtgagctttcaatttacacagttagaaaaaaatgctctagtgtatatactaggataaaataacagggtcataagacaagtgcactccataatctttgtgacaacttacacttccagtgtctgatgaacatttgcccataaactcccacgtttcatccatccatccatcaatcaaatctacctatctttatttatttattgggcgaaatacctgaactttgcctttccttccctgatttctgccacaaactaggcaaggagttctgcctaggggtttttcagagctccggctaccaccgaggttcctaacagggaaattgccagcttgaatgcttggggttgatgtgggagtgcgtgtgaaacgggtgtg

SEQ ID NO: 182512 - DNA, 588 bp, Homo sapiens
tctaactcctaacctcgtgatctgccctcctaggcatcccaaagtgctgggattacaggcgtgagccaccgcgcccagccctcaagtctattttttatagatgcattcgaaagcatgaaaaaaatcatgtctctattttactttaaattttaaaaacacaactaatgaatatggtaattctcttccaatttgttatcttttctctcacgaaactaatttgtgagctttcaatttacacagttagaaaaaaatgctctagtgtatatactaggataaaataacagggtcataagacaagtgcactccataatctttgtgacaacttacacttccagtgtctgatgaacatttgcccataaactcccacgtttcatccatmcatccatcaatcaaatctacctatctttatttatttattgggcgaaatacctgaactttgcctttccttccctgatttctgccacaaactaggcaaggagttctgcctaggggtttttcagagctccggctaccaccgaggttcctaacagggaaattgccagcttgaatgcttggggttgatgtgggagtgcgtgtgaaacgggtgtg

SEQ ID NO: 182513 - DNA, 588 bp, Homo sapiens
tctaactcctaacctcgtgatctgccctcctaggcatcccaaagtgctgggattacaggcgtgagccaccgcgcccagccctcaagtctattttttatagatgcattcgaaagcatgaaaaaaatcatgtctctattttactttaaattttaaaaacacaactaatgaatatggtaattctcttccaatttgttatcttttctctcacgaaactaatttgtgagctttcaatttacacagttagaaaaaaatgctctagtgtatatactaggataaaataacagggtcataagacaagtgcactccataatctttgtgacaacttacacttccagtgtctgatgaacatttgcccataaactcccacgtttcatccatccatccatcaatcaaatctacctatctttatttatttattgkgcgaaatacctgaactttgcctttccttccctgatttctgccacaaactaggcaaggagttctgcctaggggtttttcagagctccggctaccaccgaggttcctaacagggaaattgccagcttgaatgcttggggttgatgtgggagtgcgtgtgaaacgggtgtg

SEQ ID NO: 182514 - DNA, 495 bp, Homo sapiens
cttgatttttaaaagtcaatgtactctcaaagaaacaaaactcttattcgtggattctgttatttgaaaacatttactgatcatttaccttacagcaagtgatctccagctcgtggaaaaatatgtaaagttgcccagctgcattaagcttaaactcttctgaaggagaaaagaagcaatggagtagggacattaaagcaggagtgtggtgatatggctgagacttctacttgcacactgtggtagctgtgtggagaatggattaaaaaagggcaatgacagaagcttaarttagtatcaaatatggcaatcctgtaaatttaggtgtccttgaaataagaaaaatgtataatagttctcattatttccccaagaaatctctgcacttggccttgtgagggaagcgctatagttaccaagtggtgggggtgggaaggtgaatttgaaacaacatttggaattactacactttaaaggtaaagctgacaggaattc

SEQ ID NO: 182515 - DNA, 495 bp, Homo sapiens
cttgatttttaaaagtcaatgtactctcaaagaaacaaaactcttattcgtggattctgttatttgaaaacatttactgatcatttaccttacagcaagtgatctccagctcgtggaaaaatatgtaaagttgcccagctgcattaagcttaaactcttctgaaggagaaaagaagcaatggagtagggacattaaagcaggagtgtggtgatatggctgagacttctacttgcacactgtggtagctgtgtggagaatggattaaaaaagggcaatgacagaagcttaaattagtatcaaatatggcaatcctgtaaatttaggtrtccttgaaataagaaaaatgtataatagttctcattatttccccaagaaatctctgcacttggccttgtgagggaagcgctatagttaccaagtggtgggggtgggaaggtgaatttgaaacaacatttggaattactacactttaaaggtaaagctgacaggaattc

SEQ ID NO: 182516 - DNA, 465 bp, Homo sapiens
caaagaaacaaaactcttattcgtggattctgttatttgaaaacatttactgatcatttaccttacagcaagtgatctccagctcgtggaaaaatatgtaaagttgcccagctgcattaagcttaaactcttctgaaggagaaaagaagcaatggagtagggacattaaagcaggagtgtggtgatatggctgagacttctacttgcacactgtggtagctgtgtggagaatggattaaaaaagggcaatgacagaagcttaaattagtatcaaatatggcaatcctgtaaatttaggtgtccttgaaataagaaaaatgtataakagttctcattatttccccaagaaatctctgcacttggccttgtgagggaagcgctatagttaccaagtggtgggggtgggaaggtgaatttgaaacaacatttggaattactacactttaaaggtaaagctgacaggaa

SEQ ID NO: 182517 - DNA, 493 bp, Homo sapiens
  misc_feature (1)...(493): n = A,T,C or G
ngaattctcttgagcaatctattttcttgatttttaaaagtcaatgtactctcaaagaaacaaaactcttattcgtggattctgttatttgaaaacatttactgatcatttaccttacagcaagtgatctccagctcgtggaaaaatatgtaaagttgcccagctgcattaagcttaaactcttctgaaggagaaaagaagcaatggagtagggacattaaagcaggagtgtggtgatatggctgagacttctacttgcacactgtggtagctgtgtggagaatggattaaaaaagggcaatgacagaagcttaaattagtatcaaatatggcaatcctgtaaatttaggtgtccttgaaataagaaaaatgtataatagttctcattatttccccaagaaatctctgcayttggccttgtgagggaagcgctatagttaccaagtggtgggggtgggaaggtgaatttgaaacaacatttggaattactaca

SEQ ID NO: 182518 - DNA, 479 bp, Homo sapiens
caatctattttcttgatttttaaaagtcaatgtactctcaaagaaacaaaactcttattcgtggattctgttatttgaaaacatttactgatcatttaccttacagcaagtgatctccagctcgtggaaaaatatgtaaagttgcccagctgcattaagcttaaactcttctgaaggagaaaagaagcaatggagtagggacattaaagcaggagtgtggtgatatggctgagacttctacttgcacactgtggtagctgtgtggagaatggattaaaaaagggcaatgacagaagcttaaattagtatcaaatatggcaatcctgtaaatttaggtgtccttgaaataagaaaaatgtataatagttctcattatttccccaagaaatctctgcacttggccttgtgagggaagcgctatagttaccaagtggtgggggtggraaggtgaatttgaaacaacatttggaattactaca

SEQ ID NO: 182519 - DNA, 522 bp, Homo sapiens
tgtgtgtgtgtgtgtgtgtgtgtgtgtgtctgtctgtgtgtgtttgtgtgtgtgtgaagcagggagaaagagcaagagtgaaagtgagcawgagagagaggagagagagggagagaatcagacagatacagaaagagattgacagagctacagagacagaattgaaaggggacaccaagaatattgagctgagaaactataaaatgggagttgccattaaacagaatggggaagagcaaatttggggagtttcagtggctcaatatagacatattaattttgagattcctaactgacatccacgtggataagtcagggagtgttgggtgtagtgtccagtgtttaggtgtaatatgaaatatcaggaaattaatgacacaaacattagtaagaaagcaaagataagaagtcgaagtcctgagcctaatggtcctctaacatttaaaaaatagaaaagatgaaacctgcaataaaggactaggggtaattatcaaaaacatggtggggggaaagtaggttaag

SEQ ID NO: 182520 - DNA, 572 bp, Homo sapiens
agcaggcttaacccactgtggttgaaacgtcttacttttgcacattttacaaaaacatataaccatgtgaaccccttgctagggcaactctcaraacctgggaagggcccatgcaagtacaaggatctgaagcttgagcttcatcaacttcacagtgaatttgcctctgagagtgagacagggatccagagtaacatcaaggttcaggagacttgggggatggctcattgatttacttattgatacccctatctagttccaaaacagattcaagatggctggatgcatgctgatactattatccaaagaacaggcaagggccaagtgtcactgtaagattagagagctctctccctgattcatggaggaaacaagcattgttcatatatctgtgttaactgttgtcaagaaagaatcttcactaataatcttgtcagcctcaacatcccagagccattttcaaaagcacactggttcttccttcagtgggccgtcatagagagccttctggtcttcaggctgtgatgcttctgcaggacgtcactctgaagaaaggcgaaatgtgtctggca

SEQ ID NO: 182521 - DNA, 472 bp, Homo sapiens
tcattgcttctgaacccatagtttctctatacccactacctgcttcttctcccccttccctttccccagtacctccccaagaccagtcattacaaagtcacttcattttccagatatcatcatgtatatttagtaagtagtatccacagtgaaatcttacttcaattcttctagtcctaagctgacatgaaagtgcccaattyctggagattagaaaaaaagggtatctggtgttaagaaaacaaaatttggggattttgctttattttgaaagtgggtattgctgccacctaaaatgtataattagcagaagcagagacttggcacatctcttctgaaagcctgccagccgctcctttgtactttattaagatataagatataaacttgtctgccataaaattacacagcccatcacatttttgacaggaatttttggttcttccttttcaaaaatttgtgtaaagaattc

SEQ ID NO: 182522 - DNA, 456 bp, Homo sapiens
gaattccccaactctgctcttgtttccatgacatctttactcattgcttctgaacccatagtttctctatacccactacctgcttcttctcccccttccctttccccagtacctccccaagaccagtcattacaaagtcacttcattttccagatatcatcatgtatatttagtaagtagtatccacagtgaaatcttacttcaattcttctagtcctaagctgacatgaaagtgcccaatttctggagattagaaaaaaagggtatctggtgttaagaaaacaaaatttggggattttgctttattttgaaagtgggtattgctgccacctaaaatgtrtaattagcagaagcagagacttggcacatctcttctgaaagcctgccagccgctcctttgtactttattaagatataagatataaacttgtctgccataaaattacacagcccatc

SEQ ID NO: 182523 - DNA, 472 bp, Homo sapiens
tcattgcttctgaacccatagtttctctatacccactacctgcttcttctcccccttccctttccccagtacctccccaagaccagtcattacaaagtcacttcattttccagatatcatcatgtatatttagtaagtagtatccacagtgaaatcttacttcaattcttctagtcctaagctgacatgaaagtgcccaatttctggagattagaaaaaaagggtatctggtgttaagaaaacaaaatttggggattttgctttattttgaaagtgggtattgctgccacctaaaatgtataattagcagaagcagagacttggcacatctcttctgaaagcctgccagccgctcctttgtactttattaagatataagatataaacttgtctgccataaaattacacagcccatcacatttttgacargaatttttggttcttccttttcaaaaatttgtgtaaagaattc

SEQ ID NO: 182524 - DNA, 535 bp, Homo sapiens
agatctgtaatgaacatattagtttagttagagagattcaatatattcaaattaacaatgataaagtattacagtgtaaattataccaaaacatccctctaacactttttaatcattaagtgtttattaagaaaataatctgtacccagttccacactgggaggtattttctcttgtggcatttttttgtcttacctaatgttgtattccctatggataaggatttaataacagatcctccatcttaggtggtcatacaattgctattttctgcagtattaaaraacctctttcactacaagacaagctcaactgtaggactgcctgagaacatgaacccagagagcaatttaacagagtgatttttgtgtatatgcttgtatgccagagagatgggataaaaacggacggccttgtatgatcttctccattaaactgctttgctaatctctttcctcttaggttgtataagtaaatgttctgattgtgtcttttctcctcaaatcctcccttatttgctgccgctaactggtca

SEQ ID NO: 182525 - DNA, 385 bp, Homo sapiens
tccagtccccattacacagaacctagggtgcctccttcctgtaccacgtacttacccacctagagcactctacatattcrgtgtttgttttatttttatgtagtatttttattcatattctagatccatactagctttgggtaaattacacaaagttgtgtaactctctgtgcttcagtttatacatctgaaaaaatggaataataataattgtggattaaacaaattaatatatacacatgaaaagtgtctagaatacagcaagtgaccaaaaaaatgtttttgttcttaatgttgttgttgcatggtatttcccttgccaggaattctcagctttttaaaacatatggaccatgtctttttttcttttttaatttccagcctt

SEQ ID NO: 182526 - DNA, 572 bp, Homo sapiens
gaaactgggaattttcatttttcacacataccttaactggttgtgatgcaataggtcttccattaatccttggaaaacagccatgggccattttgatgatttttaatttcctgaactgttagtttttttcatgtgctagaaaactttccactagtctgcatcatttgggggaagtggagtgagtagtccaggaaaggttagtattctttgttacttgaacttaattacttgatctttgctgtttaattactttgttatttcagaagatgtagtagactttttaaggtattaaaactaaataattcttgaaattcccctggcttctgtgacactacctacctcttcttcttggtttctctttttgcacttctctcttaagcccattttctcttcccatcatgtacattttttcctaggtgacatcagtctgcggtttcaactatcgtcaatataatgaccacccctaatttctgcggtctgagctccaracaagaatatccaattgcctgttgaaaatattcatttaactatgccttgaaaatccagattcaatatgtcaaaaacttaattcc

SEQ ID NO: 182527 - DNA, 637 bp, Homo sapiens
gacatcagtctgcggtttcaactatcgtcaatataatgaccacccctaatttctgcggtctgagctccaaacaagaatatccaattgcctgttgaaaatattcatttaactatgccttgaaaatccagattcaatatgtcaaaaacttaattcctcaatttttaccccaaatctattcttcctccagtatttcctatctccatgaattgctatacccagttaaccatggcagatacttgattctgtcctctctcatcatttacctccagaagactttcaaatcctatttattttatgctcctattgkgtctagattctgccccctcctcttcattctcaccagagccaccttggtatagtcttcatgtaatgcatctacagttcttctcccatcttctggtcttgccccatttgtattcatatttcacactactagtgatgttatgaaattatgaatctgatcatgtcacaaaatgttttcaagcagtcttctgtatgaaacttctaattacagcaaacaccatccttatgatttgatttagcctacatcactagcctcacctcccatcattctcccccaccccaaactcgtgcacagccatcctgaaccatatataattttctctctgccttttgt

SEQ ID NO: 182528 - DNA, 666 bp, Homo sapiens
ataaattttatgagaaatggtgactaaaatatattagcatattttacacatccattttgaagcatacatgattcaggaagggcaaagctataaggacagataacagataacaacagttgttgctgggatggagacaggaaaggtgttaactgcaaaggggcagcacaagtgaaattggggagtaataatggaattatatcttggtagtggtagttatacaaactatgcatttatcaaaactcatagacctgtgtgccaaaaacaatgaatgttactatatataaagtttaaaataaatttaaaaattttaatattatatacagataaatctaattatcttggaaaattttttacatatttattgtagaaaaggacacatcatttacatagatgccaatattaaaaggtatttgcataaaaggaacacatttattctctctgtatctcttaarccagtatttcagaacgaatgcagaaaggatggaaaacccattttctgctttctcaatttatcattcaagctgaatggcacataatttatgtagataagtgtttacctttgagcaaatggcattatggccaacattcactatatccatcaaataactgctaaaatccctgcaagtcggcaaatgatgcagagtagcccagcctcggcaaccacag

SEQ ID NO: 182529 - DNA, 568 bp, Homo sapiens
attctacactatctcttctagaaaatgcaggagggaaaaacacttcccaactcattttatgaggtcaacatcacactaatatcaaaaccagaaaaagacattatattttaaaaactgcaaccactatctttatgaatatagatgtataaatcctcaacaaaacatgagtaaattgaatccagcaacatataaaagtacaattcatcatgagcaaactggaggttatctagaaatgcaaagctggttcaatattaaaaaatcttctttttttaaagtagggtctttctctgtcacccaggctggattgcagtggtgcgatctcagctcaccgcagcctcgacttcctgggctcaagcaatcctcttgcytcaacaccgcccgcccccagtggttgggactattacagatgcacgccatcacacccggctaatttttttttcttttttttttttttttttgtagaggtagggttttgccatgttgcccaggctgatctcaaactccagggctcaagtgatctgcccacgttggcctcccaaagcgctgggattgcaggcatgaaccattg

SEQ ID NO: 182530 - DNA, 578 bp, Homo sapiens
tctaacagacagtcaaagacatcgtatcaatcctattgatgctattccaaaagatagggaaagaaggactcctccctaaatcattttatgaagacagtatcaccctaataccaaaactagggaaggacataacacgcaaaagaaaactacagaccattatccctgataagcatagaatgcaaaaatccttagcaaaatactagctaactgaatccaacagcatatcaaaaagacgatccaccatgatcaagtgggtttcataccagggatgcagggattgtttaacactcataagtcaataaatgtgatatgccacataaacagaattaaaaacaaaaatcacatgatcatytcaacagacacagaaaaagcatttgacaaaatccaccatcctttatgattaaaaccctcagtaaaattggcatagaagggacataacttgaggtaataaaagccatttatgacaaaccacagccaacactatattgaacagagaaaagttgaaagcattccccctaaaaactggaacaaaacgagcatgcccacttttaccacttctattcaacatagtactgtaa

SEQ ID NO: 182531 - DNA, 564 bp, Homo sapiens
ttacagtactatgttgaatagaagtggtaaaagtgggcatgctcgttttgttccagtttttagggggaatgctttcaacttttctctgttcagtatagtgttggctgtggtttgtcatagatggcttttattacctcaagttatgtcccttctatgccaattttactgagggttttaatcataaaggatggtggattttgtcaaatgctttttctgtgtctgttgagatgatcatgtgatttttgkttttaattctgtttatggggcatatcacatttattgacttatgagtgttaaacaatccctgcatccctggtatgaaacccacttgatcatgggggatcgtctttttgatatgctgttggattcagttagctagtattttgctaaggatttttgcattctatgcttatcagggataatggtctgtagttttcttttgcgtgttatgtccttccctagttttggtattagggggatactgtcttcataaaatgatttagggaggagtccttctttccctatcttttggaatagcatcaataggattgatacgatgtcttt

SEQ ID NO: 182532 - DNA, 564 bp, Homo sapiens
ttacagtactatgttgaatagaagtggtaaaagtgggcatgctcgttttgttccagtttttagggggaatgctttcaacttttctctgttcagtatagtgttggctgtggtttgtcatagatggcttttattacctcaagttatgtcccttctatgccaattttactgagggttttaatcataaaggatggtggattttgtcaaatgctttttctgtgtctgttgagatgatcatgtgatttttggttttaattctgtttatgkggcatatcacatttattgacttatgagtgttaaacaatccctgcatccctggtatgaaacccacttgatcatgggggatcgtctttttgatatgctgttggattcagttagctagtattttgctaaggatttttgcattctatgcttatcagggataatggtctgtagttttcttttgcgtgttatgtccttccctagttttggtattagggggatactgtcttcataaaatgatttagggaggagtccttctttccctatcttttggaatagcatcaataggattgatacgatgtcttt

SEQ ID NO: 182533 - DNA, 535 bp, Homo sapiens
gcattgattgaaaaaatataaaaacagctcagttgtaatttgatcttcttaaataaggaagatcaattgccaatataatggaagcaaagttgagagcactaaaaagattaaggtccaccaaattaataattaacccagatttaataaaattgctattatattttttccttaaaaaaagacaaacatatttcctatacaaatttaatgccaacgtcagagtaataccgggggggraaatggattgctaagcagccatgatgctgtgttggtattcaacaggttttggctataaatcggtttggtgtgtgtagatgacttttggctgccttattaaaggaaaatccttttagtaaaaatacacagcaccccttttctatatagtaaacagatgtcagcctttcattgtaaagtatttttgatttgatagatgtcaaatattactttaacagacagttcctgtctacaaagaatatttaacatttgtaagataaaatagccactcaaaagttttttttttttaacagctaatgaggca

SEQ ID NO: 182534 - DNA, 535 bp, Homo sapiens
gcattgattgaaaaaatataaaaacagctcagttgtaatttgatcttcttaaataaggaagatcaattgccaatataatggaagcaaagttgagagcactaaaaagattaaggtccaccaaattaataattaacccagatttaataaaattgctattatattttttccttaaaaaaagacaaacatatttcctatacaaatttaatgccaacgtcagagtaataccgggggggaaaatggattgctaagcagccatgatgctgtgttggtattcaacaggttttggctataaatcggtttggtgtgtgtagatgacttttggctgccttattaaaggaaaatccttytagtaaaaatacacagcaccccttttctatatagtaaacagatgtcagcctttcattgtaaagtatttttgatttgatagatgtcaaatattactttaacagacagttcctgtctacaaagaatatttaacatttgtaagataaaatagccactcaaaagttttttttttttaacagctaatgaggca

SEQ ID NO: 182535 - DNA, 509 bp, Homo sapiens
tccttctcccaaagaggagggtggggttaaacacaagcagagactagaataaaactggcttgtgttatgaagggataaaagtgtcagtggcaggaatagagtaagactatattggggtaagtaccgtctttttctcttgttaagtttatcaatctttctttaggtttattttcttactgttagtgtatacttggatagctcagtacagtagttaaacacccaggttctgaatgtggactacttgagccctgaccaggggaaagttgcttagcttctctgtgtcttactttcttcacctgaaatttgaggcaaaaggtacttacatcaaaggggagttttgtgaggactagatgagaaaaaaaccacctatgaagtacttagtacaatgcctggcatatggtaggagygcaatgaaagatagtagttggtataggatctaaaagggctgaattggggtaagagctaaataggtcactgtttttagggtcaatcttggaacacaaaggcac

SEQ ID NO: 182536 - DNA, 493 bp, Homo sapiens
tgccttttctataacatcatataaatgggatcagtgtgcagccttttgaatctagctcctttcacttagcataatactttcaagatgcatccacagtgttgcgtatataagcagttcattgcttttcactgctaacctacaaggatcttaacgtagcaaaaaatcaacagaagctgccccacctaactggaaacaccctgagagcagcacctgtgagtcttggctactgtcttcaagatggcacaactgtcttggagatagtgggaatgaaggtgactggaaatcttaaaggcacaaacatatcccgtggagctatcctasatggcttgagtgacagctggtgggggctaggagccctgtggtttgaactagacagccctgggatagtcaagtcatggtaggtagggccagagccagaacacaaacccagccatgtttagtccaagttcagctctttcccttactccagcagtttccaaccacatccacagga

SEQ ID NO: 182537 - DNA, 521 bp, Homo sapiens
agtcagatcttcacccatggttcaatcaagtggggtgctcatccatgctggtaccatgtgacttcccactcccatcatagtgagaccagggataggcacccttcatgggcattcaaaaaagagtccacttttattattttcttcaccctccatcttttagttgccggtttctccttgttcactcctccatcttactgtctcatcaytgcctgtttacccatttctttgttgcactgtagattctttgagggctgggatctcagcccctagcaggcctgcctttatttatctatccatattgagtgctatttctctgcaggacctgcactgccctgaagatggctgcagggaccagcatcattgcaatctcacgtggcttacattctagcaggggcaacagatgctaaatagtcatgcaggcacattatctctgatcacaactcttcacatttttttttctcaagttatggtcagtgtagtctaagatggaagagagagaaaaagagaaggaaatatataat

SEQ ID NO: 182538 - DNA, 622 bp, Homo sapiens
caatacaactgaagacatcctccatcccttccttgcctcccacctcagaggcagcctgcacatttctatatttttattatatgtgagaatccataaacaatgaatgctattgttctgtttttctaagatatgcacaaatcgtatcccatatatgtcttttcgcaaattgccttttccacctcatattatatttttgagagttggtgatgttgctgcctataaatattgttcattattctacctgctgtacagtattctattattgtagaagccccggtctatccattctcctgctggaaaacaccagcaagtagtttccacattttttgccattatagatactgcctcagtaaacatctttatacatgtcttcytttgcacatggtcatgagtttctggagggtggacagctaattgtgaaattgctgtgtggccactttctaggcaattttcagccagttatatccgctttgctgccatttcctcaaccatgaaatgggtccccagtttatgacttgggagctccctcatagagaaaatgtgagaacctaaaattttaaataataattccagaatgtgtttccaatgacttaaaagaaaaaatcaactgttcccagtggat

SEQ ID NO: 182539 - DNA, 597 bp, Homo sapiens
taagagataggaggcaggagggagctggcagataaattcttttctcttcctcttgactctgctgaggtacagtggttgcatttagcttggccataaacacagctctgactgtgatcagcccaggaatgcaccactttgcatttgctttttctctttctgagccttttccctcacattggttgccctgggcttgtagttccaacttgtttttagggaatacaaggtatgacacccatcaggtccattgtttgatatagtaatttccccagtgattcacaaacttttacacagsctcaaaagcatgactctatgcataagaaacaagtattttatgaaatacccaggaatggtggatctatctattgcttttttttagttttcctaaaaggtatcatatcattcacttcataggaaaaaacaacaacaaacatatggcaaatgttaatattcgatgacaaccactatagcaaaaattactttttaatattaatttagtgcattcattacaatgtctaaaaaatttaaattgatttaggacacattttgggagtagctggtgtatgtcaaggctttttaccaattactcatagtataaat

SEQ ID NO: 182540 - DNA, 615 bp, Homo sapiens
cttgaaattgaccaataagagataggaggcaggagggagctggcagataaattcttttctcttcctcttgactctgctgaggtacagtggttgcatttagcttggccataaacacagctctgactgtgatcagcccaggaatgcaccactttgcatttgctttttctctttctgagccttttccctcacattggttgccctgggcttgtagttccaacttgtttttagggaatacaaggtatgacacccatcaggtccattgtttgatatagtaatttccccagtgattcacaaacttttacacaggctcaaaagcatgactctatgcataagaaacaagtattttatgaaatacccaggaatggtggatctatctattgcttttttttagttttcctaaaaggtatcatatcattcacttcataggaaaaaacaacaacaaacatatggcaaatgttaatattcgatgacaaccactatagcaaaaattactttttaatattaatttagtgcattcattacartgtctaaaaaatttaaattgatttaggacacattttgggagtagctggtgtatgtcaaggctttttaccaattactcatagtataaatatc

SEQ ID NO: 182541 - DNA, 516 bp, Homo sapiens
aaggattaaaaggaaaaggaaaaaatggctcgacttattccctttcttgttatgtcatccttttagcataaatggttggttaatccagggaagtaatatgagtaagaaaggatatgaaaaaattccttggttgcttatgttttttggaatgcctttggcttccttctgtgtttgaagcargttttggttccaagagaaagcatggcatttcacagttctcagtttctccacttactcattagcagatgaaacatgctttgtttgtacttgctttgagtctcattaaactcctatgctgtattagtccgctggaactctgtactcttgagggattgtgaacatgtatgcaaattagggggcagggaaaagaagcatgatgcaccttctgtgctcatgtgcatactttattttattagtctgttctcaagctgctaatgaagacatacctgagactgggtaatttataaaggaaagatgtttagtgaactcagggttctgcatggctggagaagctta

SEQ ID NO: 182542 - DNA, 352 bp, Homo sapiens
aaacttacaatcatgggggaaggyacctcttcacaggactgcaggagagaatgagtgcaagcaaggaaaatgccagacacatataaaactatcagctctcatgagactcactcattatcatgagaacagcatgggggaaactgctcccagattcaattaactccacctggttccacctttgacagaaggggattatgggaatttacaatgcaaggtgagatttgggtggggacacagagccaaaccatatcaatccctcttactgtttttaacaccaccaacatcaacagcagctacttttagcatgtgttttagagtacttgctgtgagacagattaacttgtttaagttt

SEQ ID NO: 182543 - DNA, 352 bp, Homo sapiens
aaacttacaatcatgggggaaggtacctcttcacaggactgcaggagagaatgagtgcaagcaaggaaaatgccagacacatataaaactatcagctctcatgagactcactcattatcatgagaacagcatgggggaaactgctcccagattcaattaactccacctggttccacctttgacagaaggggattatggraatttacaatgcaaggtgagatttgggtggggacacagagccaaaccatatcaatccctcttactgtttttaacaccaccaacatcaacagcagctacttttagcatgtgttttagagtacttgctgtgagacagattaacttgtttaagttt

SEQ ID NO: 182544 - DNA, 352 bp, Homo sapiens
aaacttacaatcatgggggaaggtacctcttcacaggactgcaggagagaatgagtgcaagcaaggaaaatgccagacacatataaaactatcagctctcatgagactcactcattatcatgagaacagcatgggggaaactgctcccagattcaattaactccacctggttccacctttgacagaaggggattatgggaatttacaatgcaaggtgagatttgggtggggacacagagmcaaaccatatcaatccctcttactgtttttaacaccaccaacatcaacagcagctacttttagcatgtgttttagagtacttgctgtgagacagattaacttgtttaagttt

SEQ ID NO: 182545 - DNA, 599 bp, Homo sapiens
tcaaaaatacaaataacccaatttaaaaatgcacaaaagacctgaatatatatttataaaaataagacatgcaaatgaccaaaaggtgtgtgagaaaatgttcagcatcactaattatcagcgacatgcacatcaaaaccacaatgagatatcacctcactcttgttagaatggctattatcaaaaagacaaattataacaaatgttggtgaggatatagagaaaagagaacccttgaacactgctggtggaaatgtaaatcagtgcacccrttatcctcatcccttcaagtaccccagcctcttgtgaccaccattttactctctaattctatgagataaatttttttcagattccacgtatgaatgacatcatgtgttatttgtctttctgtgcctgacttatttcacttaacatagtgccgtccaggttcatccatgttgtcaaaaatgaaaggattttctttagtatagctgaatggtattccattgtgtatggatagcacattttctttatccattcattcatttaaggacacttagtttgattccatatcctgtctgttgtgaatagtgctgcaacaaacactggaatacaga

SEQ ID NO: 182546 - DNA, 599 bp, Homo sapiens
tcaaaaatacaaataacccaatttaaaaatgcacaaaagacctgaatatatatttataaaaataagacatgcaaatgaccaaaaggtgtgtgagaaaatgttcagcatcactaattatcagcgacatgcacatcaaaaccacaatgagatatcacctcactcttgttagaatggctattatcaaaaagacaaattataacaaatgttggtgaggatatagagaaaagagaacccttgaacactgctggtggaaatgtaaatcagtgcacccattatcctcatcccttcaagtaccccagcctcttgtgaccaccrttttactctctaattctatgagataaatttttttcagattccacgtatgaatgacatcatgtgttatttgtctttctgtgcctgacttatttcacttaacatagtgccgtccaggttcatccatgttgtcaaaaatgaaaggattttctttagtatagctgaatggtattccattgtgtatggatagcacattttctttatccattcattcatttaaggacacttagtttgattccatatcctgtctgttgtgaatagtgctgcaacaaacactggaatacaga

SEQ ID NO: 182547 - DNA, 598 bp, Homo sapiens
tattgaaaatacaatgtccatccaaatttaatcatccaaggcctgaaggttgtggttcaataacataatcatggtggatggatcctctttttttcaatgatgttgaagaggtaatattcttagacactgggttaagaaccaagaattaaagtatcctatatactcattcagaaataatcttccaaattgtaagtaactttttagggagtatttaggcttttccactatgtacaccaggatctggatgctactgaataggcaaggtcawcaatcagtgtatgtatatgtacttcgtatgaactttggtttaagatgtttaagaaatatcacattattttagttttttctaagcaccctctttagcaaacatacagagacacacacaaatcctgctgaaattataaaaaagtttgaccctgtttattttaagtagtccccctaacaatcctagaatcacgttaacatctcactggacctccatggtctttcccaagctcaaggctttctgctgctttcgtactatctttgtgaaataagaatattttccaagcctaatatctcagtggctaaaattaaatctacttataagcacaaaagt

SEQ ID NO: 182548 - DNA, 519 bp, Homo sapiens
tgacaaatactacttcagccaggcggcgttcaaggtcaacatgagaagttataaagcatgttaataatatggacccttgatatgatgaaatgaaaatagtactttacctgcgtgatctaataagccctgtctaaatatgaaataaaatccaaacatcaaatacattccacaggggcatcctacaatatatttgacttctcaaaactgtcaaggtcatccaaaagaagaaacacttgagaaaatgtcacaggcaaagtaacttaaggatatatgaaagttaaatgtaatatgttttcctggatagtatcctggaaaagaaaagggtgttagataaaatcttagaaaatctgaataaacaatgaatgatagttaatagtacggtatcaatattggtttattaattgtaacaaatgtaccrtgttaatatgtggtgttaataaaataggaactgtaaatctaaaactgttttttaaattaaaatctgttaacaatgtatttttttttttttttttttttttt

SEQ ID NO: 182549 - DNA, 414 bp, Homo sapiens
cagaaatataagagatcatccaaggctgcaatgaacacctttacaagcataaactagaaaacctagaagagatggataaatttctggaaaaatacaatcctcctggcttaaatcaggamgaataagatatcctgaacagactgatagaaagtagtgagattgaaattgtaattaaaaaattgccaacaaaaaaagcccaggaccagatggattcacagcagaattctaccagacattcaaagaatagtgatattattccacaagatagagaaagaggggaccccacctaattcattctatgaagacagtatcacctttataccaacaaaaaccaggtaatgacattaaaaaaaaaaacctacagaccaatatccctgattactatagatgctaaaatccttaacaaaacactag

SEQ ID NO: 182550 - DNA, 514 bp, Homo sapiens
ttatatgacacaccccaatttccaatattttaagtcaaaagatttcaaacttttatctcaggaccctttcatactcttaaaaaaattttaagggcccatagagcttttgtttatgtaggttgtatctattgatattgaaatattaaaaattaaaatcaatacattttaaaatgtttttaacttaaaaataattaaacccattatacattttatgttcttataaacagcrtacttctcatgaaatataactttattctcaaacaaaaaatgttcagtatcaaaagtagcgttgttcttttttttacaaatctctgatttagtagatgcaactggatctcgtctctgcttcggcgtttaatctgttgtaatagcatgcatcacacagcctctgggaaactccactgtacacttgggagataataagagcaaacaaggcaagaagcagcttagtattattataattgtgaccttatgtactcttcaaagggtcttgggggcccagtggtctctggag

SEQ ID NO: 182551 - DNA, 607 bp, Homo sapiens
ttccttcatttactctttctttctatttattgtggtttattttaattctatatatatatttaaagtgttaaaagatatagcgtttggttatatggtcaattttagcttatatgtacctacctatatcagtcttccaagaatcttgcaggagtgtctgatgttgacagcttctctgtttttctttgtccaaaatatatttatgtcaccatccatttttgaactttattttaattgggtgtaaaatttgaactcagcagttactttctctcagaaattcaaggagtcaactggctttcattgttggttttgagaaagcagatgtcagttctrttgttgtcctttagaggtaatatgtccttttccatttggctgcttttaacatttttttctctttttcatttttttgaggttttattattatatctatatgtgtagctttcttttaatttactctgccagagtttgtagggcttctttatgtagttttctgctcttgctcatatttagaaaatttccaaccatcaatttttcaaatataacctaaattctttctgaggttctattcactatatttcttatgctgttacagctttttttttttttttgt

SEQ ID NO: 182552 - DNA, 607 bp, Homo sapiens
ttccttcatttactctttctttctatttattgtggtttattttaattctatatatatatttaaagtgttaaaagatatagcgtttggttatatggtcaattttagcttatatgtacctacctatatcagtcttccaagaatcttgcaggagtgtctgatgttgacagcttctctgtttttctttgtccaaaatatatttatgtcaccatccatttttgaactttattttaattgggtgtaaaatttgaactcagcagttactttctctcagaaattcaaggagtcaactggctttcattgttggttttgagaaagcagatgtcagttctgttgttgtcctttagaggtaatatgtccttttccatttggctgcttttaacatttttttctctttttcatttttttgaggttttattattatatctatatgtgtagctttcttttaatttactctgccagagtttgtagggcttctttatgtarttttctgctcttgctcatatttagaaaatttccaaccatcaatttttcaaatataacctaaattctttctgaggttctattcactatatttcttatgctgttacagctttttttttttttttgt

SEQ ID NO: 182553 - DNA, 575 bp, Homo sapiens
ggtcttttgcctccttagttatgtatatttctaagtattttattgtttttgcagcttctgtaaaaggggttgagttcttgatttgattctctgcttcgttgctcttggtatataagagagctactgatttgtatacattaattttgtatccagaaactgctgaattcttttatcagatctaggagctttttggtgaaatcttcagggttttctaggtatacaatcatgtcatcagcaaacagcaacggtttgacttcctctttaacaatttggatgcccattatttctttctcttgtctgattgctctagctaggacttccagtactaggktgactaaaagtggtgagagtgggcatctttgtcttgttccagttctcagacggaatgctttcaacttttccccattcagtattatgttggctgtgggtttgtcatagatggcttttattacatcgaggtatgtcccttgtgttctgattttgctgagaattttaatcgtaaagcggtgctggattttttcaaatgctttttctgcatttattgagataatcatgtgatttttgtttttaattat

SEQ ID NO: 182554 - DNA, 575 bp, Homo sapiens
ggtcttttgcctccttagttatgtatatttctaagtattttattgtttttgcagcttctgtaaaaggggttgagttcttgatttgattctctgcttcgttgctcttggtatataagagagctactgatttgtatacattaattttgtatccagaaactgctgaattcttttatcagatctaggagctttttggtgaaatcttcagggttttctaggtatacaatcatgtcatcagcaaacagcaacggtttgacttcctctttaacaatttggatgcccattatttctttctcttgtctgattgctctagctaggacttccagtactagggtgactaaaagtggtgagagtgggcatctttgtcttgttccagttctcagacggaatgctttcaacttttccccattcagtattatgttggctgtgggtttgtcatagatggcttttattacatcgaggtatgtcccttgtgttctgattttgctgagaattttaatygtaaagcggtgctggattttttcaaatgctttttctgcatttattgagataatcatgtgatttttgtttttaattat

SEQ ID NO: 182555 - DNA, 368 bp, Homo sapiens
acctggctaatttttgtatttttagtagagacggggtttagccgtgggtgggaatgctgttcttgaactcctggcctcaagtgatctacctgcttcagtcttccaaagtgctgggattacaggcatgggcaactgctcccggcattatttatcttttcaaagaaccaactttttgtttcctttatcttttgtatttttttttgtttccatttcatttaattctgctctgatctttttttatttctttttttctgctgtgtttgggtttgattttttcttgtttctctagttccttgaggtgtgaccttagattgtctatttgtggtcttccagacwttttgatgcaggcatttaatgttttgaagctt

SEQ ID NO: 182556 - DNA, 375 bp, Homo sapiens
tttgttcccggttagaagctgtaggaacagactaatttatttaaacaaaagacaagttactggactgatatcagggactcaatgaatgaagggaaggtggaggtccaggattagaawatacgtaggaagacgtgaactttggaggtttgagcagtggctccaccactgagacctaccatgaccacaggctggtctactgctgctgccaggatagagactcttggtctttcaggaaagccctaactgctaagactatacagtatgaggaattctgtaaaatgaagataagggtgtcaataggaatggaagtttggatgttggacacccatatataagtgttcacaaaagcaattccacagacacagtcttgtctat

SEQ ID NO: 182557 - DNA, 404 bp, Homo sapiens
acagttcccctgctagcaaatgcttcaatggctctccactgacctgaggaatcaaccctcctttccatttgatttatatgattcttcatggtctggcatgkcttactccttaagtcagactctagactttatcctcactgtgcttctcatccatcatggttttgctaaccatactggtgatagcacaattagggatttgatctgttaccctctttaacttttctccagcaattcataagaatgactcccctcttcttttggaaatgttctactccatttgcttctatgacaatggtttcttcttgtgatcttcctaaagtacttgtcattcggtctcagtttcagttttggacatgttaattttgaaatgcatgtgagagagccaagcagggatcattagtatc

SEQ ID NO: 182558 - DNA, 537 bp, Homo sapiens
  misc_feature (1)...(537): n = A,T,C or G
caacaacaaatatggagaaaattaagaaaactagctacttaaaaaattgacaaaataaacaagccctaactcgactggataagaaaagagagagagaaagaagagaagagagggaagggagataatataaactaacccatgtcaggaatgaaagaggtaaatcattaaaattcctaatagaaataaaaaggattataaaataatagtatcaatattttacaataaaaattcaaaatcttatatataaaatgaacacatttcttttaaaaatgtttttagcaaatctgacacatgataaaatagaaaatttcagtagttcaatatgtatttaagagttgaacttattatcatcataaagaaagaaaacttcagcccagaggttttaatggtgaattttgtcaattatttaagagaaaaacaacatcaaacttacaaaaactactactgaagagagaaaaagggaayacttccccatttattataaaatgacttcataagaagtcatcataactacaaatctcataannnnnnnnnnnn

SEQ ID NO: 182559 - DNA, 633 bp, Homo sapiens
aggaataataaatgaaataaaacttaaactaggctttaagggaagaaatagaacttagtaaaaaaaaaaaaaaaagaggagaatcaagaaagagacacgctgaggaaattgcaaaagttgaggagatatgcattgtcacagaagaaatcattttgkcattaatggtaccttgatgaggaacagcaccttagacaagaatagagaggcagaggagaaatcagattgtgcagaaccggagacattaagcaacttgaagttatactgcaaaataacgcaaatattttaggtgtctttttctcatagtattcataatgaacagtgattctattgtaaaatgcatgcatttagtagaaatttataagttacagaaaaaagacactaattacatgtcaagagaaatctaaatgcaatattcctgctatgttaaacatggtgtgcaatttattgaattaaggataatcaaattgcaaaacttctaaaaaagtgcaagatttgatagctgcaatagaagactttgaataataaaagaaaaaagatgagttggtgaagacataatctttcttcatctaggtaataacaatgtttgagatgttattaacataattataatagttgtactgtctttattattta

SEQ ID NO: 182560 - DNA, 633 bp, Homo sapiens
aggaataataaatgaaataaaacttaaactaggctttaagggaagaaatagaacttagtaaaaaaaaaaaaaaaagaggagaatcaagaaagagacacgctgaggaaattgcaaaagttgaggagatatgcattgtcacagaagaaatcattttggcattaatggwaccttgatgaggaacagcaccttagacaagaatagagaggcagaggagaaatcagattgtgcagaaccggagacattaagcaacttgaagttatactgcaaaataacgcaaatattttaggtgtctttttctcatagtattcataatgaacagtgattctattgtaaaatgcatgcatttagtagaaatttataagttacagaaaaaagacactaattacatgtcaagagaaatctaaatgcaatattcctgctatgttaaacatggtgtgcaatttattgaattaaggataatcaaattgcaaaacttctaaaaaagtgcaagatttgatagctgcaatagaagactttgaataataaaagaaaaaagatgagttggtgaagacataatctttcttcatctaggtaataacaatgtttgagatgttattaacataattataatagttgtactgtctttattattta

SEQ ID NO: 182561 - DNA, 633 bp, Homo sapiens
aggaataataaatgaaataaaacttaaactaggctttaagggaagaaatagaacttagtaaaaaaaaaaaaaaaagaggagaatcaagaaagagacacgctgaggaaattgcaaaagttgaggagatatgcattgtcacagaagaaatcattttggcattaatggtaccttgatgaggaayagcaccttagacaagaatagagaggcagaggagaaatcagattgtgcagaaccggagacattaagcaacttgaagttatactgcaaaataacgcaaatattttaggtgtctttttctcatagtattcataatgaacagtgattctattgtaaaatgcatgcatttagtagaaatttataagttacagaaaaaagacactaattacatgtcaagagaaatctaaatgcaatattcctgctatgttaaacatggtgtgcaatttattgaattaaggataatcaaattgcaaaacttctaaaaaagtgcaagatttgatagctgcaatagaagactttgaataataaaagaaaaaagatgagttggtgaagacataatctttcttcatctaggtaataacaatgtttgagatgttattaacataattataatagttgtactgtctttattattta

SEQ ID NO: 182562 - DNA, 633 bp, Homo sapiens
aggaataataaatgaaataaaacttaaactaggctttaagggaagaaatagaacttagtaaaaaaaaaaaaaaaagaggagaatcaagaaagagacacgctgaggaaattgcaaaagttgaggagatatgcattgtcacagaagaaatcattttggcattaatggtaccttgatgaggaacagcaccttagacaagaatagagaggcagaggagaaatcagattgtgcagaaccggagacattaagcaacttgaagttatactgcaaaataacgcaaatattttaggtgtctttttctcrtagtattcataatgaacagtgattctattgtaaaatgcatgcatttagtagaaatttataagttacagaaaaaagacactaattacatgtcaagagaaatctaaatgcaatattcctgctatgttaaacatggtgtgcaatttattgaattaaggataatcaaattgcaaaacttctaaaaaagtgcaagatttgatagctgcaatagaagactttgaataataaaagaaaaaagatgagttggtgaagacataatctttcttcatctaggtaataacaatgtttgagatgttattaacataattataatagttgtactgtctttattattta

SEQ ID NO: 182563 - DNA, 394 bp, Homo sapiens
ttgacagctgcatgtctaaggaaaaaaatagtcaatatttttcatgatgatagattgaaatgggattagaatacagctggatttcatctggtacatctcaacagtacacatttccctcagacttaaaagaaatctctggatgaacttaaagggctaagctatttatcaatcataaattctgttgtttgtccttaaatayagatattggcaattttcatgtatctatgctggcatttcaaaataagagttatattgctaaatactctttgcaataaattcaagtttgccaatatataactatatgatgactgctcctctgagaccccaccaaaggacaagcataatttataatatttctaacagggtaaagacatgccctgtctcagggaattca

SEQ ID NO: 182564 - DNA, 477 bp, Homo sapiens
taatgataatttatagactagtcaatcattttattttttcaggaaatgttagagaccaaactgggtatcaaagtaatcgggcaattcttagcgtacctggacctataagagtacaataagataactgttttaaatcaagtcaactaaggctactatgtaataccaacaaacaacaaaggattgagcaaattcatgctgagaggaagtcagtttgagaggactcttctaaaaaagataagtattcatcacttaacgtaaaagcgcctctaaagraaaaggtgccttgtttgaggtctgttcaagaataagaaaacttattgtaagtacttaaggttaaggctttctttgccgtttctctcaagaaatagcagcaaaatcaacatcatcagcaactctctgagtatgaaagtatttctggcaaaaggcattaagctatatgatatgtaatttgcaaactataaagcacagataaaaggt

SEQ ID NO: 182565 - DNA, 587 bp, Homo sapiens
atgcaaaaaatgcattcaaggtgttttgaaaccttcatggtagcccctcccattacaagcctggaggcctgggagggaaaaataatccctgaaccaggacaagggccctatccctatttctctgtacagtctcaggacacagcactttgcatcccagcagctccagctctaggcatggctaaaaggggccaagatagagctcaagctgctgcttgagagggtgcaaaccacaagcattggtggcttccacatagtgttggactgcaagtgtgcagaaggcaagagttgaggcttgggagcctccacctagattttagaggatgtatgaaaacacctggatgtccagggagaagtctgctgcaggggcagagccttcactaggaagctctactagggcaatgcagaggggaaatgtggagttggagcccaaaaagagtcccarctggggcactcctttgtgaagctgtgagatgagggccacagtcctcgaaatccaagaatggtagatctaccaactgtttgcaccatgcatttggaaaagcttcggatagtcaacctcatcccatgaaagcagctgtaggggctat

SEQ ID NO: 182566 - DNA, 587 bp, Homo sapiens
atgcaaaaaatgcattcaaggtgttttgaaaccttcatggtagcccctcccattacaagcctggaggcctgggagggaaaaataatccctgaaccaggacaagggccctatccctatttctctgtacagtctcaggacacagcactttgcatcccagcagctccagctctaggcatggctaaaaggggccaagatagagctcaagctgctgcttgagagggtgcaaaccacaagcattggtggcttccacatagtgttggactgcaagtgtgcagaaggcaagagttgaggcttgggagcctccacctagattttagaggatgtatgaaaacacctggatgtccagggagaagtctgctgcaggggcagagccttcactaggaagctctactagggcaatgcagaggggaaatgtggagttggagcccaaaaagagtcccagctggggcactcctttgtgaagctgtgagatgagggccacagtcctcgaaatccaagaatggtagatctaccractgtttgcaccatgcatttggaaaagcttcggatagtcaacctcatcccatgaaagcagctgtaggggctat

SEQ ID NO: 182567 - DNA, 625 bp, Homo sapiens
tgaggcttactcaaccaccaagcctccgtgctctaatgatctgccctcatcacaaacgttcagtctgtcccatgtaaagtttacagcatggagtagcagcactgagtacattctgtgcaagtagaaacactcgaaagagaaaaagaagtcaggcttggccaagcaacctcaattttagctgttgaacttaatcagataactcattcatttttcccagggaattcagagagcagagagtaattaaggaaatagagacaaaaatgtcacctttactgttgtctcttctcatgaaaacatagagtagatgtaaatccccagtccttattcccaccattaccacccaacagaggctacattttaktctgtatacagatcccctaactttcatggcacctcattttccaatctgaatttctgatgaagttttatgatctttaaggtgcaggatatgtcttatataagttatttctctctctgcattcaactcaatacctgacatggggtaggcatgttgggttgaatgaatgaataaaagcttacaaccacaattttcgtgttcatacttcatcagagaattcattcactcctttttaccatgtgaaacaggaattgaaaataaaacagt

SEQ ID NO: 182568 - DNA, 624 bp, Homo sapiens
gaggcttactcaaccaccaagcctccgtgctctaatgatctgccctcatcacaaacgttcagtctgtcccatgtaaagtttacagcatggagtagcagcactgagtacattctgtgcaagtagaaacactcgaaagagaaaaagaagtcaggcttggccaagcaacctcaattttagctgttgaacttaatcagataactcattcatttttcccagggaattcagagagcagagagtaattaaggaaatagagacaaaaatgtcacctttactgttgtctcttctcatgaaaacatagagtagatgtaaatccccagtccttattcccaccattaccacccaacagaggctacattttattctgtatacagatcccctaactttcatggcacctcattttccaatctgaatttctgatgaagttttatgatctttaaggtgcaggatatgtcttatataagttatttctctctctgcattcaactcaatacctgacatggggtaggyatgttgggttgaatgaatgaataaaagcttacaaccacaattttcgtgttcatacttcatcagagaattcattcactcctttttaccatgtgaaacaggaattgaaaataaaacagt

SEQ ID NO: 182569 - DNA, 612 bp, Homo sapiens
attgcttgaccctgggaggcagaggctgcagtgagctgagatcatgccactgtactccagcctgggcaaaagagtgagactgtctcaaaaaaaaaaaaaaaaaaaaaaaaaaaaaaaagggcaatgttgtcaaatacggcccaaattttgaaataaactactgactttcatttcatggtttgggggggtaaaggctgaagcagggccaacatgtgggttggaaactctactgatattagcagtgataaaatagccagaaaaaaaaaaaamaacatattgccaaattacaccctgaaaacatatctcgtatctagcttactaccttggcggaatgaggcctggaaatgacctatctggaaccgcaaaacaaatcttgctaaagggaagagctgtgctaatacacattgccaaatgttcaaaacgtcactgcatgggtgtgtctcttctgacgtatacctgctcctgctgacacatccaagaacagccctatgcctgaaatatttgtgccatctgattctccccagttagatgccccttctacccaaagtcatctgcatggagtctggacctgccattttcctctccccaacaagtatggatattgaatttctt

SEQ ID NO: 182570 - DNA, 326 bp, Homo sapiens
agaatgatgcctaggccagatctgttggttttctaatttgtattaaacttaaactacatagcaatacaaaatgagttttttttttaataggtgaatttgaattcgctccaataacataaaacacaccctagtggcaagtcmcctgggacgctcatcattgtccccatgtctaataaggatttctgctggacacagaggtttttctaagtctagtaagatggaaagcaagtggactcttgttatttttcccttttagattcccacctcctgtagagaaggtgtaagtgcagttagcaagggttacacaagtggattataagcattta

SEQ ID NO: 182571 - DNA, 615 bp, Homo sapiens
aggctttcaaatatcccccaggccagtttcaggttgggcagcctactaccccatgacatccaatattatattgacatactgatttcatttctcttggatgtatacccaatagtgattgctggatcgtacagtagttctatttttaattttttgagtaaacgtcatactgttttccataagggctatactaatctacattcccaccgatagtgaagaaagattctttttcctccataccctcatcaaacttttttatcttttgacttttttcatagccactcagacaagtgtgaggtgcatctcackgtggttttaattggcatttcccttatgaataacgattttgagcattttttcatatctgttggcaatttgaatgtcttcttgtgagaaatgtctattcaagtactttgctctttttaaaaattgggttatttggcagttttttgctactgagttatttgaactccttatatactttgaatattaactccttatcagatgtatgatttgcaaatattttctcccattttgtaggtcatctcttcattctgttggttgttacctttgctgtaaaagacttttagtttaatttactagcgcttgttaatttta

SEQ ID NO: 182572 - DNA, 641 bp, Homo sapiens
tcctgggcaaaaataaagctggaggcatcacactaccaaacttcaaaatacagaacagcagatacaagggcctacctgagggtaggggaaggaacatgagaatcaaaaaactaggtgtaggaaatttgtgtaggaaaagcccttcacaaattgagtactatgcctattacctgagtagcaaaataatctgtacaccaaacccccacgacacgcaatttacctatataacaaatctacacatgtactcctgaacctaaaagttaaaaacaatataatactatagttaccaaacagcatggtactggcataaaaatagaaacatagacaaataaaacagaatacaaaaacccataaattcattcatgtatctacagtcaactggtttttgacaaaggcaccaagagcacttactggggaaaggccagtctcttcartaaatggtgctgggaaaactgaatatccatatgcaggtgaatgaaactagatccccacctctttccctttacaaaattcaaaatggattaaagacttaaatataagaccagaaacaataaaacttctaaaagacaaaataggcaaaatacttcaagagttggtctgtgaaatcactttatcaataagatctcaaaagcacaggcaac

SEQ ID NO: 182573 - DNA, 482 bp, Homo sapiens
actagagtttattcaagggcctggtgctggtactgattgcaaagttggatgttcacttcactttccttccttcatacagagggtatctccctccacactgtgctgcctgggcttgatgtaggggtgatgtaaggaatgtcaagctgtccttcctatcctmttcagtaagtcttttattatttctgtgctaaacccacgtgacataatttttacttgtcgtgaaggtaattttatgtgtaggtagttgttcaaattgatgcctatgtgaggagatgagggccaccttgctaacatcactccactccatattcacttttgaaatattttattgtcactttggctaaatggataactaagtattgtttcacattgatctgtgattccatttaattaagtattcaaattttttaatattttgccttccgaaaattaaatcataaatgtaatcttaaacttgaactgactttgaaatttcccatagg

SEQ ID NO: 182574 - DNA, 482 bp, Homo sapiens
actagagtttattcaagggcctggtgctggtactgattgcaaagttggatgttcacttcactttccttccttcatacagagggtatctccctccacactgtgctgcctgggcttgatgtaggggtgatgtaaggaatgtcaagctgtccttcctatcctcttcagtaagtcttttattatttctgtgctaaacccacgtgacataatttttacttgtcgtgaaggtaattttatgtgtaggtagttgttcaaattgatgcctatgtgaggagatgagggccaccttgctaacatcactccactccatattcacttttgaaatattttattgtcactttggctaaatggataactaagtattgtttcacattgatctgtgattccatttaattaagtattcaaattttttratattttgccttccgaaaattaaatcataaatgtaatcttaaacttgaactgactttgaaatttcccatagg

SEQ ID NO: 182575 - DNA, 298 bp, Homo sapiens
aatgaactcaaatctcaattgaaatgaaattaaagcttgtattttggtaagcctctgaaaatatttctaggcttacaaataattttgatgtaaactgtcyaccttttttaagtatctaagaggtcagatccatggattatgtgtaggaggatatatcaagaagtctatacagatcatcctcccacactctagtccttcaataacaacaagttgttgttttattttcttcagaataaggggacctgagaaggcatgcattttggcaggatggtcagaggcaggaatgactcatggtctg

SEQ ID NO: 182576 - DNA, 477 bp, Homo sapiens
tggagttccagactcctaggtgctcaagtgcctctgttataattggctgccgtgtgcacctatggtccaatgtgacactggaagccatagctgccccactgactttgaactggaatcctgagccctctacatgtgctcgcaacatcccaggcagcttagtccccacaaggtaaacattgaaaataaactgctatgatatttacaactaccaagtacatcttttattgctccatttattaaaacacgtgacaaatttgttaaatatgttaaatatattagacctaggaaatataggtcaatatgttaaatatattattagatctaggaaatacaagtctactaatatatttaacatatatcctccccctcccaagaattatggaatataaaaaagaaagacagatttagagaagttgattatcatatamcttaatctggattttataggaaatattgcactcaactataatttcaacc

SEQ ID NO: 182577 - DNA, 528 bp, Homo sapiens
tgagaggaaaatcagcacttcccatgccttcttcctgggcttgcctcagagataaatccagatctattcatctctcttgggaaggagattgtcgaaacgtcaaatgcctcaagttttaccgctcccactggaaagactgcatcctaaacttcctagctctggatgcagaagggccttggcatatgtgagtcatcttagatcatgaacaaagaggtggttttaaacaagactgcaaacatttccattttgggggctacacctttgagagtagtgttgcagaaaaagggctgggacatgcagctctaaatctctcctaagaggtttacagcacacatttccagtagatacttgacagcctgacaataaacttgcattgaagagctaacagggcagacagacaatagccctctggctgcctgagccagggctaagaacttcccaagcctttcctctggcccacctcagtgataaacccaatctgtccattcttcctcraaggagcttatccatgcatcaggtgctacaact

SEQ ID NO: 182578 - DNA, 561 bp, Homo sapiens
agtaatgagtaatttccaacgctggaatacaatcaagagtctcaattattagtgagagggcattgaaagaacatatttacccaatcagttattgagatgttatagagaagaggccatgtacctagaattttcctagggactggttatctgactcttagtagatatagattgtcactttatattttctcataatcatagagtcatattttcttctgtagagttggactgcctagtcttattttctttggtaaatttagactagtaaatgcatgattctactgagggatattaatcaacccataacagayatggagatatgtaaaaggtaatttaacaaactaggcattggtttacttatattttgttataggtaaactgtctaataaagttggaatttaggaagtattcaataatagagagacttatgtgtacaaattctttgagactgagtgccacactaacacacatgaattgtggtgtctaaaataatcccagatccagttggtaaaaaaagttataggataatgtgataacagtttaaagcagtcatatattaaatat

SEQ ID NO: 182579 - DNA, 561 bp, Homo sapiens
agtaatgagtaatttccaacgctggaatacaatcaagagtctcaattattagtgagagggcattgaaagaacatatttacccaatcagttattgagatgttatagagaagaggccatgtacctagaattttcctagggactggttatctgactcttagtagatatagattgtcactttatattttctcataatcatagagtcatattttcttctgtagagttggactgcctagtcttattttctttggtaaatttagactagtaaatgcatgattctactgagggatattaatcaacccataacagatatggagatatgtaaaargtaatttaacaaactaggcattggtttacttatattttgttataggtaaactgtctaataaagttggaatttaggaagtattcaataatagagagacttatgtgtacaaattctttgagactgagtgccacactaacacacatgaattgtggtgtctaaaataatcccagatccagttggtaaaaaaagttataggataatgtgataacagtttaaagcagtcatatattaaatat

SEQ ID NO: 182580 - DNA, 561 bp, Homo sapiens
agtaatgagtaatttccaacgctggaatacaatcaagagtctcaattattagtgagagggcattgaaagaacatatttacccaatcagttattgagatgttatagagaagaggccatgtacctagaattttcctagggactggttatctgactcttagtagatatagattgtcactttatattttctcataatcatagagtcatattttcttctgtagagttggactgcctagtcttattttctttggtaaatttagactagtaaatgcatgattctactgagggatattaatcaacccataacagatatggagatatgtaaaaggtaatttaacaaactaggcattggtttacttatattttgttataggtaaactgtctaataaagttggaatttaggaagtattcaataatagakagacttatgtgtacaaattctttgagactgagtgccacactaacacacatgaattgtggtgtctaaaataatcccagatccagttggtaaaaaaagttataggataatgtgataacagtttaaagcagtcatatattaaatat

SEQ ID NO: 182581 - DNA, 619 bp, Homo sapiens
ttatggtgctgcacacctgtaatccttgctactcaggaggctgaggtgggaggatcctttgagcccaggaggttgaggctgcactcactgagccatgatcatgacactacactccagcctgggtgacagagcaagaccctgcctctaaaatattatgacaaaagatgataaaataaaatagttaccccaacatctagcatgacaattaaataataccgtaagtgctgcagtaggtcttcaagcatgcatacagaaaataaatataatatgggaaaaaatgtttttaggcagtggacatcagagcacaaaactgtcaattytgaatgaatattagtggaaaaatactatgcaactattttttactgggaaggatacgataaatatgtatttcctatttggaagcatccagaattggaggagacacccactcaaaagttaagcaccaatccaaaattcgaatttaaagttattaatatcataaaattgaattgaatttaaagcaaaaatataaaaataaataaaataatattcatattgttctaagtatcagtatatcatccagataagctgtaaaatttaataccgttccaacaatacctttacaattgaagtggtgtca

SEQ ID NO: 182582 - DNA, 619 bp, Homo sapiens
ttatggtgctgcacacctgtaatccttgctactcaggaggctgaggtgggaggatcctttgagcccaggaggttgaggctgcactcactgagccatgatcatgacactacactccagcctgggtgacagagcaagaccctgcctctaaaatattatgacaaaagatgataaaataaaatagttaccccaacatctagcatgacaattaaataataccgtaagtgctgcagtaggtcttcaagcatgcatacagaaaataaatataatatgggaaaaaatgtttttaggcagtggacatcagagcacaaaactgtcaattctgaatgaatattagtggaaaaatactatgcaactattttttactgggaaggatacgataaatatgtatttcctatttggaagcatccagaattggaggagacacmcactcaaaagttaagcaccaatccaaaattcgaatttaaagttattaatatcataaaattgaattgaatttaaagcaaaaatataaaaataaataaaataatattcatattgttctaagtatcagtatatcatccagataagctgtaaaatttaataccgttccaacaatacctttacaattgaagtggtgtca

SEQ ID NO: 182583 - DNA, 445 bp, Homo sapiens
ggccgccaccatcacaagcccttggggactactgccagggtactaatgatgttcacttaaagcccaagggctcctctgtcaacttatagtgaacactgccaggcctggctctcacctttcaacacagtgggctcccctctggcccagggcaggtccagaaatgcctagaattggggaccccaagagcctgcttggtgctctacattactgtcattgagctggtacctaagatgcaagacaaagttccctttagttttctttctgcttttctcaagcagaatggatctttcctctaagccaccatagctgggaatgtgctgggtctcacctgaagccagyacatctcagaatctcacccaaggcccatggtgtcttgctgatggttattcagggcctgagggctctttagtcagcaggtgatgaatcctggcaggactgggtcctt

SEQ ID NO: 182584 - DNA, 573 bp, Homo sapiens
tttctcagtcctttcttatcccttgcaatttgaacaaagcttggtgaatagtgtgcacacaaaaagcacactaggtgaaagacagatacataaaaagggtaaagtcaggatattttaacaagcctatcaagctttaaatataagcctccttggtagttttctctttaaccctytttccactgttggatgaaatttgccgcattcaattccagttcccaccccaacttcttttttaacacaaggtcagggttaagccttcggtgctttaatccagaggaaaattacttattttaaaaagcagtgaaaaacaccgcattcctttggcacaggatgaagaccagctcagtttttcagttgttgatcattgtctattgttctccaaacagtaaaccagtatttcacactgagattgtcggttgggggtatattccaattccccgtctcctcatgaatatgaagtgaaggggtggtgaccctggaagtggtaggtaatttccaaaaaaaaaaaaaaaaagagagagagagagaaaaaaaaggtcaggtaggaagaagaaaaatagactttctgtgact

SEQ ID NO: 182585 - DNA, 573 bp, Homo sapiens
tttctcagtcctttcttatcccttgcaatttgaacaaagcttggtgaatagtgtgcacacaaaaagcacactaggtgaaagacagatacataaaaagggtaaagtcaggatattttaacaagcctatcaagctttaaatataagcctccttggtagttttctctttaaccctttytccactgttggatgaaatttgccgcattcaattccagttcccaccccaacttcttttttaacacaaggtcagggttaagccttcggtgctttaatccagaggaaaattacttattttaaaaagcagtgaaaaacaccgcattcctttggcacaggatgaagaccagctcagtttttcagttgttgatcattgtctattgttctccaaacagtaaaccagtatttcacactgagattgtcggttgggggtatattccaattccccgtctcctcatgaatatgaagtgaaggggtggtgaccctggaagtggtaggtaatttccaaaaaaaaaaaaaaaaagagagagagagagaaaaaaaaggtcaggtaggaagaagaaaaatagactttctgtgact

SEQ ID NO: 182586 - DNA, 455 bp, Homo sapiens
tctctccctttttgtttgcttgtaagtgtctttattttgatgtagaagctgtatctttctatgttatgaaagacatggaagaattcacgtttgaagactatttttaactgygaaaaaattcccggttgacaggttttttttcttttggcactttaaagaagacttctagatttttttttctctttcagtgctttataggtgtctgcagtacttgcattctgggggggaccgttactgtgtggattgagaagtcagccatcagtctgtgtagctcttttgaagggaacttgtcttttttctgctagatgcttttgtttttctcgtcattgttgcttttcagtgattttactttgatgtgtaagtgtgtttttcttcgtgtatatctttttccttcaacttttattttagactcaaggggtacatgtgcagatttgtgacaagggtagatcgcatga

SEQ ID NO: 182587 - DNA, 358 bp, Homo sapiens
aggtaagaactaaccaggcaggtgaggacggaagagaattctggccagaagaaatagaagttcaaagctacagaggcctgagaggacttggcagattcagtaacatccaagtagttctgaatggttctgaaggatgctctccattaattcccatctccattcagggatctcttgcaaagtggggccccttcatccctagggcgattaggccatttcctggcttgtttcagagagaagctcttggagcctgagactcattgcccccacttttccagctcaggtgctctcacctgaggggcaacagctgcaggtgagggcaaygggaaaggagagagggaagagagaagagaagggacaa

SEQ ID NO: 182588 - DNA, 449 bp, Homo sapiens
aactacctttcttttcttctacctaacatcatttttacttgaaagcatgactgactgacagactgtggttattcagacttgggtatttggcagttataatctcaaaaattaataaagtgagcttgtcacttcaaggaaaacaactagcagtgtttgttgccaatgataaaatgtgatctttcaagcaawaatgagaattttggaaaacatgcatctgtcaccataagcatgacagcttcccaacacttaatgacttttctgatgagattggtggtgatattaagaaacatgtggagtttgttttgggtcttgtaaaatgagatgcattaacatttggaagacttacataactcagccaatattttccaaataactaatagtggatattacaaaatcatgcacacatttaaaaaaaagtctattcaggtacacgatggaccaatggattt

SEQ ID NO: 182589 - DNA, 539 bp, Homo sapiens
tctcttgttctttttcctgttctcaccatgggatgcatcagctctccctttgccttctgccatgactggaatcttcctgaggccctcaccagaagcagatgccagcaatatgcttcctgtacagcctggagaactatgagccaattaaaaatatttttgaaataaaccacccagtctcagatatttctttacagaaatgtgagaacaggctaacacatcaagaggtacgaaagactcatattggatatttgtggaaaacgagtttgagtcattagaatggttccaggggaggaagggcctggaatgggagaatagtgtgtttaaactcagcatgttgagaaatagaaagacactgacagtcacaaagcagmagaccaactcagtaaagtaatgtttcaggaacttcaagagccagcaggttgtgaggatactttcatttccagccatgacggaataggggtgtgttgtagtaggccaacacacctgctgagaacaagcagaaaagccagacagaacaaatttctgcgtgaaagcactag

SEQ ID NO: 182590 - DNA, 561 bp, Homo sapiens
agcatgtaattcttgttaaccctgtgaggatggtttcggacttttaagaggtaattaggccatgacggctccaccctcacaggagggattggtgccactgtaaaagagtgagtttggccccctctcaccctctcttgcccttctgcctcctgccatgggataacatagcaaggtcctcaccagatgctggcccctcaatcttatacttcccagcccccyataatggaaaaaaatttctgtttgttataaattacccagtctcagatattctatgatagcagcacgaaacagattaacacagaaaattggtaccacagaagtgcggctgttcttatagcaaatacctaaaaatgtgaaagtggcattcaaactgagtaatgggtagaggctgcaagaatttggaggagcaggctagaaaagatctcaattgccatgaaagtggtgataagggtgattctggtgaaggcttataagaggaggaaagctgtagggaaagtctgaatcatcttagagattccttaagcagtcacgatcagaatgctcgtagaaatatagatgatt

SEQ ID NO: 182591 - DNA, 470 bp, Homo sapiens
tacctttgcaactctgtcatgaagtgtccccaaacccctgccagggtgatatcagggaaggccaagtagataactgagactttcaccctcatcagctgaaaagaagtcatggagaccaggagaccatgtgggkagtcagacttccattgctagctggcagtagtgaggcatctcctccctctcttgactgagatgtagtcgagatgtaggagggcctaataaagagtcaggacttttaccaccactagtggtaatgaggcaacccccaccatggtgtcagtgaaaaccacattggaaactggaactcccattcacatcaagaggttcaaagaggtatccctaccctcaagtgtcaatggagaccaagtaggaaacctggatttctgtctctacctggtgacaaaatggcagcacccctccaaagtgatgtcataaaaatctagctaaaatggaaggttgaaacgagagcc

SEQ ID NO: 182592 - DNA, 471 bp, Homo sapiens
ggtgggatggagtgtgatggcatgagatttcatcatgctagtcagaacagcatgcaatttaaaacttaygaattgtttatttatggaattttcctttcaatatttgctgactacaggtgaccacaggtaactgaaaccactgaaagcaaaaccatagataacagaaactatagtagtcccctgcttttctatttgtttatttaaaaaaaaaaaaaaagaacgaggagagggcacaggatgagcatttggctatttcatgccacccagatggtaaagtaagctggctcaaacacctgtcatgcttagccctatctggagtgtaagggaaggagggatcagagcttcatgcctggcatggcatgcattcatgttcttttgttctggtcggactcaagctcagttacatgagattgcatgtacccagcagcaagtcaccagccctcaccagcctttttcggcatgttcatggtc

SEQ ID NO: 182593 - DNA, 471 bp, Homo sapiens
ggtgggatggagtgtgatggcatgagatttcatcatgctagtcagaacagcatgcaatttaaaacttacgaattgtttatttatggaattttcctttcaatatttgctgactrcaggtgaccacaggtaactgaaaccactgaaagcaaaaccatagataacagaaactatagtagtcccctgcttttctatttgtttatttaaaaaaaaaaaaaaagaacgaggagagggcacaggatgagcatttggctatttcatgccacccagatggtaaagtaagctggctcaaacacctgtcatgcttagccctatctggagtgtaagggaaggagggatcagagcttcatgcctggcatggcatgcattcatgttcttttgttctggtcggactcaagctcagttacatgagattgcatgtacccagcagcaagtcaccagccctcaccagcctttttcggcatgttcatggtc

SEQ ID NO: 182594 - DNA, 471 bp, Homo sapiens
ggtgggatggagtgtgatggcatgagatttcatcatgctagtcagaacagcatgcaatttaaaacttacgaattgtttatttatggaattttcctttcaatatttgctgactacaggtgaccacaggtaactgaaaccactgaaagcaaaaccatagataacagaaactatagtagtcccctgcttttctatttgtttatttaaaaaaaaaaaaaaagaacgaggagagggcacaggatgagcatttggctatttcatgccacccagatggtaaagtaagctggctcaaacacctgtcatgcttagcmctatctggagtgtaagggaaggagggatcagagcttcatgcctggcatggcatgcattcatgttcttttgttctggtcggactcaagctcagttacatgagattgcatgtacccagcagcaagtcaccagccctcaccagcctttttcggcatgttcatggtc

SEQ ID NO: 182595 - DNA, 471 bp, Homo sapiens
ggtgggatggagtgtgatggcatgagatttcatcatgctagtcagaacagcatgcaatttaaaacttacgaattgtttatttatggaattttcctttcaatatttgctgactacaggtgaccacaggtaactgaaaccactgaaagcaaaaccatagataacagaaactatagtagtcccctgcttttctatttgtttatttaaaaaaaaaaaaaaagaacgaggagagggcacaggatgagcatttggctatttcatgccacccagatggtaaagtaagctggctcaaacacctgtcatgcttagccctatctggagtgtaagggaaggagggatcagagcttcatgcctggcatggcatgcrttcatgttcttttgttctggtcggactcaagctcagttacatgagattgcatgtacccagcagcaagtcaccagccctcaccagcctttttcggcatgttcatggtc

SEQ ID NO: 182596 - DNA, 606 bp, Homo sapiens
tcttttaaatgcatagctgagcttgcttaaaagaagtagagaaatcttcaggctcttgtggcaaggaagaaagtgaaaaacaagattgtaaagtataaacccactgcctggggcatgaggtgggagtagggtacagaagttgaaagaacataggttgccatgttggtraccatagcttagactgaaatgcccatgctggtcaggaaacagaattgtagacattttttcaagggtaaggaatcagaactgagaccttcatataacccgggactctcatagggctacattatcagtgaaagagtcaactttaaaatatctgctggcaggtaaagggaaatgatgagggcatttatttatcttagcatgagttctgggaacacttatttgcattaggcggggttctggtggagggtagtaagtccccctgaaaattcataactatagatcttatgagaattcagggtttaagtaaatactcataatcttcttccttggggaaaattagcaaaaaagtggccccaggctgatatccttggcaaaaacaaaagcataaatatcacaggatcttcctttgacatttgcataaatatagacctaatcctgtct

SEQ ID NO: 182597 - DNA, 525 bp, Homo sapiens
acctcattactcactagggaattgtaaagaaatgagataacactaaatttactcatcagaattgttataataaaaaagatcgacaatactargcgttcgtaagaatgcagagcaaccataactctcctacattgcctgtgagtacttaaattgacacaatcctttgaaaaattctttggcaatatctactgtatttgaatatacacatgctctatgacccagcaattttacttctgagtatatatcaaacagaaatacatgcaaatgcataagagacatagataagaatgttcatagaacattatgcataacagcaaaaaatccagaaacccaaatgcccaccaacagtgaaatagaaaactgtagcatattcatgcagcacaatattatacatagcaatataaatgagtgagctacagctacacacaacatagatgaatcttacaaacattttgtcaaataaaggaaatcacatatttaaaaagacataatgtatgatactatttttataaagtacaaaaacag

SEQ ID NO: 182598 - DNA, 525 bp, Homo sapiens
acctcattactcactagggaattgtaaagaaatgagataacactaaatttactcatcagaattgttataataaaaaagatcgacaatactaagcgttcgtaagaatgcagagcaaccataactctcctacattgcctgtgagtacttaaattgacacaatcctttgaaaaattctttggcaatatctactgtatttgaatatacacatgctctatgacccagcaattttacttctgagtatatatcaaayagaaatacatgcaaatgcataagagacatagataagaatgttcatagaacattatgcataacagcaaaaaatccagaaacccaaatgcccaccaacagtgaaatagaaaactgtagcatattcatgcagcacaatattatacatagcaatataaatgagtgagctacagctacacacaacatagatgaatcttacaaacattttgtcaaataaaggaaatcacatatttaaaaagacataatgtatgatactatttttataaagtacaaaaacag

SEQ ID NO: 182599 - DNA, 526 bp, Homo sapiens
ggatataaaacattcttattggggatggtgctgggtcctcagatatcagtgagggagaaaaccgcaccttttgggttccatcggagggctccatcagctctatgaagaacataatttttaaatgcacactttaaaaggatgaaattaatagcctggaataatttagaaagatatttaaaggaatgaattcaaagaaatttgccttctagaatgctaaaagagtttttagatacactactagaaattacaaaacatgggcaacatatgtggcttgaactttacataaaacacatttttcatgattagattcagattataatttatgttttttggccagtagtctcacagagtcatgttgcatcctcctatatgtatcagcacctgataccaatctgtcccattaattttattaacttggttaacgtgttttctgaagaatttcttcactrtaatgtttctttttaaaaactgtattattaataggtattttggagaggtgactaatgtgcataaacaatcacattta

SEQ ID NO: 182600 - DNA, 587 bp, Homo sapiens
tgtatctattcagaagtaacaaatagaggttaatggaaaacttataaaacaaatataactatttgtctttataatctttcacaatagcccatcttaggtcttccatttcttattcactataattwaaataaaattttttcataatgttatagttgatctctttgtctgcggcattaaaacgagggtgattccatcttgaatagtgtcaggtaaaatgaggctgagacctattgggctgcatcctcaggttaggcattcttagtcacaggacgagataggaggtcagcacaacttacactgtatttagcaatatgtcacaatcatccctgtaagcagggtgcaggcacaatacaggagtcagatatttaggtcatggatgcagagatatgtcacagagtccccaggggcagggtcaagaaaggagctttctattccctaggagttgagcccaccaatatatcacaatacccaaaatatgtgagacccaccccccccaaaaaataaagagaatcacatcaccaaggtgctgggtcaggtgatatgttgcaattgccatttgtggcagactccagccataagaacagagt

SEQ ID NO: 182601 - DNA, 587 bp, Homo sapiens
tgtatctattcagaagtaacaaatagaggttaatggaaaacttataaaacaaatataactatttgtctttataatctttcacaatagcccatcttaggtcttccatttcttattcactataattaaaataaaattttttcataatgttatagttgatctctttgtctgcggcattaaaacgagggtgattccatcttgaatagtgtcaggtaaaatgaggctgagacctattgggctgcatcctcaggttaggcattcttagtcacaggaygagataggaggtcagcacaacttacactgtatttagcaatatgtcacaatcatccctgtaagcagggtgcaggcacaatacaggagtcagatatttaggtcatggatgcagagatatgtcacagagtccccaggggcagggtcaagaaaggagctttctattccctaggagttgagcccaccaatatatcacaatacccaaaatatgtgagacccaccccccccaaaaaataaagagaatcacatcaccaaggtgctgggtcaggtgatatgttgcaattgccatttgtggcagactccagccataagaacagagt

SEQ ID NO: 182602 - DNA, 295 bp, Homo sapiens
tcataaaggggtaaatttaacaagagggtgtaacaattttaaatataaatacaaccaactcttgagcactgaaatatataaagcaaatattattagagcctgagagagatagactctaatacaataataggtggagactccaaaaacccactttcagcattgaatagatgttacagatattccagacacattatcaacaaagaaacattggacttaatctgttgcactatagaccaaatgtacctagtaaatatttacaggayattttatctaatggttgcagaatgcattcttt

SEQ ID NO: 182603 - DNA, 585 bp, Homo sapiens
gatgctacacttttgccttggtcctgacctcagaaagctttgtgacatattactgggctcagcaacaacatgatatgagtctcttgcttggaccctgcccacagggggcattgtggcatatctctaagttcatgaactatttgatgtgactcttcttgcttatgtgggctttacaattagaagagattgtgacatgtctctgattccagcacctaggtgttgtgactctcctcgtttgcctgtgctatgctcactggatgtaaagtaaatgatcactaggcacgacacacaggcaatgtgattctactgcctggtcattgcccacaggggtcactgcaacatatctctgggcccattacctagatggtgtaattctccttatttttctgcttctgtccccagtagggattgtgacatattccttcacccaacatttatgttatgtgattctcctctcatgtctggactctgaccacttgtaattttgacataaggctgggctcatctgtcyaggttatgtgacaggttatgtgactctcttcttttttcctaagccctacctacagggagctttggtacatagct

SEQ ID NO: 182604 - DNA, 561 bp, Homo sapiens
gtgctccatttaaaaaattattttctgatttgtgtcctctgactctgtattttcaaataacctgtctttgagttcactaattatttcttctgcttgatcaattctgctattattgcatttttcagctccagaatttctgcttggttctttttaattatttcaatccctttgttaaatttatctgatagaattctgaattccttccctgygttatctcgaatttctttgagtttcctcaaaatagctattttgaattctctgtgtaaaaggtcacacatctctgtttctccaggactggtccctgttgcctcatttagttcatttggtgaggtcctgttttcctagatggtcttgatacttgtagatgttcatctgtgtctgggcattgaagagttaggtatttattgtagtcttctcagtctgggcttgtttgtacctgcccttttttgtgaaggctttccagatattcaaaaggacttgggtgttgtgatctaagctgtatctgctttagggggcaccccaagcccagtaatgctgtggttcttgcagactcatagaggt

SEQ ID NO: 182605 - DNA, 569 bp, Homo sapiens
tgctccatttaaaaaattattttctgatttgtgtcctctgactctgtattttcaaataacctgtctttgagttcactaattatttcttctgcttgatcaattctgctattattgcatttttcagctccagaatttctgcttggttctttttaattatttcaatccctttgttaaatttatctgatagaattctgaattccttccctgtgttatctcgaatttctttgagtttcctcaaaatagctattttgaattctctgtgtaaaagrtcacacatctctgtttctccaggactggtccctgttgcctcatttagttcatttggtgaggtcctgttttcctagatggtcttgatacttgtagatgttcatctgtgtctgggcattgaagagttaggtatttattgtagtcttctcagtctgggcttgtttgtacctgcccttttttgtgaaggctttccagatattcaaaaggacttgggtgttgtgatctaagctgtatctgctttagggggcaccccaagcccagtaatgctgtggttcttgcagactcatagaggtaccaccttg

SEQ ID NO: 182606 - DNA, 561 bp, Homo sapiens
gtgctccatttaaaaaattattttctgatttgtgtcctctgactctgtattttcaaataacctgtctttgagttcactaattatttcttctgcttgatcaattctgctattattgcatttttcagctccagaatttctgcttggttctttttaattatttcaatccctttgttaaatttatctgatagaattctgaattccttccctgtgttatctcgaatttctttgagtttcctcaaaatagctattttgaattctctgtgtaaaaggtcacacrtctctgtttctccaggactggtccctgttgcctcatttagttcatttggtgaggtcctgttttcctagatggtcttgatacttgtagatgttcatctgtgtctgggcattgaagagttaggtatttattgtagtcttctcagtctgggcttgtttgtacctgcccttttttgtgaaggctttccagatattcaaaaggacttgggtgttgtgatctaagctgtatctgctttagggggcaccccaagcccagtaatgctgtggttcttgcagactcatagaggt

SEQ ID NO: 182607 - DNA, 565 bp, Homo sapiens
gcatcagaagagctggggaggggtggcgaggctgaggtgcaatttaaatacatctttgccataccaatgtgtcactctgcacacacagactagtgcgctggggctggcaggaatgaccccaagtatgagatgtttttaaaggagcaggtcttccagtagactttggtcctgagagaagaggatacggaaaaaataaaagagaagcttttaaagaggtggctgaattagcatgtgttcacttttcctgcttcttcaaatctcattgaaatgacaaaagaaatttttaaaaattgagtttaggaaggtttccaccagcagagcgagcagtaaggaatcgctggaagatacctcgtgaatggacagaatggatccatttggaggatgaaaaccaacaaagagtcagcagtcccgaccaggccagaaagaacctggggaaaagtggcttttcccacagaattcagtcagaatagacacagaatttgagacatcacaggttggaagaaggagcccggggtctcattacrtcagtgattaatcacaaagtggggtcctgcttctgaactca

SEQ ID NO: 182608 - DNA, 431 bp, Homo sapiens
aggacatgttttgtcattatctgctttcracaaatgagtaaactcaggctctgaaaaaaattaatgcctttgccaaggttgccctgctagtaagtggcaaagccaagataactctatctcatgaggccgataacacataaacaacaaagcatgaggtggaaggttgggaggcttttgcattggtccaggcaagaggtgggtagagatactgatagaatggaatggaaaagagagcatagatataagagataatgaaaaagtaaagttggcattttttatcagtggaagaccctgggaatcctgtgatacctgttaatttccagtctttccccagctaccttcttctttattccaaaaggaaagcacattcatgcttaagaaatgggcacccttgggtacacagacatccatctttaatccagtcttccact

SEQ ID NO: 182609 - DNA, 414 bp, Homo sapiens
ttctacccaaggccgggatgtctggggtgtgggggttkgtgggtctaccctacgtgccccaggattcagctattctggaagatcagagcctaagaactgggacttgatcctggtcctggccctccctaagcatcatgtgtcccaggagcaggactgactgggagagggggaccaaggtcctacccagctctccctgtgcccccattcctccctccggccatactgcctttgcagttggactctcagggattctgggcttggggtgtggggcggcgtggagtaacaggccagagctgtctgaacttatgtgtcagaagcctccaagcctgcctcccaaggtcctctcagctctctcccttcctctctccttatagatacttgctcccaacccattcactataggtgaaggccctc

SEQ ID NO: 182610 - DNA, 414 bp, Homo sapiens
ttctacccaaggccgggatgtctggggtgtgggggttggtgggtctaccctacgtgccccaggattcagctattctggaagatcagagcctaagaactgggacttgatcctggtcctggccstccctaagcatcatgtgtcccaggagcaggactgactgggagagggggaccaaggtcctacccagctctccctgtgcccccattcctccctccggccatactgcctttgcagttggactctcagggattctgggcttggggtgtggggcggcgtggagtaacaggccagagctgtctgaacttatgtgtcagaagcctccaagcctgcctcccaaggtcctctcagctctctcccttcctctctccttatagatacttgctcccaacccattcactataggtgaaggccctc

SEQ ID NO: 182611 - DNA, 414 bp, Homo sapiens
ttctacccaaggccgggatgtctggggtgtgggggttggtgggtctaccctacgtgccccaggattcagctattctggaagatcagagcctaagaactgggacttgatcctggtcctggccctccctaagcatcatgtgtcccaggagcaggactgactgggagagggggaccaaggtcctacccagctctcccygtgcccccattcctccctccggccatactgcctttgcagttggactctcagggattctgggcttggggtgtggggcggcgtggagtaacaggccagagctgtctgaacttatgtgtcagaagcctccaagcctgcctcccaaggtcctctcagctctctcccttcctctctccttatagatacttgctcccaacccattcactataggtgaaggccctc

SEQ ID NO: 182612 - DNA, 496 bp, Homo sapiens
tcatgcaccgcgtaacaagttttcagcgaatgacagtccacatgttcaatggtggtcccataagattgtaaaggagctgacaagttcctattgtcttgtgacgtarccctccgaacgtttgcagtgcaaagcattactcatgtgtttgtgatgatgctggtgtaaacaaacctaccgcactgccagtcgtataaaagtctagcacatacaataatgtacggtaaatagtgcttaataatcataagtaatgacgatgttgctggcttacgaatttactatactatacttattatcattagagtgtactccttctacttataaaaaagtgtttactgtaaatcagtgtcaggcaagcaggtccctcaggaggtatccagaagaaggcattgctgtcataggagatgacagctccatgcctgttactgtccctgaagacgtgctgcaggatgagctgtgggggtggaagacagtgatattgatgatcctaaccctgtgt

SEQ ID NO: 182613 - DNA, 518 bp, Homo sapiens
cccaaattctccacttcatacatgacccccatcagtactggcttgatgacactgacaccatagacttgcctactttcactgaatcttcaactcgcctctaattccactcagagagtagtcctgaaaccaccagctcaattgtccccagtgacctctaactgccaaaggatactcctcaagggcttgccttgatttccttgtaggactttacactatggtcttcccttctttttaaaaattattttcttctttggctttccctacgccttccagcaacccaaatctctcttgactctcgctttttttttttttttttttttttttaragtcagagtcttgctctgtcatccagcttgtagtgcagtggcatgatcatagctcactgcaacctcaacccctaggctgcagtgattttcctgccctggcttcccaagtagctgaaactacaggtgtataccaccatgcccagctaattttgtgtttttgtttttgttttgtttttttgtttgttagtttgt

SEQ ID NO: 182614 - DNA, 426 bp, Homo sapiens
tttaattgacattatttgagttcctgatctataaaaatagctaacacttattgaaaactgattacgcaccaacacagttctgaatgcttcacatagtcctactctacagctggtgtcattgaggcatagaggtaggtcagattaccccaggtaactcagctaggaagtgatggggccaggtatgaaaccaaacagtttgaactgttagccatctgctatgtggtctccccgagggccagcgaaataccttcaagkagcttatgaaggcaactgcctcgtggtgatgtaatagcaatgcattaagattatgtgagcagtactcctctataaaatagaatgtctatcaaaatgctggccatttttagggtttcctgccaaactccttttaactatttggggtagcaggggataacaataactttacat

SEQ ID NO: 182615 - DNA, 539 bp, Homo sapiens
tgctttagtcatgaataattatatttatgtattgaagaggaatgtcacaccctccaaacttggtctctgtgaaaacggccccatgtccaagctaaaagttggcaatgcattccygaaatggaacacgataggacagagatgacaataaactcaaatgagtattcttcagactccgatggcctatacctgagggttcttgtgcttcttgtccatggtctggagagccaggcttccactctcaattgcatagattccattctacaaagccagatatacaatagaaaccctaaataggcactttcttcccttggtgcctgggaggtgaccaatctaggggagagaacagggccactgaaggtgtcaagatgacttgccttcaagccttcagtggggttcatctgattaatcatttgggtgagtatttttgaaatatctgacaatttcttcttgagtagtagtttgtgtgtgagacagcgactgaaaaatacatgtttagaaaaaacaaatctctttatttcacctacactagtaagcaaatc

SEQ ID NO: 182616 - DNA, 394 bp, Homo sapiens
tgacttgccttcaagccttcagtggggttcatctgattaatcatttgggtgagtatttttgaaatatctgacaatttcttcttgagtagtagtttgtgtgtgagacagcgactgaaaratacatgtttagaaaaaacaaatctctttatttcacctacactagtaagcaaatcagtataataaaagaagactagtcagaaatactttatttcacgataaatgaggtaagaaagaatcttcctttaatattttggtgcttgatatacagcaaaataattccttatagccccatctctaataaagttatatttattgatatacataaatgaacattcttaatgattttgtaatgaagaatgatattcataattcctacctaccaggaggttccaag

SEQ ID NO: 182617 - DNA, 655 bp, Homo sapiens
aggatgggctcatgtgacactttaaactgcttgctttgttcacaagtaaagttggttttcacagagcagagaatggttcctggactaatgctaaaatccttggatgctcacatcccttaaataaaatkgtgtagtattttcacataacctatggatatccttccatattctttaaatgatctctagattagattatttataatatctaatccaatgtatatgctatgtaaatagtggttatattgtattgtattttatttctattattttttattgctaattatttattgctttttaaaaaatattttaagtctgcagttggctgaatccaccaaagtggaacctgtggatacaaagaaccaactgtgtaagatccccaagatgttataatcgttttgaaaaagtgtcaactgtgagcatcacagtagccttcactggagcaaacgataaatttttttctctgtgcttgccaactgacttgtcaatcagaacaaataggatgtgtttgggcctccccatctgccttacatggatagtttggggattcttgtcacaggacaaaacatgccgttaaataaagaccacccttcctggaagctgctaaggcctggcaggattagctccagcttttctctccatggcacatgctcactgt

SEQ ID NO: 182618 - DNA, 510 bp, Homo sapiens
cagcttaaaagaatatgctttataatatatgaattatgtaccaataaaaaatgaagaggtatgatgattattaggaaccagcaatgaatcacttaagaataacttgactaacataatttattaccattttttcataaggaaactagacaagcagattagagaaacaacctatagacaatgtatcatgatttaagtaagtaatttggatccagtcattrattgtttgcttgtttagtaattcattatctgttggaaatttactaagaatgtacctgaattgtgctggctattggagattcagagatcaatatgacagttctttacagaactagcctactaattaaaaattatgctttaaatatggcaagagaagctcagagaagttaaataactctcctgatgtcacacagctaaaaagtaacaaagaatttgaactaaattatatggggctgaaaagtccatgacgttccattatggcatgcttccaatagcagcgtgcttgtgggtaag

SEQ ID NO: 182619 - DNA, 531 bp, Homo sapiens
taaacaaaccaccaatagacttttgaactatatgtatgaactttctagctatatccattaatagcctatcttattgaccaagaaaagttctagcattgccccaagatcttcaactctctggtctcactccgtcacccagactggagtgcagtggtgcaatcatagctcactgcatcctcgaactccttggcctcaagtggtcctctggcctcagcctcccaagtagcatcaactttctttcatttgagccatgagaaccaattgtaagtctcaacccagaaaaatcatataagatttaagaaacgataaaagctaacccttacatagtgtcaggcatggatcttaacaaaataatttaatcttcacaaaaaccctattatcctgatattacagargaagaaactgaggcacagaaaagttaaggaatttggtcaatctcacacagctagtgggtgaaggagcacatattccaaccctagcagcctgactccagagcccaggatctgagacattctgctccatttcttgcta

SEQ ID NO: 182620 - DNA, 442 bp, Homo sapiens
aggtgtgagccattgctcccaggctgaatcactatattttgaatgaataaatgaacaaacaaatggttacagggttgtttataacaattaaccactgaaacaaattatatttatttttcaaggggaaaatcaggtatagattaaagctaaaaaattgtactcatgtattaacattttttcagttttatgaataatatcatattcatatcactgtttaaccaacagagctacaatgattaggtttacatagtttrctttctaagtagacagacaaataaagttgttgataccatggctaccagtctttgtctaatagaagatgctgaaagatatgcagagctaagaagccctactgggaactgaggctggactcttctctccctctgggtggtagagcaagggatggtgctctgcttcaggacactggtctcttcaacctggg

SEQ ID NO: 182621 - DNA, 548 bp, Homo sapiens
gtcaagatgtggaagcaacctaagtgtccatcaatggacaaatggataaagaaatgtggtacatatacacattagagtactatttagccattaaaaaacaaggtcctatcatttgtagcaacatggatggtcattatattaagtaaaataaaccaggcacaggaaagacaaacttcgtatgttcttacttgtttgtgggagctaaaaattaaaacaactgaactcaaggcaatagagagtagaaggttagttaccagaggctgggatgagtggtcagatgtaagmggggaagaggggatggttaatgggtacacaaatgcagtttgaaagcatgaataaaatctagtatttgatagcaaaatggggtaattaccgtaaaccataatttattgcatacttaaaaataactataagagtataattggaatgtttgtaacacaaagcaatgatatatgcttggggtgatggttaccccatttaccctgatgtgattgttatacagtgtatgcctagatcaaaatatctcatgtatcccataaatatatata

SEQ ID NO: 182622 - DNA, 548 bp, Homo sapiens
gtcaagatgtggaagcaacctaagtgtccatcaatggacaaatggataaagaaatgtggtacatatacacattagagtactatttagccattaaaaaacaaggtcctatcatttgtagcaacatggatggtcattatattaagtaaaataaaccaggcacaggaaagacaaacttcgtatgttcttacttgtttgtgggagctaaaaattaaaacaactgaactcaaggcaatagagagtagaaggttagttaccagaggctgggatgagtggtcagatgtaagcggggaagaggggatggttaatgggtacacaaatgcagtttgaaagcatgaataaaatctagtatttgatagcaaaatggggtaattaccrtaaaccataatttattgcatacttaaaaataactataagagtataattggaatgtttgtaacacaaagcaatgatatatgcttggggtgatggttaccccatttaccctgatgtgattgttatacagtgtatgcctagatcaaaatatctcatgtatcccataaatatatata

SEQ ID NO: 182623 - DNA, 578 bp, Homo sapiens
tcatggacttggaactagctcatgaggtgaccacagcactttccaattccaaaatcagtataggcctctgtgacatgtcacaaattagaactgctccatacccaccatcaacctcccacttcaacatttataagactcctaagaagatgatagcacatcatggtctgcagtcttttgtgtaaggacaaggcatcactacctcatccttttccacatttccaaacaggacttagaccagagccagctcaaaagagctctcgatggccaaaactagatccatttgaacaacaaaataaataacagtagtactgaattataacccacaggataaaataaatatgraagagtccttactgacatgaatgaataatgaataaataagtagaggagagaaataggcttttttaaaaattctaattaataaatgtagaaaaaatgaaagaaataaagaatcaaatttagaacattatagtaatagttgtcacaggcaacactgatagatgccaagatcagtgaagaaagtttgaggagaaacaggatatttccatagcctgaaaattatctttccaaggttattt

SEQ ID NO: 182624 - DNA, 590 bp, Homo sapiens
aactgtagcataacctgtcttgcccctttcctatacctatttccttcctttcccctacaggcgttgatccaaaaagaattacccaaaaaagactcctgtagctaattttcatcttacagtctactttccaaggaacatggaaygtatatcttgctgcaaagtctactttcaaaattttatgctggatttctttggagtagagttttcatgagttttttttctataatttcacttttaacctttggatattattgtttttaagaagtatctcttgaaagcagcatatttctgagttttgtttttattcagtctgacaatcgtttctccagcagtgtatttaatatatgcataattattgatatgtgttatttgacaattaccttataccatttgattttttatttggttttaccaactttttttttcatttttattctttcttttgggctaagtattattaattattcattttctcactttatgaacttgttacttaaacagttttcctatttttacattattatctcttgagcagtataaattgttttcttaccacatcctttacaatgttaggtgctttaaaacacctt

SEQ ID NO: 182625 - DNA, 590 bp, Homo sapiens
aactgtagcataacctgtcttgcccctttcctatacctatttccttcctttcccctacaggcgttgatccaaaaagaattacccaaaaaagactcctgtagctaattttcatcttacagtctactttccaaggaacatggaacgtatatcttgctgcaaagtctactttcaaaattttatgctggatttctttggagtagagttttcatgagttttttttctataatttcacttttaacctttggatattattgtttttaagaagtatctcttgaaagcagcatatttctgagttttgtttttattcagtctgacaatcgtttctccagcagtgtatttaatatatgcataattattgatatgtgttatttgacaattascttataccatttgattttttatttggttttaccaactttttttttcatttttattctttcttttgggctaagtattattaattattcattttctcactttatgaacttgttacttaaacagttttcctatttttacattattatctcttgagcagtataaattgttttcttaccacatcctttacaatgttaggtgctttaaaacacctt

SEQ ID NO: 182626 - DNA, 625 bp, Homo sapiens
cctttacaatgttaggtgctttaaaacaccttaaatacagtcctctcctatttttgtgaacttattgttacatgctttaattctacatatttttaaactctaaaatttgttattatcactgttttatgcgttaatactcatttgtctttataaacatagttactgtttctttgttgtttattcctgcctgcatttacatattttcatctgggatcaatttttatctgcctaaataactactttattaggtgtcctctcttaactagttttgtcagtttttttttatttgtttgtaaatatctcttttaagttttctttttagcaccattttattggttatagaattaaaaattgacagttgtttacttttcatccttaagatagtccatttcattatattttgagttctttcatttctgcttaaaagacaattaccagtcttgctttcattatttcaaagatagtctttttttcccctctgactgtgtktaagatttttctctacgctatgagattcagcaattttactctcatgtaactcaatgtgtgcttctccaaatttatcttaccccctttacttcttcttaaatacatgcccttaaattgagttttttaaattatcata

SEQ ID NO: 182627 - DNA, 625 bp, Homo sapiens
cctttacaatgttaggtgctttaaaacaccttaaatacagtcctctcctatttttgtgaacttattgttacatgctttaattctacatatttttaaactctaaaatttgttattatcactgttttatgcgttaatactcatttgtctttataaacatagttactgtttctttgttgtttattcctgcctgcatttacatattttcatctgggatcaatttttatctgcctaaataactactttattaggtgtcctctcttaactagttttgtcagtttttttttatttgtttgtaaatatctcttttaagttttctttttagcaccattttattggttatagaattaaaaattgacagttgtttacttttcatccttaagatagtccatttcattatattttgagttctttcatttctgcttaaaagacaattaccagtcttgctttcattatttcaaagatagtctttttttcccctctgactgtgtgtaagatttttctctacgctatgagattcagcaattttactctcatgtaactcaatgtgtkcttctccaaatttatcttaccccctttacttcttcttaaatacatgcccttaaattgagttttttaaattatcata

SEQ ID NO: 182628 - DNA, 440 bp, Homo sapiens
caaaaattcgcaaagcaaaacactctagataaaagcttttattatgaactttttcccttaaaggcgatttagactttgtgtaggttccagaatttccataaataattttattgcctgcattacaaattgaatggggactggaagctatgtattcttgaatatcatataagagccataaaatcaattggctgtgtatatcaatgaataggtagaagctattaggattatgaactttttaactctaccaacaattaattgtaggaacgactgcatggactagtttaaaattattatcacaggtcagcactttatatrtattttagatatagaaactgtaagattcctggaaaccagtactgatggggcaacctcctgaaaagcagttgattggggttggagataggtcatatatctgctttctggttaacagtggagaattc

SEQ ID NO: 182629 - DNA, 440 bp, Homo sapiens
caaaaattcgcaaagcaaaacactctagataaaagcttttattatgaactttttcccttaaaggcgatttagactttgtgtaggttccagaatttccataaataattttattgcctgcattacaaattgaatggggactggaagctatgtattcttgaatatcatataagagccataaaatcaattggctgtgtatatcaatgaataggtagaagctattaggattatgaactttttaactctaccaacaattaattgtaggaacgactgcatggactagtttaaaattattatcacaggtcagcactttatatatattttagatatagaaactgtaagattcctggaaaccagtactgatggggcaacctcctgaaaagcagttgattggggttggagataggtcatatrtctgctttctggttaacagtggagaattc

SEQ ID NO: 182630 - DNA, 584 bp, Homo sapiens
aaacagcacagtattaaaatattcaagtacaacaagaatgaatagaaaaataaagaggaaaaagatcccacaataaatgagcagatttgtgctattttatttcttttgcaagctgtgaaaatccctgctgagaatgccataatttcttacagattgtcatttcctttggatattattacatgcagtaagttaactggagctaatatagttccaggagatgtagtgaagacttagaagtacaaagccttttatcaatgtaaaaaacatcctgattagtagtagctggttatcctctgaagctgtttccatgaacaaccctgcctacacagagcctgataggcaggactgccagtaaaaactgtccaaagaactattgccaagatgtctgcttcttcctggaaatgcctcctgactcattgcatgartacctaatacacatggtgactacacatgaacagtgatacaagaggaaaaatatgatttaccaagcaaagaatttaaaaaggcaccaagaggtcacatgtcatacagatatatgatacatatgggctcgtgcataagacaaactctgccattaaccagcg

SEQ ID NO: 182631 - DNA, 548 bp, Homo sapiens
tataaactagattttcttgggtgtgattagcatgagcagcattgaacatttaacattaatgaaaatatagatagatagatagatagatagatagatagatagatagatagatagatacaggtagatatagagaagtgatgatggttgaatttgaagttatatttatctgcctaacccattgtgctgaaactagcataacaccctttaatgctactcataaacttaagttggctctgaagaaaaacagaaagggaaacttgttgattacagtctgtattctagagattttctagctgtcaccattaatccccaactctttcccccatgacacagtgttcagtttagatggaaacatttaagtatttctgaataaatgttagataaaagctatcctttaatccacagggattgttcataacaacgttgttttcatcaataaacttatatattaaaattgaaaagttagtcaattatctggaaaattgaatataaaaactcaatrtttttcagaaatgtgcttcaaagctctgtcagtagtaggataggcc

SEQ ID NO: 182632 - DNA, 602 bp, Homo sapiens
gtacttactttactagttacttgagttacatgtacttcaaaactgaatactgctacattacctgaaatgtatttccaaaaaaaaagtttaaatagagaattttttaataaatttattcctaaacaattgttattattactgaaagtttttttctgaggaaaatgcagttgaactgattaccgactgcaaaaatctaataactttcatttcaaagaaagcatgatgcatgctgtcaaacatgtattgttcactacacactgtcacaaaattcttttcttgccagcattccagaacagatttaaagataaatcaaacattacctgagaatgactgatttaatcaatgctcaaatgaaagcaagaagcattttgccttaaatattacacaagaattcatcataaatgcaccacattaagaagtacactgytatatgttaatatcatgcatgattactaaagaacaatatgtttactatttttcaaaagccaatgacatttcacagaaatatagttctagaaatattttatttcccattaagttactagtgaaaatattcctgaggtatatgggtagctgttgaaatgtcatttggctttatttgg

SEQ ID NO: 182633 - DNA, 537 bp, Homo sapiens
tggtttgccaaatatttaccatctactgaacacctaccaagaagagtggtgtgctcttaaagatactggtctatatatctagatgcctaccaagcaggacctttagcaggcaactcagagtgaaactagatcaaattaagtcattatctttgccttttcccatccaccaatccttttatgtcctttctattgatawctatcctcaccctcaaccctgtcactaaccttgacactttattctttctgacatcatttcagtgtactcagccagctactaagccttatggatggtaccttataaattgcaactgaatgtgtttctttctctttattccatttgcagttatttcatcccctttatttctcatttgaattattacaattaactctgttctcaagggtcactctcctcatgtccattctcatcgtagatatcagtttgcccttaactaaagtacacattagctcatgtggcaaaccactgaagaagttagagcagaatagacatcacctactgtgtgctttagttaagaaaga

SEQ ID NO: 182634 - DNA, 554 bp, Homo sapiens
agggcacatatctatagtacttctagtcttagaatccgataccatttttcttctccataaattcagtatctatagattttgttattggttttaaagtcttagtccaatttatgatgaggattttagtctagctctgccctttgccaaacctaggacattggaaaactttacccctttcaacattaatgttctcaattgtaaaaatagggttatttaccctttttgtaggaacttgtgtggattgtataagataaaataattaaagcacctaacattgtaccttattgattttaataattcaattaataagtaatccactttctcaacctacttctttgttgctacttatattttctgtcaaatcctccatgtgtattcactttcaattgaaaggactctcacttttataaaaattttaaaccagtcagtccacttcttgccattcatgtcatagatgaacaatatattgcacgtcatatgtctaatgckctctttcgtttttcaaacctgtgttgtcatggctattccttcactattggacaacaaggtcttgg

SEQ ID NO: 182635 - DNA, 631 bp, Homo sapiens
gaaacttctctcatgtaacagaataacttatgccaaaataggcataagaattgcagagctggtgtgaatacttcaatgatttgatcagtttccaaaagtggttttatctggctttttcagtatccttmctctattgcttgttaccttacactataaggatggctgctatatctataggtagcacgtataattatcatgcagaaagaaagtgaacgacaaaagacgaggaccacctaagtctgatatattttcttaggatatcaacagctttttcaaagcgccacctggactaaagcttatatacattattggccagatatagatctgttatacgaatttaactgcatgggaatttagaatgttaaataattcttacttggtgcattataattctggaaaatgtccaagttcaattagaaaaaatatatacagagaatggacattagtagctaccttggagtatctatcacatgtggtcctgccaaatattaggttggtgcaatattaggttggtgcaaatattaggttggtgctgtttttttttttccattaaaagtaatggcaagaatcacaattacttttgcaccaatctaataaatactttaactttaatttttctttgtatataaat

SEQ ID NO: 182636 - DNA, 575 bp, Homo sapiens
agtaataatgtttgaatagttaacaaaacctgttttttccatatcagtttttatacctcagggtgaaattttcttatttatcaktcaattttatagtccaccttcataaaaccaaaagaatataattaagattttataaggaaaaaaatgaaatagaattttaaatcctactgtcaatttctttggagaaatgccattgaccaatcatgtttggatattaaaagcagaaataattttttgagcaggaaaataatacattttaatagatataattaatgtttaaaatcttctatgtaataaaaaagtattaggctttgacataaactacaggcaccaattataggtttcattcataaggcacctcttaacaaattgtaaggcaagcctggctgaattatatagaaaccttttactagaaaaatattttactaggaagatttttatcatagaaataataccagaggaacatataaaagtaccttccaggtaaaaacaaaacaaaacaaaacaacaacaacaaaacctttattccctctctaccctttagtatctataatgtgttcataaattttcca

SEQ ID NO: 182637 - DNA, 575 bp, Homo sapiens
agtaataatgtttgaatagttaacaaaacctgttttttccatatcagtttttatacctcagggtgaaattttcttatttatcattcaattttatagtccaccttcataaarccaaaagaatataattaagattttataaggaaaaaaatgaaatagaattttaaatcctactgtcaatttctttggagaaatgccattgaccaatcatgtttggatattaaaagcagaaataattttttgagcaggaaaataatacattttaatagatataattaatgtttaaaatcttctatgtaataaaaaagtattaggctttgacataaactacaggcaccaattataggtttcattcataaggcacctcttaacaaattgtaaggcaagcctggctgaattatatagaaaccttttactagaaaaatattttactaggaagatttttatcatagaaataataccagaggaacatataaaagtaccttccaggtaaaaacaaaacaaaacaaaacaacaacaacaaaacctttattccctctctaccctttagtatctataatgtgttcataaattttcca

SEQ ID NO: 182638 - DNA, 631 bp, Homo sapiens
caagcaccaccatgcccagctttcattattattattattatcatcatcatcatgtacatacacagtgtcttgctatgttgccaagttggtcaagactattaaaagactatgaccatttgaagaaataattctccacattgttctctaaaactgccaaacttattctacatgatttataatacagtgttaccaaatattgaatgtataayacttgagatgaaaaaataggcaaactaaaacaaataaatttaacagatgcaaagctaaacacgaatatgtccaagtttatccctatgatttccatcaaatatatgaataagctatcttatggctaataagaaattaaccattgagatgctaaaaattatcagcaatgtaagagtagaatctgtcagttccaaaatacaaactcacaacctttcatatctccaattatcatcttttttgaaaaaatgaggggccttaaagtagaggttataaatagaggacctatgcttttatttaaagggtgtggtgaatgaataaattgcttttcaaattataagtatattctacccttaatattcagaaaattattaaattgttgaagacatttacttttctaaaaccaaaaatataattttaaaaacat

SEQ ID NO: 182639 - DNA, 582 bp, Homo sapiens
acttgtctgtctaccccactaagcttcttgagaattagaactttcatgtctcttcccaacacaaacsttttatgtgtattttgttgaagaacttcaaatatgacctataaaattatgactcatttatgtttcaaactccaacctctcccttgagttccttgctcacaagcaactccagactgagcttagttggaattcagtagcgcacaactgggatatccgcaccgtacggcttttaacaattttttaaattttggtcctctcagcatcacaaattcactgtgtccaaaatacagtagaatgttgtttctacccacctacactctgccatccgctgaagtcctttccccttgctccaccactcaagccttgcctatcgcactaaatggcagttctgtctctccagttgctcgcacataaaactaggctgctattttgatgtcttcacttttctctattctgtatctaattccttagcaatcctgtcagttctacctccaaactgtactcagcatattcactgctctaactccagcttaaatcaccatcatcctttgcctggaatgctgcatcaaccttcta

SEQ ID NO: 182640 - DNA, 326 bp, Homo sapiens
ctacacacaactgtgttggtttctccttccgcctgtgctcctaaagcactcagtgtttacctgccatcatactttattgaaagcacaaacttgtcacttgtctgtctaccccactaagcttcttgagaattagaactttcatgtctcttcccaacacaaaccttttatgtgtattttgttgaagaacttcaaatatgacctataaaattaygactcatttatgtttcaaactccaacctctcccttgagttccttgctcacaagcaactccagactgagcttagttggaattcagtagcgcacaactgggatatccgcaccgtacg

SEQ ID NO: 182641 - DNA, 582 bp, Homo sapiens
acttgtctgtctaccccactaagcttcttgagaattagaactttcatgtctcttcccaacacaaaccttttatgtgtattttgttgaagaacttcaaatatgacctataaaattatgactcatttatgtttcaaactccaacctctcccttgagttccttgctcacaagcaactccagactgagcttagttggaattcagtagcgcacaactgggatatccgcaccgtacggcttttaacaattttttaaattttggtcctctcagcatcacaaattcactgtgtccaaaatacagtagaatgttgtttctacccacctacactctgccatccgctgaagtcctttccccttgctccaccactcaagccttgcctatcgcastaaatggcagttctgtctctccagttgctcgcacataaaactaggctgctattttgatgtcttcacttttctctattctgtatctaattccttagcaatcctgtcagttctacctccaaactgtactcagcatattcactgctctaactccagcttaaatcaccatcatcctttgcctggaatgctgcatcaaccttcta

SEQ ID NO: 182642 - DNA, 580 bp, Homo sapiens
ggcttttgtctccctgcatgcccagaaattgcacagaatgtggatcagctgtcctctcagggaagagcatactatttgagcactgcgtttttaccagaccaggctcaagkcagttatatttcaggatggcagcctttgtaaccacctaaaataataagcttctttctgtctcctaagatgtgtttccattttccttcatgtagttgtgcatttcccatctgtctgtctgtccatccatgtgagcagcttctgttgagcatttgcctggtgccgttaccatacgaggtgttcaggatacagtgatagataggacacacctctgctttctggtgccgttaccatgcgaggtgttcaggatgcagtgatgggtaggacacgcctctgctttcagctgctgcttgttgatgagccaccattctaagcaggtcacattacaaggtggtgaatggtgaaatggagatgttcatacatggttctgggagaagaaaggcttcacattggcagcagtcctgaaattgcgtgagagagcattctgggcagaaaacacaggagtgtcaagggcactgctgagaggagcagg

SEQ ID NO: 182643 - DNA, 613 bp, Homo sapiens
tcgctctgtcaccccaactggagtgcagtggcatgatcatagctactgcarcctcaaacttctgggctcaagtgattttcccacctcagcctcccaagtagctctaggactacaggtgtgtgccgccaagcccagctaatttttaaattttctttgtagagatatgaattcgctatgctgcccaggctggtctttaactcctgacttaccccaccttagcttgccaatatgctgggagtacgggcgtgaactactgctcccagccaagagcttactttggtttgctagcaaggttcttggtatctttttatatttgaggctttcgtgctagtgctgaagtattacactcaccatctgaggtttacaggacttttgttttaatattgaaccgagggaactgtttagttttgcatctttgcaggtatacaaaatgtgcctaccaggactctgctttatatccattgaaaagcaagaagtaatacagtaaaagtttgcctggctacaggctttggaagaatggagtattctggtttaattctattaacttggaaggatgaaggtggaaaaaattcaaaactttaatttcctgttgaatgcaatttgaaaatatagc

SEQ ID NO: 182644 - DNA, 611 bp, Homo sapiens
gctctgtcaccccaactggagtgcagtggcatgatcatagctactgcagcctcaaacttctgggctcaagtgattttcccacctcagcctcccaagtagctctaggactacaggtgtgtgccgccaagcccagctaatttttaaattttctttgtagagatatgaattcgctatgctgcccaggctggtctttaactcctgacttaccccaccttagcttgccaatatgctgggagtacgggcrtgaactactgctcccagccaagagcttactttggtttgctagcaaggttcttggtatctttttatatttgaggctttcgtgctagtgctgaagtattacactcaccatctgaggtttacaggacttttgttttaatattgaaccgagggaactgtttagttttgcatctttgcaggtatacaaaatgtgcctaccaggactctgctttatatccattgaaaagcaagaagtaatacagtaaaagtttgcctggctacaggctttggaagaatggagtattctggtttaattctattaacttggaaggatgaaggtggaaaaaattcaaaactttaatttcctgttgaatgcaatttgaaaatatagc

SEQ ID NO: 182645 - DNA, 611 bp, Homo sapiens
gctctgtcaccccaactggagtgcagtggcatgatcatagctactgcagcctcaaacttctgggctcaagtgattttcccacctcagcctcccaagtagctctaggactacaggtgtgtgccgccaagcccagctaatttttaaattttctttgtagagatatgaattcgctatgctgcccaggctggtctttaactcctgacttaccccaccttagcttgccaatatgctgggagtacgggcgtgaactactgctcccrgccaagagcttactttggtttgctagcaaggttcttggtatctttttatatttgaggctttcgtgctagtgctgaagtattacactcaccatctgaggtttacaggacttttgttttaatattgaaccgagggaactgtttagttttgcatctttgcaggtatacaaaatgtgcctaccaggactctgctttatatccattgaaaagcaagaagtaatacagtaaaagtttgcctggctacaggctttggaagaatggagtattctggtttaattctattaacttggaaggatgaaggtggaaaaaattcaaaactttaatttcctgttgaatgcaatttgaaaatatagc

SEQ ID NO: 182646 - DNA, 616 bp, Homo sapiens
gtggcatgatcatagctactgcagcctcaaacttctgggctcaagtgattttcccacctcagcctcccaagtagctctaggactacaggtgtgtgccgccaagcccagctaatttttaaattttctttgtagagatatgaattcgctatgctgcccaggctggtctttaactcctgacttaccccaccttagcttgccaatatgctgggagtacgggcgtgaactactgctcccagccaagagcttactttggtttgctagcaaggttcttggtatctttttatatttgaggctttcgtgctagtgctgaagtattacactcaccatctgaggtttacaggacttttgttttaatattgaaccgagggaactgtttagttttgcatctttgcaggtatacaaaatgtgcctaccaggactctgctttatatccattgaaaagcaagaagtaatacagtaaaagtttgcctggctacaggctttggaagaatggagtattctggtttaattctattaacttggaaggatgaaggtggaaaaaattcaaamctttaatttcctgttgaatgcaatttgaaaatatagccaatgagtccacttttcttctctagtaagt

SEQ ID NO: 182647 - DNA, 512 bp, Homo sapiens
acatatggtccttggcatgaccacatgacctgcagagcccctgttatagaactcatttttatattttccttagtataacagttaatataatatgtcatttttgttaatagtgtctttttgtcattttactttttaaaagattttattgaaatatacatacaggaaagtgcatctatcataagtgtgcaaattgatgaattctaaaatctttattgtacctgtttagcacmtagattgacactgaacataactaacaaccagaaatctccgtgtactcccttcctgtaactacccctgcgcccgaccaaatcactctcttctaacagcataactttgtgtgactagcttttttaatgtaaaagaatgaaatctacagcatgtattcatttgcatctggcttctgccacccaacattatatttgtgggattcatttgtacagttgcatattagtttgcagatccctcactctcatttctatatggtattatattgcataaacgtaccacacttt

SEQ ID NO: 182648 - DNA, 408 bp, Homo sapiens
aacattgatgcagaaaattgaagaagacacacagaaaaggaaaagwtactctgtgttcatggattggaagaatcaatattgttaaaatgtctgtactacccaaagcaatctacaggttcaatgtaatccctatcaaaataccaatgacattcttcacagaaatagaaaaaaaaaatcctgaaatttgtatggaatcacaagagacagaatagccaaagccatcctgagcaaaaaacaaaactggagaaattgcattacctgacttaaaattatactacagtcacttcctggtcttttttggcttagatcaagtgcaaagtttactagaaaggtataccaaaacagcatggtactggtataaaaacagacacctagaccaatggaacagaatagagaacccagaaacag

SEQ ID NO: 182649 - DNA, 406 bp, Homo sapiens
aaaacattgatgcagaaaattgaagaagacacacagaaaaggaaaagatactcygtgttcatggattggaagaatcaatattgttaaaatgtctgtactacccaaagcaatctacaggttcaatgtaatccctatcaaaataccaatgacattcttcacagaaatagaaaaaaaaaatcctgaaatttgtatggaatcacaagagacagaatagccaaagccatcctgagcaaaaaacaaaactggagaaattgcattacctgacttaaaattatactacagtcacttcctggtcttttttggcttagatcaagtgcaaagtttactagaaaggtataccaaaacagcatggtactggtataaaaacagacacctagaccaatggaacagaatagagaacccagaa

SEQ ID NO: 182650 - DNA, 362 bp, Homo sapiens
tgacccttcagcccccccacattagataggtcactggatctttctggtcatctgtaaaatgggaatagtasagccagaggtggtcatgggtctgggctttgtggaggtgggggcagagagggagagggcagcctgtccagcctccagcccctctctccagggccctttccccttgtgctttgggcagatttgcacattaaagaaagagaagcagcaagatatgcgtcgggtagagaagctggagaggagcttgtccaaactcaaaaaccagatgggtaagatggggctggcatgacctgggagcaggactggcatcagagggctgtgagggtggcttagagtgccccagggaggtgggtgga

SEQ ID NO: 182651 - DNA, 408 bp, Homo sapiens
aacattgatgcagaaaattgaagaagacacacagaaaaggaaaagatactctgtgttcatggattggaagaatcaatattgttaaaatgtctgtactacccaaagcaatctacaggttcaatgtaatccctatcaaaataccaatgacattcttcacagaaatagaaaaaaaaaatcctgaaatttgtatggaatcacaagagacagaatagccaaagccatcctgagcaaaaaacaaaactggagaaattgcattayctgacttaaaattatactacagtcacttcctggtcttttttggcttagatcaagtgcaaagtttactagaaaggtataccaaaacagcatggtactggtataaaaacagacacctagaccaatggaacagaatagagaacccagaaacag

SEQ ID NO: 182652 - DNA, 567 bp, Homo sapiens
acttaactagatggtgaactcataggtggatggggagtatctaatgcttttgtattctgcttttcagcaaataaatattaccgtactgtgtgtgtaacatgagctatrtaagtgtgtgatgattaaattagaagatagggttctctgcaatccagttttccaagataaatttttgccttgtttttgttaggtaataaaggtaccatattgactgttgatatatgcctacttagtcatgcttctcttgcagtaatcttatcaaattaccagctttttacttttttagagagacagtcctagaattgagaatcctcctttgcctacattcaaaatgagactatattatgtgggtaggaaatttctggtgacctacttttaatttttaaatttaaaaaaatattagcatagttttatatttagaaaacagttgcaaaggtggtatagagagtttctgtgtaccacacaggcacccagtttcccttgttgctaacatcttacatgattatggtatatttgtcataactaacaaatcagtattgatatattataactaaactgcatactttt

SEQ ID NO: 182653 - DNA, 460 bp, Homo sapiens
atcctcctttgcctacattcaaaatgagactatattatgtgggtaggaaatttctggtgacctacttttaatttttaaatttaaaaaaatattagcatagttttatatttagaaaacagttgcaaaggtggtatagagagtttctgtgtaccacacaggcacccagtttcccttgttgctaacatcttacatgattatggtatatttgtcayaactaacaaatcagtattgatatattataactaaactgcatacttttaggggtagtgacccagttttaaagcttatttcccacaatttgttaaaaatgacaatcagtattgagtgcccatgggtggtggcttcctgattcttcaaagaaactgagtaattttgtaaccattgggacttatcaggaaataaggaactcataataatgtgcgcttaaatttccagtggaggaattgtacagcttaacata

SEQ ID NO: 182654 - DNA, 564 bp, Homo sapiens
taaacaagaaacatgtgtaatatttgtaaaaacacaaagcttttgggccgggtgcagtggcttatgcgtataattccagcactttaggagcctgaggctggtggatcatgaggtcaggagattgagaccatcctgactaaaaaggtgaaaccacatctctactaaaaatacaaaaaattagccaggcgtrgtggtgggtgcctgtagtcccagctacttgggaagctgaggcaggagaatggcgtgaacccaggaggtggagcttgcagtgagctcagatcgtgccactgcactcgagcctgggctacagagcgagactccttctcaaaataaataaataaataaataaataaaacttctatttctttcactttctaatataattttaatatctcctcctgggatttcactaagacacattttggacctcattctgatcttcctctcccctccaagcccaccaacttctgccctatcatctatcctcatgtctctctgtgtgacatgctgacttactttttggagagaatcgtctaaacaattaattctttcttctcgtgtcta

SEQ ID NO: 182655 - DNA, 607 bp, Homo sapiens
ccaaacttgaatactacaccttcatgttctaagaatcaggggacttatataaaacctcagttgcctgataaggactacatcaaagtgaaaagccatgggaaagaactagaaagtatacttttgaccctagttctgtagtttccttatgccacaggtaatacacatcgcaattcctgccaaattctttccctcacctctgtttatggtctcgattccataaataggagaagggcatgaatttgctttagttagatagacagatagatggatagakagatagatggatggatggatggatggatagatagatagacagagataaagatagagacaaagatggagacagagatggacatagagacagatttgcagaagataagttctaggtgaactagtgtcaacattaaagtggtatgcctacatctaactattctggagagaaaaacatacctcaaagaaattgacttaaatatatacagagaaaaagtttaagctgaaagctactgcctttttatatgagacactttaggaaattacttggggggcaagagagaaaatgggtggacatagctcagaggttacacagtagcagatatgtaggatgaac

SEQ ID NO: 182656 - DNA, 607 bp, Homo sapiens
ccaaacttgaatactacaccttcatgttctaagaatcaggggacttatataaaacctcagttgcctgataaggactacatcaaagtgaaaagccatgggaaagaactagaaagtatacttttgaccctagttctgtagtttccttatgccacaggtaatacacatcgcaattcctgccaaattctttccctcacctctgtttatggtctcgattccataaataggagaagggcatgaatttgctttagttagatagacagatagatggatagatagatagatggatggatggatggatggatagatagatagacagagataaagayagagacaaagatggagacagagatggacatagagacagatttgcagaagataagttctaggtgaactagtgtcaacattaaagtggtatgcctacatctaactattctggagagaaaaacatacctcaaagaaattgacttaaatatatacagagaaaaagtttaagctgaaagctactgcctttttatatgagacactttaggaaattacttggggggcaagagagaaaatgggtggacatagctcagaggttacacagtagcagatatgtaggatgaac

SEQ ID NO: 182657 - DNA, 559 bp, Homo sapiens
gatgttagatgtttttgtccttgttacagatgtaaatgctcagttggaaagagggaagtatttagagtgaaaaastttcggtggaacacacacaaaaataggaagatcaggtataactgttccaaaaaaaagagtatggcagtatagaagaaaaggtctccatgaaaatgcagaagaacaatttcacagctggtgctggcatttcagagaccttgagctgggaatcaaaagatgggaatttcagtctcggatgtgccactccttagaggtttaatatctactaaacccggcgggctccacttggtggtgtttgctatttaaaaaaacaaaaacatgtggcaatgatcttccacgtgattctgacttgagccccacgcgagtctgcagacttacccttccactgctttgcccttcaagtttgtgcccattagcaaagagaaattttctctttgggatcactgctgtgttgatctcaggaatatttggcgttgaatttaacatatttttcatatgtgtgtgcaatagggaggctgagaaagttgtcttttttttaaggtgt

SEQ ID NO: 182658 - DNA, 559 bp, Homo sapiens
gatgttagatgtttttgtccttgttacagatgtaaatgctcagttggaaagagggaagtatttagagtgaaaaagtttcggtggaacacacacaaaaataggaagatcaggtataactgttccaaamaaaagagtatggcagtatagaagaaaaggtctccatgaaaatgcagaagaacaatttcacagctggtgctggcatttcagagaccttgagctgggaatcaaaagatgggaatttcagtctcggatgtgccactccttagaggtttaatatctactaaacccggcgggctccacttggtggtgtttgctatttaaaaaaacaaaaacatgtggcaatgatcttccacgtgattctgacttgagccccacgcgagtctgcagacttacccttccactgctttgcccttcaagtttgtgcccattagcaaagagaaattttctctttgggatcactgctgtgttgatctcaggaatatttggcgttgaatttaacatatttttcatatgtgtgtgcaatagggaggctgagaaagttgtcttttttttaaggtgt

SEQ ID NO: 182659 - DNA, 559 bp, Homo sapiens
gatgttagatgtttttgtccttgttacagatgtaaatgctcagttggaaagagggaagtatttagagtgaaaaagtttcggtggaacacacacaaaaataggaagatcaggtataactgttccaaaaaaaagagtatggcagtatagaagaaaaggtctccatgaaaatgcagaagaacaatttcacagctggtgctggcatttcagagaccttgagctgggaatcaaaagatgggaatttcagtctcggatgtgccactccttagaggtttaatatctactaaacccggcgggctccacttggtggtgtttgctatttaaaaaaacaaaaacatgtggcaatgatcttccacgtgattctgacttgagccccacscgagtctgcagacttacccttccactgctttgcccttcaagtttgtgcccattagcaaagagaaattttctctttgggatcactgctgtgttgatctcaggaatatttggcgttgaatttaacatatttttcatatgtgtgtgcaatagggaggctgagaaagttgtcttttttttaaggtgt

SEQ ID NO: 182660 - DNA, 624 bp, Homo sapiens
aatagtccaactgactgatttattttctcactgaatttatcgacttacagagctgactagtggtttgggacttcagagactaaaatttttcttctaagcattggctgacagcatacactgtgggttttcagcataacaaaaatgagcagcattgtgatctctttatttgataaggtagtagaaatatttgccttagctctggtaaaagtcctgtcattgacttttaatcctgataatatcatataacctttcctatgatagttcaaaaatgttcaaaaatttgcataattaacaagtcaattaaacgtgattattttttcattaagatgaaaaatgaggcatatcactattgataatgaaagcaaatgcctgtcattactcattctctggagccatttgtcttacacagacttgtcttggagcccgtctggtctgaagaattcagtgaacagcacaggtgacggtccataagatcaatgggcagaaacatcttccaagaaatctttgcatgttttgaagcttttagatttgcatcctctataaacctttcatcaaaaactatgttgccaaaatmaatactatggcctactaggtttattcattaattcatcacatatattccag

SEQ ID NO: 182661 - DNA, 635 bp, Homo sapiens
aatggcttataaacaatataactttatttcttacagttccagaggatgggaagtccaatatccaggtgatggcagatttagtgtctggtaagtgcttgctcttctggtcgatagatgaggctgtctgtctgtgtccctacccaaatctcatcttgaattgtactcccattattcactcaagttgtgggaggcacctggtgggagataattgaatcatgggggtggtttcccccatactgttctcatggtagtgaataaatctcatgagatctgatggttttataaggggtttccgctttcacttytctctcattctctctttgcctgctgccatccctgtaagatgggacttgttcctccttgccttccaccatgatcatgaggcctccccagccatgtggaactgtgagttcattaaaccttttttcttcccagactcgggtatgtctttatcagcagtgtgaaacagactaattctcagagtccttacttggaggaaggggctaactagatctccagggtctcttttataaggacatttatgacatttttgagagcccttatgacttaatctcccaaaggccccatttcctaaaactaccaccttaggagttaggatttcaacatatgaatgt

SEQ ID NO: 182662 - DNA, 635 bp, Homo sapiens
aatggcttataaacaatataactttatttcttacagttccagaggatgggaagtccaatatccaggtgatggcagatttagtgtctggtaagtgcttgctcttctggtcgatagatgaggctgtctgtctgtgtccctacccaaatctcatcttgaattgtactcccattattcactcaagttgtgggaggcacctggtgggagataattgaatcatgggggtggtttcccccatactgttctcatggtagtgaataaatctcatgagatctgatggttttataaggggtttccgctttcacttttctctcattctctctttgcctgctgccatccctgtaagatgggacttgttcctccttgccttccaccatgatcatgaggcctccccagccatgtggaactgtgagttcattaaaccttttttcttcccagwctcgggtatgtctttatcagcagtgtgaaacagactaattctcagagtccttacttggaggaaggggctaactagatctccagggtctcttttataaggacatttatgacatttttgagagcccttatgacttaatctcccaaaggccccatttcctaaaactaccaccttaggagttaggatttcaacatatgaatgt

SEQ ID NO: 182663 - DNA, 635 bp, Homo sapiens
aatggcttataaacaatataactttatttcttacagttccagaggatgggaagtccaatatccaggtgatggcagatttagtgtctggtaagtgcttgctcttctggtcgatagatgaggctgtctgtctgtgtccctacccaaatctcatcttgaattgtactcccattattcactcaagttgtgggaggcacctggtgggagataattgaatcatgggggtggtttcccccatactgttctcatggtagtgaataaatctcatgagatctgatggttttataaggggtttccgctttcacttttctctcattctctctttgcctgctgccatccctgtaagatgggacttgttcctccttgccttccaccatgatcatgaggcctccccagccatgtggaactgtgagttcattaaaccttttttcttcccagactcgggtatgtctttatcagcagtgtgaaacagactaattctcagagtccttacttggakgaaggggctaactagatctccagggtctcttttataaggacatttatgacatttttgagagcccttatgacttaatctcccaaaggccccatttcctaaaactaccaccttaggagttaggatttcaacatatgaatgt

SEQ ID NO: 182664 - DNA, 578 bp, Homo sapiens
taaataaccttggaaagataattttcaggctatggaaatatcctgtttctcctcaaactttcttcactgatcttggcatctatcagtgttgcctgtgacaactattactataatgttctaaatttgattctttatttctttcattttttctacayttattaattagaatttttaaaaaagcctatttctctcctctacttatttattcattattcattcatgtcagtaaggactctttcatatttattttatcctgtgggttataattcagtactactgttatttattttgttgttcaaatggatctagttttggccatcgagagctcttttgagctggctctggtctaagtcctgtttggaaatgtggaaaaggatgaggtagtgatgccttgtccttacacaaaagactgcagaccatgatgtgctatcatcttcttaggagtcttataaatgttgaagtgggaggttgatggtgggtatggagcagttctaatttgtgacatgtcacagaggcctatactgattttggaattggaaagtgctgtggtcacctcatgagctagttccaagtccatg

SEQ ID NO: 182665 - DNA, 579 bp, Homo sapiens
aacaagttggtataattctatgcctagtatttttcccatagccactgtttttttttccctgtaattgccataataagcactttgtacttcttaccaatttatagaaaattaagtcttgacagtgaatatatgctcaaagcaagaaatgcaataggaatttatcttccttgggcttgtatcagattgggaagatattttcctttgtcaagtggtattttgattgatagaagattcagagaattctctcaatagtttattactgggtctaattcctttattttatccacatccacataaatagtttaagctcgatattctaggggccaaatcatgtgaatacagaagttatattcattgtcaaaacgaaatgcaaaggatgtaataggatatgaatacatatttatactttactgggttaggcgctcacatgggacctaggcttttccaattaattattggcaaagtagcacattcttgtcaacatagggaaaaatggtgggaaaagacttwtaaaggaccataaatttcatggagagcaggaattctcattccctacagtgatatttgagtgaatcagaa

SEQ ID NO: 182666 - DNA, 647 bp, Homo sapiens
ccttctctcttaaacatttcaacctacaaatccaactgtcagtgaaagataaatataataacctgtaagaaatatttaaaatcacatcaaattagagtatgcttattgaggatctagtatattcagagggtctgattcatatagatattgagaagtttgtttttttactacagttgattagttgggagggacctgtgagaatgagtatcttttttcagacaaaaagctctagaaatttcagattattgtcatacatctcaaaattctagattcagcacttattctttgaattatttcatcttaatttaaagtctaatacattttcaatgtaagtctaatacatttaattaattgtatatttaaaaagactatatctagaaatcatacattatttgggttctcaatttattcacaagtttagctttttttatatatattatggcaatttggttttgtaacatatgttatactttaaaatattcawctaaatttcacttagaaatagtctacgaggctgggctcatgcctataatcccagcactttgggaggctgaggtgggaggattgctcaagaccagtctgggcaacatagggggacgccatctctacaaaaaataaaaataaaaaaattagccaggcgtggtggc

SEQ ID NO: 182667 - DNA, 502 bp, Homo sapiens
attggagtgtttttcgaactcaacttttgaaatttcttacatgtttgtggcccattcttttgaaatccccaattcgagggcagattttatttttttatggtaatcaaaatggctgcaagttaaatttgaaatcagttttggggacaacattggaataagactaaatagcaagaccacttttcttttttttttttttttttttttttgktaatacgaagtcttgctctgttgcccaggcttgagtgcagtgatgcgatctcggctcgctgctgcaaactctgccttctaggctgagacaattcttccacctcagccaccagagtagctgggattacaagcctgcgccaccatgcacggctaaattttgtatttttagtagagaatgggtttctccatgttgtccagtcttgtcttcaactcctgagctcaagtgatctgccagcgtcgtcctcccaaagtgctgggattacaggcatagccaccacactcagcccgactgctt

SEQ ID NO: 182668 - DNA, 555 bp, Homo sapiens
actgacatccagcagagtgacacagtatacaagagagcagcaaagacacacacatggcaggaccatggcaggatcatggcaggatggaggcacggtccaatgggacaatgcagaggcagagcatgcagaaactcaggagaacgcacaccctcaatgcaatgcagcaatcccagtgaagtagagggctgagacacagggctgtgtgaggaggctggacccaggaatcccagacagtgcacatccagagcagtccagagcctggcacgctgcaacagtgttgctgggagggtcatgatgcctccctgtgatgcactggaggagaggggagctcagatccctggaaaactctctacctacagctctgcccggccacgctggctcaccccacaagttgggggcygaaatctcatctggcttgtctccctccctccaacatcttccaccccagtgactctccaagggcaaaggatgaagccactgccacccacaggataggccatctagaatcgagcacattgtccaggtattataactgagcagaatcccagcatgctg

SEQ ID NO: 182669 - DNA, 463 bp, Homo sapiens
agatctgactaaaaccacaagattttatgacaaaagggcaactagtgtactcaaaattctttcacactttacatgaaatggcttattataaaaaataaaatctatatacaatcaaagccaacaaaagttaccacagagctgaaagggtataaacaagtgctgctaatattgttgcttccttgacgtgcatctargattcctgcccctcccttccctacagtaactctttttgtttttttttttttttttgagacgaagttttgctcttgttgcccaggctggagtgcaatggcaggatctcggctcaccgcaacctatgcctctgaggttcaagtgattctcttgcctcagcctcccgagtagccaggattacaggcatgtgccacgacgcccggctaactttgtatttttagtagagacaggggtttctccatgttggtcaggctggtcttgaacttatgac

SEQ ID NO: 182670 - DNA, 516 bp, Homo sapiens
aaagagatgtctatattcccacgtttattgcagcactattcacaatagccaagatatggatcaacctaagtgtccattaacagatgaatggataaagaaaatgtggtaaatatacacaatggaatattattcagccaaaaaagaaagaaatgaaatccttgcatttgtagcaacatggataaagaatcactatgctaaatgaaataaaccaggcacagaaagacaaataccacatgttctcactcatatgcctgagctaaaagagttgatctcatggaggtgaagagctcattgatggttactagaggttaggaagggtttggaggaggaaggagatgaatacaggttggttaatgcgtacaaaaatacagttagattgaagaaatagtctagtgtacgatagttcagtagggtgactatagttaatatgtgtcgtatagttcaaartagctagaagataagaattgcaatgttttcaacatgaagtaaagataaatgtttggggtgatggctatc

SEQ ID NO: 182671 - DNA, 432 bp, Homo sapiens
tggccaaactggatgaaatgaaacgtatttgcacgaccaggaggatttttatagacgctgtatgtggtgggtttctggagaacctttaaggccaagaagagcctgaacatgtttcagtagaaagtagaaagcaatacatggtagaattttgagtagtttaaacatttttgatatttggaagatattttttgatatttttgatatttagatatttgatattgatgcaaasgctattaggagggaaaacaacaacatgactggtagtattcaggatataaagtggcagagggtaagggactaggatgataacaggtgagccatttgagtccctaagaagtgagagatttaatctaaaacttctattgatcataaaaatacatgctcagaattggttgggtacttttatttatttatatcctgcttcctttcaga

SEQ ID NO: 182672 - DNA, 593 bp, Homo sapiens
ttgctgggttccatgggaatgggatccgctgagcaagacctcttggctccctggcttcagccccctttccaggggagtgaacagttctgtctcgctggcattccaggcaccactgggatacagggaaaaaaaaaacaaaaaacaaaaacctgcagctagctgggtgtctgcccaaacggttgcccagttttgtgcttgaaacccagggcgcttgtggtgtaggcccctgayggaatctcctggtctgtgaagactgtgggaaaggtatagtggctgagctggaatgcactgttcctcatggcacagtccctcacagcttcccttcgctaggggagggagctccccaaccccttgcacttccggggtgaggtgacgccccaccctccttctgctcgccctccgtgggctgtacccacatctaaccagtcccaatgagatgaaccaggtacctcagttggaaatgcagaaatcacccaccttctgcattgatctcgctgggagctgcagaccagagctgttcttattcggccatcttgccctggaatcgccttttgaatttttataaagtagaagtctccactgagtacttccaa

SEQ ID NO: 182673 - DNA, 593 bp, Homo sapiens
ttgctgggttccatgggaatgggatccgctgagcaagacctcttggctccctggcttcagccccctttccaggggagtgaacagttctgtctcgctggcattccaggcaccactgggatacagggaaaaaaaaaacaaaaaacaaaaacctgcagctagctgggtgtctgcccaaacggttgcccagttttgtgcttgaaacccagggcgcttgtggtgtaggcccctgatggaatctcctggtctgtgaagactgtgggaaaggtatagtggctgagctggaatgcactgttcctcatggcacagtccctcacagcttcccttcgctaggggagggagctccccaaccccttgcacttccggggtgaggtgacgccccaccctccttctgctcgccctccgtgggctgtayccacatctaaccagtcccaatgagatgaaccaggtacctcagttggaaatgcagaaatcacccaccttctgcattgatctcgctgggagctgcagaccagagctgttcttattcggccatcttgccctggaatcgccttttgaatttttataaagtagaagtctccactgagtacttccaa

SEQ ID NO: 182674 - DNA, 598 bp, Homo sapiens
gtccagcttcatcatcttacagatgagaacactggaactcagagaggccgcaagagtggactacatgccctcctgagaagattccacagccaacactgatatgaccccaaaaccgtccgttttaaaatactatgaagaaaatcttccttacattttaacccaaattctttaaactatagtttgcactggtttcttcttgttctgttcccagtaatgataaagtacagctgcccaatgaccctttgaacatctcttattayataatttattaccttaatgtatttatactcagcctcatttcacagacaatttgacataacttacataatacaacaaaaaattaagaccagcaagaatagaacacaaatagggaaaagaacacaaatatgctggccagaaattattgctatgattgagcttcaaatttaattccaaacttcttgaaaggtatttttattattactattagtactattgctgttgttgatggtaatgtgatacaattcttgcctattacgaggggtatttcaatctttggatcctgagtgtcataagccagttttaattttagtcacataacagtgaagatgtttcccaa

SEQ ID NO: 182675 - DNA, 595 bp, Homo sapiens
atccggaaaaaaaagggagaggtgccctcctgccctccctgtccccaaggcacatgtacatgttccaatttttatgagcagtatttttcaaaaattttacagcaataatcctgacacaaatygctggcaatattgaagaactgctgattaaacagatggcttgtgagaatttaaaatataaagcagcggccagcaggagctcacatgggcttatggagaatatgccaaattaacctaatttctttctgtggagggttgattggtagatcacagagaagcaattagttgtggtatatcatgatttcagcccatctgataaaaccatgttaacatgtcaaagagatgagtctgtgatatccttttcatacaggagaaatgcagtcttcttgtggattcatagctggtcaaacaagcagaccaaatatgctggactcttgtgtcttaggccatttttcaggtggtacttcctaatgccattgagatccctaacaatatcctcacttacattttattaatgacttggatgaaaatctaaaaggacacatttaccaagtttgtagaagacacaaagccagacagcataatcaataggcat

SEQ ID NO: 182676 - DNA, 595 bp, Homo sapiens
atccggaaaaaaaagggagaggtgccctcctgccctccctgtccccaaggcacatgtacatgttccaatttttatgagcagtatttttcaaaaattttacagcaataatcctgacacaaattgctggcaatattgaagaactgmtgattaaacagatggcttgtgagaatttaaaatataaagcagcggccagcaggagctcacatgggcttatggagaatatgccaaattaacctaatttctttctgtggagggttgattggtagatcacagagaagcaattagttgtggtatatcatgatttcagcccatctgataaaaccatgttaacatgtcaaagagatgagtctgtgatatccttttcatacaggagaaatgcagtcttcttgtggattcatagctggtcaaacaagcagaccaaatatgctggactcttgtgtcttaggccatttttcaggtggtacttcctaatgccattgagatccctaacaatatcctcacttacattttattaatgacttggatgaaaatctaaaaggacacatttaccaagtttgtagaagacacaaagccagacagcataatcaataggcat

SEQ ID NO: 182677 - DNA, 490 bp, Homo sapiens
ttcttgctttttgtaattctgtatgtctctacaccattagtgacctgtggatctattttgcctttaatcatctacttcttcttggcttatcttttgaaagaaaaatccatatgccacctctgaatagagtttgttttgtttgaggaattcaggtcattctttttaagccttattaagcatgctattacaggcttagctagcacagggtgttacggccactgtgaagacccagaatcttcaagatccctgaaggcccgacacacagatacagcataaacaaaggcagaattmtaacttctcacaaataaaaaggaaaacacaatttcatgggtctattattctcctctgcttattctgctttcaggcaaactggcctaccctaaactatcctatgggaatttaaaaggaagaagtccatcacttcaaatccctagttacctgatgacataatatagccctcacgtaaagtgttcttctgagagcgcccctt

SEQ ID NO: 182678 - DNA, 565 bp, Homo sapiens
tgaagacccagaatcttcaagatccctgaaggcccgacacacagatacagcataaacaaaggcagaattctaacttctcacaaataaaaaggaaaacacaatttcatgggtctattattctcctctgcttattctgctttcaggcaaactggcctaccctaaactatcctatgggaatttaaaaggaagaagtccatcacttcaaatccctagttacctgatgacataatatagccctcacgtaaagtgttcttctgagagcgcccctttttcttctactacagtgacacaggaaaatgaatggtagccatgtatgtttagcaataaatacataaatatgaataaattttaatagctatatatctctctatatatggacattgattgygggatataggtgcttatatactattttatttcatctttacaacaccgagaagtgactaatattagccctagttatagatgaggaactaaagatgtaattaaccagaatagaaatctgtttgcttaatcattatgtatcccaatgttctctgggatgcaccctacttttaattgattc

SEQ ID NO: 182679 - DNA, 514 bp, Homo sapiens
tagtgcagggagaatcagcttcaggtgtcacgaacagaagtccaggagcatcaggtgactccaaatcactgtaccctggcagaggggaaccacaggatcataaaaaagacatgcaaatgaaaacaccacactgcagttattcatcttttargacatagtgccagtctttgtggagcaagacagagttgcaggaaagaaatagtcagaggtgtctctgtcctttccaaaatagccatgaaatttcagtagggatataaattatgaatcagatccaataaagtgtaatggctggatacttgctgtcattagaaaggaaagctgcaaatgaatacttggacatattcacaattaggtaaaagatagtagatgatttctagaccctaaactagatgagaaagaatttgtaatgtcccaccaagcctaggtaatttaaaagcaaaatgtgctgtttctagtttcatgtgttttttatctcattgacaaagcatgcttcctatacaaagcaatgaaaaca

SEQ ID NO: 182680 - DNA, 514 bp, Homo sapiens
tagtgcagggagaatcagcttcaggtgtcacgaacagaagtccaggagcatcaggtgactccaaatcactgtaccctggcagaggggaaccacaggatcataaaaaagacatgcaaatgaaaacaccacactgcagttattcatcttttaagacatagtgccagtctytgtggagcaagacagagttgcaggaaagaaatagtcagaggtgtctctgtcctttccaaaatagccatgaaatttcagtagggatataaattatgaatcagatccaataaagtgtaatggctggatacttgctgtcattagaaaggaaagctgcaaatgaatacttggacatattcacaattaggtaaaagatagtagatgatttctagaccctaaactagatgagaaagaatttgtaatgtcccaccaagcctaggtaatttaaaagcaaaatgtgctgtttctagtttcatgtgttttttatctcattgacaaagcatgcttcctatacaaagcaatgaaaaca

SEQ ID NO: 182681 - DNA, 514 bp, Homo sapiens
tagtgcagggagaatcagcttcaggtgtcacgaacagaagtccaggagcatcaggtgactccaaatcactgtaccctggcagaggggaaccacaggatcataaaaaagacatgcaaatgaaaacaccacactgcagttattcatcttttaagacatagtgccagtctttgtggagcaagacagagttgcaggaaagaaatagtcaraggtgtctctgtcctttccaaaatagccatgaaatttcagtagggatataaattatgaatcagatccaataaagtgtaatggctggatacttgctgtcattagaaaggaaagctgcaaatgaatacttggacatattcacaattaggtaaaagatagtagatgatttctagaccctaaactagatgagaaagaatttgtaatgtcccaccaagcctaggtaatttaaaagcaaaatgtgctgtttctagtttcatgtgttttttatctcattgacaaagcatgcttcctatacaaagcaatgaaaaca

SEQ ID NO: 182682 - DNA, 504 bp, Homo sapiens
ccaaacactgacatcaaatgctgatgaggacagaaagcaatggcaactcccatttatgttgctaggtatttattaaatgaaacgaaagcttaggaccacacaaaagcctgctgacaattgtttatagcacttyattcataactgccaagaattaggtgcaaacaagctgcccatcaataggtaaactgataaacaaactaaagtacgtttatataattgattatcattcagtgataaagaggaatacactatcaagctacaaaatgacatagagaaatcttaaatgcattttgctaggtgaaaaaagccagcccgaaaagactaaatgagtgattctaactacagtttacccttgaacaatatgggtttgaacaggttcaaaaaatacatgtatcttttacaaacaaacttggacgtaaaacacattattgtgaaatgcaaaacgcacatatatgggagccagcttttcatcacacaggtttgaaggggctgactgcgagacct

SEQ ID NO: 182683 - DNA, 504 bp, Homo sapiens
ccaaacactgacatcaaatgctgatgaggacagaaagcaatggcaactcccatttatgttgctaggtatttattaaatgaaacgaaagcttaggaccacacaaaagcctgctgacaattgtttatagcactttattcataactgccaagaattaggtgcaaacaagctgcccatcaataggtaaactgataaacaaactaaagtacgtttatataattgattatcattcagtgataaagaggaatacactatcaagctacaaaatgacatagagaaatcttaaatgcattttgctaggtgaaaaaagccagcccgaaaagactaaatgartgattctaactacagtttacccttgaacaatatgggtttgaacaggttcaaaaaatacatgtatcttttacaaacaaacttggacgtaaaacacattattgtgaaatgcaaaacgcacatatatgggagccagcttttcatcacacaggtttgaaggggctgactgcgagacct

SEQ ID NO: 182684 - DNA, 504 bp, Homo sapiens
ccaaacactgacatcaaatgctgatgaggacagaaagcaatggcaactcccatttatgttgctaggtatttattaaatgaaacgaaagcttaggaccacacaaaagcctgctgacaattgtttatagcactttattcataactgccaagaattaggtgcaaacaagctgcccatcaataggtaaactgataaacaaactaaagtacgtttatataattgattatcattcagtgataaagaggaatacactatcaagctacaaaatgacatagagaaatcttaaatgcattttgctaggtgaaaaaagccagcccgaaaagactaaatgagtgattctaactacagtttacccttgaacaatatgggtytgaacaggttcaaaaaatacatgtatcttttacaaacaaacttggacgtaaaacacattattgtgaaatgcaaaacgcacatatatgggagccagcttttcatcacacaggtttgaaggggctgactgcgagacct

SEQ ID NO: 182685 - DNA, 527 bp, Homo sapiens
agactttgggggactgttgggaagtcatggttggttttgagatgtgaagacatgagatttgggagcagccaggggtggaatgtcatggtttggctgtgtccccactcaaatctcatcttgaattcccatgtgttgtggaagggatgctgtgggaggtaattgattaatgggrgcaggtctttcccatgttgctctcatgatattgaataagtctcacaagatctgatggttttataaggggagtttccctgcacaagctctctttttgcctgcttgcatccatgtaagatgtgacttcctcttccttggcttctgccatgattgtgaggttttcccagccacatggaacagtaagtccattaaacctttttcctgtatgaattacctcgtcttgggtatgtctttattaccagcatgaaaatggactaatacagacaccaaaccaaagtttaaaagaaaaaaaactcagaatagaccaagcttgctaagaagaacagcaaaaatctctacacctagacatattattt

SEQ ID NO: 182686 - DNA, 591 bp, Homo sapiens
tctcagctctccttttccctcttaccctctctctcttaacattgtaaacaacagacttacgttaaacttcatttctagtacacgccctatttaaaaaagagcagtacatcctgggaggaaatgaaactaaagaacagttagagtaactgtttaacctcagaattttaaaggcagttgtttctttcctaagcacatcaattcgtagtaaatgatgcttcggtttgatggacctttcaacgttatttattgaatatgtatttcggttgcctaccctgtagatatgtggatgaagagtctaactagaataatgacttgtaaacccaccatgagttatttggtttttgacttaaattcctatttgaatcccctttcccggaattttaagkgtctctacaactttgaataaagggaaatgcccccaagatgtcctgatctgactaattagtttaattctttcgggcttgctaagcatttctaaagcattagactaacagattcctgtgaagttctgtgcatatgtcccagccccaacaactatcaaagtctagaaacagatgttttcagtgttgctgagagaaacaaaaaatttcc

SEQ ID NO: 182687 - DNA, 562 bp, Homo sapiens
cgattatataacccacccctacttaaaattctttcagggtcttcttgtttttaggatagaggctcaaaggcttagcatagcttttatggccccacatgatctcatatctagccttacctcctctttgcttatatttctcccttccttcttttgtgctccagtcaccctggtcttcttccagttacaggataagctccctttccaccttaagctaatggggatctttgcaaatatttcactgccagcctcctctttctctcctcacctcttgacttctatttttacttcaatactcctccaaggcatctctcatgactctggttttttcaattcccctattatagtatagtagttcattaaayttaagatgcccttgattataagaaatactattacttatgtgctattttttacaagatttccaattgtaaggataaagtaccagtgattttaaggtgcatcccaatttcatagatgctcaaatctaaaaatgtaggtcttagaatgcattaaatatagtatgttatcttgacatagctgtaattttatatttatttgtgtt

SEQ ID NO: 182688 - DNA, 562 bp, Homo sapiens
cgattatataacccacccctacttaaaattctttcagggtcttcttgtttttaggatagaggctcaaaggcttagcatagcttttatggccccacatgatctcatatctagccttacctcctctttgcttatatttctcccttccttcttttgtgctccagtcaccctggtcttcttccagttacaggataagctccctttccaccttaagctaatggggatctttgcaaatatttcactgccagcctcctctttctctcctcacctcttgacttctatttttacttcaatactcctccaaggcatctctcatgactctggttttttcaattcccctattatagtatagtagttcattaaatttaagatgcccttgattataagaaatactattacttatgtgctattttttacaagatttycaattgtaaggataaagtaccagtgattttaaggtgcatcccaatttcatagatgctcaaatctaaaaatgtaggtcttagaatgcattaaatatagtatgttatcttgacatagctgtaattttatatttatttgtgtt

SEQ ID NO: 182689 - DNA, 536 bp, Homo sapiens
gtcctgctgtcagcactcccaccagtccagtagcccagaacccttaggcattgctttaagtactttcttgcaagatttccaactccagcaacccccttcctgctccctcaccagcacagtcccaccctgcatcaataacatggkggccttttcactcctttacccagtctaggggtcccaatagggaaaatcccatagccacaaggagaggaagtactgccacgtccttccttttcaccaggatctgggcagagttcggtctgtcttagtgaagacctttcagttccaggtgcctgaggaccctaacctcagccagcctctgtactctcagccaaagccaatcccaatccattctcacctcctaccatcaaagaagtgtcccaggtctgggccaggcgaggtggctgacacctgtaatcccagcactttgggaggccgaggcaggtggctcacctgaggtcaggagtccaagaccagcccggccaacatggtgaaaccccatctctactaaaaatacaaaaattagtctggcatga

SEQ ID NO: 182690 - DNA, 492 bp, Homo sapiens
  misc_feature (1)...(492): n = A,T,C or G
acggcgcgtctgaggatgcgtagtaaggataacgggcccggaagccggaagttcaaagccggcctccagccagagtgacggcctgcgcggactcccgccttagtgggcggagttgtgccgcgtctgatgcgcagttccctttatagcgcggcaagccgaatcctagaggctaacccggcaggtgggagggagaaagttgctttctgcaccaatagctgaggcgttcagggttgtccagggacgctaccctcacrtgtctggttccgagtgctgcgttcggctgtgctgggaagttgcgtagacagtggcctcgagaccctgcctgcctgaggaggcctcggttggatgcgaaggagctgcagcatccaggtacgctgccggctagggccgagcaggggctgccagtcccactgcctgcgcgcccacctgggccagtctccgcttgccgcgtcctcccatcccctagtctgcaggcctggtgcccttnnnnnn

SEQ ID NO: 182691 - DNA, 595 bp, Homo sapiens
aagcttaccttctaggccacaggtgtcagagctgagcagacaggtgggtaagctacagccktgttacttgtagtgaggtccaggaccatcaactgggagcttgaaaggaatgcaggactttgccaccccacttcccaaacctactgaaccagaatctccatctaataagatcctcaggtgactggagtatacactaaagtttgagaagcaccgtgaagcacaagtaagggaaaccttctcttaaatagccagacagtaactccctgtgtgccatccgcaccccatacatagacacatacactgtttggttaggtttcctgcttgccggcaagagccgcagagccaggatctgaggaaaggaaggccatcgggacacccagtcatggctgccctggaggcttcctttgcatcttaaaatggagatgccccacagatgtggctgcctcaggccagcacctcagggagggcatagggaaactgattttggcatctgatgtgctgggcaaccctgggcaagtcacacagattcctgagggttaagacctggacccagatggcaaagagaccagaggctccagagccatgcaggaacaat

SEQ ID NO: 182692 - DNA, 595 bp, Homo sapiens
aagcttaccttctaggccacaggtgtcagagctgagcagacaggtgggtaagctacagccgtgttacttgtagtgaggtccaggaccatcaactgggagcttgaaaggaatgcaggactttgccaccccacttcccaaacctactgaaccagaatctccatctaataagatcctcaggtgactggagtatacactaaagtttgagaagcaccgtgaagcacaagtaagggaaaccttctcttaaatagccagacagtaactccctgtgtgccatccgcaccccatacatagacacatacactgtttggttaggtttcctgcttgccrgcaagagccgcagagccaggatctgaggaaaggaaggccatcgggacacccagtcatggctgccctggaggcttcctttgcatcttaaaatggagatgccccacagatgtggctgcctcaggccagcacctcagggagggcatagggaaactgattttggcatctgatgtgctgggcaaccctgggcaagtcacacagattcctgagggttaagacctggacccagatggcaaagagaccagaggctccagagccatgcaggaacaat

SEQ ID NO: 182693 - DNA, 595 bp, Homo sapiens
aagcttaccttctaggccacaggtgtcagagctgagcagacaggtgggtaagctacagccgtgttacttgtagtgaggtccaggaccatcaactgggagcttgaaaggaatgcaggactttgccaccccacttcccaaacctactgaaccagaatctccatctaataagatcctcaggtgactggagtatacactaaagtttgagaagcaccgtgaagcacaagtaagggaaaccttctcttaaatagccagacagtaactccctgtgtgccatccgcaccccatacatagacacatacactgtttggttaggtttcctgcttgccggcaagagccgcagagccaggrtctgaggaaaggaaggccatcgggacacccagtcatggctgccctggaggcttcctttgcatcttaaaatggagatgccccacagatgtggctgcctcaggccagcacctcagggagggcatagggaaactgattttggcatctgatgtgctgggcaaccctgggcaagtcacacagattcctgagggttaagacctggacccagatggcaaagagaccagaggctccagagccatgcaggaacaat

SEQ ID NO: 182694 - DNA, 470 bp, Homo sapiens
gatgcgtggtgggcttaatacctaggtgatgggttgataggtgcagcaaaccaccatggcacacacaagtttacctatctaacaaacctacacaacctgcacatgtatctcagaacttaaaaaaataaaataattaaaaaaagaatgatagttacagatggatttttccctggcttgaattatgctgtagacttgaaacatcaacatgcaataactacaaaaataatcattaaacttgtaacaatttgaaataacaacatgtaataattactaaattgaaaagcattaatttttggaaatgatatytagggtcatcgtgtaatgcagaaataccagttgaaattatgattatataattataaaaccagcttgtttttctggaaacattttacatttatatttgatgttgattcttctctcttctaaaaaacaaagtagattaactttcatccttaaatgattgacctata

SEQ ID NO: 182695 - DNA, 470 bp, Homo sapiens
gatgcgtggtgggcttaatacctaggtgatgggttgataggtgcagcaaaccaccatggcacacacaagtttacctatctaacaaacctacacaacctgcacatgtatctcagaacttaaaaaaataaaataattaaaaaaagaatgatagttacagatggatttttccctggcttgaattatgctgtagacttgaaacatcaacatgcaataactacaaaaataatcattaaacttgtaacaatttgaaataacaacatgtaataattactaaattgaaaagcattaatttttggaaatgatatttagggtcatcgtgtaatgcagaaataccagttgaaattatgattatataattataaaaccagcttgtttttctggaaacattttacatttatatttgatgttkattcttctctcttctaaaaaacaaagtagattaactttcatccttaaatgattgacctata

SEQ ID NO: 182696 - DNA, 536 bp, Homo sapiens
actgctccagtgatggtgcaccaaaatctcacaaatcaccactaaagaacttactcatgtacccaaattccacctgtaccccaataacttatggaaaaataaaaataataaaaagaaaatattcaaaaagtgcttaaaataaaaataacaatacaacaataaaaagtaatgcaaatttcaaaatacaatataacaactatttacatagctttttttgtgttaggtattataagtaatctagagacgattttaagtataggaaaggatatgcacaggctgtgtgcaaatactactctattttgcataagggacttgaacattcacagattttggtattcttggggtggaagagggcgaatggagttggagccagtccccccagataccagggaacacctgtatataaaactaggaaagacacaactcatctttackgatagaaagcggatcaatggtcatctgtggatggaggtaggaggcatcattcaccaggaatgggcataagaaaacttttcagagtaaagtaataataatgt

SEQ ID NO: 182697 - DNA, 464 bp, Homo sapiens
gagaggcatatatggcaaacccacagctagtattgtactgaacacagaaaaactgaaagcctttcctctaagatccggaacaagataagtatgcccagtttcaccattgttattcaacatagtactggaagtccttcttagagcaatcagacagaagaaagaaataaaaggcaagtaaattggaaaggaagaagtcaaatttagatgtgtgcaratataatcttatgtttggaaaaacctaaaccctccatcaaaacactgttagaactgataaattcagtaaaatcacaggatacaaaatcaacatataaaaaccagcatcatttctatatgccaacagctaataatctgaaagagaaatcaagaaggtaatttcatttataaaagctacaaacaaaataaaatatctactaataaacttaaccaaagaagtgaaagttctctacagtgaaaactataaaaca

SEQ ID NO: 182698 - DNA, 364 bp, Homo sapiens
aggtcatttggatgaagttcacatgtaatgcaatctgagaaagtgagtgtgagcacaggaaaaagagagagggagagacactttagaggttataagaactgggagactggcacttcattatttagcacaatttactgcagcattcacatggtgctcttcccttcctcatctaccccagggacctcagccttggcacaattgatattttgtaccagatagttctttgttgtgtgggactgttctgtgcattgcaggatgtttggcagcatccctggcctctmccttctcagtgccagtggctctctcctctttcaagttgcgtcaaccaaaagtgattcccgacatggccaaatgtcccctgggg

SEQ ID NO: 182699 - DNA, 249 bp, Homo sapiens
ccttcagaactatgagaccatgagtttctgttgttttaagccatcctgcttgtggaattttgttacagaaacactaggaacctaatatactccacttctaaaagtcaggggacccgggtgcagaggctcacacttgcagtcccagcactttgggaggctgaggcagayggatcacttgagcccaggagttcaaaatgagtctgggcaacatggcgaagccccatctgtaccaaaaatactacaattagc

SEQ ID NO: 182700 - DNA, 673 bp, Homo sapiens
tctaacaaaaataaacaaacaaataaaagtcaggggaaggagtgggaaacgcatagttgtaaaaagctcyccagaaaattctgctgtacactttggtttatgaacactgaattaagtgctctcccaactctggaattctttgattccagactctagcttctggcactgtagattcatcatggaaatagtgaatttaagaaagatatgctctggtaatagaaaaagaggagctgtccccgtattcaggggcagaacgatggaaccatgctgtcagtgaaaaagaagaaaggtcttcaaggtggtgctgagacatctatcctcttttaggctcgctccacattccccaaactaagctaattaaaaggaaaaattgatgggtgctaccaatggatcaaatatctatttgaagtactaataaaagctatgaatcttctccccagaaatatgccaacactttcacagggctcaagacaccctgatccccatttgctgactttctagggatccatgaacattaccctaaaacccttgaatgctataatttgccaaggtcccagcatggcccaaaggtgctaacataaaaccttcagaaacacaatgatgtctactcttctctggtcctaacttctccctctgtaaaaagagaggattgattcattcctccaacaaatat

SEQ ID NO: 182701 - DNA, 563 bp, Homo sapiens
gagaattgtattattcttaccatcatcaccatcaccaccattatttgccaagagagaggtatatgcaaagtgctatagtggttcaaaggagggggcaatcrcttccaccaggaagacagtggagggtagtgtgaggataaatgtaaaacctgaaaatttaaacttgaacttgaaaggagactgtgtatgtgggaattttggatcaaaaggggattccaatagaagaaacagctgagttaaagcaaagcgatagaacactgataacaactatgaatggtgaatagagcattttggctgattgctgtgtacctaaatggagatgagggtggaaagatgcattggggggtaagactttgagaaccaagttcatttgagaaccaagttcatttgagaacaactacgaatggtgaatagagcattttggctgattgctgtgtacctaaatggaggtgagggtggaaagatgcattgggggataactatgagaaccaagttaagggaagtgtcatgagcagagctatgctccaaaaagatttagcaggccatctatacccattatgtct

SEQ ID NO: 182702 - DNA, 598 bp, Homo sapiens
atgtgcagggtctggtctccaggctgctgcagaattccagagctggcatttgctttgcaaagtgcgtttatgatcctcttatgtgtcaggagccagggatatggaggagagcagacatcatctctttccttatgcagtttataatctactggcacacactgtatggcgttgagaggggacagcaggtatctttggaatgttaggagattacctggttcccaagatgtccrattgcttttattatcccagggttccctggccaccaactaggcctgtggaatctctctctacaaaatgggtagcattaatattttcattttatggttgaggaaactgaggcccagaaagagtaactaactcacccaaggtctgtctgttagcataactagtattaaaacccagatagtcttatctcagggacttcaaactttaaccacaaagatgacctgtctcaacgaaggcactggcaatactgatggagaagagagaattgaccggaaatattaaagatgtagaaaaataagtcttctgccctttctccataacctcaagttagttaagaggttagcagaggtgatagaatgaaacaaaatgtttc

SEQ ID NO: 182703 - DNA, 598 bp, Homo sapiens
atgtgcagggtctggtctccaggctgctgcagaattccagagctggcatttgctttgcaaagtgcgtttatgatcctcttatgtgtcaggagccagggatatggaggagagcagacatcatctctttccttatgcagtttataatctactggcacacactgtatggcgttgagaggggacagcaggtatctttggaatgttaggagattacctggttcccaagatgtccgattgcttttattatcccagggttccctggccaccaactaggcctgtggaatctctctctacwaaatgggtagcattaatattttcattttatggttgaggaaactgaggcccagaaagagtaactaactcacccaaggtctgtctgttagcataactagtattaaaacccagatagtcttatctcagggacttcaaactttaaccacaaagatgacctgtctcaacgaaggcactggcaatactgatggagaagagagaattgaccggaaatattaaagatgtagaaaaataagtcttctgccctttctccataacctcaagttagttaagaggttagcagaggtgatagaatgaaacaaaatgtttc

SEQ ID NO: 182704 - DNA, 598 bp, Homo sapiens
atgtgcagggtctggtctccaggctgctgcagaattccagagctggcatttgctttgcaaagtgcgtttatgatcctcttatgtgtcaggagccagggatatggaggagagcagacatcatctctttccttatgcagtttataatctactggcacacactgtatggcgttgagaggggacagcaggtatctttggaatgttaggagattacctggttcccaagatgtccgattgcttttattatcccagggttccctggccaccaactaggcctgtggaatctctctctacaaaatgggtagcattaatattttcattttatggttgaggaaactgaggcccagaaagagtaactaactcacccaaggtctgtctgttagcataactagtattaaaacccagatagtcttatctcagggacttcaaactttaaccacaaagatgacctgtctcaacgaaggcactggcaatactgatggagaagagagaattgaccggaaatattaaagawgtagaaaaataagtcttctgccctttctccataacctcaagttagttaagaggttagcagaggtgatagaatgaaacaaaatgtttc

SEQ ID NO: 182705 - DNA, 536 bp, Homo sapiens
gtgctgggttccagtacagactctaccactattagctatgtgacctgagacaagctatttaacctttctgtggctgagtttttttgcctatgggatgggtataatgatagtaactacctaccagaacttctgtaagaaygggctgatggaacacatgagaccatccgcagagctgggcacagcacaagtgctcacagttagagttgttgctgttgctatagtaattggtattattattattagcagcagcagcacttgagcttcagaatatcccagtgaggccaccacagaagcagatcggaggttagaatctgcttcgaaaatgagggaacagggtaataaggctcagagaggggaagcatattgcccaagattacccagcagagggcctgaaatgagagggctcattttattgtgtgaattccagaaaactgctcttttcatacaaacatcacctccaagaaaagcagaaggttggggagtttgcaactgttctgcccaaagcctcaggatatccatttaccccaaggccaggc

SEQ ID NO: 182706 - DNA, 536 bp, Homo sapiens
gtgctgggttccagtacagactctaccactattagctatgtgacctgagacaagctatttaacctttctgtggctgagtttttttgcctatgggatgggtataatgatagtaactacctaccagaacttctgtaagaacgggctgatggaacacatgagaccatccgcagagctgggcacagcacaagtgctcacagttagagttgttgctgttgctatagtaattggtattattattattagcagcagcagcacttgagcttcagaatatcccagtgaggccaccacagaagcagatcrgaggttagaatctgcttcgaaaatgagggaacagggtaataaggctcagagaggggaagcatattgcccaagattacccagcagagggcctgaaatgagagggctcattttattgtgtgaattccagaaaactgctcttttcatacaaacatcacctccaagaaaagcagaaggttggggagtttgcaactgttctgcccaaagcctcaggatatccatttaccccaaggccaggc

SEQ ID NO: 182707 - DNA, 466 bp, Homo sapiens
gaagctgtagttctgtcaaagggctcccagactgccacagggctgggcatggagttaaataaaatgtacctttgcagctacagcagaaagtcagaggccattggaatctgcagctgcctgactccagctctgcctcttactctgtttctctggtccctgatactttcttctgtttatggcatgtgttactctgcataaactcttcttcctgaaagttcacactgactcttaaaccttggtccactgtccagggtctgctgcatagcctaagcattgtgctcactcaggacatggtatctggaaatgctttccatccttcatgccaagctaacagcctctgaccccaggccctcmcttttgttccctcttttgattccgctcatttcatcagcatgactcgcagagttttcctcatttgtttttgaattctggggtagtgatttaatagtaataggttcaaagatca

SEQ ID NO: 182708 - DNA, 484 bp, Homo sapiens
caatcgcttcccgccctaagctttccatggcaacaggcttgtgcccagctgccttcttccatgaggccctggtctttgcgttgcaagtgagtcttagtggaataaggaagggggaaaatacctgccaggagaagtggttatgtaacaatctattacaacattcctccagtgcagcaggagcagtgtcaaaaacatattaaggttgaaacattataaatgataaaacattgatgtatacctattgtttttatggtacaaatttcctaaaataatgtgcctcaaatttctcttcgttggtaggaatgcgcgaaaaatgaaatggaatttgctccctgtatgtagtgacactcaatggtggacatccttcaaagttaggtatatcagaatctagtatgggacagcagagtgtgaggcttttatgawcatccaaagagatcattattggttcttttttaaaaagttgcaaaacgctgctgtagtgaga

SEQ ID NO: 182709 - DNA, 370 bp, Homo sapiens
tatgcccctaactactgctgtacctctgacaacagggacatttagtctctgggtctcagtttacttgtgaatacaatggtacaacaccattcgccttgcagaccccaaatgatgaagttctatttcagaactgtgtttcacaattgagaagatttttaaaaaatacatattgctgggacccacctcaggccatcccaggaccatgcggagctcacgagaaagtgctgagctaatttttatgaactggttggcaaggtggctctctttccaggacatgagcttatgtggtctaatacaacatgaattctgttagttgaaatcacascaccttaaaagcaaaggaagagtcagtatgtctgccatagactga

SEQ ID NO: 182710 - DNA, 552 bp, Homo sapiens
ttgatggcatcctttacagctgctaaccaaaaccttccagagctcaggacctcagtggattggtgtcacacttaayccatgcagcttgggaagaggtgaagaaatggttctgaatgacctgtaacctgtagcagggaggcccacacaggccaagacctcatttactttaggctaagaaaactgggctcaggaaagcacttctttataaaagaaagtgtgatgttgtaggtaagatgtcaggctccagagccaaagtctctgtttgaatcccagctctgctcattactaactttgggacttttggaaaaatctctttatttcttagtactgtagttttttcatctgtaaaatggcaattgtaataatacagactttagaaatttgttttgagattaagcactgtaagtgtctgacacatagtaaatactcaaatgttagctattattatcaatgctgcaaactctcatagcctcttctttatcacagcctcgcattctccattcttgcttctcactgagttttaccacccacttccatgagagtttctgggaa

SEQ ID NO: 182711 - DNA, 552 bp, Homo sapiens
ttgatggcatcctttacagctgctaaccaaaaccttccagagctcaggacctcagtggattggtgtcacacttaatccatgcagcttkggaagaggtgaagaaatggttctgaatgacctgtaacctgtagcagggaggcccacacaggccaagacctcatttactttaggctaagaaaactgggctcaggaaagcacttctttataaaagaaagtgtgatgttgtaggtaagatgtcaggctccagagccaaagtctctgtttgaatcccagctctgctcattactaactttgggacttttggaaaaatctctttatttcttagtactgtagttttttcatctgtaaaatggcaattgtaataatacagactttagaaatttgttttgagattaagcactgtaagtgtctgacacatagtaaatactcaaatgttagctattattatcaatgctgcaaactctcatagcctcttctttatcacagcctcgcattctccattcttgcttctcactgagttttaccacccacttccatgagagtttctgggaa

SEQ ID NO: 182712 - DNA, 552 bp, Homo sapiens
ttgatggcatcctttacagctgctaaccaaaaccttccagagctcaggacctcagtggattggtgtcacacttaatccatgcagcttgggaagaggtgragaaatggttctgaatgacctgtaacctgtagcagggaggcccacacaggccaagacctcatttactttaggctaagaaaactgggctcaggaaagcacttctttataaaagaaagtgtgatgttgtaggtaagatgtcaggctccagagccaaagtctctgtttgaatcccagctctgctcattactaactttgggacttttggaaaaatctctttatttcttagtactgtagttttttcatctgtaaaatggcaattgtaataatacagactttagaaatttgttttgagattaagcactgtaagtgtctgacacatagtaaatactcaaatgttagctattattatcaatgctgcaaactctcatagcctcttctttatcacagcctcgcattctccattcttgcttctcactgagttttaccacccacttccatgagagtttctgggaa

SEQ ID NO: 182713 - DNA, 525 bp, Homo sapiens
tactaatatagtcatgaaagtttcaaccaaagtactgattataaatcagaggatattttggcttctccctttctaatgtattttccaatctgcatccataaataggggagagaagtgttgagttacaactcccacatggggaataagaagtagttgcatctgtcacaggagctaggaagggtagaaggttgttgattactgtrgcaatgtagcactttatttattaagggtcagctatcatgccccatccttagcaaatattccttaagtgcctactgtgtccagggtattgaactatgtggttaaaagagagagaaataggagacatttctatagcctagatcaggggtgtctcaaagcctagacattgagacaggctagatcaggggtgtccaatcttttggcttctctgggctgcattgaaagaagaagcattgtcttggaccacacatcacatacactaacactaacaatagctgatgagctaaaaaaaaaatcacacaaaaagtctcataatgttttaag

SEQ ID NO: 182714 - DNA, 420 bp, Homo sapiens
cttaaaactgaattctcagcaataatgagatgggaggtcagacaagccccctaataccctcttcctttggcatttagacacaatgactggccctcattaatgttaaaatagagattataagactgacagaagatactctttgtaacaataagataccaaattataaacagggtgtgaggccatgccaggcaaaggttaagtcacacactcctacatktaaagaataaactatattctaactccttaaggcttctcttttcttttttttctttttctagaagctaaacaacactggcctcaaaataaacagtattaaaatgattacaactcactcagcttacaaaggctgactaattgaccctctgttctgccagccataattacagacaagaaactgattttggtaactctctccagata

SEQ ID NO: 182715 - DNA, 397 bp, Homo sapiens
gctactaagatttatggaggtagttgggggtaaccaggcattataaatcatctttgaacccactcctggaaatagcggacaacctaacagaattcatctgttttactgtttagtgacacccctattttatggagaaaatgatacagtcagaagacctcatggatatttttggtagtaatctcaaagatgtgggtaayagctggcatttcggtaccatttctttgggtaccagttgacgaaggaagagtggtacatacatttagcacatatctcattcttttaagataaagataaggttgttaatgaatatatttaaaaaaataaagacaggagacaaagctgagtatgacaatgtggagataatgatattttatggataaaaaaggttcactgagat

SEQ ID NO: 182716 - DNA, 482 bp, Homo sapiens
ttttctgtagaccaaaaaaagaaaataaaagagagagagagtaaaaattaatatctaatagaaagagaggataaaaccaaagggaatcartattcctcagggaagattagcagtctaaaattttacctgagtgcacctctattttatctatagataattttaattcaatatgccttatatctatatatttgataaataaatctaaaatgcacacaataaatatttttgtagcaatatttatctaagccagtggaataaatatatttggtttgaaataagaaaacacccttcaaacacaaaaagagtttgtgcagcttcaaatgaatcaggggaccctcttttggggagaagcaggaatcaagagaattctcacatttacagaatttttctgcactctaatagaatgaacactgtattagtcccccagtattttctatggaagagaaataaggatttgcatttgtgaaaaaaaaaatttctta

SEQ ID NO: 182717 - DNA, 476 bp, Homo sapiens
gggaaacacatacatgttttttacaaaaaactaaaccagatggctttttcaatctgaactgtgtgtactaaataagaaatgttcatcctggcccattttcatgcctttttattgttattactattgctactatgatagcatacattatttgaaaaacataaaataaattaatatcaaatatcacttgagaataaaatatccagttctatataagaacatttaattaatccattacataatacatattataagcttgtatatartagaaaataaatcacaaacttttcaagtcataatagaataaaacaaacagagctgagctgtctttaactgattttgataagaagaaatgctgtaaaatgaatgtatacatatacttactgcaattttatttcacaaggaaacatagaggataattcagctcaaaaaatagttattttcatgagtttttctttaaattatgaaattttttaaat

SEQ ID NO: 182718 - DNA, 445 bp, Homo sapiens
aagggacactgtgaactttcgattcatctgagtttattggaagggaaaaaagtcactaaaaatccatgataataaaattacttaatgaatattgaataacctatgataagttattgatataaatttagtaaatgctacattttaaataaataatataaataagtttataaayaatgcctttaagtcaatcataaagcatatgctttaaaataagagtggttagggtaactagacaggttttgctatgttttatgtggagatagaggagtgtattttagaaattgatgactttctctgtaaagttaagtcaagcgattattttaattttttccctttatggttaagactcataaaatattgctttatttctagaaatagcgttgatttttactgtcttttccttttgaaaactaacactccaaagagaacactagacttcctgcat

SEQ ID NO: 182719 - DNA, 553 bp, Homo sapiens
aaaaataaagtgttaaatttaaagtcaaatatatctgattttattaaatctgaatatattaagcactccatataaaagttgaagtttaaaataatagaaaaaaacctgatttatgctgcttacaggagatacaactgaaaataaatatatacaaaagtaagaagtgaaacagtaatagaagataagctgcacaaccccaagaaagatttgatagagcaataatatcagatgatgacacatttcataatgctacaataacttatccaaggaaaagcttagaatgctaartttgaacataccaacatatctataaaatacctaaagaaaatttgatataactaaaaatgaaaatagacaaacttaccatcataatgggagattttaacacatatcatttacttgttgatagaaaaacgacaaaaaaccataaggatgtagaagatacctcaatatcaacaacaacaaaaatcacccaaaatattaagcaataaacacattcctcaaatttctctgtatgagttagaaaaaatcatgtggttcttttggagtatag

SEQ ID NO: 182720 - DNA, 516 bp, Homo sapiens
  misc_feature (1)...(516): n = A,T,C or G
naattccatattataagtgaaaatctggttctaagatcttaacaatacttcttcccaaatcaagagaagtctaaatttttactttaaaaatatgttcatctttgctctgcatttattcaatggtgttccagtctaggcctacttactagcttgtactgacttcagatatttttataackttccattctctttatggtttatttattcccccctttattgaattactacagtctagtgcatataaaaatatttgaaagaacagctgtgaattaaaaagacagctctgaactatacagatttaataaatctaaaattttatttaaaatttataaattctttgtttctttctgtctgtttttgcgtcttggtagaattttgaagtggtgccacttgattcctttctcctcttcctttgtgtaattgctttactagtgatctgtataatttcaggtgtcttcatgatggtgaacatctacctttcacttccaagtttaagatacctttgagtgttgcttg

SEQ ID NO: 182721 - DNA, 585 bp, Homo sapiens
aaagctttcaattgactgagaatgttcacatgataacaaatgaagaattcaaaaacatttgtatcccctcaaatgttgtctattattatggtataaagtagcatactgttgttattttaaagttggatgcagttatttatgaaataaagccacagaaaagtgtaattaattgttattttgtttaacgtgctcttttattttaatagcatctccattcctcctagggttataaaacttttgaataatggcttgttcatcaagtgttgatgtgcttatgctttttagatttatttttactgtgcctttaacatagaatatttctgcctttgcaaactagtaattttgataattaaaactcaggatttggagattctcgagttgagctttaagacagcaggggtttttcagctatgtcacactctgtgtcttctgctagcccagtcctgtttggcagctctagacattactgttgttcgaattgtctcctttagtccattcaggtctgaacaaaactaagtttatagacagtgtcagaygtgtattaattaaatctaaacaagtgagcttaatgtctcagccacaaca

SEQ ID NO: 182722 - DNA, 616 bp, Homo sapiens
aaaaacacttagaatttcctaagtccagctgttttcatgaggattctcatagcatgacaaattacccttttcttgctcaagactgtcccagtctcagcactaaaagtgggtcacgaatgttcaaaaactctgttcatataagaaacctttagcccaacaactaatcatactgtctcttctgctttctgccacacatctgggagtaaaaagttcccaatcaattcttccattctaaatcatatactgrttgttggaagaactaaatttacatgggaatgcctctggcctggtaataaatcgcacatgcttttttgtttgtttgttttgctgtctacatttcctttgctaacctttgatatgggaaatatttgtaaaatgaggataccattaaatatgcaacacctttttaatatacttttcattccataaacttttttaaacattctgatttctccatatcttttctctttctgggctttggtagtttttgagagtgaaatatactccagttttcccctcaaaggtaaaaggaaactctatcagaagaggttgatctgaattattgatgtgtattttatctctatgtgttctgtgcctctccgcctgattttttcag

SEQ ID NO: 182723 - DNA, 623 bp, Homo sapiens
gttcttgttgtagaagagggcaagatatttttgaataatctaaagaggaggaaaattatattctacctctttccaaaatagtttgaaaaacaaagtaacaggatttgagtactaaccctaggagctaacatggaaggaggactgggatgcaccatggcttcagagaaattgagatcaaaaggggggttttgaaactggaacagttgggcacaatactatgcctaggaaacatcacagccacctctatgtgacaaagatactcactcagaaatctcttgtattcgggctaaactgaagatgactagaccctagaaaccagacagaagcacagagacccaaaaacaatttgaggatgcccatggggccaaaatataamgaagttcaaaaaaggaggcagaacatggtgtctgatgtctgataggaggaatctaggcaagaagactgaactcagagacaagattgtagtttccaggaagcctagaagggcagaaccttaatctagaaacctggcatgctaacctgggacccagtaactggaggagacctaattgctcctctctgtttttggcaagagaactcgagggctggacggagtgtctgagatcagggagttgtagaacctt

SEQ ID NO: 182724 - DNA, 616 bp, Homo sapiens
aaaaacacttagaatttcctaagtccagctgttttcatgaggattctcatagcatgacaaattacccttttcttgctcaagactgtcccagtctcagcactaaaagtgggtcacgaatgttcaaaaactctgttcatataagaaacctttagcccaacaactaatcatactgtctcttctgctttctgccacacatctgggagtaaaaagttcccaatcaattcttccattctaaatcatatactggttgttggaagaactaaatttacatgggaatgcctctggcctggtaataaatcgcacatgcttttttgtttgtttgttttgctgtctacatttcctttgctaacctttgatatgggaaatatttgtaaartgaggataccattaaatatgcaacacctttttaatatacttttcattccataaacttttttaaacattctgatttctccatatcttttctctttctgggctttggtagtttttgagagtgaaatatactccagttttcccctcaaaggtaaaaggaaactctatcagaagaggttgatctgaattattgatgtgtattttatctctatgtgttctgtgcctctccgcctgattttttcag

SEQ ID NO: 182725 - DNA, 504 bp, Homo sapiens
tgctaaccctgaaaccatgtaagctgaattcaaataaaccttatgactgataatgcatgtgcctacatttgtactgtaatgatttttttatgattttgtaaacttgatgattgtattagaaaacatcagatagtataagaaaattatgaaaatgattaaaataaaatatggtaacatgcaagacaagtaaattatttttatcatggattattctttgcaaagagctcaaagcatcttccacgtgttcagtcttttgtattacttgactatgcaatgtactgacagaagatgagctttgtctactctaacatgaaggatttacataccccttaatagtgactccactggagaacaaaagccactaatgcattttttttgacttcctaattttattttaggttcacacasgttatcaaaaagtaaagggaaatgactaaacaaactcacttattatacttattgatggctatgtattgacttcacagtaaatgataactaaagtct

SEQ ID NO: 182726 - DNA, 504 bp, Homo sapiens
tgctaaccctgaaaccatgtaagctgaattcaaataaaccttatgactgataatgcatgtgcctacatttgtactgtaatgatttttttatgattttgtaaacttgatgattgtattagaaaacatcagatagtataagaaaattatgaaaatgattaaaataaaatatggtaacatgcaagacaagtaaattatttttatcatggattattctttgcaaagagctcaaagcatcttccacgtgttcagtcttttgtattacttgactatgcaatgtactgacagaagatgagctttgtctactctaacatgaaggatttacataccccttaatagtgactccactggagaacaaaagccactaatgcattttttttgacttcctaattttattttaggttcacacaggttatcaaaaagtaaagggaaatgactaaacaaactcactyattatacttattgatggctatgtattgacttcacagtaaatgataactaaagtct

SEQ ID NO: 182727 - DNA, 570 bp, Homo sapiens
tctgcagattcattttatcaggatctcagtattatacatcacaactgtaatgtgtaacatattttcagtacatatctttattgtacgttataggctaaagtagcataattatcattatagtaaggttttacaagagactttatgttttaatttttatgttcaaagttatttaagtagtcactgcaagaagaatyttaaaaaatactcataagttatactataaaaccagtccttggagattttaaattataaaaaatttttagggggtcttttatgagaagaaatattttatcaataagggagtaaacattttcaatgcatgctcttcatttcacattttgcttcagcttgcaccaagtggttattttgcaggaaaacaaaacaaaacaaaaaaaatattaaagactcaactctgctgcactaaagtaaatcaaaagcaactgcagaaacaaaaagctgtttaaatgcaaaaccttgccaacttttctgtcagggatacaacttttaaatggtgtctaaatattttaagcataataagaaatagatctctaaaacttatatcgctatcca

SEQ ID NO: 182728 - DNA, 534 bp, Homo sapiens
tgaaaaaccaaaacaaaataatgttaacaaaaactacaacatctatattgaagcatttcataaagaactactaattttgaaaagaataataaagtgaatgtctaattaaatggcgcatttttaaaagacttcttgcaaacactctttttgctgtcacttaaaatttgtgctccttagagagtgaaaggagagaaccaggaatcattaagcctagtaccataatgaaatacctgcgtgatgaaacaatctgtacracaagcctccatgatgcaggtttacctgtgtaacaagcctgcacttgtacccctgaacttaaaataacagttaaaaaacattgtgtgcttatcataatttcttgaaacaaattgtatatgcaaaactgtgcctctgcatctgttaaaattaccctgattggccacttgcattctcagagagaagggtatagagctaattgaccttgccagagaccaaatgtacctactgtgttttaatttggtgtgcaattctatgtctgtgcaaattttctcatgccaa

SEQ ID NO: 182729 - DNA, 534 bp, Homo sapiens
tgaaaaaccaaaacaaaataatgttaacaaaaactacaacatctatattgaagcatttcataaagaactactaattttgaaaagaataataaagtgaatgtctaattaaatggcgcatttttaaaagacttcttgcaaacactctttttgctgtcacttaaaatttgtgctccttagagagtgaaaggagagaaccaggaatcattaagcctagtaccataatgaaatacctgcgtgatgaaacaatctgtacgacaagcctccatgatgcaggtttacctgtgtaacaagcctgcacttgtacccctgaacttaaaataacagttaaaaaacattgtgtgcttatcataatttcttgaaacaaattgyatatgcaaaactgtgcctctgcatctgttaaaattaccctgattggccacttgcattctcagagagaagggtatagagctaattgaccttgccagagaccaaatgtacctactgtgttttaatttggtgtgcaattctatgtctgtgcaaattttctcatgccaa

SEQ ID NO: 182730 - DNA, 570 bp, Homo sapiens
tgggagggtctacaaaacatgacattttaagttcttatttctggtgttgaatgtaaaatttcttataggttaataattgaagaatgaattattgatgctaaatacaatgtgagaaatattttaaagcttttacattaatatagaaactgtttattttttaaattttttcataaaaatgtttacttttaaatttttttcatactcctcaataacaacatgcctgtatttaatgttaaaatgagtggtattcatatatttagttgggtttccatctgcaaaaaaagctattccctctaaatcctcattttaaaattataatattaaaggagataaatgtgacatggctatgtcatttcaagatcagtcaaaatagaaaaawtatgtacttcattttaacttatgtaaccaaagtttacatttaaaagtttaattccaaagtaagttttcttgtgtcacttctttttgaggtgagttcatttttacagtgttcacttaagacaaattccaagcatctcagggcaggatattgccctcttctctcacattttatacagcgcctagtaacattta

SEQ ID NO: 182731 - DNA, 570 bp, Homo sapiens
ggtcagaatatagaaatgacttccaaagtatcctctcttgckttttttttcctttcagtcatccgtgggtctatctgtgctttaataatgcttccaatccagttcagatcacttttcagtcctaccaataatattacaccctgatcctgatagtacaaactgttacattttccacttcacagatcccaatctgcaccactgattatgaaacaaatattctttgttcctgaatgactgtagatgtggtggagagtaccaaagggtcacagcctctctcacactaaaaacaagaataaagcagtgagttgccctctctcaattcaaacagctgtaaacccaacaagtacatggcctctaattctcctactcctggaggaaatctcttgactgcacttacatttaggccactaaggagaaaaaacctaccctcaaatgaatatatcagcacacaatagaaatacacaacaaagtaaaatatttaataaattgtttgaggtaaatcatgaaagtataaccctaaaaaccccaaaatagacatagcattgaatcctttgaagactcaaatttaca

SEQ ID NO: 182732 - DNA, 570 bp, Homo sapiens
ggtcagaatatagaaatgacttccaaagtatcctctcttgcgttttttttcctttcagtcatccrtgggtctatctgtgctttaataatgcttccaatccagttcagatcacttttcagtcctaccaataatattacaccctgatcctgatagtacaaactgttacattttccacttcacagatcccaatctgcaccactgattatgaaacaaatattctttgttcctgaatgactgtagatgtggtggagagtaccaaagggtcacagcctctctcacactaaaaacaagaataaagcagtgagttgccctctctcaattcaaacagctgtaaacccaacaagtacatggcctctaattctcctactcctggaggaaatctcttgactgcacttacatttaggccactaaggagaaaaaacctaccctcaaatgaatatatcagcacacaatagaaatacacaacaaagtaaaatatttaataaattgtttgaggtaaatcatgaaagtataaccctaaaaaccccaaaatagacatagcattgaatcctttgaagactcaaatttaca

SEQ ID NO: 182733 - DNA, 435 bp, Homo sapiens
ggtgcacacatacatacacacacacacacacacacacacagaggaagaaacaagaatctatgaaagtgcttctctgcactcatgagaatggatcacagatgatctgctatctccaatttttaaatacagacctcttcatatgaatgatatcctctgaagggcactgaggcctctggaattaaggaagcctgtaattcttccaactactacagcccttatctcctaagagagcttttcctcastgcctcacaggaatggcaatatcaccaccaacagcattccttatgcaggaatgaagtggtgatattttaaaaatcatcttctgaataccgactttgtgccctacacttctcgtgtgtcatctcagttgtgtctaatcctcacagtcctttgagggaggaatatatattcccaatgttacacacttccgaattc

SEQ ID NO: 182734 - DNA, 503 bp, Homo sapiens
ctctgctaccaaacattggaattcatttcttctgtcccatatgtttgtacacattaaggaatctctcttcaattccccacttgacccttcccagacactgatatctgtcattctactctctgcctccatgagatcaacttttttagcatccacatatgaatgagaacatgcaatatttgtctttctgtgcctggcttatttcacttaacataatgacctccagttccatccatattgcagcaaatgacaggacttcattcttttttattcttttcatgaccatamagtattccattgtatatatatacatatacaccactttttctttatccatttatccattgatggatacttaggttgattccacatctttattttttttttcatatacctgctggctatttgtatgtattcttttgagaaatgtctatgcatgtcctttgcccactttttaatggacaagagttgttggttgtttggtttttacatagtgatttggtttg

SEQ ID NO: 182735 - DNA, 576 bp, Homo sapiens
atgatccagccatctcactgctgggtatatacccaaaagaaaggaaatcagtatatgaaagagaaatctgcactcccatgtttattgcagcactatttacaatagccaagcttttgaagcaacctgtgtccatcaaaagatgaatggatagagaaaatttggtacatatatacaatggagtactattcagccataaaaacaatgagatgctgtcctttgcaacaacatgaatggaactggaggtcatcatgttaagtgaaataagccaggcacagaaagataaactttgcatgttctcacttatttgtgggagctaaaaatgagaacaattgaattcatggaaatagagtagaaggatattatcagaggctgggaaggygagttggggggtagtggggaagtggaaatggttaataggtacaaaaaaagtaattagagaatgtgaatgagacctagtatttgatagcacaagagggtggggcgagtatagttaataataatttaattgtacattttaaaataactaaaagaatataattggattgtttgtaacagaaaagataaatgcttgataaa

SEQ ID NO: 182736 - DNA, 544 bp, Homo sapiens
gtaactcaacactcctgtctcagtgtagcaaccccaacccaaataagcaacctccacatacaccatgaatttactgaaaagaagatctcactcttacctcgagaatgtcacaaaacccttgtcaggggtgatacaagaaagtggagtggagtgggttgctgaggagcaagactctatactttcaatcaattcaacaactgttgatcatctgctctacaccaacttgcaccctcggtcacagcagtaaaccagacagagcaatcccccagccatgtaaagcttaacattcaggcytaaggataaggagtcctttgggagcacagccctacccagggcagcccatttcttcacacaggcattttattattattattttttgctttgttgactgatacgtaaattgctcaaataagttctcatgattcagaattacaaagactaagaagtaacattaaatacgtaaaagggaacagcctgttagtgcctagacctgaattcaaacccagatgcttttagctacacaaatagatgtgtctcagggatt

SEQ ID NO: 182737 - DNA, 544 bp, Homo sapiens
gtaactcaacactcctgtctcagtgtagcaaccccaacccaaataagcaacctccacatacaccatgaatttactgaaaagaagatctcactcttacctcgagaatgtcacaaaacccttgtcaggggtgatacaagaaagtggagtggagtgggttgctgaggagcaagactctatactttcaatcaattcaacaactgttgatcatctgctctacaccaacttgcaccctcggtcacagcagtaaaccagacagagcaatcccccagccatgtaaagcttaacattcaggcctaaggataaggagtcctttgggagcacagccctacccagggcagcccatttcttcacacaggcattttattattattattttttgctttgttgactgatacgtaaattgctcaaataagttctcatgattcagaattacaaagactaagaagtaacattaartacgtaaaagggaacagcctgttagtgcctagacctgaattcaaacccagatgcttttagctacacaaatagatgtgtctcagggatt

SEQ ID NO: 182738 - DNA, 544 bp, Homo sapiens
gtaactcaacactcctgtctcagtgtagcaaccccaacccaaataagcaacctccacatacaccatgaatttactgaaaagaagatctcactcttacctcgagaatgtcacaaaacccttgtcaggggtgatacaagaaagtggagtggagtgggttgctgaggagcaagactctatactttcaatcaattcaacaactgttgatcatctgctctacaccaacttgcaccctcggtcacagcagtaaaccagacagagcaatcccccagccatgtaaagcttaacattcaggcctaaggataaggagtcctttgggagcacagccctacccagggcagcccatttcttcacacaggcattttattattattattttttgctttgttgactgatacgtaaattgctcaaataagttctcatgattcagaattacaaagactaagaagtaacattaaatacgtaaaagggaacagcctgttagtgcytagacctgaattcaaacccagatgcttttagctacacaaatagatgtgtctcagggatt

SEQ ID NO: 182739 - DNA, 409 bp, Homo sapiens
aaacttctgtttcaggagaacacacatcatttccatctagtttctttagaaaaagtaagttcatggccactcttgagttcaacatggtaaggatgtacacacytcctccaggaagagatcacaggtcttcaagccaatgtaataacttatcacaaaaatccaaaatctaggaactgttgataaccatagtaaacagatggttatcattttctaaaattgttaaaaatacagttgaccctagaacaacatgggtttgaactgtgtgggtccacttacacgggactttttttcaaaacagttacacccagcaagactgcttctcctgcctccccttccaccttctccacttcttctgccttttccacccctgagacagcaagaccaacccttctccttcctcttcctcagc

SEQ ID NO: 182740 - DNA, 415 bp, Homo sapiens
ccagtgttgtgctcgaatcataagccccagtctctcctcaatagactgcactcaaatcttttttgttcctggaaagtcttgccctcatctctcctcttaactaaatgctgctggtctggtcaggtgcagtagcccatggctggtgtcccgttaccttctaaggtgtgcaaggaagtccctatgcctcggttctggagtagcagggaaaggtggccacctcagctcagcttctaacttctgtgcctcctgggatttgagagttagcagaaattmtgcctccactcactcagaaaatgcctacagcttctgggttttgggtgtttgtgttctcttctgtcacctgtacatgctaaaaaaaaagccctgatgccttcactccactgcaggtcctttccattgtaaaggttctgaaggc

SEQ ID NO: 182741 - DNA, 444 bp, Homo sapiens
attctgaaatcatcctcaacttgctggccrcatcgacccctaacttattttactctgaaaggtttaagttgaaactactgaagttactcactttgaggttggaagggacctttagtgatggggatgcccctccccttcccagatgcttcagttctcaataagccagtgcttgaatacctcctggggcagggttcttgctcctgctgcaaggctgttgcattgttgcagttttagtttttggttcctttccgtactctgaaacgttaagaagtttccctgaactaagaagtctaggaacaggtgatgcaggcagggtggaggtagcaagactccatctactgaggctgggatgtgggagagtttatcaagacagagacccagaccctggagcctggtaacacttgaaggtgaactttgcatcagaaacaagatccccaggggtgg

SEQ ID NO: 182742 - DNA, 458 bp, Homo sapiens
gtttcatccagctgcattctgaaatcatcctcaacttgctggccacatcgacccctaacttattttactctgaaaggtttaagttgaaactactgaagttactcactttgaggttggaagggacctttagtgatggggatgcccctccccttcccagatgcttcagttctcaataagccagtgcttgaatacctcctggggcagggttcttgctcctgctgcaaggctgttgcattgttgcagttttagtttttggttcctttccgtactctgaaacrttaagaagtttccctgaactaagaagtctaggaacaggtgatgcaggcagggtggaggtagcaagactccatctactgaggctgggatgtgggagagtttatcaagacagagacccagaccctggagcctggtaacacttgaaggtgaactttgcatcagaaacaagatccccaggggtg

SEQ ID NO: 182743 - DNA, 608 bp, Homo sapiens
taatcatctacctagaaaaaccaacagagtcaatagacaaactgttagaactgacatagattcagcaagatgccagatgcaagtgcaacctataaagctggtttctcatagtgaaaagcagcaggccaggctgcaggcacagcaacacaaggtctcaaaacacacagatgatggataaaaaacagtggcattaggtgccaggaatggactgaggcaggaaaaagacagtgtgcctgagaggatggggcccctctgcagagggcctggratgtcctcctaggccacaaagatccagaatagatacgtggctgcaggttgctgaaacccccaacacccccacccagaaccctcaaatatttaccccttcaataaatattaacaacacctctttctccctgcactgccccccactctggccttgaggctatgggcaagcaactttggtctctggactgccacttccttatctataaaatgggatgatcccaataagcaacttcccagggatattgggtgggttaaatatgataatacagagaaaggatttagctcatgcttactaaacataagtgagaataactattaataaaatgattaaggcgctcccc

SEQ ID NO: 182744 - DNA, 599 bp, Homo sapiens
tcactactttcttgagcctttaacatatgtttttgtcccaagaattgtataaaggagttattatatccccatttcacagatggaaaaactgaggcccagagagaggaagtgacttgcccttacagtccagccaggactctcatcccattcacycatttactactctgtgaatgcttgcagtccttggctttgccttttgtgggcaagagcctctccacacttctctggaagagcctggaaggtggaagacagaaacctctaaggcagatgccagcagggttgatatctgagcaggctttccctctctccccctttctttttgctctttccatgctgccctctctttctatctactttggacaatcagaatggccagcagctgccagcaacctcgcggtaaaaacctagcgggagcgttggaagtgggggccaaggggaccatcaccatggttctgccacatccaaggaccagccagatgtcggcctcagagcctggggaacttaggatcaaaggaacttggatgtccagtgcatcagccaggtgaggagacagtggcactaacagcaggcagtcgtagcaatgacagtgataacaaatg

SEQ ID NO: 182745 - DNA, 589 bp, Homo sapiens
agatctgtttgaattgtgctgtttcatacaccatgaaagtgactctaatctagtagctcacaataaaatccatctttttatgccaaacttttaaaacgttaaagggtcactaatatctgtatcgggaaaaaaaaaatcaatctagccgtttggaaaaacccagcctttgagttccatttgggtcctttttggaccaactccctgacaccttcattaggaagtaaacacactgctggttgccaacgctttaaaaagagataatactgttaacaaggcctataaaagcgaggtgaccmtatgtcctggctgatgcttatagtctgtgtttaataattaacagcaccctcttttactctcaagaatcacggtttggttgataaaattctcaaattttatcaaccaaaatggtcactcaaatggttatcaatcaaatggacacgctacctgtaaagccccacgatttggcctcactcccattaatttctctccattccagtttcactggtctttgtccaacccctcctgttcaccattactcttgagccaggttttgtgcatattcctctctctctctcgcctgccttctcca

SEQ ID NO: 182746 - DNA, 592 bp, Homo sapiens
tgaactgagatctaaatgacaagaagaagccagtctgcaaaaatctggggaagagcattccaggctgagaaaatagaaagtgcaaaggccctaaggtggaagcaaacttagtgcaacaaaccagctttggggagaagcaaagagggcttttaggcctcttttgctggaagagaaatgggmtctcaggaaagtaaagacctttgccctctagtaaggggtgggttgggaatatagtcttctaactccttagacaagtctcttcctggggccccccacagttggcctaaaggggagacacacccaaggctcgggtttccctctggcctgctccagccccagatgaacaaaggccccctttctccctctggccctgctggtccagttgaagcacccattgtgtggctggacagctctggccatagcccagatgcctcccatgccctctgccatttgcccactccagcctttctggttcttctctgtttgcccagcctgcccgtctctccacccaggccttgcacctgtgtctgctgtgttggtctggtagcttcggctgctgtaagtgaccagttgtagttgcctgttgagttgg

SEQ ID NO: 182747 - DNA, 461 bp, Homo sapiens
atgatatgggttaagaggagttttgactgattttgaggcaatgtatgtatcactaaagtttctcacctacattgggccttcatcttttatctattaaagtgtaagtttattcatgtataaggctggctgcaaaatccttcacaaagaaaagcataccctgtaagagcacataatagacccccttttcatttctattgttcatagaggcataaacaagaaaaaaaattcaaakataagagtctcatgatagtagaagttttgatccgtgatcttgtggaaaagctgttcacatcaaggatgccatcttcttctggggagaaactttcctgattagttttaccttaagggttccaacaggtgtacagttgcaggagtgtggagggacccttctcagttgtgagattataaacccaaggttcgaggctccaaagtttttctgtagtgtggatggcaaagacggc

SEQ ID NO: 182748 - DNA, 508 bp, Homo sapiens
cttctgtcaatgttctctttaatccatgatatgggttaagaggagttttgactgattttgaggcaatgtatgtatcactaaagtttctcacctacattgggccttcatcttttatctattaaagtgtaagtttattcatgtataaggctggctgcaaaatccttcacaaagaaaagcataccctgtaagagcacataatagacccccttttcatttctattgttcatagaggcataaacaagaaaaaaaattcaaatataagagtctcatgatagtagaagttttgatccgtgatcttgtggaaaagctgttcacatcaaggatgccatcttcttctggggagaaactttcctgattagttttaccttaagggttccaacaggtgtacagttgcaggagtgtggagggacccttctcagttgkgagattataaacccaaggttcgaggctccaaagtttttctgtagtgtggatggcaaagacggcctttctctgatgttctcagaag

SEQ ID NO: 182749 - DNA, 524 bp, Homo sapiens
aaaagctttctttacctggttaaaatacactgtagcataataatctactgctataagatcagccctcttgcatggaaaagcttttatacaccagaaaacatgcattgaaaatgacaattgagtgaaattcctttataaatgtttaaatggcccatcaggtagccaaatgtacctgaagctttgattgtcttcctgggaatatggaaccaaacattggttttaaactatttccttaatttataagtcaccacattaatatattcaatttggattattttatcttttccatgaccagtcatggaatgaaaaacctttaataacaaaagctttaaggattcaggaaggacaaggcagctgtcctggttcttartgagaccatgcttaacatatgtcctctggaataccagttgttttccaatttaggtgcatagaactgataactaatgggttatcataggtaatttgacttagaccatggagttcattcaaattgtacatttaaacaattttagtgttggctgatt

SEQ ID NO: 182750 - DNA, 524 bp, Homo sapiens
aaaagctttctttacctggttaaaatacactgtagcataataatctactgctataagatcagccctcttgcatggaaaagcttttatacaccagaaaacatgcattgaaaatgacaattgagtgaaattcctttataaatgtttaaatggcccatcaggtagccaaatgtacctgaagctttgattgtcttcctgggaatatggaaccaaacattggttttaaactatttccttaatttataagtcaccacattaatatattcaatttggattattttatcttttccatgaccagtcatggaatgaaaaacctttaataacaaaagctttaaggattcaggaaggacaaggcagctgtcctggttcttagtgagaccatgcttaacatatgtcctctggaataccagttgttttccaatttaggtgcatagmactgataactaatgggttatcataggtaatttgacttagaccatggagttcattcaaattgtacatttaaacaattttagtgttggctgatt

SEQ ID NO: 182751 - DNA, 578 bp, Homo sapiens
ccagttgttttccaatttaggtgcatagaactgataactaatgggttatcataggtaatttgacttagaccatggagttcattcaaattgtacatttaaacaattttagtgttggctgattttttttgataatctagagcttgattttgaaagatttgttaaatacctttggtttaaaacattggctgttacaaaatagactctcagattaccataagtcactcatttagccaaaatgataactcgaaaattttttaggccaggcatcatggctcatgcctgtaatcccaccaccttggggaggcccaccactttggatcatttgaggtcaggagttcaagaccagcctggccaacatggtgaaactccgcctgtactaaaaagacagaaattagccatgcatggtggcaggtgcctgcagcctcagctactcgggaggctgaggcaggagaaatcacttgaaaccccaggaggcggaggttggagtgagccaggaccacaccactgcactccagtgagactctgtctcaaaaaaaaaawttttttaaggaaaaaacattattctgataaagaggaga

SEQ ID NO: 182752 - DNA, 474 bp, Homo sapiens
agcctgagtgacagagtgagaccctgtctttaaaaaaaaggtgggggacacagtttactagaatgaaaataaaaaggtcaacagttagaatggaagcgtattggggagaggaatgggagtaggacaggcagataaagggaatgcacagacacataacactagagagggagcgaaggctgatgataatgttccatcaactgagaagtttaactcaaaactttgcccctgatattaaaacaaaaagaggaattccaatgagcttgagaattgtgaggctgggccaagatcagcttcttgcaggtcagcagtctccactractgaggcccttctgggcacagaggagcacactgagccactggggaacccaaggacagagcccctctgctccagggctaccttccgcattcccttaaagtgcaggacccctggctcggaggctgggctgggctgagtgcagggcgggtgagctgatt

SEQ ID NO: 182753 - DNA, 283 bp, Homo sapiens
gggagtaaagggaaaagacagcctataggtggggtgtgatgatctgtagagaagtggggaccctgaggaaataatgagaggccatgttgggttaaaggrgattgaaaagtgagcatttactctggtcaggctgatggacgtctgtgccacatcccgaactgaccgggagatcaaggtaaccctggtgtttgagcatgtagaccaggacctaaggacatatctggacaaggcacccccaccaggcttgccagccgaaacgatcaaggtgagtggggttggtagg

SEQ ID NO: 182754 - DNA, 432 bp, Homo sapiens
tactatggcagctctgtcagctattttgccactacaaccacaattcacttctgtctcctgagcccctcagggactcatcaagggtctagtacacagagaagatgtaatcgttcacttaattttggtcaaaacaatcaccaaaaaagcaattagtgactttacaattccatatgactttaaaacccatttgttgtttttcgtttgttttctgggattttcagttttagactartcacaaacgaccactgccaacttctacatgaacacttctgtctcctctttattctgagtctcacagtcctggacctccaagagaccatgttcgttttgtcttgtttacaggaacagaaagtacttaaatactacgttctgtacattttgacttcttagtatgttttcattggggggatgggtatttttaagcaaaattca

SEQ ID NO: 182755 - DNA, 451 bp, Homo sapiens
gtatggcccacccactcctgtgggttccccaaattctttcaaggaatctgccagatcaaaactattttcataataatattgagatggatatgtcttgctctctgtattaggcatttcttgcattgctataaagaaatatctaagactgggtaattgataagaggtttaattggctcacggttctgtaagctgtacaggaagcatggcatcagcatcttcttctgggcaggcytcaggaaacttttactagtggcagaagttgaagcaggagcaggcacatcatgtggccaaagcaggagcaagagagagaatggggggaaggtgccatactttacaacaaccagatctcacaagaagtcactcattagtgcaaagacagcaccaagccatgagggatccaccctgatgacccaaacacctcccaccaggccccacctccagcactggggat

SEQ ID NO: 182756 - DNA, 575 bp, Homo sapiens
catactttacaacaaccagatctcacaagaartcactcattagtgcaaagacagcaccaagccatgagggatccaccctgatgacccaaacacctcccaccaggccccacctccagcactggggattacgtttcaacatgagatttgggtgaggacaaatatccaaactatatcactctctgggttgacattttcattgaaggtgcaaaagcaccagtgggtaaaactgctggaatcctcacacccatcaaggcagtggcaccaaactattgtaataatcatattctttttttttttttctttttcagatggattctcactctgttgcccaggctgaagtgcagtggtgcaatcttggctcactgtaacctctgcctcccgggttcaagtgattctcctgctttagcctccttagtagctgggactacaggcgcatgccaccacaccggtctaatttttgtgtttgtagtacagacggagtttcaccatgttggccaggatggtctcgaactcctgacctcaagtgatccacgcacctcggcttcccaaagtgctgagattacaggcatgagcca

SEQ ID NO: 182757 - DNA, 575 bp, Homo sapiens
catactttacaacaaccagatctcacaagaagtcactcattagtgcaaagacagcaccaagccatgagggatccaccctgatgacccaaacacctcccaccaggccccacctccagcactggggattacrtttcaacatgagatttgggtgaggacaaatatccaaactatatcactctctgggttgacattttcattgaaggtgcaaaagcaccagtgggtaaaactgctggaatcctcacacccatcaaggcagtggcaccaaactattgtaataatcatattctttttttttttttctttttcagatggattctcactctgttgcccaggctgaagtgcagtggtgcaatcttggctcactgtaacctctgcctcccgggttcaagtgattctcctgctttagcctccttagtagctgggactacaggcgcatgccaccacaccggtctaatttttgtgtttgtagtacagacggagtttcaccatgttggccaggatggtctcgaactcctgacctcaagtgatccacgcacctcggcttcccaaagtgctgagattacaggcatgagcca

SEQ ID NO: 182758 - DNA, 575 bp, Homo sapiens
catactttacaacaaccagatctcacaagaagtcactcattagtgcaaagacagcaccaagccatgagggatccaccctgatgacccaaacacctcccaccaggccccacctccagcactggggattacgtttcaacatgagatttgggtgaggacaaatatccaaactatatcactctctgggttgacatttkcattgaaggtgcaaaagcaccagtgggtaaaactgctggaatcctcacacccatcaaggcagtggcaccaaactattgtaataatcatattctttttttttttttctttttcagatggattctcactctgttgcccaggctgaagtgcagtggtgcaatcttggctcactgtaacctctgcctcccgggttcaagtgattctcctgctttagcctccttagtagctgggactacaggcgcatgccaccacaccggtctaatttttgtgtttgtagtacagacggagtttcaccatgttggccaggatggtctcgaactcctgacctcaagtgatccacgcacctcggcttcccaaagtgctgagattacaggcatgagcca

SEQ ID NO: 182759 - DNA, 610 bp, Homo sapiens
ctcgtacgcaaaactctagaatctacaatcgtaaaatagatttctcaaagtgaaaacagatacgaatgaaatatttaatgaaataaatacaaatatttaaaatacaaggaaactgaaagtaataagcgacgcgaaacaagaaagaaacataagggaaaaagagaatttaaaaactgacaaccagcaatgaaagcacatcttaatgtatttttattttctaggtggagacgtttggtaactgaraatcttttcaaggaggagaatccaaaaagccttctgctgctatctaaggctgcttagctccacagatccgtgaacagcacgcccagagtacagagaacgcggcaaaaccaacgcgaagaatccactccaggcagtctgagaaacccgggaggtggcgccacggctggagggcaggaggatggcggcgttccaaaaggcacccgctgtcacagacctcggtgtcctgctgtctgtcccagggatggagaggactgctccagggaagctgctggagcctgagtctgtcgggttcctctgcctgccccacctcttctacgggtgcctcttgctgcttctgtgtccccggccaactgaactcagtgggctt

SEQ ID NO: 182760 - DNA, 537 bp, Homo sapiens
aattcctttcattttctggtagagacaaaggagacaygttttatacgtggacccaaaactgtggtgccggtcacagactgggaaggcagccttcccttggtgtttaatcactgcagggacgcctctctgattattcacccacgtttcaagggtgtcagaccacgcagggacgcctgccttggtccttcacccttagcagcaagtcccgcttttctggggaaagggcaagtacccaacccttctctccttgtctctatcccttctctgcttttcttggggaaagggcaagtaccccaaccccttctctccttgtctctatcccttctctgcttttctgggagaggggcaagtacccctcaaccccttctccttcaccctcatgcgtgcaagtcccgcttttctggggaaagggcaagtaccccaaccccttctctccttgtctctaccccttctctgcttttctggggaaagggcaagtaccccaaccccttctctccttgtctctaccccttctctgcttttctggggaaagggcaa

SEQ ID NO: 182761 - DNA, 480 bp, Homo sapiens
taaaatggcttatatcaaaattacaggcaataacaaatgatggcaaaggatgtggagaaaagggaacccccatatcctgttggtgggaacgtaaattagtacaaccactatggagaacagtttgacagtttcttaaaagctaaacatagagctccctatgatgcagcaatcctgctgctatgtttatatgaaaaagaaaatgtattagtccgtttttatgctgctgataaagacatacttgaaactgggtaatttataaagaaaaagaggtttaatggattcacacgtggctggggaggcctcacaatcatggtggaaggcaaaaggcacgtcttgcgtgggggcagacaagaaagaatgagagccaagtgaaaggtgaaaccccttataaaaccatcatatcttgtgagacttattcactaccacgagaacactatggrggaaaccgcccccacgattcaattatctcccaccaggtcc

SEQ ID NO: 182762 - DNA, 522 bp, Homo sapiens
taaaaataatttattaaaaataactgatgtagtcacactaaggcatcaatctggtctttggtatatgaattttttttagttcaaaaatatgtttatatctaaaacaatgattatagaaaatagacacatttatccagttaagaataaatttatgtgaataaatgttgttcttaaaattgtctctcttgtcattttatttttgttaagatgaacaaatcaataaaattmtatgaatccaacaatctaagctgaaatgtataataactatgcctatacctagagaagttaaaaaacttctctaggtatagtcctaaaataggtaattatattttagaaataattaaaatagtctaatattttctctgtaggtacacataactctagactcttgaatatattggcactgacaggtagatgttaatgaaaaatgcagttttctaaaacagagatcaggccacagtcatattcctgtttggtgataaaataaactcaatgacattggctaaagaatgagttttattc

SEQ ID NO: 182763 - DNA, 442 bp, Homo sapiens
acatacaactataatataataactgcagaagtagagataagaacagctgtttttttaaaacaaatataggagtctgaactccaagagaaaacttctacccgttatttatcacaaaccttttataaacagtatttttttagtagagaatgaatgagttaaaacagaaaaaaaaactatgtttggagtcactagatttataaacactaaaaaaaaattgtaagcataaatcctyagagagttttaacaagtgaatgtataattctatttttaaaatagtttttcttcacctgcattaatgtacatggtggagcaggtgactcctgtagcaccatgtggttcttagtaaggaaagaattaaagcagaagaatggaacctactttttcacaaaaggaaagcaagtgacatgcaatgataaaattagttttttttatatatgatata

SEQ ID NO: 182764 - DNA, 626 bp, Homo sapiens
agaggcttattcctgtattcccagcactttgggaggccgaggcgggtagatcacctgaggtcaggagttcgagatcagcctggccaacatggtgaaaccctgtctctactgaaaaaaacaaacaaacaagcaaacaaaaaactagccaggcatggtaygagagcaaacctccctcttaaaaaagaaaaaaaaaaaaaaaagaatgtgggattcaataatagcaaaattattctgttttttctaaaatacattcagagttatacctatgtaggttaaactgcttgaattgaacacatcttcaaatcgaagtcaaattttcattgtaatgttatcaaatttaaattattttaaaatataaatttttattggaatagaaaaaaatgcaactgaaacataagtacatggatcaacatatgattccaatctcctaaggaagcaagttaaataacctctgccaaattttacaattctttgaaatatggaaaaatatgattttttcacaagtttcacatagttaatcatactaagtatatttgaattataagacagcctgttctaatgtaagtaaatgtacaatagtcagttaaatgcaatttgtcatacacaaacatgcacaaatattgatt

SEQ ID NO: 182765 - DNA, 592 bp, Homo sapiens
tgggttaatctcacaagcagagcacatacactggtaatgatttgtctaaatgtggatgccacaagctacacttacaaacaatcttttctcccatcaattaaagcttaaagttattttggtggaagaggtgaaaacaaatacacaagcaacagcataataagttcaattatcttataatcacatctaaaactattcaatgttaaaggcaacaatggtagctaaatgtatagtgttttaaagtgcaaaaaggagtaaccacataatcaacttacaaaacttaatcaaaatattagaagggtagtaatgtcaaatgctaagtgtagtaattacctttttgatatggttaggttttgtgtccccactaaaatcatattgaattataatccccataatccccacattataatcccacataacccctacctggagagaccaggtggaggtaattggatcatgagggtggctttcccctatgctgttctcctgwtagtgagttctcaggagatctgattttttttttttttctgagaccaagttttgctcttgttgcctaggctggagtgcagtggtgcaatttcagctcactacaact

SEQ ID NO: 182766 - DNA, 600 bp, Homo sapiens
ggtttcagaatctttggccttttctgactcagtcatgaagcctctagggctggagaactcccaacctgggacaaccggatgaagcatccagggggcattccaccagcagccactgggactttaactgtaacactgaagctgtacttagataagcaagagctgatttcacacaagttcttacttctctgtactttagctgttagcactctcagggtcaatgccttgtaccgaaggaaatacttcctgctgcactgataactcatgtttcattataacatagggmagatgcatgacggtctccatatgcagatactgtgccattagtcaaatgaatcattccagcaggtgcctgggaaaggctgggaccagctgacatctttatgatgattatatagtctttgtgtctcatgcaactaaaaatagctctctaagatgaaaaatttgaattgaagcacattttctgcatagagaaaaatagtgcccattaaatcgtttttgaatctgcttggtgtggcgctttcttttcaacgtggctttttttttttttttttgccattatcggccagtaagcagggatggaaaccatcctgttggttaagc

SEQ ID NO: 182767 - DNA, 600 bp, Homo sapiens
ggtttcagaatctttggccttttctgactcagtcatgaagcctctagggctggagaactcccaacctgggacaaccggatgaagcatccagggggcattccaccagcagccactgggactttaactgtaacactgaagctgtacttagataagcaagagctgatttcacacaagttcttacttctctgtactttagctgttagcactctcagggtcaatgccttgtaccgaaggaaatacttcctgctgcactgataactcatgtttcattataacatagggcagatgcatgacggtctccatatgcagatactgtgccattagtcaaatgaatcattccagcaggtgcctgggaaaggctgggrccagctgacatctttatgatgattatatagtctttgtgtctcatgcaactaaaaatagctctctaagatgaaaaatttgaattgaagcacattttctgcatagagaaaaatagtgcccattaaatcgtttttgaatctgcttggtgtggcgctttcttttcaacgtggctttttttttttttttttgccattatcggccagtaagcagggatggaaaccatcctgttggttaagc

SEQ ID NO: 182768 - DNA, 403 bp, Homo sapiens
atacagttagtaacagacacctttattgaggacttactatgtgccaggtccttttgaagtgcttctacatcttaactcttcaatttacaagaagggggcggtacccctcctgggtgctcttgcagtcctctctggaacacttccgacgttagaaacgtctgtttatatgtagctttctcaccagggagtaagttgtttgagggtaggaagtgtaactcacttatcctctgatccagtttggatgtgtgccctctccaaatctttatgttaaaatgtggttcccagtgttagaagtggggcttggtgggaggcgtctgggtcatgggggcagatgcctcatgaatggcttgatgytatgctcgctgtaatgagtgagttctccctctgagttcctgagagatct

SEQ ID NO: 182769 - DNA, 532 bp, Homo sapiens
tcttctccagcccttggacatcagaactccaggttcttgggccttcaaactcagacttatgccagtggcctcctagaatctcaggcgtttggcttggcctgaaagttataccatcagcttccttggttctcagacatttggactccaactgaattataccaccagcttcccctggttctccagcttgcacgtggcataggatgggacttctctacctccataatcacatgagccaattcccataawaatttcctcttacatatctatagatactgacatatcttcatctatatctgattggttccatttctctggagaaccctggtacaatgggcaaatcatgacacactgtaggacagattttgcccatggaataccactaatctaaaccaactctttcatattacagataaagaaattgagtctggttttctcatcctccactttcagaagagagtgactccagtttaagtatcatttaaattttccacttttgttttaggtaatagagagctgctgtcttacagaattc

SEQ ID NO: 182770 - DNA, 648 bp, Homo sapiens
attccttaaccctatcctcccctggattaacttttcytctggttgaagttatatctgttaactcttattttagggaatgtgtatgggtgggaaagatttttagttttttatatgtcagaaagtttatttatttatttatttaaagatggtcactcactgtcacccaggcttcatagaatatagtgaatagttagctgcaaccttgaactccaggtataaccaatcctctgccttagcctctcaattagctgggactacaggtatgtcccaccatattcagctaattttttttttaatttttatttttgtagagacagggtctcactttgctgcccaggctacaacatttattttgtccttattcttgagtaatactttagctggttatgtgattcaagattgattatcctttttacccccagcaccaatgtctattgtttctgatgagatatataattactgtccttaagttactatcctttctcttggtatctttgaatactttctctttaatgtgttgtagtttcactaaactatgtatgctgagcatagtggcttatgcctgtaatcctaggattttgggaggccaaggcaagaggatcacttgaggccaggagtctgagagcagcctggacaacatggtaatac

SEQ ID NO: 182771 - DNA, 258 bp, Homo sapiens
caagtgtccttcctctgcatgtgaagcagccagctctgccatgtggcagttagacatagaaagaccccctccccacagccatgtactctcttcaggaagacagggcctaagaaattcacctgatttttttttttttttttttttttttttttttgkggtggtggtggtagtggtggggaagggaaggcactgtctctgtcccttgctaattgtgttatattaaggaatttgcttcccatctcagcctcagtttcttca

SEQ ID NO: 182772 - DNA, 258 bp, Homo sapiens
caagtgtccttcctctgcatgtgaagcagccagctctgccatgtggcagttagacatagaaagaccccctccccacagccatgtactctcttcaggaagacagggcctaagaaattcacctgatttttttttttttttttttttttttttttttgtggtggkggtggtagtggtggggaagggaaggcactgtctctgtcccttgctaattgtgttatattaaggaatttgcttcccatctcagcctcagtttcttca

SEQ ID NO: 182773 - DNA, 602 bp, Homo sapiens
agaatgtgttccaacttgcatggctgggctaaaatatctaatcatttagtatttcatagcagagatagatcaggagtttgttaatttaactcaacttagaagtgaagtttttgtactgcaatcattaaaatcaattttgttttacatataaacatattatcaggctaatcctagagcaaaatctatttattctattcagttgaattccagacattgatgaaccatgatattattttctaacactgcatatggaaatttaccgttttaatttgagttcactaatataattaaattgtggcaattcaaacaaagagatgccttccattagtaaagttaataagacataacgaagggctagaacaaagcatgaatctaaacatatagaccagagtctctcccaagtcaggaaaaacaaagtggaatctacaggtttctttttatacaacagtttgttacaaggtttagaaatatactgattctctcatgcattgaatagccataaaataccaacactggtttttctgtgtaccttatgragatgcagctatgcatttttagtcacacctattttcagtagattaaaatctctacaaggcaaaaat

SEQ ID NO: 182774 - DNA, 594 bp, Homo sapiens
acatattctcacttaaaagtgggagctaaataataagaacacatggagagaaggagaggaacaacagacactggggcctacttgagggaggacagtggaaggagggagaggttcagggaaaaaaaaaatatcaggtactatgcttagtacacacatgatgaaataatctgtacaccaaacccccaagtcacaagtgttcctacataacaaacctgaacatgtacccctgaacataaaattataattaaaatattaaaaataattcactgtgatttttatkgtactgatgccattcttaatcaagttctgataagtggatggtctctgcctatctccacctttctgaatcctatgtgtatcgctgtggattaattctagatatcttctccaccctccttgcaccagactaaatctgtattatgtgatattgattcttccttctaaatattacccgttatctctttcctttatttctaccattatctttatctggctcagaattattgtcataggctcctaactgttcctcctgcttctagtttctacccactcaatcaattaccgatggtgttgccagatttatcttcagaaaat

SEQ ID NO: 182775 - DNA, 484 bp, Homo sapiens
ggatgattagcagaattggcaactctatattattagattatcctgctcactagctcgttcaaatttattttcttrtgtgtgtgtgtgtgtgtgtgtgtgtgtgatcaaaatctctttggagagtctcctcttttccactcttagtccatttgtgtcaggtagggctcacatgctccttagctttgggaatggcaatgtgtcctgggtctgcttactgtatatacaacttgtccttggttacagtgattggttagggttgggcacaagatccaaggtgagccaatctacagtaaatgtaagaaacttgctgatgctgtctaaatgagcttgctaaattggtgatcaccttccctctttttttgcaaacgttctgattgagaatgaagcagatcctgaggaaaaacagggctgtgaagggctgtgaaatagagacatagtgtcctaatgatatcatgtaagacctggatccaactatcctaaagcc

SEQ ID NO: 182776 - DNA, 550 bp, Homo sapiens
tcattacatgtgagatgagtctctgaaaacagcataccattgggttttgcctttttatcccactttcctctgtgacttttaagtggggcatttagcccctttatacccaaggttactattgatatgtgtggatttggtcctgtcactgtactgttagctggtgattatgttagcctctttgtatggtttgtatggctttacagtgacactggtctgtgtggttaagtgtgtctttgtattatctggtagcagtcatttggaggacataaaacactctgtccacttgagtcactggagttctttcacagcttctttctcatctctgcatgtgggtgttcctttaacttcagtgtagagtgaggatastcaatagactttttttttttttctgggtgtattcactggaccaaggcattgtgcaaagtgtttatttgaagctgcctttttgtctctggttttagaggtgggtatgttagtgaggtatttttggtgttgaagcttcgaggtgtgatccagcaggtggcacttaggcttattggtcaattggtag

SEQ ID NO: 182777 - DNA, 673 bp, Homo sapiens
catttgacacttgtgattcactaatcatcagaggcaaggagtttagtgactctatacataataccttttaccatatgcggagaaccagggaacataatgaagttggttggttgctcctgagttcactggacaaagtgaagaaaggaaatgatgaactcagggattctaactccctgcctcagaagcagawactgagtctcaaatcttccaagattgccctgagtgaggatcttatctcctgtagagaaagagctagaattgtggaaaatcagatacaggctcttatcatgagagtggctgacctgccatgaaaggtgtgtgcacagccttgccaggtgtctactgttaaagtgagggcattgatcagaaaaaaatgggacccagcaacttggaatggggatgtgtgagaggaccccaatgaagctggggacactgagcttatagactgtaatgaacctttttttgccagaagaaacagcttccacattctcagtagtggcaacatcctctccctgacccatgcttccatcagcttttccaccattgtctgaagagataaaccgtacactgtctgaggcaacagtgatggcctcccccaaggcagttgccaggcaagacaatgttgattctcctcaggatccacccccacacccctgtttgcttttagacctat

SEQ ID NO: 182778 - DNA, 673 bp, Homo sapiens
catttgacacttgtgattcactaatcatcagaggcaaggagtttagtgactctatacataataccttttaccatatgcggagaaccagggaacataatgaagttggttggttgctcctgagttcactggacaaagtgaagaaaggaaatgatgaactcagggattctaactccctgcctcagaagcagaaactgagtctcaaatcttccaagattgccctgagtgaggatcttatctcctgtagagaaagagctagaattgtggaaaatcagatacaggctcttatcatgagagtggctgacctgccatgaaaggtgtgtgcacagccttgccaggtgtctactgttaaagtgagggcattgatcagaaaaaaatgggacccagcaacttggaatggggatgtgtgagaggaccccaatgaagctggggacactgagcttatagactgtaatgaacctttttttgccagaagaaacagcttccacattctcagtagtggcaacatcctctccctgacccatgctkccatcagcttttccaccattgtctgaagagataaaccgtacactgtctgaggcaacagtgatggcctcccccaaggcagttgccaggcaagacaatgttgattctcctcaggatccacccccacacccctgtttgcttttagacctat

SEQ ID NO: 182779 - DNA, 689 bp, Homo sapiens
agatggttctgcacaatatgcaggcaccaccccaaagtggacagctccagcaccacagcacctttacaggacatccctgaaggacagcagtgaaggaaaatcttcccagtgggcagaactttgagcagtgcacctggttgtacactttgcrtggaaggagaaatggccagatatgtgattatatactgattgctgggctgtagccaatggtttggctggatggtcaggcacttggaagaagtatgattgaaaaattggtgacaaagaaatttggggaagaggtatgtagatggacttctctgagtggcccaaaactgtgaagatatttgtatgacctcagcagaagaggattttaataatcaagtggttaggatgacccgttctgtggacaccactcagcctctttcaccagccacccttgtcatgacccaataggcccatgatcaaagtggccatggtggcagggatggaggttacacatgtgctcagcaacatggacttccactcaccaaggctgacgtggctaaggccactgctgagtgtccaatttgccagcagcagagacgagcactgagccctcgatatggcaccattcctcggggtgatcagccagctacttggtggcaggttgatatattggactacttctattatggaaagggcagcagtttgtcttcactggactagac

SEQ ID NO: 182780 - DNA, 689 bp, Homo sapiens
agatggttctgcacaatatgcaggcaccaccccaaagtggacagctccagcaccacagcacctttacaggacatccctgaaggacagcagtgaaggaaaatcttcccagtgggcagaactttgagcagtgcacctggttgtacactttgcgtggaaggagaaatggccagatatgtgattatatactgattgctgggctgtagccaatggtttggctggatggtcaggcacttggaagaagtatgattgaaaaattggtgacaaagaaatttggggaagaggtatgtagatggacttctctgagtkgcccaaaactgtgaagatatttgtatgacctcagcagaagaggattttaataatcaagtggttaggatgacccgttctgtggacaccactcagcctctttcaccagccacccttgtcatgacccaataggcccatgatcaaagtggccatggtggcagggatggaggttacacatgtgctcagcaacatggacttccactcaccaaggctgacgtggctaaggccactgctgagtgtccaatttgccagcagcagagacgagcactgagccctcgatatggcaccattcctcggggtgatcagccagctacttggtggcaggttgatatattggactacttctattatggaaagggcagcagtttgtcttcactggactagac

SEQ ID NO: 182781 - DNA, 454 bp, Homo sapiens
aatctctaattgtaatattgggcatccactcatcttgctccttatttttaatcattatgcttctagcgttttaagattaagcatgatcctggcttttggttatatatgctattatcttaatttagtaactagacatttttactataytgacttaagtcagaaatcaataactttttaaaccgatttttataaagtagtttttataaatgaattttgccatttagatgactatattataaaattcattttataaaatcattttttgccatttatttggatgactatatgatgaacattattaacagaattcttaattttgagccatccttgccttcctgaaaatatgaactttgttttttatggtggcaatgatatgctaactttacaaataatttgggaaacatttcttttttttttttttcatgtgttctggtatagtttaaatagcatggaa

SEQ ID NO: 182782 - DNA, 454 bp, Homo sapiens
aatctctaattgtaatattgggcatccactcatcttgctccttatttttaatcattatgcttctagcgttttaagattaagcatgatcctggcttttggttatatatgctattatcttaatttagtaactagacatttttactatattgacttaagtcagaaatcaataactttttaaaccgatttttataaagtagtttttataaatgaattttgccatttagatgactatattataaaattcattttataaaatcattttttgccatttatttggatgactatatgatgaacattattaacagaattyttaattttgagccatccttgccttcctgaaaatatgaactttgttttttatggtggcaatgatatgctaactttacaaataatttgggaaacatttcttttttttttttttcatgtgttctggtatagtttaaatagcatggaa

SEQ ID NO: 182783 - DNA, 582 bp, Homo sapiens
cttttctcctatttcaagcagggtaaagtgcatataaatattaaagaagagatgatggtgatgtctcaagtaagctgagtctgctttttttttttggtcaagagaagagacagaatttccatgattagttggcagagatgcaaacacagcacagaccacctacatctgctagacactctgttggcgtgatgactgtgggaccatctggtaaatgtatttttcaaataggtcaaaacgtaactcatataaatataagcacctgtcaatgatttcactcaactsatcaattagtgcagtaatcagtaatatagaaagctgattccaagtgtatttgagaaactgggtatttataggaaattcaataagagaatgttaagatgagattactaaattagattggaaacttgttcatggccttaaaggcaataaatgataacatatggggtaatttttttccaccagatagaaataatttgcatacaatttaatactctttttacagaatcaattgggtgcagtcctgattcttatcaggaaatgttaggcatcctaatcatagcagaggtgatttaggactgggct

SEQ ID NO: 182784 - DNA, 582 bp, Homo sapiens
cttttctcctatttcaagcagggtaaagtgcatataaatattaaagaagagatgatggtgatgtctcaagtaagctgagtctgctttttttttttggtcaagagaagagacagaatttccatgattagttggcagagatgcaaacacagcacagaccacctacatctgctagacactctgttggcgtgatgactgtgggaccatctggtaaatgtatttttcaaataggtcaaaacgtaactcatataaatataagcacctgtcaatgatttcactcaactcatcaattagtgcagtaatcagtaatatagaaagctgattccaagygtatttgagaaactgggtatttataggaaattcaataagagaatgttaagatgagattactaaattagattggaaacttgttcatggccttaaaggcaataaatgataacatatggggtaatttttttccaccagatagaaataatttgcatacaatttaatactctttttacagaatcaattgggtgcagtcctgattcttatcaggaaatgttaggcatcctaatcatagcagaggtgatttaggactgggct

SEQ ID NO: 182785 - DNA, 582 bp, Homo sapiens
cttttctcctatttcaagcagggtaaagtgcatataaatattaaagaagagatgatggtgatgtctcaagtaagctgagtctgctttttttttttggtcaagagaagagacagaatttccatgattagttggcagagatgcaaacacagcacagaccacctacatctgctagacactctgttggcgtgatgactgtgggaccatctggtaaatgtatttttcaaataggtcaaaacgtaactcatataaatataagcacctgtcaatgatttcactcaactcatcaattagtgcagtaatcagtaatatagaaagctgattccaagtgtatttgagaaactgggtatttataggaaattcaataagagaatgttaagatgagattactaaattagattggaaacttgttcatggccttaaaggcaataaatgataacatatggggtaatttttttccaccagatagaaataatttgcatacaatttaatactctttttacagaatcaattggrtgcagtcctgattcttatcaggaaatgttaggcatcctaatcatagcagaggtgatttaggactgggct

SEQ ID NO: 182786 - DNA, 582 bp, Homo sapiens
cttttctcctatttcaagcagggtaaagtgcatataaatattaaagaagagatgatggtgatgtctcaagtaagctgagtctgctttttttttttggtcaagagaagagacagaatttccatgattagttggcagagatgcaaacacagcacagaccacctacatctgctagacactctgttggcgtgatgactgtgggaccatctggtaaatgtatttttcaaataggtcaaaacgtaactcatataaatataagcacctgtcaatgatttcactcaactcatcaattagtgcagtaatcagtaatatagaaagctgattccaagtgtatttgagaaactgggtatttataggaaattcaataagagaatgttaagatgagattactaaattagattggaaacttgttcatggccttaaaggcaataaatgataacatatggggtaatttttttccaccagatagaaataatttgcatacaatttaatactctttttacagaatcaattgggtgcagtcctgattcttatcaggaaatgttaggcaycctaatcatagcagaggtgatttaggactgggct

SEQ ID NO: 182787 - DNA, 593 bp, Homo sapiens
tacccttgcctatctatttatatttcaaagagaagcagtaaaatactgattggaatcagtgtgtttggatgggacatatagactgatggatattatcaagatggctagcagtcttttccctccaaatatgagtttctgttgatttttattctggaacgatcctcagaaaaaggattttccaacttccttcctgtggggtgcagtgatggcttttagcatattgactctgggcaggcagaggggcttagggattttattgttttttttatgcagataaaattgaatctccagttttcagtaaagcactgtgccccagcctcctctgtgcttgatgtcccattcaggcactgggttagtagttgggtgagatgggagaggtatggttgcccagctgtagagacagggacctgaagttttcactgctccytatatggactttcaaactggcttaaataatgactgccatctccatttcctgagaatttccaggttctgaggatcagattggcttgcttctcattgatgtcatgccagtaggttttatcttcctgatgagtcatttaccatttccccatatgctttctgcaatcata

SEQ ID NO: 182788 - DNA, 392 bp, Homo sapiens
ggaaggcgcgcgagccagatttggccaaacgctaagctcgctgcggcctcgggccctcggcccacggggcccctctccccgtttgggctgccccacccagggacgcttgggccgggcgcgaagagcccggaaatagccacccttgtcgtcsgcccggtttccctccgaggtcttagtatttcccccctcccccaccccccaaggcctgtggagggcgaggctgctgctccagccaaccctcggaattggctgcagggcgctcaggtcctgcctttcttcccctgcccctctcccaagcccctccgtgctaagcggcccagttctgggttctctcctggtgcccacgctagtccctagccggctcactctcaaaacagcaggctgtggcaggg

SEQ ID NO: 182789 - DNA, 478 bp, Homo sapiens
ttcccatcgaatttggggggctctgagataatggcagcatctctcacggtgacggcggcctcagrtcacggctgtggtggagtctaacagtgggggctctcttctcatccatgctgtggggagggggtcctctggactctggaggagaagtgacgcggtgggtgagaaggtcatgcgtaagaaacccagccacggcgacagctccctctcctgagatgtttgtctttcctggtagcatttggcttcatcttacgatggcaaccatcaagtctgtgtttcagaactgttagagccactgatggtcactcagaccaacacaagccagcggacgcagtcagggcaccggtggccgaaccttccacgtcttccaccctggtccatcacccttaggagccagtgccacgtatattccctgtgtttctgttgacaaaaacaggcaagatcttgcagttctttttgtgtgcatggtccctcctcc

SEQ ID NO: 182790 - DNA, 510 bp, Homo sapiens
actgcgtgaccacagccacctcatcgacgactcgccccgggcccctgcccttctgagatttcgttttcccatcgaatttggggggctctgagataatggcagcatctctcacggtgacggcggcctcaggtcacggctgtggtggagtctaacagtgggggctctcttctcatccatgctgtggggagggggtcctctggactctggaggagaagtgacgcggtgggtgagaaggtcatgcgtaagaaacccagccacggcgacagctccctctcctgagmtgtttgtctttcctggtagcatttggcttcatcttacgatggcaaccatcaagtctgtgtttcagaactgttagagccactgatggtcactcagaccaacacaagccagcggacgcagtcagggcaccggtggccgaaccttccacgtcttccaccctggtccatcacccttaggagccagtgccacgtatattccctgtgtttctgttgacaaaaacaggcaagatct

SEQ ID NO: 182791 - DNA, 390 bp, Homo sapiens
agaattccaactggcccactatcccacggagctgcagccacttgctgcaggaaaggcaagtagcttaaagtcatgaattaagaaaaagcaaactgttccttcaaaaacttgggggtttaatgcaaaacattaaggatagcacgctgcacatatctgtctacagcttgtgctttcccccaactcagaaacacgtctgggagctatcgatatcaaaacaaatatctctacttcattttttcaattgcygcattgatattccacattttatttgggcattctctattggtggacatctagatcacttctcattttttgctataaaaaatgatgtatttgcagaaacagccttgctcatgcctcacagtagattctgaaaagccaaactgctga

SEQ ID NO: 182792 - DNA, 533 bp, Homo sapiens
tcaggattttgacagatgaaaacaagatattccaccatagggaagagcacacacaatcagcataaaactaattccagaaatgggaaactgtatattttcaagtcggtctaaaaccagcttctacaaaaaaaaaacccagaaatgcccaacagagggagagataggtaggtaactgcagtcactgctgcttaggaaagtatctstctgtctggggcctatctatacagggtttgtatctgaaactattttcatatactgcttagtatttatttctatgttaaaaaataataataaacctataacaaggctcctacaaaactaaattcctaccataatactataaaaaaaaaaagcacaaacacaacttaccaaaaacaagaatgaacagtgtatttaaagataccacccagaagacatgttcctaaaggaaaaaagcatcaataaagcatattcaattcatacttaatgtatgtttaattggactattccacttatttagctagagccaaatagtaaaaacagctaagattgaa

SEQ ID NO: 182793 - DNA, 533 bp, Homo sapiens
tcaggattttgacagatgaaaacaagatattccaccatagggaagagcacacacaatcagcataaaactaattccagaaatgggaaactgtatattttcaagtcggtctaaaaccagcttctacaaaaaaaaaacccagaaatgcccaacagagggagagataggtaggtaactgcagtcactgctgcttaggaaagtatctctstgtctggggcctatctatacagggtttgtatctgaaactattttcatatactgcttagtatttatttctatgttaaaaaataataataaacctataacaaggctcctacaaaactaaattcctaccataatactataaaaaaaaaaagcacaaacacaacttaccaaaaacaagaatgaacagtgtatttaaagataccacccagaagacatgttcctaaaggaaaaaagcatcaataaagcatattcaattcatacttaatgtatgtttaattggactattccacttatttagctagagccaaatagtaaaaacagctaagattgaa

SEQ ID NO: 182794 - DNA, 599 bp, Homo sapiens
gtagagcctggctttaagcccagaccatctggctccaagcctccttaaagcactctgcacatggtgaagagtctgggtttttctaaagatccgtatgaaagttctgcctcatataaatattatattaattatacttaatttgcaattctgtattcttgtgttcaaatgggtcctttcttgctttaataaattttcaaagtactttccattaaaggttttttgaagtgttggtacattgatgtgtgtataattatgcattaatctgaatctgaaagttaatgtgaaaaaactaccaagtaaactgacagagtctctgatctcagcttttttgggcrtgcgaattcagaataggaaggcaaagggagtgtttggagatgcctgaaagctgatagacttgggcaagggtgtggacatgttgactcacatggcctgttgctattatgtgctagtgttcaggcatccaattctggaagattgattccaaaattatgtaactggactcctcattcacccactgaaatccactgagacccagtatcccagcattggaagatagaatacaaccatactacattaaatggattaagcagaaatgcaaa

SEQ ID NO: 182795 - DNA, 591 bp, Homo sapiens
  misc_feature (1)...(591): n = A,T,C or G
ggagagactcgcagggagtgagaagcactgaaatagggaaatgttttagtacctcaatcctcagtaaaaaacaaaacaaaaaaggcttactctgcatttctcaccagtgatttaaggtcaagctcttgagattttttttcccccttaggaaacgtttctggaatwagattnnnnnnnnnnnnnnnnnnnnnnnnnnnnnnnnnnnnnnnnnnnnnnnnnnnnnnnnnnnnnnnnnnnnnnnnnnnnnnnnnnnnnnnnnnnnnnnnnnnnggctcatctctttaaatcagaaaattcctttaaggtatggggagcacgtaggagcatgataataagaattgagataatggtctgttttgcaatcctctgtagtaatacagctcaactgattgaagagaaagtcaatggaatggtagttttcattttagagaaatcacaatatgtgaaggtagtcatgtagctggttcacataactgaggtgaaaatggacactgggattctttcctcattgcaccacatatttatatctgcaaaatagtacattaacttgtatcctccaaatataggaagagtaaacctttttccaaatta

SEQ ID NO: 182796 - DNA, 484 bp, Homo sapiens
ggcttgttgctcacttcctataggtctactcaaatgtcaccttaacattgaggccgtttggagctttctgtaagtctggcaatacccttcttaccactccctccactgcctgaatcctccagcaccattcggggggtggtgtgtgtgtgtgtatggtaggtgtgtgtgtgtaagaactcattctcacgagacagcatgggtccctcaggacccaaacacctcttaaagttcccacyaccactcaacaccattacattagaaaccatgcctcaacacgaattttggtgggaacaaaccattttcaagccatagcaggccctgtacctattcagaatgtttaagggttttctcctgtggtcttagaagcaaatttgttcattcaacacctacttaagtaggcaaattctctgatctattaagtttaattgagcccaggctcattggggctaaagcatataccttgtgatttcgttgacagtagcat

SEQ ID NO: 182797 - DNA, 551 bp, Homo sapiens
ccagcctcagccccctgtgtagctggaattacaggcacctgccaccgcacctggctaatttgttttgtatttttaatagagacagggttttgccatgctggccagtctggtctggaacccctggcctcaagtgatccgcctgccttggccttccaaagtgctgggattatagtcatgagccaccacgcctggcccaagacgtttcttgtgttacctctaccacctgccagctctctcactttaaccttggttttttcatcgctaawgtcaagacatcagatgtaatcacctaatatcctttctggttctgacattccattgttctcactgcttcctgggatgcctgtgagcctgtgtttgtgactatacagcacatgtcagtgaaccaggaacagaggaggtgcctggtataggtttcctgggtagtgattcttatcctcttactgtaattgtgttagaagatcaaggaggtgaaggactccatggagcatatattcatgaagtactctttaagttcaggctgtatgagggtgtgagtattcagagggaat

SEQ ID NO: 182798 - DNA, 618 bp, Homo sapiens
tgaggtcctatagattctggttactattctcttgtcaaatgggtagtttgcaaatattttctccattctgtgggttgtctcttcactttgttgattgtttctttgctgtgcagaagctctttaacttgatgtaacctcatttgtccagttttgcttttgttgcctgtgcttgtggggtattactcaagaaatttttgcccagaccaatgttctggagagtttcctcaaagttttcttgttatagtttcatagtttgaaatcttagatttaactctttaatctattttgattttcgtatatggtgagagatagggktctagttttattcttctgaataagataccagttttcccaacacaatttattgaagagactctcttccttaatgtatgttcttgacacctttgtcaaaaatgaattcactgtaagtgtgtggacttgtttctgcgttctctattctgttccactggcctatatgtctatttttatgtcagtagcatgccatttggctacttagctctgtagtgtaattggaagtcaggtattgtgattcctccagttttgttctctttgctcctcaggatagctttggctgttctgggtcttttgtggtttcac

SEQ ID NO: 182799 - DNA, 461 bp, Homo sapiens
agattatttcacttgctaacaaagaaatgagagacatagatatgaataatctaacagaaattttctaagttcatttgatcatgaatttcaatgtattaatccgtaagtatatatagaaagactatgattaaagttcgactgacttttattgaaacataaacaacctaagaacaaaagaaactagaaccatacaaaataagattaaggataagccaaagttttacacaaggttctacatatcatataatcacacacaatctttcaagctagtgcacaaatrtgctgctaaagcctaacaagaataataataatatacttgtcaccaaagagatatttaagaaaacacttccttttattctgtacctaaagaggatacatacagtgcaatgatacagtacaatactaccttaacccttaattattattatttctaaaagaggatttaaaagactatttgcata

SEQ ID NO: 182800 - DNA, 698 bp, Homo sapiens
taatatttactttcaaatgaatatcatgctgtgtgaaatactacagaactttaaagcagtgcttaaaaaaagaatttttgtgcaaaagcaaaaatgtcatctcttataaggaaacagatgccaaatcatatttcatgcacatagaaacaaaaagttatttagaagttgaaggggaagtaggaaaaacattttttatggtcagtagtctactatcatcacccaaacattaataattactttcccaccaaaagtgatttcgattcaattcaatgaatatttattgaatacagtaagcaatgttctgtgctaggtataatttcccagctgtactaattagaaacaataaatggtattcaatccatatttttacygacaagaaagctctagaagttgtgtttctctgtattttctaatatgagtatcaacagctacattggaacagagatgagattaatgctggatttgctaatagatcgtttgcttttcctactgttttatgcgagacaggcaagagttggggagggagttgatttctgcctcacagagttataaatactggtgatacccctgggctgcccttccattcattagaggtattgggacctgaaaaagagaatgtaaaaagtggagcaggataacttatttttttgtttcagttaatttttggttaatatttaatatttgtttaaatatttaaa

SEQ ID NO: 182801 - DNA, 512 bp, Homo sapiens
actggccagggactggttctggcccatttacagagattgagcacttgcgtgccttcatgtcctgaatagaccttttgatgtgtagggcctaactgtaatatatttaaatgttacttctccacccgaagtgaacatgactcataatgttacatgcatgtttgctcaacacatatgtgtcaggacttccttcatgaatattcatagctcctcctgtcacctgttaaatatgwatgtttagccaacctattcagcataaagcttctaccccagcctctactccttccacatgcctgtgtctggttgtgaccggaggctgtgcttcccagcccatgggagggccaccttgcggactgtaacccttcactcaaataaagcctcccctacttttcttcttaatttatacatttgttttaagttaacaaatcaacacatattgtaaacaatctcttccaaccagaatttctgaattttttttatatacattgttttgttattttatttcattagctaat

SEQ ID NO: 182802 - DNA, 493 bp, Homo sapiens
tggaatgggaaatgccttccacaaggacactgtggatactgaagtatgaaactactacagttgaatgtcactgcaaaggttaagaaacttctcagacagaaaggttcatggaatacattcataatttccccttgtccttctcctcttcctcctccacgttcttcttataaacccattttgaaaaacaaaagataaaaatgggtgggagaatgaacaatgtcagtcaaaatacctttatttctctctgaggaaggggaagattggtttggtttctgcttttcttttatttccataggttattttgttttatttccatgggttattggggaacaggtggtgtttggatacatgagtaagttatttcatgattatttgtgagattttgstgcatccatcacccgagcagtattcactgcaaccagtttgtagtcttttatctctcacccctttcccaccctttccccctgagtccccaaagtccattgtgtcattc

SEQ ID NO: 182803 - DNA, 279 bp, Homo sapiens
tgattgctacttgcaaatccatgcataccccagggcacctccccatgtaggcttaggcttggagtgtaggttccatttgtgtgatgtgctgaagggagaaaactattttttttttttttttctgagacagagtcactgttgcgcaggctgaartgcagtggcgtgatctcggctcactgcaacctctgcctcctgggttcaagtgattcgcctgcctcagcctcccaagtagctgggactacaggcacccaccaccactcgtggctaatttttgtattt

SEQ ID NO: 182804 - DNA, 279 bp, Homo sapiens
tgattgctacttgcaaatccatgcataccccagggcacctccccatgtaggcttaggcttggagtgtaggttccatttgtgtgatgtgctgaagggagaaaactattttttttttttttttctgagacagagtcactgttgcgcaggctgaagtgcagtggcgtgatctcggctcactgcaacctctgcctcctgggttcaagwgattcgcctgcctcagcctcccaagtagctgggactacaggcacccaccaccactcgtggctaatttttgtattt

SEQ ID NO: 182805 - DNA, 613 bp, Homo sapiens
tgggtctcaatagtttaaaagaacaatagctccctattaacacctgaactttatgcctgggtttcaggactagaaatgacacttcatggataaacattgtcagctagaggaggcagcttttgatacattaggcttatttccatggctttcaacattcagtatttgtatgcactgcaaaagagggaaaattagtggaagaaataaatgctcattgatccttaaaacaaataaccgccgagggtttcagtacttgtagaaggaactgggctctactgttactgagagattcagggagagtgatgtgaacagagataggtgkgtgtttttctcaaacccacaaccattgggaggcagcttgtctgctggtgtgtggatcaaacagccaaactccctcaactcagagtgtttccagagttgaaagcaactaacgctcccaacagtgaaacccgagtcctattttcatttccagttgtaccagggaaatggaatgtggatttaggcaaatcatcttatttctcagggtccaagaaccccaccatttaaaatgtgaatgatggtaataatcgctgtcagcatgttccataaagaaaatctattttctcttatattacaa

SEQ ID NO: 182806 - DNA, 558 bp, Homo sapiens
actcagaggcactgaaataattagaacctaggtttattatcttaaagtataaaaccagtacctaagaaattgcctcttttctattagggagttggttttggaagaggtgagctgtaaccagtactgggcttaattatcagtctttcatatggacaattacatgagaatctatgttagcacattttcctcctaattatgcattttcttaatgaaaaatgcgcaataaaataaactcccaaatataaaattattttagactttttttcaaaccagacagaatagtgaatcaatttcttcttcctgcaaacaggaaaaaaaaaaatggttgggtacataattgatctgatcactgrttaatagagtgaaaaatcacatgataaaaaaatgtttcacttactttaagagaagaaagtctaaagagattgcaatctcatgcatgttctaggggaactttgtaaaaggtgaggctctttatctttttaaaaacagtttgcttttgcattcaattttaaaatattacatgtaacacattatttattgtaagaattaccttgagct

SEQ ID NO: 182807 - DNA, 578 bp, Homo sapiens
tgtaaaggagtagggggattatttgatgctggtaatgttctatttctgggtcttggtgtggttacacagatatattcagtttatgaaaatgtatcaaattgtaaacttgtgatttatgcattctctgcatgttgatatacttccataaaaagtttttaaaatactattacctaataagcagggtaccaaaaaaatctgtcatgtaaaataaggggtcaagttattccaaaattaatgcaattaccacggtgagcctgctgcagagagtgggagtcaataattaaacatgctttatccaaactcaagttagcatgggaagtattatcgagtagtcacttgctttgaacacttcttgcartacaataaatattcatgctgtgtctcctttaactccctggggaaaagttaggatttaagacgaagcttatttgaacattggaaggtgcacttttaggtgagtctttcccaagcactttatttcaatagaaaaaaaataaatcagcaatttaaaaaatatttaaaaaaatgtattggggtttggtttatctgaaaagggttgaaattattaatagcattat

SEQ ID NO: 182808 - DNA, 578 bp, Homo sapiens
tgtaaaggagtagggggattatttgatgctggtaatgttctatttctgggtcttggtgtggttacacagatatattcagtttatgaaaatgtatcaaattgtaaacttgtgatttatgcattctctgcatgttgatatacttccataaaaagtttttaaaatactattacctaataagcagggtaccaaaaaaatctgtcatgtaaaataaggggtcaagttattccaaaattaatgcaattaccacggtgagcctgctgcagagagtgggagtcaataattaaacatgctttatccaaactcaagttagcatgggaagtattatcgagtagtcacttgctttgaacacttcttgcaatacaataaatattcatgctgtgtctcctttaactccctggggaaaagttaggatttaagacgaagcttatttgaacattggaaggtgcacttttaggtgagtctttcccaagcactttatttcaatagaaaaaaaataaatcagcaatttaaaaaatatttwaaaaaatgtattggggtttggtttatctgaaaagggttgaaattattaatagcattat

SEQ ID NO: 182809 - DNA, 543 bp, Homo sapiens
ccagtggctttgtttacactgtgaggggaaaactgcctactcaagccccagtattgagggackcccctccccccaccaaacttcagcatcccaagtcgactctagactgctatgctggcagtgagaatttcaagccagtggatcttagcttgctgggctccatggggctggggtctgctgagctagaccacttggctccctggttcctgcctcctttccaggggagtgaatggttctctctcactggcattccaggcaccactggggtatgaaaaaaaaacttctgtagctagctcagtgtctgtccaagtggccgcccagttttgtgcttgaaacccagggccatggtggcctaggcaccagagagcatctccttgtctgcaggttatgaagaccatgggaaaagcgtagtatctgggctagtgtgcaccattcctcacagcacagtccctcatggcttcccttggcaaggggagggagttccccaaccccttgtgcttcctgggtgaggcaacgccccaccctgcttcggcttgcccttca

SEQ ID NO: 182810 - DNA, 220 bp, Homo sapiens
tgatgtaacttaagttcttatctaaaygactgtcctttcaatgcatagagtatttcacctctctacatattcacttgtaagacacctaacaccaaaatcatgaaagtagaaggagatataaattcatatgttaagtcaggcatggtggctcatgccttaatcccaacaactcagggctgaggtagaaggatcacttgagaccagcttgggcaacataggc

SEQ ID NO: 182811 - DNA, 430 bp, Homo sapiens
gtaacttaatttaggagaagttggaaaattggacaatttccccatccctaccaagaaratatatttgcagataggggaataacatcacagataattttaaaacagcatttatcctaattagcctctggaaggtaaatattgactctactcatttttatttttgaagggaaggatattcttacagttttcttaccttctgctctgactaaaatcaaaagagttgagttctatcttgctatatagatattatccccacaagatctgtgaaattttaaaatttcgtaagcagagaatgaaagatttatgtcagttacctggaaattctgaggatcaatcctgccttgccatactgtgacatattctgcaagaatgacatgaattgttacataagccatcatactttgtttttgaaagacaaagaaagtaaagt

SEQ ID NO: 182812 - DNA, 435 bp, Homo sapiens
gtaacttaatttaggagaagttggaaaattggacaatttccccatccctaccaagaaaatatatttgcagataggggaataacatcacagakaattttaaaacagcatttatcctaattagcctctggaaggtaaatattgactctactcatttttatttttgaagggaaggatattcttacagttttcttaccttctgctctgactaaaatcaaaagagttgagttctatcttgctatatagatattatccccacaagatctgtgaaattttaaaatttcgtaagcagagaatgaaagatttatgtcagttacctggaaattctgaggatcaatcctgccttgccatactgtgacatattctgcaagaatgacatgaattgttacataagccatcatactttgtttttgaaagacaaagaaagtaaagtcaata

SEQ ID NO: 182813 - DNA, 435 bp, Homo sapiens
gtaacttaatttaggagaagttggaaaattggacaatttccccatccctaccaagaaaatatatttgcagataggggaataacatcacagataattttaaaacagcatttatcctaattagcctctggaaggtaaatattgactctactcatttttmtttttgaagggaaggatattcttacagttttcttaccttctgctctgactaaaatcaaaagagttgagttctatcttgctatatagatattatccccacaagatctgtgaaattttaaaatttcgtaagcagagaatgaaagatttatgtcagttacctggaaattctgaggatcaatcctgccttgccatactgtgacatattctgcaagaatgacatgaattgttacataagccatcatactttgtttttgaaagacaaagaaagtaaagtcaata

SEQ ID NO: 182814 - DNA, 636 bp, Homo sapiens
attattatttcataagtggtattaatactcttttgaatgggattccaaagagctgccttgtccctttcaccatgcgaggatacagctagaagactttatctataaaccagcagaacccccgtcagatactgaatctgctggcaccctgattttgaacttctcagcctccagaaccttaagaagtaaatttctattgtttataagctactctgtttatgatattttattataacagcttgaatggattaagacaatgatttttaaaatttctctttacacatctcctaatttttttttattggacattggaagataatttttgtgtttaaatggtagatttgttttgtatctttatatattgggtatataaagcattcttgactttaaggctaatttggggtcgcaactaaggcaatacgattctcaggattttactagatatttgatgtgttaggagatgtttygactctcgagattgttcagctaacccttttctaaggcatctttctatgtgttagttgtttcctcactagcatgaatggatgcactcaataaaagccttgaaggggacaacatacagattgtgcagctttgtgtgtgctatcccttcattctgatactacattctactaatcc

SEQ ID NO: 182815 - DNA, 623 bp, Homo sapiens
aggagtttaataagttctgttagtgttccctcctcagtaagaatgtaacaattaattcatatcccactaagttgtagtaaagacgaattctctgcaaatccagtaaattatctgagtggtagagaacttcatgttttattctcatcacataaattaaaaaatacttaaaaggaggatgagtcaaggctgtagttctgatgatgacaaagactttcttcgtgttagacaagactgctgcaataatatatataaaaaaaatagtgcagcacttgccaatgtggaaattagagagtcacaatttttgtgacgctcttgaccagaatagcaaataagatgtatggccaggcgttgtacatttcacttatattgtaactctaagctttctttttcagacagagctaattggtaaagggrttttccaaacaattaaaggcacaaaatatatttttaatcatcaggaagctactgaaaaattagtaattcgcctatttaatggcattaatacgcacacaacaggaaaagcagaatcttatagccttgagggaaggcagaatttcattctaattgcatactgattggaaatgggatagctgccattttcttcaaaatattcatttcaaaat

SEQ ID NO: 182816 - DNA, 623 bp, Homo sapiens
aggagtttaataagttctgttagtgttccctcctcagtaagaatgtaacaattaattcatatcccactaagttgtagtaaagacgaattctctgcaaatccagtaaattatctgagtggtagagaacttcatgttttattctcatcacataaattaaaaaatacttaaaaggaggatgagtcaaggctgtagttctgatgatgacaaagactttcttcgtgttagacaagactgctgcaataatatatataaaaaaaatagtgcagcacttgccaatgtggaaattagagagtcacaatttttgtgacgctcttgaccagaatagcaaataagatgtatggccaggcgttgtacatttcacttatattgtaactctaagctttctttttcagacagagctaattggtaaaggggttttccaaacaattaaaggcacaaaatatatttttaatcatcaggaagctactgaaaaattagtaattckcctatttaatggcattaatacgcacacaacaggaaaagcagaatcttatagccttgagggaaggcagaatttcattctaattgcatactgattggaaatgggatagctgccattttcttcaaaatattcatttcaaaat

SEQ ID NO: 182817 - DNA, 558 bp, Homo sapiens
tatttttctttttatgacaggaaacacaacatgaagtctcatttgcaaaaacatgaagtcagtagaaacttactatcccgaataagagaatctatcctggcttcttgaaagttgtatcacccctcttaactattggtatgcattaatatatgggaagggataatatattagaatatgtattaggaggattttattgaaagaaatgaataaaattatggtctatttctccttgacaatttattttatcagaatcttttgaaagttagagatgattctaattgaggctcatcttgtagcccaaaaatgtatcaagggtyctaaaaaaaatttccctaaaggaagctgtgatctgggttggtgatctgcaatcccatcaaggatgtagggttttgaggggattccaatctcagacacaaaatagaggacaagcctggatgcagcccctaggcttaattacctggcaaaatgccctgctttgaggattaaggttaagtatataaaggtgaactaaaattgctgtaaccttggaacatggtacaaagttgcaaattaggaaat

SEQ ID NO: 182818 - DNA, 480 bp, Homo sapiens
aggcaaagatcacattgtaaaaggacttataggtcatattaattttggtcataattatattagccatggaaagctgctgaagaatttgaaccatgatgtgacatgaccagatttgattttagaaaatgtctccagaagcagtgtgaagaaaggattagaggaaattcagtgaataggaggaggacattcattattttgcaagtctaggtgaaagatggtatttcctgagrctgtattgatgaaaacaggaaaagagagaaatgaatagtttaaagagaaagttagagctacgattactagaatttggtgatggttttgttatatggagctgaaagagagctatgtagtgtgacttcttggtttcttgcttgatcaactgagtggaggattgtgtctttgaacaagattagagatatgtgaaaggactttacttgtcatacatatcagttgttggggggcgggtggcaacttgtgcagtga

SEQ ID NO: 182819 - DNA, 497 bp, Homo sapiens
tcagccagttggcattgatgtagtttacatggtcaatctgatccaccctaaaaaccctacatattatccaaatattgattttctttgttgtgctgatcaacaaaaggtatattagtgaaaatggctacagaaatttttagcctagtgtcagtacaacaaattactaatgtgtaacaaattgcgagaagtaaaaatgaaaattatgcatcttatacacatctctttaataataatattaatatattaggcacaaattttttatattctgaatattaattccctaataaacataaaacattaaactctttgtttatcaagatttttggttacttttgaaaaatggatgggttattttaaaaagatttcataaggaaagttaaatacaatcctgtaattcatacagttataaatgataacatgattttcaattaaactcrtttttatgtgttaaaaagaaataaatatggaaagtcaaaaggaagtgttataagcattct

SEQ ID NO: 182820 - DNA, 561 bp, Homo sapiens
gaatcaattaaaaattaaagagttcaatgttcaaacacaaaaaaaattagtattttgmaacttggcaagatggcctaataggaacagctccagtctgcaggtcacagtgagactaacacagaaggtgggtgatttttgcatttccaactgaggtactcagttcttctcactgggactggttagacagtgggtgcagcccatggagggcaagcagaagcagggtggggtgttgcctcacccaggaagcacaagcagtctagccaagggaagccatgagggactttgctgtgagggacagtgctacctggcccagatactatgcttttcccacagtttttgcaaccaatagaccaggagagtcccttgtgtacatacaacatcagggccctgggttttaagcacaaagctgagagaccatatgggcagacaccaagctagctgcaggagtattttttgtaccctggtggtgactgggaacccccatgaaaaagaaccattcactcccctggaaagaaggctaaagccagggagccaagtggtcttgctcagtgggtaccaccc

SEQ ID NO: 182821 - DNA, 621 bp, Homo sapiens
atgtatgcaattttacatcatatatgcttgatgtgccctacatctttccttaaatgttacctttccaaaaattagaccactatggttttgtctctatgctagggaagtcaaggaacatcactacctgctgaggagtaaggcagagagtgattgtgaggctcaaaataaaatgaaaaaaaaacaaacaaacattgttaccgatgtttctagatcccaacaaaaagtcaggattaagtacttctgaccttatgagtgcacaaaactgctaagccaaaaatcagataatgttcttctcacctgatgtacattgcttgaatggaaacagacttttagaattacccaaactgttacttggattactttagtagcttctgtgttacaaagagtggctgatgtagctttcaaggtaaaactaggatgacgtrtttgtataatgaacattcaaaatgacataaatgtaatgatatggaggtactgaaaaaatgtttgcattatttaaagtgacaaatgttaattcagtggataagcaacctgtcacctgcttgggacagactctcacagctgtgggaatcaaactgaagcatgacttattaaaagtcattcaggaagcacctgttccag

SEQ ID NO: 182822 - DNA, 501 bp, Homo sapiens
tccacctggaaaagttctatatcatttcacgtcaaaaaggctcaggaggtctatttgactgttagctcagagtcatcagtgttatggctgccagcaaagccaatgggattggatgcagtgaactcacggccaatgttcagatcaagggaggtgacatttgcaccacgcatstgtgctgctcatattgcacttgttaaatttaacttagattcggatcctagattaaactattagtagttggttgactggacaggagtaaacagaatggagaaattgtttacgaccatatacttataaagaaaatggcaggaagtagttctgttagccgaggaaatacatgacctggagaagagccacaaacacttcaactattcagaggctgaatcgtttagggggacatttcataatttgtgtattctagaggataaagttaacattcaagggtaattgaaggcagatgaggttttgttttacataagcctcacatatccattagaattc

SEQ ID NO: 182823 - DNA, 506 bp, Homo sapiens
gaattcatatctagggaaatagtctccacctggaaaagttctatatcatttcacgtcaaaaaggctcaggaggtctatttgactgttagctcagagtcatcagtgttatggctgccagcaaagccaatgggattggatgcagtgaactcacggccaatgttcagatcaagggaggtgacatttgcaccacgcatctgtgctgctcatattgcacttgttaaatttaacttagattcggatcctagattaaactattagtagttggttgactggasaggagtaaacagaatggagaaattgtttacgaccatatacttataaagaaaatggcaggaagtagttctgttagccgaggaaatacatgacctggagaagagccacaaacacttcaactattcagaggctgaatcgtttagggggacatttcataatttgtgtattctagaggataaagttaacattcaagggtaattgaaggcagatgaggttttgttttacataagcct

SEQ ID NO: 182824 - DNA, 609 bp, Homo sapiens
acttggaagttaatttcctgtcactgaagtaatacagaaaaatctgatgaccagggattagaattgtcatataagagattccagtaagacactaattagaagaatctgtttcgattattaaaaaamaaaaatcttcaccaactttgcaatctctaaacacactgctctaagtaactctttaattattttagataaatttaaatatagcatattcagagaaaagtgcacaaattgtaaagtacagcttgatgaatttttacaaagtgaatataaacacattaccactgcccaaataaaaaataaaacattgccagtaatgcaggcaccacatttgagatattaatagatgacttacattaacatatgtctaaaaactaaccactatgtcgatttaaatctttataggttagttttaccaatttaaggatttgtacaagtgggatcatacaggatatattctttgagtgtgtctagtttctttgcaatgcatttagcaaagcttatttgttttaattgctcaattgtattccactgttgctttatgcattctgtatgtatgctcagtctggttgttttcagtttgaggcaataatgaacaatgatagacca

SEQ ID NO: 182825 - DNA, 377 bp, Homo sapiens
aagaaatatgtagaattaaagaaaaaatacccttggtcattgatgatatgatacctattcatgaaatccaaaataatttcctgacaaatsatgagaatatgagattaagaatatagcactatgagattaagatttaaaaattgcatttttatgcaccaacatgaagttgagacatatgtaatatattacatgtttatgaaaagagtgaaactctgtaaaccatttcaagattttttttttgagccaaatatgggtgaccacggcctatggcacagcccaggagatcctgaaaacatgtgcccaaggtagtctggagcagcttggttttatacaacttaggcagacatgaaacatcaatcaaatacatttaagataca

SEQ ID NO: 182826 - DNA, 495 bp, Homo sapiens
gccccggcctaaaagaggaagtccactcagatggttgaggggccttagaatatttttggcttacatccagatagatacacatgtaggtagatacttatatgcacatatacmtacatgcatagtaaacacaaagatgcatgaacgaaataaaaaccatttgaaatagccactaaaaatatgaaattctgagaaataaatagaacatacatgtaaataaggttttattattctgaatgttatagaactttagtcaattctgtgagtattggctttattacccttttgcatctgagatagcttctgtattttataacaaattgtaaggcaggttatcatatgtaatatgttacattcccactgccttccaaaaatgtttttcctctgtaatccttatgactgtttctattggattactgtagaggaatttccttctctatatacttcttaaatgttgaatttctcaatgtgcttaatatgctctctatattctattcc

SEQ ID NO: 182827 - DNA, 526 bp, Homo sapiens
actaatgtataaatctaacatgtctgaggctagactgtagacatctacattatgtatttcatggatattgtgagatgatgatactggtcatattataatccatgtgattgacaccacttagaagagcacatggcttgtgcaacgttccacaacattcctcccccatgtgtgtcctcctccctggtcctcatcacatcagtaaaataatacctctattcgcttagttgcttctgaaaaatgaaaataaaaaactaatatacattttgtgacttyatcacttaaatatcacatccaagttatgtgaatactctcagttgtaccttaactacacgaaaagggatgtgtagttgcaggaatgatagagtaggaagctgtggattaagccactacctataatcaattgaataattgggatagcatcctaacactgatgccaaagcagcattttagggacaagacccaggacagctcctccaataactgtactaataaactgatggacaagacctttcaataaattaattag

SEQ ID NO: 182828 - DNA, 487 bp, Homo sapiens
catttagtaaatagtgaggtattgatctgaaaatgtcatgggaaattagaaaacagtaacaccagaatgtcatatagctatgatttatgactttaccaatgtgaagtagaaattgattactattaaggtcaatattaagattcattgactcaagtatacatagtggctaaggctaaagtgagaatcaatgcttacatcaagaaactatgtatcttcctatggttaaaaatatgccaatatatcctgtcatcctgttattaagtrttataagaatctaatctttgaagcatgataaatattttacaattgaaaaatcatccactgctgcttatattggtctctacatcatcaatgatagaatattagattatttcaattaaaaattggcattcatatcaaatacaaatgaatcctaagtacagtcttcttctaaattattgaagaatccaaacttccttgtatagcacaccgaggaacatattatcat

SEQ ID NO: 182829 - DNA, 596 bp, Homo sapiens
ttgtaaagatctctaaccctggggtggggaaaattatttgtttaggccctgatgcagatctctggaagaattctcttgtccatgacaccttagacatgccctttggaaggtgcttcctggtgtaccaygctctttgtgcacatctaaagtggatgctggggaatgagccattcctgagggctgttcatttctcacagcccacttcttcttggagcaaggttgttttttagctccctgagtcagggtgacacaggactggcgagcccccaaactggggcttagcctgggagggttgttggcttcacctaggaaagaatcaagggagagctggtggtgttagacagcaacttgtattgaagtggcagtgcacattggcaacagagggatggctccttgcagagcagggctaccccataggcagtgtgcccaggttagcagctcagaggcagttctgcagtcatatttatacccacttttaattatatgcaaattaaggggtggtttatacagacatttctaggaaaaggatggtgacttctgggttgcaggtcgttgcatggaaaggggtggtaacttctgggtgttggcctgacagt

SEQ ID NO: 182830 - DNA, 596 bp, Homo sapiens
ttgtaaagatctctaaccctggggtggggaaaattatttgtttaggccctgatgcagatctctggaagaattctcttgtccatgacaccttagacatgccctttggaaggtgcttcctggtgtaccacgctctttgtgcacatctaaagtggatgctggggaatgagccattcctgagggctgttcatttctcacagcccacttcttcttggagcaaggttgttttttagctccctgagtcagggtgacacaggactggcgagcccccaaactggggcttagcctgggagggttgttggcttcacctaggaaagaatcaagggagagcyggtggtgttagacagcaacttgtattgaagtggcagtgcacattggcaacagagggatggctccttgcagagcagggctaccccataggcagtgtgcccaggttagcagctcagaggcagttctgcagtcatatttatacccacttttaattatatgcaaattaaggggtggtttatacagacatttctaggaaaaggatggtgacttctgggttgcaggtcgttgcatggaaaggggtggtaacttctgggtgttggcctgacagt

SEQ ID NO: 182831 - DNA, 641 bp, Homo sapiens
aatcaccggtaattcatatcacccagaggcaaaggttagcactgtggtatatttccttctgtcttccatgcagtttatacaagattcttcacattcaccatcttcaaatattctttaagggcatacttttatggctatgtaatactccacttactcacggacctaagtttattttaccattctcacaagattggccatttcagttgtgcccaatgctccactattattataacttaacattttcatgggcatctttttttatatagtatctgtactttcctttaaattcctaacctctccgtttaaaaaataataataaaaatcatattttttttaactaggtccagaaattctggaaggtcaagaggctttggctcgaatcccaattctgatacttatttgctgtttagtgttggcaccagtcctaaacctctccaggcctcagattatcatctgtaaaatgagactgtggaatcagaggtctgaggcctggtggatcttgtgtgacttttctctgatgcacctcagatgcattaggaggcagaaaaagtcggatttcggtggttgcagcatatactgaaatccgcagcctcatacttacrggcaacagtgtccagagagctagagaatttagaagaaaa

SEQ ID NO: 182832 - DNA, 458 bp, Homo sapiens
aagttgtttctgtcaggccaggygcagtggcttacacctgtaatcccagcactttgggaggccaaggcaggtgcatcacctgaggttaggagttcgagaccagcctggctaacatggtgaaatcctgtctctactaaaaatacaaaaaattagctgggcatggtggtgggcacctgtaatcccagctacttggaaggctgaggcaggagaactgcttgaacccgggaggtggaggttgcagtgagccgagatcgtgtcactgcactccagcctgggcaacagagactctgtctcaaaaacaaacaaacaaaaaattgtttctgtctttgaaactctgacgtttaagcccacatagtcacattggaagggccttaaagcatgggctattggaccttctcctgcccttctgtctctggtcctctttcttccccaaaatggggtcacaaaaactagaattc

SEQ ID NO: 182833 - DNA, 458 bp, Homo sapiens
aagttgtttctgtcaggccaggcgcagtggcttacacctgtaatcccagcactttgggaggccaaggcaggtgcatcacctgaggttaggagttcgagaccagcctggctaacatggtgaaatcctgtctctactaaaaatacaaaaaattagctgggcatggtggtgggcacctgtaatcccagctacttggaaggctgaggcaggagaaytgcttgaacccgggaggtggaggttgcagtgagccgagatcgtgtcactgcactccagcctgggcaacagagactctgtctcaaaaacaaacaaacaaaaaattgtttctgtctttgaaactctgacgtttaagcccacatagtcacattggaagggccttaaagcatgggctattggaccttctcctgcccttctgtctctggtcctctttcttccccaaaatggggtcacaaaaactagaattc

SEQ ID NO: 182834 - DNA, 420 bp, Homo sapiens
ggttcagtcactcacagattccacctgggtgtgaaagtaaaatttgcagggtctgtagccttgggggttccctatccagccctcttcagaagggagctccttggcaaatgttggagcacaggggtggtgtgcaccctgctctgatttctctcacccttgagggtctctcaggtgctcaggtgagagcccactcccctggagctgccctcttctagcagggtctgcctggacatcagccctcccatagcctgaccagcagcatgtctatttcgggggtgtttggggawtgggactcttctcaccttcttcttaataaagaccaagaattgattccctccctgtctcctcttctgcacctccaagattattctttgggagcaggaggctcactgattaccccaggaggcttccctcctaggg

SEQ ID NO: 182835 - DNA, 455 bp, Homo sapiens
tggaaaggaaagaagattctctacagaatgtagattttccccaccagagacagctttgcaggaccatttcaaaattcataacagatatatatttggggtaaaatacattgatttctttcaggacctgctgtcacatgatgtatcttattgctacaaatagtctgttctatcagttttgttttgtttttttttttgagatagggttcactcctgttgcccaggctggagtgyaatgacgtgatctcagctcaccacaacctgcacctcccaggttcaagtgattctcctgccacagcctcccgagtatctgggattacaggcatgtgccaccacacccggctaattttgtatttttagtagagacgggggtttctccatgttggtcaggctggtctcgaactcccgacctcaggtgatccacccaaagtgctgggattacaggtgtgagacacctt

SEQ ID NO: 182836 - DNA, 604 bp, Homo sapiens
cggttgtgtctggttgacattggagagacctgggagggtttgtcaggagaaggcctatttgccacttgcccctggagatattctctcgtggccttagcccatgttgagaaacctctacttttagagagtgggaggaagaaaatgagcttgtaaaggagccaagaggagcagtccaggacacaggcagagaaccrtgatggtaatgtcatggaaattgagaggagaaagttccaagggggaggaaatgacccaccgcgttgactgctgatcagcagagttagctcaggatccatggatcagagaaggccaggttgcaagggccagaggggctgagtggatcagaagcaaaggcgcaggaggagctgtgtccttagagtgggaggcagggcccagctcaaaggatttcaaggcagggatggcccgtgctcattgggagggggagggacagaagaggcatagggggacttggggacagagcggtggaattgagggagacttgctttgagaagaaagaatctctttatcgggaggcaagggaaggagaaaggatggttacagacatagactctgcattacgagcagctgcatttaacctttttataac

SEQ ID NO: 182837 - DNA, 604 bp, Homo sapiens
cggttgtgtctggttgacattggagagacctgggagggtttgtcaggagaaggcctatttgccacttgcccctggagatattctctcgtggccttagcccatgttgagaaacctctacttttagagagtgggaggaagaaaatgagcttgtaaaggagccaagaggagcagtccaggacacaggcagagaaccgtgatggtaatgtcatggaaattgagaggagaaagttccaagggggaggaaatgacccaccgcgttgactgctgatcagcagagttagctcaggatycatggatcagagaaggccaggttgcaagggccagaggggctgagtggatcagaagcaaaggcgcaggaggagctgtgtccttagagtgggaggcagggcccagctcaaaggatttcaaggcagggatggcccgtgctcattgggagggggagggacagaagaggcatagggggacttggggacagagcggtggaattgagggagacttgctttgagaagaaagaatctctttatcgggaggcaagggaaggagaaaggatggttacagacatagactctgcattacgagcagctgcatttaacctttttataac

SEQ ID NO: 182838 - DNA, 488 bp, Homo sapiens
tagtgctggtttttagttgttgcttttgtttttgtttgtttgtttctttgcttgagacagagtcttgctctgttgcccaagctggagggtagtggcactatcatggctcactgcagcctcaacctcttaggctcaagcaattgtcctacctcagcctcccaagtaactgggactacagatgcatgccaccatgcccagctaatttttgtattttttgtagmgatgaggtttcaccctgttccccaggctgatctcaaactcttgggctcaagtgatcctcctgccttagcctcccaaaatgctgggattacaggcgtgagccactgcacccagcttgcagtatttttaaaaaatggtttcataacatcccatagtaagactctacgagcatttatgtaaccaatcccctggagatgggcattttagctatttgcattttccctcagatttatcatagcatgcagtgatcacctttacacatacacctt

SEQ ID NO: 182839 - DNA, 560 bp, Homo sapiens
tatgcatccctcactccttggcaacactatcttaccacattgataaaataatctatttgcctgtacctatgcacaaggaccattttactcatttgcgtatcttccctgattagcaggatagtagaaacaattaacaccraatccataagtgtagattaaacaaaaaccagtcaagtttgcctttgtattgtaactctggtaataggttttagaggaaattcaactaaaaaggaaaatgaacttaaagagtctggatttttttcctaatccatagttatctaattcaccctttctcaaaagaaggctctctctttcttcctctttatcggctcttgcctgtctttccctttctccagttctctctcacacacagcttgtatctaaagctatgcaagaaatacattttatactagtgatttggtcagtgttaccctgcttcttcttgctatgaatgcagtatatatgagataagtacaaaagaaagagtatctaactctcttattttcatcatgacccactgggacaaggggagagagagggcacagctgcctccacggaat

SEQ ID NO: 182840 - DNA, 476 bp, Homo sapiens
gggtgccagagtgagaccctgctcctgccccccaaccaaaaaaagaaaagaaaagaaagaagaagagatacaggcagaacaccttgtgacagtggaagcaaagattgaagtgctgctgtgtaagccaaggaaagcctcaaggacttcggacaaaacaccagaaacaagaaaagattctcccctacagatgtcaaaggagcatggccctctcaacaccttgattttagacttctagcctctggaastaagagacaattttgttgttggttgttgttgttgttgttgttgttgttgttgttgttgttgttgttttaatccacctagtttccacttaatggcaaccctagagaactagtacaagggttgtgtgttccattcttttacctgcaagcagggctgcaggtaaaaattaatcctgataggcagactgtgttagatgctatagaaccttctgtaatctatcctaatggagaaga

SEQ ID NO: 182841 - DNA, 476 bp, Homo sapiens
gggtgccagagtgagaccctgctcctgccccccaaccaaaaaaagaaaagaaaagaaagaagaagagatacaggcagaacaccttgtgacagtggaagcaaagattgaagtgctgctgtgtaagccaaggaaagcctcaaggacttcggacaaaacaccagaaacaagaaaagattctcccctacagatgtcaaaggagcatggccctctcaacaccttgattttagacttctagcctctggaactaagagacaattttgttgttggttgttgttgttgttgttgttgttgttgttgttgttgttgttgttttaatccacctagtttccacttaatggcaaccctagagaamtagtacaagggttgtgtgttccattcttttacctgcaagcagggctgcaggtaaaaattaatcctgataggcagactgtgttagatgctatagaaccttctgtaatctatcctaatggagaaga

SEQ ID NO: 182842 - DNA, 645 bp, Homo sapiens
atctgggtgggttttgatatgatatagcaataaacaacacatggatgcacgcacttagacctttatctcaggtgcttaaactataaccaggacaattcaagacgtacrtaaataatgacaggacacatttttgagattcctttgctttttttttttttttaagaatatataagaatatttccagctggccatatcagagaagatggttttggaacagaaaccatcttcactggctcttgaaggataaaaatgtcttaaacaagcagaaatgaggagttgcatctcaggcagaggcaactgtataaagaaaggcacagagtgaaacatacaaatgaggagctggaaaaagatacaaaagaaatgaaacaattaacattgaatatgaaaggtgatttagaaggtggaatacaagatgactctacgtttttggcatggaagatgggatagaccactgtgccattaacagaaaggatggtcaaatctgaaggaagaactagtaggagcgggaaggaaatgagttcaattttagacatagattgggtttaagctatcaggggaacatatgtaggtagggtccattaagcaaataaaatatagaattggagcttaagaaatatatttcctaatagaggtcattgctgaagc

SEQ ID NO: 182843 - DNA, 645 bp, Homo sapiens
atctgggtgggttttgatatgatatagcaataaacaacacatggatgcacgcacttagacctttatctcaggtgcttaaactataaccaggacaattcaagacgtacgtaaataatgacaggacacatttttgagattcctttgctttttttttttttttaagaatatataagaatatttccagctggccatatcagagaagatggttttggaacagaaaccatcttcactggctcttgaaggataaaaatgtyttaaacaagcagaaatgaggagttgcatctcaggcagaggcaactgtataaagaaaggcacagagtgaaacatacaaatgaggagctggaaaaagatacaaaagaaatgaaacaattaacattgaatatgaaaggtgatttagaaggtggaatacaagatgactctacgtttttggcatggaagatgggatagaccactgtgccattaacagaaaggatggtcaaatctgaaggaagaactagtaggagcgggaaggaaatgagttcaattttagacatagattgggtttaagctatcaggggaacatatgtaggtagggtccattaagcaaataaaatatagaattggagcttaagaaatatatttcctaatagaggtcattgctgaagc

SEQ ID NO: 182844 - DNA, 471 bp, Homo sapiens
aaagagagagagaaaacaaggatgaacgatggggagaagggagggcagaagagagaaaacagaagcgggaaattcgacagaggaggagaggcccaaagggcggggagcaatgcggggaagggagaagtgggagggaagaagaggagaggagtcagtggcggtggaaggaaggggaagaaccagagagaagaaaagaggttaaggaaaagaagagcartgcaaagtcggggccccgaatagtgccgcattctgtgggcacacgccgggcagatagaaagtatagacgcgacgcgctcggcccctcgtcgggcgtcgggtcctggtgctgtcgctcaggtgctggtccccagctccaagcccgcctcgtagtcggcgctgcgggtgagatcgcccgcaagcactcagtttactggcggctgcctaccagcggctcactttcctcggggcgcctaaagctccccgcccggcatt

SEQ ID NO: 182845 - DNA, 561 bp, Homo sapiens
tggattctctgaagacatggattttgtggctaggtaataaaaatactaataatgataataataacggcaataacatctcttggstgtatcctatatggcaggtcctatttacgtgttttacagagattagctcagttaataacacaaccctacaaggtacgtgttaggccttttactggagaggaaacaggcacacagaggttaagtaacctgcccaagattacacagagagctactggtaacaattcatggagttgttaactatttggggacttttcatgagaaagataatgaccatgaatagtgtggggcccacgcaattctgtcactaggagagaaaggaggtatctgtttggatcctctcatggaagagaattgcattttagagctcaaagagaccaccaaataatgaggctctttcagcctgttgcaaaacactgtgggtcctgcgggaactaaagccaacagacatggaatagagggtgcgcatcccatcttaaatatgcaagattaaatttacccaacccgctataggttaccaatgctgacgggtcagaattc

SEQ ID NO: 182846 - DNA, 589 bp, Homo sapiens
aaggaccccagggtggcatctacccacatgggtctccatacaaagaaagaagacagggccccagaagagctcttccaattcctggtaccaaccacccaggaaatgctgcactggggctgcacrtggcagccctgggtccaagagagcctgagagaattcttcaaggagctgctgatgcttagaagtgagagagaggctgggggacctcactccagccttggatagatggaagaggggcagatcacctgaaacagaagacaaagaggagtacaggcccaaaaagagaggtacagagagagctgcaaaggagtgagtgaaagagaccaagagaaatggagagagcaagaaaaaagacaagacgagatgaaaccaaacaggaagagatgccttgttaaccaagtcgagaagtactggtggactgcagaagcgagaggaaaaggttaccatggcaacaccttgcagaaagcgtaggctgtgtagctgagtgagcccagccaagagagctgcagccgccaatggcctcacctgctactgcatctgttcacctgtgggactgtgcctcgaaggctatgcccaagctcccactccc

SEQ ID NO: 182847 - DNA, 559 bp, Homo sapiens
ggctgaggtggtcttagatggagatgaggaactttttgggaactggaataaaggtcacttttgctatgcaagaaactgatgtattttggccctgctctagagatctgtggaagtttgaacttgagagaaatgatttagggtatttggcagaagaaatttctaagcagcaaagcattcaagaggaagcaaagcatacaagtttgaaaaatttgcagcctgacaatgaaatagaaaagaaaaacccagtttctcagagaaattcaagcctgctgcagatacttgcataagtaacaaagagcaaatgttcatcaccaagacaatggggaaaatgtctccagagcatgttggagacgttcatggcagcccctcccatcataggcctggagacctggaagggaaacatggtttcatggatgggcccaggytccccctgctttgtgcatccttgagacatgataccctgtgccccagctgcttcagctccagccatgactgaaagggacacacatacagctcaggccactgtttcagatggggtaagccccaaggcttggcagct

SEQ ID NO: 182848 - DNA, 622 bp, Homo sapiens
acaaataatatcttcactccctccctatacagttctagataggaagaaaatatttgatcctgagatgtttccaatttatattagtttatatgttacacaatcttttataattttttaaatatttgtattagggttctccagagaaacagaactactgggatatttatatacaggaatatgtaagaggatatttattatgaaaattggcttttatgatgattgaggccaaaaggtctcaaaatatgctgtctgcaagctggggaaccaaaggcctgaggaacaatggtgaggaccattgatgtaagtyctggtatcctaaggccagaaaaccaagatctctgatgtctaaggccaggagaagaacaatgtctgcatgaaagagagtgaattcatccttcctttaccatttttgctctgtctgggctttcaacggattggatgatgtgcactcaaattggtgagtgcagatctttattcagtctactgattgaaatgctagtctctttcaaaaacaccctgacagacacacccagaagtgttgtattaccaactttctggtcatccttgtacccagtcaagttaacacacaaaattaaccatcacaagtttattttaataaatc

SEQ ID NO: 182849 - DNA, 385 bp, Homo sapiens
atccatttgcatttgcctgtgaacggctacatgccataggtagtgatcagttaaagtaaagaaaatacaccgtaaaaagtggcttccagcaaacacactccttgcatttcttttgacagctacctgacatttagttgacctagacaaatttgcatattttaatttgatccctccccayttcatttcatttgccttatctgagaaatgagaaaaataacatgaaacacaaaagtccactaaaaacaacagcagagagcaatgatttcctcttttagctgcaattgtcttcatcgcccaatacttctcatcaacatcatcatgttgacatttcatgaatgcttattgcacatcaggtggaccattgaattgtttccaaataattatg

SEQ ID NO: 182850 - DNA, 281 bp, Homo sapiens
acgagtgagtaatggccacaaatctgtaggcttgtagggcatgaccwatttcagtaaaccacttgagtcagctctgttcagcatctatctctaggcactacagagatgcctatcattactgctccttagtgctctggtaaagatattagaaagattggcaaattaccttgacctaattaactgaagttcaaactggggcagtattttatgtacactaaatcattatgaacttgggtgtggctatcttcagcatatagtgatgtcttgtaattttgcacaca

SEQ ID NO: 182851 - DNA, 434 bp, Homo sapiens
gggagagggaggagcaatgcaggttgttttgggaaaagtaaataattttggagaaagatgaatgggtctttaaaagaataggtaatagcctatgacaaattctgtctgggtgtgatgtcagcagtcttctctcctgcaataaaagtttattcttctctggttgatgagattcccaaggagggacttcattccatttatgggcttttttggggactccatatttgggtagataagggaagttcagagaaagattttccctgcrttaacggttcccaaagtgccctcaatttgaggcagtcagcataccaaggtagcatattacaggataacattccctgacctccttcaatgtattgtgtaaatgtattctaggtacatgaccatgaagtgagttgagatttgcagtgactagaggaaacagaaagatgccaaga

SEQ ID NO: 182852 - DNA, 432 bp, Homo sapiens
gggagagggaggagcaatgcaggttgttttgggaaaagtaaataattttggagaaagatgaatgggtctttaaaagaataggtaatagcctatgacaaattctgtctgggtgtgatgtcagcagtcttctctcctgcaataaaagtttattcttctctggttgatgagattcccaaggagggacttcattccatttatgggcttttttggggactccatatttgggtagataagggaagttcagagaaagattttccctgcgttaacggttcccaaagtgccctcaayttgaggcagtcagcataccaaggtagcatattacaggataacattccctgacctccttcaatgtattgtgtaaatgtattctaggtacatgaccatgaagtgagttgagatttgcagtgactagaggaaacagaaagatgccaa

SEQ ID NO: 182853 - DNA, 521 bp, Homo sapiens
tgacataagcaatgacagtaggtgtgatgtaagcaatgacagaaggtgggacaaccttctggctcccatgtggttcatgctggtgttggcagtaactgcaattggctgggcactccagttcctcctattgcaggygccacatgtgattttgtggcagctgtggtggtagtggtagataggtatgcccatcctcaggcccctggtaggaatgtaggtgtcaatggtggaatataagtcagggaaattcccaggccttgggcagtggggtaggtaatgctacactgggagggtctgtttgcaggccttccagttgtgcatgcaggtgctatctgtagtaggcaggagtggagttacttctgcatccatggtggaatgctcctgtggggatgacagtgccagtgctgtggcccagatgctgaggagggtagggttgcatttatttccaccagccatagacaggtagctgggaagcacaccactttagccccaggtggcggttgcaggtgggattgtctgtcttc

SEQ ID NO: 182854 - DNA, 625 bp, Homo sapiens
gtcagggaaattcccaggccttgggcagtggggtaggtaatgctacactgggagggtctgtttgcaggccttccagttgtgcatgcaggtgctatctgtagtaggcaggagtggagttacttctgcatccatggtggaatgctcctgtggggatgacagtgccagtgctgtggcccagatgctgaggagkgtagggttgcatttatttccaccagccatagacaggtagctgggaagcacaccactttagccccaggtggcggttgcaggtgggattgtctgtcttcagggtgatataaatgcgtgatggcccggctgctgaggacattcaaactgctaatggcttgcactttggacctggtggtagcagccagtagcagtggtgcctgcaggtaggggatgtcaatggggctgcaggaatgtggagattgaaagactgttgtgccccaaggaaggatggagttctgtgtggctttgcagtagctgcttaaggttcaggggtatgtgggaccctgtgagtcactctctagagtaatgccttcaaccagtgtccaggcagctcccaatgttggtctcagggtctgtgacagttagggggctgtctcatggatagaattgctgtagt

SEQ ID NO: 182855 - DNA, 625 bp, Homo sapiens
gtcagggaaattcccaggccttgggcagtggggtaggtaatgctacactgggagggtctgtttgcaggccttccagttgtgcatgcaggtgctatctgtagtaggcaggagtggagttacttctgcatccatggtggaatgctcctgtggggatgacagtgccagtgctgtggcccagatgctgaggagggtagggttgcatttatttccaccagccatagacaggtagctgggaagcacaccactttagccccaggtggcggttgcaggtgggattgtctgtcttcagggtgatataaatgcrtgatggcccggctgctgaggacattcaaactgctaatggcttgcactttggacctggtggtagcagccagtagcagtggtgcctgcaggtaggggatgtcaatggggctgcaggaatgtggagattgaaagactgttgtgccccaaggaaggatggagttctgtgtggctttgcagtagctgcttaaggttcaggggtatgtgggaccctgtgagtcactctctagagtaatgccttcaaccagtgtccaggcagctcccaatgttggtctcagggtctgtgacagttagggggctgtctcatggatagaattgctgtagt

SEQ ID NO: 182856 - DNA, 521 bp, Homo sapiens
ggggttccttttagcacttgattttcctataataaagataacccctgttctaataaaaacaaaacttgcagcaactcaattagcaggattactagattcagattctttggaaatgaagttttaacaccctccaaggtaaagacatccattcagaggatgtatcatcagaaagtaaagagaactaggaataagtagcagaagaaagaagttatcattttcaacttaagcctcaatcagctacataggtgatgactatagtagccaagtatatgttacattaatcattaccctcatttcctattaccatttgctattggtggtgactaacattacaaagtaggttacaggyggaaagatgactgaattgagacaagcctgtaatgtgtttttcccctgtgagatgagtttcttcaactgaatgaaaaggaacaatggatattaagcataaaagaaaaaaaaaaacctatatgggttattttctattggcttgatcaaatccattatccagccttctctgtttt

SEQ ID NO: 182857 - DNA, 588 bp, Homo sapiens
ttataagcgagaacatgcagtatttggttttctgtttctgttagtttgctaaggataatgacctccagctccatccaaggtgctgcaatggatatgatctcattcattttacagctgcatagtattccatggcatatatttacaacattttctttatccagtctactacagatgggcatttatgttgattttatatctttrctattgtgaatagggctgtgatgaacatatgcatgcatgtgtctgtatggtagatcaatttatattcctttggtcatatactcaataatgggattactgggtacaatggtaattctattcgaagttctttgagaaattgccaaacagctttccacaatgattgaactaatttacattcccgtcagcagtgtataagtgtacgcttttctccacaaccacaatggcatctgttattttttgactttttaataacagcctttctcattcagactggtgtgagatcgtatctcattgtggttttatttgcatttctctaaagattagtgatgttgagtattttttttaatatgcttgctggccacatatatgtcttcttttgaaaagcgt

SEQ ID NO: 182858 - DNA, 506 bp, Homo sapiens
gtcagttgttattgtaacatatctagattattataattgctataccagtataagccccgtgatgaataactgtttttacaaacacaacagtgyccagtagatccccagtggaaggtagaataactggaaacatcgaaagtaggggaatttcttgtgagcatgtgtgaaattcactctaggtactccagaaaacacaaaaggttaagggatttgagattttgcagtgagctgaatgtctttctgcatagcatgtagaagcagaagccattagccattgagtcattaataagatattgttttacttggagtagtgttatctggggaaacgagttatgtgctttcacacaacttcaaagttttaggctgtttgtgagatttttttctcttataggtttaaaaactgtcaaatttacattttattttgttttagaagtttttattgtaggtcttcttttattataggactattattttgtaacttttataatcaaatatgagttattttt

SEQ ID NO: 182859 - DNA, 556 bp, Homo sapiens
tagattttatttgtcaatttttgcttctgttgcaagtgcttttggcaattctgtcatgaaatctctgcccatgcctatgtcctaaatggtattgcctagggactcaaatgaacccctagcataccacagcatccctacagaaaagtggccacactattttaagggaaaaaaaaaagcttcaaatgtttgtaatctcaaatatggaaggtcaataagcycacaaagatgagaaagattcaatgcaagaacactgaacactcaaaaagccagagttccctttttttcctccaaatgaccatatcactattccagcaagggttcagaaatgggctgaggctgagatggctaaaatgacagaagtggaattcagaatatggataggactgaagttcactgggctaaaagagtgcattgtaacccaatgcaagaaaggtacaaattatgataaaacattacagcagcttacagacaaaatagccagtataaagaagcatgtaaccatcctgatagagctggcctacactgcaataatttcataatgcaatcacaagtgtta

SEQ ID NO: 182860 - DNA, 620 bp, Homo sapiens
gatttggggccaatattcaacattcttaaagaaaagaaagcctaacccagaattttatatctggtcaaactaagcttcataagtgaaagtaataagatcattttcagacatgcaaatgcggagggaatttkttaccaccagacctgtcttacaagaactcctaaaggaagcactaaatatggaaagaaaaggccattactagccactacaaaaacacactgaagaacagactagtaactctataaaggaattacataaaccagtctgcaaaatagcaaaataaccagctaacatcatgatggcagaatcaaatctacacatattactactaatcttaatgtaaatgaactaaatgtctgaattaaaagacacagagtggcaagctggaaagagaatcaagacccatgctgtcttcaagagacccatcttgcatgcaatgacatgaataggcttaaaacaaaggcatggagataaatctactaagcaaattgaaaacagataaaacaaaggttgcaatgccagtttccgacaaaacagacttagacacaacaaagatcttaaaagacacagaagggaattacataatggtaaatggttcaattcaacaagaagatttacat

SEQ ID NO: 182861 - DNA, 604 bp, Homo sapiens
cttcaagagacccatcttgcatgcaatgacatgaataggcttaaaacaaaggcatggagataaatctactaagcaaattgaaaacagataaaacaaaggttgcaatgccagtttccgacaaaacagacttagacacaacaaagatcttaaaagacacagaagggaattacataatggtaaatggttcaattcaacaagaagatttacatattctaaatatgtatgtgcccaacacaggagcaaccagtttcataaagcaagttcttagagaccttcaaagagacttagactcccatacagcaatagtgggagactataacactctattgacgatattagaaagttcatcaagacagaaaattaactaaggtattcaggacytgaactcagtactggataaaatggacctgatagaaacgcacagaactctccaccccaaaacaacagaatataaattgttctcattgtcacatggcacttactctaaaactgaacacataatcggaagtaagacattctcagcaaatgcaaaagaagtgaaataataacaaacagtctcttggaccatagcatgatcaaatttgaaatcaagactaagaaattc

SEQ ID NO: 182862 - DNA, 604 bp, Homo sapiens
cttcaagagacccatcttgcatgcaatgacatgaataggcttaaaacaaaggcatggagataaatctactaagcaaattgaaaacagataaaacaaaggttgcaatgccagtttccgacaaaacagacttagacacaacaaagatcttaaaagacacagaagggaattacataatggtaaatggttcaattcaacaagaagatttacatattctaaatatgtatgtgcccaacacaggagcaaccagtttcataaagcaagttcttagagaccttcaaagagacttagactcccatacagcaatagtgggagactataacactctattgacgatattagaaagttcatcaagacagaaaattaactaaggtattcaggacctgaactcagtactggataaaatggacctgatagaaacgcacagaactctccaccccaaaacaacagaatataaattgttctcattgtcacatggcacttactctaaaactgaacacataatyggaagtaagacattctcagcaaatgcaaaagaagtgaaataataacaaacagtctcttggaccatagcatgatcaaatttgaaatcaagactaagaaattc

SEQ ID NO: 182863 - DNA, 628 bp, Homo sapiens
gacaaacaatggcactatataatgataaaggggttaatatagcaggaatatataatgattgtaaatatatatgcacttaatgctggagcagtcagatgtataaagcaaatattattagagctaaagagaaagataatagacttaactatgataatagctagaggcttcaacacccgactttcagcactggacatatcatccagacagaatatcaataaagaaacatgagacttatctgcactacagatcgaatggacctaagaaacatttgctgaacatttcatccaatggctgtggaatacacattctttttcttatgtacacggaacattctcaaaggtagaccatatgttaggccaagaaacaagtctttaaaacactcaaaaagttgaaataatatcaagcatcttctctgacaacatggtaacaaaactagaaaccaataacaagataaattatggaaactatacaaacacatggggtttgaaacaatatgctcctgaaaggccagtgcgtcagtgaagaaactaagaagaaaatttttaaaattctggaaatcaaatgttgataaaatacgacatactacaacctatgggatacagsaaaactagtactaacagagaagtta

SEQ ID NO: 182864 - DNA, 640 bp, Homo sapiens
ttagcccatttacattcaaggttagtattgatatgtgtggacttgatcttgtgatcatgatgttgcatgtatgtttattatgcccaattttttgcatagttgctttatagtgtcattggtctgtgcacttaagtgtgtgtgggtttttttttggcagctagaaacggtattttcttaccatatttaaagcttctctcaagagctcttgtgagataggtctggtagtaactaattttctcagcctttacttgtctgaaaagatcttatttctcctttgcttgtgaagcatagtttgatcagacataaaattttttattagaattttcttttcttcaagaatgttgaatatatgtcccatttctcttgcagcttgtatggtttctctgagaggtctgcygttattctgatgggcttcacttgtaggtgacctgttctttttctctagcagtatttaacattttttctttcatttcaaccttggataatctcatgattatgtctcttcgggatgatcttcatgtgaactatcttgcagatgttatctgctttttctgaatttcaatgttggcccctatagctagattggggaaaatctcatggctggtgtcctggagtatgttttctaagttgttcttatttt

SEQ ID NO: 182865 - DNA, 640 bp, Homo sapiens
ttagcccatttacattcaaggttagtattgatatgtgtggacttgatcttgtgatcatgatgttgcatgtatgtttattatgcccaattttttgcatagttgctttatagtgtcattggtctgtgcacttaagtgtgtgtgggtttttttttggcagctagaaacggtattttcttaccatatttaaagcttctctcaagagctcttgtgagataggtctggtagtaactaattttctcagcctttacttgtctgaaaagatcttatttctcctttgcttgtgaagcatagtttgatcagacataaaattttttattagaattttcttttcttcaagaatgttgaatatatgtcccatttctcttgcagcttgtatggtttctctgagaggtctgccgttattctgatgggcttcacttgtaggtgacctgttctttttctctagcagtatttaacattttttctttcatttcaaccttggataatctsatgattatgtctcttcgggatgatcttcatgtgaactatcttgcagatgttatctgctttttctgaatttcaatgttggcccctatagctagattggggaaaatctcatggctggtgtcctggagtatgttttctaagttgttcttatttt

SEQ ID NO: 182866 - DNA, 592 bp, Homo sapiens
atagcaagtgaaatatttgaaaatagttttcatttgcctgtttaacagtcttactctcttcaatcatattttcatgtaatggattcatatcctactatatttctatttctgtcctttacaggcataatctcaaatgttaatatatattgtgtaataggtgtatattggatagtaataaactgctcatggtaggtttttccacttttctggttcaaatggaatggttgattttcaaatgcttctgtttagtcccactaaataccggacacaaacaccagagttttccttgccataatccaacatttggttttctgggaatctggaaacttcccrtcttttggacaagtgaatattattgccctgagctattgaaaagtgataatttgaggtaagatcatgttttccatattattacaccacaagttatgtgcaagtagcacgaataatgggatgtcttcatcatataatatagagaaggacatttcatataatacgtggcattgtgtggaagttgcttgaaaaataatgagcaatggaaaatgtaagaaagtgttggactcccatacagttctctgttgcatgccacagaagg

SEQ ID NO: 182867 - DNA, 395 bp, Homo sapiens
tggtaggtttggtttctcctgaggcctctttatggtcttgaagatgaccactctcttcctgtgccctcacgtggttttctatctgtgcatgcacactcctggtatctcttcttcttataagaacacaagttctactggattagagcccctgcccttacaactttgtgtagcctcaattacttccttaaaggtcttatcgtcacagtcacattgggggttacatgttcaacatattaacttggggaggcaagacaaaattaagcccataaaactctccattctatccttctccttgaattaatgtkcctctcatacgcaaaatatattcactctatcccaacatccctaaaagtgttaattcattgtatcatcaactctaagttcaaagctttatg

SEQ ID NO: 182868 - DNA, 535 bp, Homo sapiens
gttcaacatattaacttggggaggcaagacaaaattaagcccataaaactctccattctatccttctccttgaattaatgttcctctcatacgcraaatatattcactctatcccaacatccctaaaagtgttaattcattgtatcatcaactctaagttcaaagctttatgtaaatatcatccaaaccagctatgggtgagtctagatgtaggatttatccagagtcaagattattctttatatatgaacttttaaaactggaaaacttatctgcttccaaaatacaatagtagaatggtcataagatagatattcacattacaaaagggaggaatcagaaataagaaaggtgtcccaaggaagtccaacacatagcaaggaaaattctaccacaatttaagacacaaaaataaagctcatggtcattcttccttttccttgaaggatagtaagtgttcaaagccaactagttcatttgtcctatttttataatccccaaggttcaacagcctttcttaattttatcttatttc

SEQ ID NO: 182869 - DNA, 583 bp, Homo sapiens
tgcctcattctctctttgcattccaccataattggaagcttcctgagktctccccagaagaagaagccactatgcttcctgtgcagcctacagaatcacgatccaattaaacctcttttctttctaaattacccagtctcaggcatttatttatagcaatgaaagaatggactacttcagaaaattggtgctgagaagtggggcgttgctgtgaagatacctgaagatgtgaaagaaacttttggaattgggcacagagtttggagggctcagaagaagacaagaagatgagggaaagtttggaacttcttagagactggtttaatggttttgaccaaaatactaatagtgacttggaaagtgaagtccaggttgactaggtcttaaatggaaatgaggaacttattgggaattgaagcagaggtcacttttgttatgccttagaaaaaaacttggtttcattgtgcccctgctctagggatctgtggaacattaaaattgagagtgataatttagggtatgtggcagaagaaatctctaagcattaaactcttcatgatatgatctggctgcttctaaccaa

SEQ ID NO: 182870 - DNA, 583 bp, Homo sapiens
tgcctcattctctctttgcattccaccataattggaagcttcctgagttctccccagaagaagaagccactatgcttcctgtgcagcctacagaatcacgatccaattaaacctcttttctttctaaattacccagtctcaggcatttatttatagcaatgaaagaatggactacttcagaaaattggtgctgagaagtggggcrttgctgtgaagatacctgaagatgtgaaagaaacttttggaattgggcacagagtttggagggctcagaagaagacaagaagatgagggaaagtttggaacttcttagagactggtttaatggttttgaccaaaatactaatagtgacttggaaagtgaagtccaggttgactaggtcttaaatggaaatgaggaacttattgggaattgaagcagaggtcacttttgttatgccttagaaaaaaacttggtttcattgtgcccctgctctagggatctgtggaacattaaaattgagagtgataatttagggtatgtggcagaagaaatctctaagcattaaactcttcatgatatgatctggctgcttctaaccaa

SEQ ID NO: 182871 - DNA, 583 bp, Homo sapiens
tgcctcattctctctttgcattccaccataattggaagcttcctgagttctccccagaagaagaagccactatgcttcctgtgcagcctacagaatcacgatccaattaaacctcttttctttctaaattacccagtctcaggcatttatttatagcaatgaaagaatggactacttcagaaaattggtgctgagaagtggggcgttgctgtgaagatacctgaagatgtgaaagaaacttttggaattgggcamagagtttggagggctcagaagaagacaagaagatgagggaaagtttggaacttcttagagactggtttaatggttttgaccaaaatactaatagtgacttggaaagtgaagtccaggttgactaggtcttaaatggaaatgaggaacttattgggaattgaagcagaggtcacttttgttatgccttagaaaaaaacttggtttcattgtgcccctgctctagggatctgtggaacattaaaattgagagtgataatttagggtatgtggcagaagaaatctctaagcattaaactcttcatgatatgatctggctgcttctaaccaa

SEQ ID NO: 182872 - DNA, 433 bp, Homo sapiens
cctcagcctcccgagtggctgggactacaggcacccgccaccacgcccggctaatttttttcttttcttttctttttttttttttttttgtatttttagtagagatggggtttcaccgtgttagccaggatggtctcatctcctgacctygtgatctgccctcctcagcctcccaaagtgctgggattacaggcttgagccactgtgcctggcccaccatccttacttcttaagcaatgcctttcctttatcttagctggattccctgggtacttattagttaggtctcttcactgtgactggactagaataccaatgtttcttgacactgcttaatgtctattaactatttactctcatctgagtagtaagtcctatgttgctatcttcacatggtatcatcctgatccttcacagtttaacaccctcacca

SEQ ID NO: 182873 - DNA, 433 bp, Homo sapiens
cctcagcctcccgagtggctgggactacaggcacccgccaccacgcccggctaatttttttcttttcttttctttttttttttttttttgtatttttagtagagatggggtttcaccgtgttagccaggatggtctcatctcctgacctcgtgwtctgccctcctcagcctcccaaagtgctgggattacaggcttgagccactgtgcctggcccaccatccttacttcttaagcaatgcctttcctttatcttagctggattccctgggtacttattagttaggtctcttcactgtgactggactagaataccaatgtttcttgacactgcttaatgtctattaactatttactctcatctgagtagtaagtcctatgttgctatcttcacatggtatcatcctgatccttcacagtttaacaccctcacca

SEQ ID NO: 182874 - DNA, 521 bp, Homo sapiens
ggttaatagaggctggagatagtaaggggcagggtgaaacaaggaaagttggtcagtggataaaaagttacaagaagaataagttttggtgttctattacacactagggtgactatggcaaataataatgcattatatatttcaagatagatggaagattttgaatgttgtcacgacaaagaaatgctaaatgtttaaagtgacagatatggtaattgccacaatttgatcattatagtatgtayacatgaatttagacattgtggcctaaatgtatgtacaatgattatttgtcaagtatacatttaaaattaaatatataagaataccattttctctctaatgtttatttctggttactttaatttttccttttatttttccattttttttacttgtaattttcctactcaaataattgtgcaatccacatccagtttaattactagaatagattttgcatttgtttttcttttaagatataaaattgccttcctgccttggtctaaaagtatttgaaa

SEQ ID NO: 182875 - DNA, 469 bp, Homo sapiens
ggactataattatatgtatttttgacttttttttttaactttctgtgatatttkctatttgcctatgttatcttacactaatgttgtctttcattgtttctaatactatttcactcatctacagaaaacatgatttcagtgacttaattgtacagctctaaaatttcaatggtgcttatttttacacatctcatttttctcatgaaattgtctacattgtatatttaaaatatttatatttattgtaaagtctataactgatcatttcagtatttggattatcaatgtgtttcttaatctattttttccttttggatattgtttatttcttccagatttttagtatgatatttggtaaatatttattgaccataatgcatgcaaatatttgaagactccagataattttattttattccagagaggatttatatccattctgactaacattaagaatatttcatatccc

SEQ ID NO: 182876 - DNA, 653 bp, Homo sapiens
caattcccttgacaggagtaaatcctgtcctattctggctagttgcctgccacttgctccatagccccaaggcatctggcagtaccatttccagtcttcttcacagagatccccttgccctttcagttattctcttagacattacaactaagacacacccatactagctcatgtttggcccacatgcagtttatgggaaacaatcatacattcttgcccttgagagattcttgtagkgtagttgttttacaacagtccttggtagtgttaattctctagcacttccaatcctccctgagagtggactgagcatgaaagtttaatgaagtcagaatacataggcacttgaggaagctgtctgtgtgcatagggcctatgtgcaacagggagaagtgaactcagataagctgaggacatacaggacatagaatcaacaggttcttctctacgtcccagaacttccccaaaaacctggttaattttcatcttctttgtgcccattctcagtaaatggaaaaagaactaacatccatgcatttgattaagcctcaaatctgggagtcatgtattattcctcgttttccctctaaccctatagggaagcaataaccaagtattaccagttctacctcctaagtattctgaatccacta

SEQ ID NO: 182877 - DNA, 653 bp, Homo sapiens
caattcccttgacaggagtaaatcctgtcctattctggctagttgcctgccacttgctccatagccccaaggcatctggcagtaccatttccagtcttcttcacagagatccccttgccctttcagttattctcttagacattacaactaagacacacccatactagctcatgtttggcccacatgcagtttatgggaaacaatcatacattcttgcccttgagagattcttgtagggtagttgttttacaacagtccttggtagtgttaattctctagcacttccaatcctccctgagagtggactgagcatgaaagtttaatgaagtcagaatacataggcacttgaggaagctgtctgtgtgcatagggcctatgtgcaacagggagaagtgaactcagataagctgaggacatacaggacatagaatcaacaggttcttctctacgtcccagaacttccccaaaaacctggttaattttcatcttctttgtgcccattctcagtaaatggaaaaagaactaacatccatgcatttgattaagcctcaaatctgggagtcatgtattattcctcgttttccctctaaccctatagggaagcaataaccaagtattaccagttytacctcctaagtattctgaatccacta

SEQ ID NO: 182878 - DNA, 639 bp, Homo sapiens
atcacctgaacgtgggaggcagatgttgcagtgagctgaggccacaccactgcacatcagcctgggtgacagagcaagactctgtttccaaaaaaaaaaagtatatatgtatgtgtacatatatatatacatatatatatatatatatatataacaaaagtatatatatagtatgtatttatatacacacatacatgtatatacatacacacaaaagtatatatgtgtacatatatacacacacatatatatgtgtgtgtatgtgtgtgtgtgtatatatrtgtgtgtgtgtatatatatatatatatatagcaattaggcagataaagaaaaataaatgagaaacactaaaagcaaaccagaacaaaagaggtaaaaagcaagcttgaaagttagggcatgggaaatttctaaagcagaaacttagatgtttttatgtgcaggaggagataagagatactcgagtccatgaactgtctcacagaactgtgacttaaaatatagaattatagtgtcataggtacatgttgttttccctcctgtactgaggtacttgagaacaggaaccttatcatagttcttctgcatgtaccctggactgagttctgtgcttggcaaatggtaagtcctcagtttaat

SEQ ID NO: 182879 - DNA, 448 bp, Homo sapiens
ttacatactctcttctcaggggagagggaggagcaatgcaggttgttttgggaaaagtaaataattttggagaaagatgaatgggtctttaaaagaataggtaatagcctatgacaaattctgtctgggtgtgatgtcagcagtcttctctcctgcaataaaagtttattcttctytggttgatgagattcccaaggagggacttcattccatttatgggcttttttggggactccatatttgggtagataagggaagttcagagaaagattttccctgcgttaacggttcccaaagtgccctcaatttgaggcagtcagcataccaaggtagcatattacaggataacattccctgacctccttcaatgtattgtgtaaatgtattctaggtacatgaccatgaagtgagttgagatttgcagtgactagaggaaacagaaagatgc

SEQ ID NO: 182880 - DNA, 402 bp, Homo sapiens
gcagatggtcaccttcttgttgtatccccatgtgatggagagtagagagcaagatcaaacccttgcatctcttcttataagggcactaatcccgttcatgaaggctccatgctcatgacctgattactccccaaagtaaagtgcattcacattcagggttaggatttcaacctacgaatattggtgggacacattcagggyattgtgctccccattggccaaaccctcaaaaaagccagagtgcaaggaggtccatgcaggacagcctcccacggcccagtctagagtggagaggggtccggagaggatccagagaagcaaaaagaaaagattcatccaccaagcatttgaggatttctcaacagtttcccctgacaacgtgggcaggtccatgtcaccctg

SEQ ID NO: 182881 - DNA, 402 bp, Homo sapiens
gcagatggtcaccttcttgttgtatccccatgtgatggagagtagagagcaagatcaaacccttgcatctcttcttataagggcactaatcccgttcatgaaggctccatgctcatgacctgattactccccaaagtaaagtgcattcacattcagggttaggatttcaacctacgaatattggtgggacacattcagggtaytgtgctccccattggccaaaccctcaaaaaagccagagtgcaaggaggtccatgcaggacagcctcccacggcccagtctagagtggagaggggtccggagaggatccagagaagcaaaaagaaaagattcatccaccaagcatttgaggatttctcaacagtttcccctgacaacgtgggcaggtccatgtcaccctg

SEQ ID NO: 182882 - DNA, 499 bp, Homo sapiens
caaaacttaaagttcaggtgtgtattatctagaactccattgtatatatcccccttttatttcaccagtggaaagaaaaggcaattagttttgaactaccagaggaaaggataaaacctgttctcaggtaatttataatgttgcatagcctttccagatattgagctctakgtagcctcctgaaggacgactggggtcttggttttttcacctgttccatggtcattgtgataagcccgccagggttgttgtgaatggccaaggaaacgttttggaaatcccgaagcgctgtacacaatgagaattgcttgttctcgtgtgttgaactctaagggccacggcactttgtgctctaagtttgtaacgatgccatttgacacagagacagataaatcagtctgctgaatctacagccccaaagatattttactcgggcaaaaggacactggctgactatccaggaaggagtaaactgtttaaattaaacgcctggtttatt

SEQ ID NO: 182883 - DNA, 379 bp, Homo sapiens
cttaaccaagtgttagcgtacagtgaccgtgcaacacgttgtaattatacttaggattactcaccaaggtgtcacagctagtggggggcagagccagggtgttttgagcacacgcatcgggcacccaatgccatgtgcttctcagtactgcagagaccagccttcctcattcctctgtccccacatttacctgataaatattttttgggcacctacttcatgctcatccccagtgcacctcattrtttgcaaagtcctctcaagttagccatctcctttgcttctcaatcttgtatggtaagcagagtagaattgctctctgcactttacaaatgaggaaactgaggctccagaaagttctgggaggtgctcagaattc

SEQ ID NO: 182884 - DNA, 567 bp, Homo sapiens
ctttcaccttccttctccattgtccaaaggctcataacggaagaagagatcgcaagctacaggtaggctttacacaygagaggaaggcaggaaggaaggggtgctctcggcaatccagatgcagacccaggactgcatttagggcagatggaagagttcacacagtgctagctacagagcttattagaaaagactatggatacataacttccaacatattagaggtcagattaggtcctcttcaaatgcaggccaaaatatctccacacagtcttccgtgccatctttgaagctctacttactgtcatcttcattcagatccctgtccatgttccagacgtcctgccaaagagatgtctgcccttcgagtgtgcttggaccgatgtgctctgatggaccaccctcaggcccctcccagaacagcaggcccattgttacccagttggaatacaacaaagggaaacatctatatcgttcatcatagcagctgctctgcacccaatccaccgggttctgggagctcctcttccacaagagccttctactgaccaagctcttatggatgct

SEQ ID NO: 182885 - DNA, 567 bp, Homo sapiens
ctttcaccttccttctccattgtccaaaggctcataacggaagaagagatcgcaagctacaggtaggctttacacatgagaggaaggmaggaaggaaggggtgctctcggcaatccagatgcagacccaggactgcatttagggcagatggaagagttcacacagtgctagctacagagcttattagaaaagactatggatacataacttccaacatattagaggtcagattaggtcctcttcaaatgcaggccaaaatatctccacacagtcttccgtgccatctttgaagctctacttactgtcatcttcattcagatccctgtccatgttccagacgtcctgccaaagagatgtctgcccttcgagtgtgcttggaccgatgtgctctgatggaccaccctcaggcccctcccagaacagcaggcccattgttacccagttggaatacaacaaagggaaacatctatatcgttcatcatagcagctgctctgcacccaatccaccgggttctgggagctcctcttccacaagagccttctactgaccaagctcttatggatgct

SEQ ID NO: 182886 - DNA, 567 bp, Homo sapiens
ctttcaccttccttctccattgtccaaaggctcataacggaagaagagatcgcaagctacaggtaggctttacacatgagaggaaggcaggaaggaaggggtgctctcggcaatccagatgcagacccaggactgcatttagggcagatggaagagttcacacagtgctagctacagagcttattagaaaagactatggatacataacttccaacatattagaggtcagattaggtcctcttcaaatgcaggcyaaaatatctccacacagtcttccgtgccatctttgaagctctacttactgtcatcttcattcagatccctgtccatgttccagacgtcctgccaaagagatgtctgcccttcgagtgtgcttggaccgatgtgctctgatggaccaccctcaggcccctcccagaacagcaggcccattgttacccagttggaatacaacaaagggaaacatctatatcgttcatcatagcagctgctctgcacccaatccaccgggttctgggagctcctcttccacaagagccttctactgaccaagctcttatggatgct

SEQ ID NO: 182887 - DNA, 487 bp, Homo sapiens
aacgtttgagctgggttggtgttgatcttaatgacctrtttaggttgtcttctgtatgccttaatttgcttttttgttaagtgggagcaaggattgtgattcctttccatagatgagagatattgtgagggccaagggcccgttggaaggcagcatggtgaggatgtcaaagcaccgagctgggagccggatctgggccttagacccagctctgctgtcctccaggtttgtaatcttcactgtgtacatagcttctgaagatcttttcctcatccatgaaatgagatggtcgagtttctcaaaatggggtgcattttcttggttcaaagctgttttgtgcccccctacacttttggatacatgctttttaaaggcataaatgtggtaaaaaaaaattgctcagaaattttgttgaaagagcagatggataaatgaatgctccaaattggggcctccaagcatgactgtgtgggctgtggggctgtgc

SEQ ID NO: 182888 - DNA, 455 bp, Homo sapiens
aaaaaaaaaaaagaaatacagggaaaatmccaggacagttgaggcaagtcggcattagttactgtcagtaatacagcctagaaacagtatgtccaggggagcctgtcatggcctggtgttttgcctatgggtaagttggggtgcaagtaatcccctttctgcaaataaggaaaccgtggctcagaaagcccaaggtcacaaggtggctggcggaacaggataggggttactgcatttcatagatgataaaatgtgttgtaggaattttatacatgaggaaacaggtctggagggaaatgtgactttctcaagaccatgcaggtaagaggagcagggctggggctggatcccagtcaccctggttcctgctcctgagatctttctactttactcctcgttaggagcagtggtagaaccagtgaaacaagtagcacttattaatcatgttgttgtcc

SEQ ID NO: 182889 - DNA, 455 bp, Homo sapiens
aaaaaaaaaaaagaaatacagggaaaataccagsacagttgaggcaagtcggcattagttactgtcagtaatacagcctagaaacagtatgtccaggggagcctgtcatggcctggtgttttgcctatgggtaagttggggtgcaagtaatcccctttctgcaaataaggaaaccgtggctcagaaagcccaaggtcacaaggtggctggcggaacaggataggggttactgcatttcatagatgataaaatgtgttgtaggaattttatacatgaggaaacaggtctggagggaaatgtgactttctcaagaccatgcaggtaagaggagcagggctggggctggatcccagtcaccctggttcctgctcctgagatctttctactttactcctcgttaggagcagtggtagaaccagtgaaacaagtagcacttattaatcatgttgttgtcc

SEQ ID NO: 182890 - DNA, 503 bp, Homo sapiens
aaaaaaaaaaaagaaatacagggaaaataccaggacagttgwggcaagtcggcattagttactgtcagtaatacagcctagaaacagtatgtccaggggagcctgtcatggcctggtgttttgcctatgggtaagttggggtgcaagtaatcccctttctgcaaataaggaaaccgtggctcagaaagcccaaggtcacaaggtggctggcggaacaggataggggttactgcatttcatagatgataaaatgtgttgtaggaattttatacatgaggaaacaggtctggagggaaatgtgactttctcaagaccatgcaggtaagaggagcagggctggggctggatcccagtcaccctggttcctgctcctgagatctttctactttactcctcgttaggagcagtggtagaaccagtgaaacaagtagcacttattaatcatgttgttgtccatatttttgttgtttttcttctcatttttggatcaaagttcacagaat

SEQ ID NO: 182891 - DNA, 585 bp, Homo sapiens
agaaaggagccgcggacccgcgacttacccgcatccatggatgcgcatggggtccgatgggagcgaggtctatacccgcgtcggcagtgagccgagtctggtctcgcggattcttactgcttcctggccctccaccctggcaagtgggagtgggtccaagggttgtcctcccttwaggtcagcgaggtatgaatatgggattggtagttatgatctacgatatgtttatggagaaggaattggacaaataagcgcatccatttgcccgggaactgttccaacaaagtatctgagcttatgaagtgactacaaatggaaacggcttagagaatgtgttcttttgtaatatatttaaaagcattttcagcttttcagtttacaagcatgcatttggggttttgtgtttcctttgcgaagggattgaggatggggaacgaaactacgggtgctgctctcagaatttctcgcattcgctcgaggctcccagaggccatggaagaccaggagctttcccggcaaggcatgggtgggggtgtcgagctgtggcaaggaagaaggtgcgcgtaaatctaaacggaggaagct

SEQ ID NO: 182892 - DNA, 585 bp, Homo sapiens
agaaaggagccgcggacccgcgacttacccgcatccatggatgcgcatggggtccgatgggagcgaggtctatacccgcgtcggcagtgagccgagtctggtctcgcggattcttactgcttcctggccctccaccctggcaagtgggagtgggtccaagggttgtcctcccttaaggtcagcgaggtatgaatatgggattggtagttatgatctacgatatgtttatggagaaggaattggacaaataagcgcatccatttgcccgggaactgttccaacaaagtatctgagcttatgaartgactacaaatggaaacggcttagagaatgtgttcttttgtaatatatttaaaagcattttcagcttttcagtttacaagcatgcatttggggttttgtgtttcctttgcgaagggattgaggatggggaacgaaactacgggtgctgctctcagaatttctcgcattcgctcgaggctcccagaggccatggaagaccaggagctttcccggcaaggcatgggtgggggtgtcgagctgtggcaaggaagaaggtgcgcgtaaatctaaacggaggaagct

SEQ ID NO: 182893 - DNA, 585 bp, Homo sapiens
agaaaggagccgcggacccgcgacttacccgcatccatggatgcgcatggggtccgatgggagcgaggtctatacccgcgtcggcagtgagccgagtctggtctcgcggattcttactgcttcctggccctccaccctggcaagtgggagtgggtccaagggttgtcctcccttaaggtcagcgaggtatgaatatgggattggtagttatgatctacgatatgtttatggagaaggaattggacaaataagcgcatccatttgcccgggaactgttccaacaaagtatctgagcttatgaagtgactacaaatggaaacggcttagagaatgtgttcttttgtaatatatttaaaagcrttttcagcttttcagtttacaagcatgcatttggggttttgtgtttcctttgcgaagggattgaggatggggaacgaaactacgggtgctgctctcagaatttctcgcattcgctcgaggctcccagaggccatggaagaccaggagctttcccggcaaggcatgggtgggggtgtcgagctgtggcaaggaagaaggtgcgcgtaaatctaaacggaggaagct

SEQ ID NO: 182894 - DNA, 585 bp, Homo sapiens
agaaaggagccgcggacccgcgacttacccgcatccatggatgcgcatggggtccgatgggagcgaggtctatacccgcgtcggcagtgagccgagtctggtctcgcggattcttactgcttcctggccctccaccctggcaagtgggagtgggtccaagggttgtcctcccttaaggtcagcgaggtatgaatatgggattggtagttatgatctacgatatgtttatggagaaggaattggacaaataagcgcatccatttgcccgggaactgttccaacaaagtatctgagcttatgaagtgactacaaatggaaacggcttagagaatgtgttcttttgtaatatatttaaaagcattttcagcttttcagtttacaagcatrcatttggggttttgtgtttcctttgcgaagggattgaggatggggaacgaaactacgggtgctgctctcagaatttctcgcattcgctcgaggctcccagaggccatggaagaccaggagctttcccggcaaggcatgggtgggggtgtcgagctgtggcaaggaagaaggtgcgcgtaaatctaaacggaggaagct

SEQ ID NO: 182895 - DNA, 603 bp, Homo sapiens
atgtaaaagtggcaaagagatggagtgatgaggtctaccacagggaggtaagggtaaggtctggataggcatracagagaaggtgatgcttaaattgagtatgcaaagagtagatcttcagcatcaggaccaagaaggccactgcagagaaagggagcattaaaagcaaagacgatggcacaaaaccccatggtccatttgatgaactgcaaataactcagttggttgcgacacagaagagtacaaggggagcacaggctatggcgagaaaaggccttggataaataagcagggggcagatgttgaactgtgcagactcagtgctggagccaacagtagccagtgaaagttcttacatacagattttaagaaagatcactctattggaaataaggagggctggaaagaccgaagacagaggaactagtttaaggactattataatcatgtagttaaagggcgattttggcttagataaatggttcttcgttctggctacatagtgaaacatcttggggatctttttaaacttacagattcctgggctccactctggatgaattaaatcagaatctggaggtctagaacctggcattggtattt

SEQ ID NO: 182896 - DNA, 581 bp, Homo sapiens
acaaagttctcgtgtcatggttttcagctccatcaggtcatttaaggtcttctctacactgtttattctcgttagccattcatctaatcttttctcaaggtttttagcttccttgcaatgggttcaaacatcctcctttagctcrgagaagtttgttattatcaaccttctgaagcctacttctgtcaacttttcaaagtcattctccatacagctttgttccattgctggcgaggagctgtgatcctttggaggagaagaggtgctctgatttttagaattttcagattttctgctctggttcctccccatctttttggttttatctacctttggtctttgatgttggtgacctacagatggggttttggtgtagacaacctttttgtttatgttgattctattcctttctgtttgttagttttccttctgataatcaggtccctcagctgcaggtctgttggagtttgctggaggtccactccagaccctgtttgcctgggtatcaccagcagaggctgcagaacagcacatattgcagaacagcaaatattgctgcctgatccttcctctggaagctt

SEQ ID NO: 182897 - DNA, 625 bp, Homo sapiens
ttcatctaatcttttctcaaggtttttagcttccttgcaatgggttcaaacatcctcctttagctcggagaagtttgttattatcaaccttctgaagmctacttctgtcaacttttcaaagtcattctccatacagctttgttccattgctggcgaggagctgtgatcctttggaggagaagaggtgctctgatttttagaattttcagattttctgctctggttcctccccatctttttggttttatctacctttggtctttgatgttggtgacctacagatggggttttggtgtagacaacctttttgtttatgttgattctattcctttctgtttgttagttttccttctgataatcaggtccctcagctgcaggtctgttggagtttgctggaggtccactccagaccctgtttgcctgggtatcaccagcagaggctgcagaacagcacatattgcagaacagcaaatattgctgcctgatccttcctctggaagcttcgtctcagaggggcagccacctatatcaggtttctgtcggcccttactgggagaagtctcccagttaggatacaagagggtcagggacccacttgaggaggcagtctgtccattctcagagc

SEQ ID NO: 182898 - DNA, 625 bp, Homo sapiens
ttcatctaatcttttctcaaggtttttagcttccttgcaatgggttcaaacatcctcctttagctcggagaagtttgttattatcaaccttctgaagcctacttctgtcaacttttcaaagtcattctccatacagctttgttccattgctggygaggagctgtgatcctttggaggagaagaggtgctctgatttttagaattttcagattttctgctctggttcctccccatctttttggttttatctacctttggtctttgatgttggtgacctacagatggggttttggtgtagacaacctttttgtttatgttgattctattcctttctgtttgttagttttccttctgataatcaggtccctcagctgcaggtctgttggagtttgctggaggtccactccagaccctgtttgcctgggtatcaccagcagaggctgcagaacagcacatattgcagaacagcaaatattgctgcctgatccttcctctggaagcttcgtctcagaggggcagccacctatatcaggtttctgtcggcccttactgggagaagtctcccagttaggatacaagagggtcagggacccacttgaggaggcagtctgtccattctcagagc

SEQ ID NO: 182899 - DNA, 581 bp, Homo sapiens
acaaagttctcgtgtcatggttttcagctccatcaggtcatttaaggtcttctctacactgtttattctcgttagccattcatctaatcttttctcaaggtttttagcttccttgcaatgggttcaaacatcctcctttagctcggagaagtttgttattatcaaccttctgaagcctacttctgtcaacttttcaaagtcattctccatacagctttgttccattgctggcgaggagctgtgatcctttggaggagaagaggtgctctgatttttagaattttcagattttctgctctggttcctccccatctttttggttttatctacctttggtctttgatgttggtgacctacagatggggttttggtgtagacaacctttttgtttatgttgattctattcctttctgtttgttagttttccttctrataatcaggtccctcagctgcaggtctgttggagtttgctggaggtccactccagaccctgtttgcctgggtatcaccagcagaggctgcagaacagcacatattgcagaacagcaaatattgctgcctgatccttcctctggaagctt

SEQ ID NO: 182900 - DNA, 554 bp, Homo sapiens
gtaattaattatctagctgagaatagtggctcatgcttttaatcccagcactttgggaggcaggtggatcacttgagcccaagagtttgagcagcctggtcaacatagtgagaccctgtctctatttaaaaataaataaataaaagctgattgactaaggaaaaaatagaaacaatgtattgtgggccttataacatttatagaagtaaaatatatgatatcaacagcacataggaggagaggaaatgaagtatactgtggaaagtacactatatattatatactatactatttgaaagtagattgttataaggtaaaatacctattataaaccataggaaaaccactgttaggaaaaaaacaataagccaatattggagattaaatgaaattwaaaaagaaggcaggaaaaaaatgaacaaagaaaagatggtgaaattagaaaacaactaacaaggtggtatatttaaatccaacttaataatgacttaattaaatgatggaatctgaacaccccaaaaaagacagagattatcagattgaatttaaaaaca

SEQ ID NO: 182901 - DNA, 616 bp, Homo sapiens
gaggtgtaggtcaaaggatacaaaacagcatgtatgtaagatgaataagtttagagatctaatgtaggaggaaagttaataaaaattgtattatattaggcgttttttgttaaataagtagatcatagctgctcttgtcacaaaaaggtaactaagtaagagggtagatctattaatctgctttactagagtaaccattttactatctacttttctagatctttttaaagaattctaattccatattgtctatctggccattttgcaagcacaagaacatactgatatgattagacatcatgattttcaattgctgccatttttgctttttaactttaaacttcttttagttaagcttattatgattcacctcatttgttgtgggctattgtacaggctattgtgttggtcaaccaggagcttagactaggccagtggcagtagagatggctagactggagrtttattttggacgaggagtatataggatttgcagatagactgaatgtgggctgttgatacagcagaggtattattaatccccgaaaacctgctcctgtatttatactttctgattatcactgaatcatctttccataactatgaaatcttttgc

SEQ ID NO: 182902 - DNA, 499 bp, Homo sapiens
  misc_feature (1)...(499): n = A,T,C or G
nnnnnnnnnnnnnnnnnnnnnnnnnnnnntcctaaactatttcaatgtaagatacagacatcatccctaaatacttcagcacacatctctttaaaataaggacatcctctgacatactcacagtaaccttttttacacttaagaaaattaatgataattacctaatatcccctggttcccaattcccaaatcatataamattttccaaaatgtttcccaatatgtcttctaacagatgtttgtgtgtgtgtgtgttttaaaaaatttcagtagcttttggggtacaaatgtttttggttacgtggatgaaccgcagagtggtgacgtctgacattttcatgcacccatcacccaagtagtgtacattgtacccaatatgtagttttttatcccatacccctctctcatcctccctcttctgattctccaaagtcaatggactttggatgtttttttttcaaacaagatccaatcaaaactcttacattgcatttggttg

SEQ ID NO: 182903 - DNA, 499 bp, Homo sapiens
  misc_feature (1)...(499): n = A,T,C or G
nnnnnnnnnnnnnnnnnnnnnnnnnnnnntcctaaactatttcaatgtaagatacagacatcatccctaaatacttcagcacacatctctttaaaataaggacatcctctgacatactcacagtaaccttttttacacttaagaaaattaatgataattacctaatatcccctggttcccaattcccaaatcatataacattttccaaaatgtttcccaatatgtcttctaacagatgtttgtgtgtgtgtgtgttttaaaaaatttcagtagcttttgrggtacaaatgtttttggttacgtggatgaaccgcagagtggtgacgtctgacattttcatgcacccatcacccaagtagtgtacattgtacccaatatgtagttttttatcccatacccctctctcatcctccctcttctgattctccaaagtcaatggactttggatgtttttttttcaaacaagatccaatcaaaactcttacattgcatttggttg

SEQ ID NO: 182904 - DNA, 598 bp, Homo sapiens
ggtagacaaagccatctttaaggaggtgccttctgcatcaccctccattgtgagattccaggcaggtgccttaaaatagctctgccactagctgatcactcaatcccattyacaagggcaaaccttcttctgtcagggagaaaaggtttaaacatacagagggaggtaactgttgcagtaagtagccttaaagcaagcagaggggcgctaaatcatctctaaacttccaggtctatgattctaagatcttaattatcctaactgggaaggagagaagaaaagaaaaaaaaaataggtggcttagaaagtgagcagagagtgtaaagcttggagatttttctatttgagatttggctgcatttagagccagtttttaagcattgccaggttcacctttgtaaaaggcgtttagaaatctgccactatcagatttaaatcaatctggctaattggtgtgattggaaagttgcagtggggcaagtaatcagattggttccggagcctccaccctttgctgtgcctgggtgctacctcctgcagggtagcatattcccaatttttgtggttttgcagtggcctcctttcctaagcccactaa

SEQ ID NO: 182905 - DNA, 598 bp, Homo sapiens
ggtagacaaagccatctttaaggaggtgccttctgcatcaccctccattgtgagattccaggcaggtgccttaaaatagctctgccactagctgatcactcaatcccatttacaagggcaaaccttcttctgtcagggagaaaaggtttaaacatacagagggaggtaactgttgcagtaagtagccttaaagcaagcagaggggcgctaaatcatctctaaacttccaggtctatgattctaagatcttaattatcctaactgggaaggagagaagaaaagaaaaaaaaaataggtggcttagaaagtgagcagagagtgtaaagcttggagatttttctatttgagatttggctgcatttagagccagttttyaagcattgccaggttcacctttgtaaaaggcgtttagaaatctgccactatcagatttaaatcaatctggctaattggtgtgattggaaagttgcagtggggcaagtaatcagattggttccggagcctccaccctttgctgtgcctgggtgctacctcctgcagggtagcatattcccaatttttgtggttttgcagtggcctcctttcctaagcccactaa

SEQ ID NO: 182906 - DNA, 489 bp, Homo sapiens
tgttttgttttgttttgttttaaactctccaggtataggccgggtgcagtggctcacgcctgtaatcccataactttgggaggccaaggcaggcagaacacctggggtcaggagttcaaaaccagcctgaccagccatggcaaaacccctatctctcctaaaaatacaaaaattagcttggcatggtggtgcatgcaagagaatcgcttgaacctgggaggcagaggtggcagtgagccgagagatcgtgccactgcactctagcctggggacacagcgagactcagtctgaaaaaaaawaaaataaaataaaataaatgacctctccaagtatagccaggattgggaaccacagtgctaaacacataaaaacaaactagtctttatccccagctttttacaaaaatctaacttttaaaaatgaaacacaaaaatctaaatgtgttatttctgttagtaaacctgtctttgaaatccaaggcagcaata

SEQ ID NO: 182907 - DNA, 554 bp, Homo sapiens
gaggctgaggcaggagaatcacttgaacccgggaggtggaggttgcacagagccgagatcgcaccactgcactccagcttggtgacagagtgggacacttctctcaaaaaaaaaaaaaaaaaaaatcaaatatattgggttccctttgttccaaaatcaaggtcaaagtaatgtaattttcaaacacaatgattttcaaagtacaatgcattaytttaaaaaactgtttgtatactctctaataaaaatctaacaaaatgcttttaaagagaatcattcttaaaaacaatttaaaaagataaatacaataaaaaggatgaaaatatcaacccagaatttcactaaaaatagaatatccaagtaaacagccaaccaaattgtaaaactttgatcaaatttgttagaaatcaaaaatgcaagttaaaatgaataaaattcttcacctattaagttgttaaataagaaaaataattataatagcagcattgaccattatgggataagggaacgggccttgcacatctccagtaggaagaagaagttagtgcagtctt

SEQ ID NO: 182908 - DNA, 599 bp, Homo sapiens
caattttcaagtatacaatgtattattaactacagtccccatgatgtacaatagaactctttagtttattcttcctgtatractgaaattttgtgccctttgatcaacatctccccagttccctcagcctctagcaactatcattttactctctatttttatgaatgtaacttttttagattccacatttaagtgacatcaagtgacatttgtcttcctgtgcctggcttatttcacttaaaataatgtcctccaagtttgtccatgttttctcaaatgagaggatttcttttttaagactaaatagtattcatatatatatatatatctcacattttcttcctccatttatccatttatgaacactgaggttgagtccatatcttggctactgttaataatgctgcaacaaacataggaatgcagatatctcttcaacatactgacattccttggatatagatgcctttaagttttaactgttatattatagtccccttatcctagaacttggggctctgtccctacacataggccaaagaacaaagtgacagcatcttctatgctcctgctaaaataagtaataattactggtatgt

SEQ ID NO: 182909 - DNA, 441 bp, Homo sapiens
cactttaagactggttagttatgataaacagctcccttacacacacacacacacacacacacacacacacacacacacacacattaacaaagtaagcctgttctaggtcctctcaaaaaaatatactcttggctttatgaattgggttgatatcagatgactgaaagatattttcagtcagttgctgagtttttgggaaatgcagcaggtagtagaaaattcaagcaatcagggtacaattaatgaacaatrtattatttggttgttgttttaattgtgttaaattttatttttaaaggtattcaaaactattataatttgtagatttatataagaaaatgtttgcgtgcacgtgtacatctactattaaactttcatcgttcctaaaaatcttaaagaatgatgcattaaaaatcaaacaccgaacattgaaccagctca

SEQ ID NO: 182910 - DNA, 596 bp, Homo sapiens
tttcctcctatctatgcttttgtcatagatagatagatagatagatagatagatagatagatagatagatgatagatagataggtagatagatagatagatgatagatagatagatagatagatagatagatagatagatagatatgatttgtcattttctaagttcttgtgtttcctgactttacattttttggttgagtgtcaagatctctagggcagccatcatctctacttgtcttgtattattgctaaagaaaaatcaaatctctgtgtccatggctattgaagagtctacggcataacaaaaattgataaataggaataaactattcatcatctagtcaagccccctcatctatcaaacgaaggaattgaaactcatggaagctaagttacttgttcaaggtcattgtattcactaaatggagtagctggaggttgagtcttagccagtgatcacactttccacgacaccttgctgattctgctgcctcctgccaggttagcaakactcttacggtagggattgtttctgttctaaattgttgtaattaaagaagctgtgccccccattagctcaccttcaatgtgtccc

SEQ ID NO: 182911 - DNA, 612 bp, Homo sapiens
cccatgattcaataaccttccaccagatctctcccacaacacggaattgtgggagctacaattcaagataagatttgggtggggacatggccaaaccatatcaacagttctatggcattaagtacactcacattgttgtgcaagcatcaccaccatccatctctagaatgttttcatattcctcagctgaaactctgtrcccattagttactaacactccatttccctctctccctagcccctggtaaataccattctatgaatttggctattctaggaaactcatataaatagaaccatacaatatttgtccttctgtgactggcttattttacttagcataatgttttcaagggtcatcgacgttgttgcaagtgtcagaatttcatcccttgttaaggctgaacaatatttcattgtatttatgcaccacattgtttatccattcatctgttgagggacatgtgggttgtttccactgtttggctattgtgcaaagttgccatggacatggatatacaaatatctgttcaagtttctgtttgcattttgtttgccaccccttctttaaaaaaattaaacattctttttaaaaaaaactttattgagtta

SEQ ID NO: 182912 - DNA, 612 bp, Homo sapiens
cccatgattcaataaccttccaccagatctctcccacaacacggaattgtgggagctacaattcaagataagatttgggtggggacatggccaaaccatatcaacagttctatggcattaagtacactcacattgttgtgcaagcatcaccaccatccatctctagaatgttttcatattcctcagctgaaactctgtgcccattagttactaacactccatttccctctctccctagcccctggtaaataccattctatgaatttggctattctaggaaactcatataaatagaaccatacaatatttgtccttctgtgactggcttattttacttagcataatgttttcaagggtcatcgacgttgttgcaagtgtcagaatttcatcccttgttaaggctgaacaatatttcattgtatttatgcaccacattgtttatccattcatctgttgagggacatgtgggttgtttccactgtttggstattgtgcaaagttgccatggacatggatatacaaatatctgttcaagtttctgtttgcattttgtttgccaccccttctttaaaaaaattaaacattctttttaaaaaaaactttattgagtta

SEQ ID NO: 182913 - DNA, 602 bp, Homo sapiens
atccaagttgggttcttttacactctttttattgttattattacttcttgagatggagtctcactctgtcacccagattggagtgcagtggcgcaatctcagctcccggcaacctccacctcatgggttcaaccaattatcctgtcrcagtctcccaagtagtggggtctacaagcacctggcaccatgccaagctaatttttgtatttgtagtagagacaaggtttcaccaagttggccaggctggtcttgaattcctgacctaaggtgattcacccgtcttggcctcccaaagtgctgggattacaggcgtgagccaccacgcctggccgggttcttttacactctgagataataaaaagtaggcaatgtttattaagcaatgcccttgggatccactgtggaagcaaaggcaaaaacataagacgagacgggagacattgatttgtgatgtggacatgacatcaatctcgataatcttgacaacgagctcttgaactaaaatggctctaactctctgggctgaactggctaaaatcttttacccatgcttacatccattgctggatgtgggtcaccccagaaagtggaggcagttcctt

SEQ ID NO: 182914 - DNA, 578 bp, Homo sapiens
gaacagttaatgtcactgaatagctattgagtgaggagtggaaagctacttaaattaaaacaaaattctaaatgcttattatttaaatctttatttaaaaaaattttccctgcagaaatatatgaatggtaatgataagaatgagatgatgcaacccaccacatgatatcaaaggactaacccacatacactatggatttaaacatgggcactaccttggcatgaaactcagagtctgattgagacctggattcagacgattaatttcctgagtcattttatgttggctacatgagggagggattgcggagtctggaaggttgattttagtttccagttaatattgtagaattgtctgtttctcatatctattctgtgagtttttgcttcatgtattttgaggctctgttgttaggcacatgtaggtttataattattatgtcttcgggatggattgattcttttattattawaaaatgtcctttatgtctctaataacaattgttgtctcaaaatctattttatctgacattagtgtagccactgcagctctctttcagttactgtttgcaggatgt

SEQ ID NO: 182915 - DNA, 352 bp, Homo sapiens
ctttgtgttacaaacaatccaattatattcttttagttattttaaaactgtacaattagattattattgactatagtcccctgttwtgctatcaaatactaggtcttatttattctttctattttttgtaaccattaaccatccccacctcctttcatccccacactacctttcccagccagcctctgataaccatccttctattctcaatctccatgagttcaattatgttgatgcttagatccgtatagagttgtttcagctccttatatattctagttattaattccttgtcagatgagtagtttgcaaatattttctctcattctgtgggttgtctcttcactttgtg

SEQ ID NO: 182916 - DNA, 352 bp, Homo sapiens
ctttgtgttacaaacaatccaattatattcttttagttattttaaaactgtacaattagattattattgactatagtcccctgttttgctatcaaatactaggtcttatttattctttctattttttgtaaccattaaccatccccacctcctttcatccccacactacctttcccagccagsctctgataaccatccttctattctcaatctccatgagttcaattatgttgatgcttagatccgtatagagttgtttcagctccttatatattctagttattaattccttgtcagatgagtagtttgcaaatattttctctcattctgtgggttgtctcttcactttgtg

SEQ ID NO: 182917 - DNA, 629 bp, Homo sapiens
tcatttgctcattcctccttgagagtaatgaggtttcaggtataaggcaattaatgggggtagcaaaagaatttgatgttctgtttatgaactgctgttttaactatggcacagtaagtggctggcaattgtcttycaaaatgagaacactatttggcagacttgacagctttgtcatttgatttgggacatgccgatggctccacatcaagggcagagaggtcagaaagttgcttgtgcaagctttaaggcattttgttgttcaggatgctgtgcaattgaatgatgagactacagcataacacccagatgtgtcactatccacacatgacacttgtttctttgcctcctgtttggtgatgtggctctcaaggataaaatttttgtctcattcagtgcatagtttgtttgctccaaataatgctactctcacaaatgttgtttggtgaagggcccttgaatttttttcttgttaattgttctagcatttttagtcatcaaactaacgaggaaagacagagttcagttatgattatttctgactgctgatcaatatgacatctatgaaaaggatgaaatttctccttgaattatggcaaggctcctgtttaaactttaccttgttagat

SEQ ID NO: 182918 - DNA, 629 bp, Homo sapiens
tcatttgctcattcctccttgagagtaatgaggtttcaggtataaggcaattaatgggggtagcaaaagaatttgatgttctgtttatgaactgctgttttaactatggcacagtaagtggctggcaattgtctttcaaaatgagaacactatttggcagacttgacagctttgtcatttgatttgggacatgccgatggctccacatcaagggcagagaggtcagaaagttgcttgtgcaagctttaaggcattttgttgttcaggatgctgtgcaattgaatgatgagactacagcmtaacacccagatgtgtcactatccacacatgacacttgtttctttgcctcctgtttggtgatgtggctctcaaggataaaatttttgtctcattcagtgcatagtttgtttgctccaaataatgctactctcacaaatgttgtttggtgaagggcccttgaatttttttcttgttaattgttctagcatttttagtcatcaaactaacgaggaaagacagagttcagttatgattatttctgactgctgatcaatatgacatctatgaaaaggatgaaatttctccttgaattatggcaaggctcctgtttaaactttaccttgttagat

SEQ ID NO: 182919 - DNA, 529 bp, Homo sapiens
ttaggtgtcataggaccagaggtcaaggagataggcatgttagatatcagcttttttctacttttattcacttagagccccagaggcagaagggaaactacgagaagtttcattcatgatttttatttattgaaaagtaaagcttatgcttttatgtctgatcccacacaaattgcctcctacatatcatttctaatcatctaaaaccaaggaagatcatggatcaaccactttggttttacaggtgaggaaactgagacaggggcttccttctagttgtgacttactgatcgaggtgrgattggtacctaaatcctgaacctaaagttgacccacaacccctctgatttcctttcacctccagccaggatttctttctggcccattgtattcatctcacatcccacagacccatctggcctatcgataaaaggaaagctagaattcaacagaagacccctctccccatttgaggtccaatggaccattccagtgcgccatgaatttttaacttctgcccagattttca

SEQ ID NO: 182920 - DNA, 562 bp, Homo sapiens
cacaataacggaagttttgttgttttttactctttgtattatcttcatatcccagtaaaaaataaactctttaataaataaatatatataataaatattttcaaattgaaagtgtataaataggtccattcttttaaaaagtgttctgtcttggtgtggcatgtttcatagttcatgtttcacccaggtgttgtttagtttttttttttcttaaaacwtataatgccataacctgtgaattctacaaggtcctcagaatttatgtagcaatgctcttggctaagtcaatccatttcttcaacatgaagtctctatttttaacataaattttaaagtaaacataatccagagaggtgaggcaccagcagcaaccatgtgagggttcccattatccacagtttaacagatttttggcttcagtctactggtaaggactaatccaatgtatctaagggaacttaatccacatataaagagtgatcatgatctatttctagtcaaaattttttttggttttttttctcaatattctttccaaatccagtctctcagtagaaaatag

SEQ ID NO: 182921 - DNA, 591 bp, Homo sapiens
ccaacccaattataattaagaatttagtacaatctccaacattttttaaggccaaaaaaaagaattcagcagtaaacaacaaaaaagaatatattcaatatagttttggggcaattgaataatcgaaaataagaaatgtaaatcctttctccccacacctttaaaataaattttagacaaatacaatattttaatttagaaattaaaatatttttatataaacttcaagtaaaaatgattttaaagcaggataccawaagtagaaataataaaggaaacgataagtggaagtagatttaaaattcaatgtataccttatcagacatctattaaacatctactgtgtatcaggcattgtataagaccctggcctcaccacgtttgtactctagtatacttactctggtagactatatttttggctgctttatatctggatatagccatgtgactgagtttgggcaataaaatatggaaggaagagatgcaagctacttccaggactggctccacttaaaaacaacaacaacacaaacttcctctctcttccctgtttgcggtaaccttggtggccacatactggtggtggta

SEQ ID NO: 182922 - DNA, 591 bp, Homo sapiens
ccaacccaattataattaagaatttagtacaatctccaacattttttaaggccaaaaaaaagaattcagcagtaaacaacaaaaaagaatatattcaatatagttttggggcaattgaataatcgaaaataagaaatgtaaatcctttctccccacacctttaaaataaattttagacaaatacaatattttaatttagaaattaaaatatttttatataaacttcaagtaaaaatgattttaaagcaggataccaaaagtagaaataataaaggaaacgataagtggaagtagatttaaaattcaatgtataccttatcagacatctattaaacatctactgtgtatcaggcattgtataagaccctggcctcaccacgtttgtactctagtatacttactctggtagactatatttttggctgctttatatctggatakagccatgtgactgagtttgggcaataaaatatggaaggaagagatgcaagctacttccaggactggctccacttaaaaacaacaacaacacaaacttcctctctcttccctgtttgcggtaaccttggtggccacatactggtggtggta

SEQ ID NO: 182923 - DNA, 466 bp, Homo sapiens
gtggcaattccttaaaaaatttttaaaaattgatacatgataattgagcatatttatcagtacatgtgatattttgatacatgcatataatatgtaatgatcaaatcagggcatttaggatatccatcattttgaaaagttaccatttctctgtgttgggagcattttaagtcttctcttctagttgtgaaatatgaaatatgttgttgttaacatgtaatgtaaccatagttacattattgtgctatcaaacactggaacttattccttctctcaaactgtttgtttgtacccattaaccaayctctcttcaccccctccccatacttcccagactctagtaactatcattctactctctacctccatgagataaatatttttagctctcacatatgagtcagaacatgtaatatttgtcattctgtgcctggcttgtttcatctaacataatgaattcaagttc

SEQ ID NO: 182924 - DNA, 495 bp, Homo sapiens
tttatctctctcatttttttttcaaaggtggggtcttgctatgttgcccaggctggacacaaactcctgggctccagtgatcctttcatcttagactcctgtatagctgtgactacaggcacatggctctatayattttaggtaggcaacttaatttaatcaatttaaactcaaggttattattaataggcaacaacttattttcgtcattttaaaatttgttaaaaaataatagaaattgtttctggttgttttgtatagtatcctttgttcctttctctcttactgcttatcattaccagtttggttgttttctgtagtggtaacatttgagtactttctttttctcatttgtgtgtttgctctaccagtgagttttatacttttgtgtgttttcatgatgatatctaccatcctttcacttccagatgtaggaatcccataaggacttcttgtagggctggtctagtgatgataaatttcctcagtttttgc

SEQ ID NO: 182925 - DNA, 555 bp, Homo sapiens
tgtgctatcagtaaacttcatcaggagcttggagccaagggttttattcaggcaagaaataattaaatttgtttcttcaggttcaatttcagagtaagtctttccagtttgagagctaatctagttgttctttctgcttctcaggtgtatgtggatcaagttgatgaagacatagtggcagtaacaagacactcacctagcatccatcagtctgttgtggctgtatctagaactgctttcaggaatcccaagacttcattttacagcaaggaagtgcctcaaatgtgcatccctggtaatgcaatctaaaaattgttactgtatttgtattatattattatattaaattatactgtaatgttatggttatatatcatgtatatatcatatatattataacacagtgctactgtggacgtacttgagaaaaagaatttaaactttttggtaacttggccaggtatgatggctcacaccagtaatcccaacacctcaggaggctgaggcaggmagatcacttgagctcaggagttcaagaccagtctcagcattatg

SEQ ID NO: 182926 - DNA, 406 bp, Homo sapiens
actctgccttctaggcctggtggtgttggggtgagggggtcatccccctaaggctgtacatggtggtcttggccccacagctctgcagagaggtcctggctcccaagctttggtcagaggccacctggccttttaaaactgaatggtgaccgtgataatctctgaattgccttcagggcaatttttctctgtctttgaacagtgcacgtttatacccagatagctctatcgtcttgtctttcaaaatcyaagaagtcaaatatcctttcttcattttgtccaacctccatccctcagttcaagctgacagtgcttctgctcctataatatcataaactctttattgagtgaaagtccagccacacccttggtgttcctttcagaatatgtttttgcattttttgca

SEQ ID NO: 182927 - DNA, 601 bp, Homo sapiens
gaattccttgtatttttgtttcggaccagccttaaaagggaaacacattaaagtcagtaaatgtaaataaccacacggtggcagtagatgccaagaaattttaagtgttacgtgtaactgagggcatggaagagcaagtttatctccctatatggccacccacgttttcctttctgtctgactgctggaaggaaagggggaggtaactagaatctttccacacactcatccctgaagcactacccataaagtattaccactgaagagtgaggacatagacagttcactgtattcctcccccaattcctagaagagtagtaagggtcttaaggcgggagaatgagacctcctgaaatrcttatgaagccttcccttatcaagtactcacagccaaatatttcagagtggcgttaattaaaacaatgtcatacttggtctgctgtgaagcctgcctagttcagagttgataccactggggaaatcccaggggaaaataagtgtcaaataaaagaaggaatattatttccacaaatgagagacattaaggataaaggcttaacaccatataggcatgcctcacatatatatacagtgcatatat

SEQ ID NO: 182928 - DNA, 602 bp, Homo sapiens
agaattccttgtatttttgtttcggaccagccttaaaagggaaacacattaaagtcagtaaatgtaaataaccacacggtggcagtagatgccaagaaattttaagtgttacgtgtaactgagggcatggaagagcaagtttatctccctatatggccacccacgttttcctttctgtctgactgctggaaggaaagggggaggtaactagaatctttccacacactcatccctgaagcactacccataaagtattaccactgaagagtgaggacatagacagttcactgtattcctcccccaattcctagaagagtagtaagggtcttaaggcgggagaatgagacctcctgaaatacttatgaagccttcccttatcaagtactcacagccaaatatttcagagtggcgttaattaaaacaatgtcatacttggtctgctgtgaagyctgcctagttcagagttgataccactggggaaatcccaggggaaaataagtgtcaaataaaagaaggaatattatttccacaaatgagagacattaaggataaaggcttaacaccatataggcatgcctcacatatatatacagtgcatatat

SEQ ID NO: 182929 - DNA, 611 bp, Homo sapiens
gcacgacctttgtcaaaacgctagaaagaagagagactggctcttagaccaaggggatttgggattcaaaaggacttccaattccagttctatagatttccttcccattagcctcttcatgtgcatcaaatgtaaatggcaggctaaacatacaggatgaagagagttgaaagactgctgcctaaaaatacccttttccaaatctgtgggtgcagaagcacattgaaaagcagctacccaacctggtggtgtggcacatgtctgcagtctcacatacttaagaggctaaggtgggaggactacttgagcccaggagtttgaggcttcagtgaattatgatggtgccacaacactccagcctgggaaacagagctggaccccatttccaaaaaaaaaaaaaaaaaagtagttacccaggtaaggtggatgatcaagtacacccagtgagaagcacacaaaccttaccctttacccaaactctctcccttacctggcccatttcyggtttctggaggaggatcagttagggggtgtgacccaagttacccagataattaactgtggaagcacgagtttttttttcactcctttgacttctacatatgagagat

SEQ ID NO: 182930 - DNA, 611 bp, Homo sapiens
gcacgacctttgtcaaaacgctagaaagaagagagactggctcttagaccaaggggatttgggattcaaaaggacttccaattccagttctatagatttccttcccattagcctcttcatgtgcatcaaatgtaaatggcaggctaaacatacaggatgaagagagttgaaagactgctgcctaaaaatacccttttccaaatctgtgggtgcagaagcacattgaaaagcagctacccaacctggtggtgtggcacatgtctgcagtctcacatacttaagaggctaaggtgggaggactacttgagcccaggagtttgaggcttcagtgaattatgatggtgccacaacactccagcctgggaaacagagctggaccccatttccaaaaaaaaaaaaaaaaaagtagttacccaggtaaggtggatgatcaagtacacccagtgagaagcacacaaaccttaccctttacccaaactctctcccttacctggcccatttctggtttctrgaggaggatcagttagggggtgtgacccaagttacccagataattaactgtggaagcacgagtttttttttcactcctttgacttctacatatgagagat

SEQ ID NO: 182931 - DNA, 611 bp, Homo sapiens
gcacgacctttgtcaaaacgctagaaagaagagagactggctcttagaccaaggggatttgggattcaaaaggacttccaattccagttctatagatttccttcccattagcctcttcatgtgcatcaaatgtaaatggcaggctaaacatacaggatgaagagagttgaaagactgctgcctaaaaatacccttttccaaatctgtgggtgcagaagcacattgaaaagcagctacccaacctggtggtgtggcacatgtctgcagtctcacatacttaagaggctaaggtgggaggactacttgagcccaggagtttgaggcttcagtgaattatgatggtgccacaacactccagcctgggaaacagagctggaccccatttccaaaaaaaaaaaaaaaaaagtagttacccaggtaaggtggatgatcaagtacacccagtgagaagcacacaaaccttaccctttacccaaactctctcccttacctggcccatttctggtttctggaggaggatcagttagggggtgtgacccaagttacccagataattaactgtggaagcacgagtttttttttcactcctttgrcttctacatatgagagat

SEQ ID NO: 182932 - DNA, 585 bp, Homo sapiens
gaggaggaacggcttggagtcatgtttacatctagttctactgatccgttcacatctggagagattatttataactccctctataactctctgtttggaggcactggtggctctamtgacagactgatgtctaggaaatattgctctatgtctaatggtacctaaatgtgctgtggttgtatttacagatttacgtttgcgggaaatataattatttccattgtatttgtgcatatacagtagttataggagcagatttatatatgggaaaatatgcgactcccttacagccatccggctttatgtacatttgatatcctgacagatttatatctctgaacagctatatagataaaaacgtatattgttagaattatgtatcaggagatatatacttattgattgcgaaatagagtagttagagcattcacttagagccatatatggctatggagatatttctatattattatcactatatataggcatatctatttataactgcatagttataaaaatagacataagtaattatagtcctataggtgcatgctgcaatctctctctagagttatagacactttc

SEQ ID NO: 182933 - DNA, 206 bp, Homo sapiens
ggttttatttaatacataaccaataaagctaagaaacccttaaaaatcaagatgtactccttaaataaaatattgagtgagtacttataaggcaataagttttgtaaaatatgctaaaaatttttaaaaattctctacatattcgagacatrcttgaagatactgtgggttttgttccagaccatcacaataaagcaaaaatcaca

SEQ ID NO: 182934 - DNA, 597 bp, Homo sapiens
tttcaaatggtaaataagcattggcttcaactgaaagtcactagctgcactaacccctaacaagagtgtcagtctgtcatttgaagctttgaagccagrcattgacttctcccctctagctatgaaaggcttagatgaaatcttctttcaatataaaactgttctgtctacattgaaaatctgttgtttagggtagtcacattcatcaattattttagctaaattttctgaataatttgctgaagctttttcatcagcagttactgtttcactttccacttttatgttgttaagatggctcctttccttctaccttaagaaccaacctttgtcagcttccaacttttcttctgcagttttctcttacctctctcagccttcatagaattgaagagcattagagctttggtctagattgcgtcttcgctgaagataatgttgtggctgatttgactttctggccaaaccactaaaacattccaagtctcagcaataaggctgtttctctttcttattgttcctgtgttcactgtagtcgcagttttgatttccttcaagaatttttctttgcattcacaacttggctaactgttaaaa

SEQ ID NO: 182935 - DNA, 590 bp, Homo sapiens
agatttggcataattcttattagccttaggattttcaaatggtaaataagcattggcttcaactgaaagtcactagctgcactaacccctaacaagagtgtcagtctgtcatttgaagctttgaagccaggcattgacttctcccctctagctatgaaaggcttagatgaaatcttctttcaatataaaactgttctgtctacattgaaaatctgttgtttagggtagtcacattcatcaattattttagctaaattttctgaataatttgctgaagctttttcatcagcagttactgtttcactttccacttttatgttgttaagatggctcctttccttcyaccttaagaaccaacctttgtcagcttccaacttttcttctgcagttttctcttacctctctcagccttcatagaattgaagagcattagagctttggtctagattgcgtcttcgctgaagataatgttgtggctgatttgactttctggccaaaccactaaaacattccaagtctcagcaataaggctgtttctctttcttattgttcctgtgttcactgtagtcgcagttttgatttccttcaag

SEQ ID NO: 182936 - DNA, 590 bp, Homo sapiens
agatttggcataattcttattagccttaggattttcaaatggtaaataagcattggcttcaactgaaagtcactagctgcactaacccctaacaagagtgtcagtctgtcatttgaagctttgaagccaggcattgacttctcccctctagctatgaaaggcttagatgaaatcttctttcaatataaaactgttctgtctacattgaaaatctgttgtttagggtagtcacattcatcaattattttagctaaattttctgaataatttgctgaagctttttcatcagcagttactgtttcactttccacttttatgttgttaagatggctcctttccttctaccttaagaaccaacctttgtcagcttccaacttttcttctgcagttttctcttacctctctcagccttcatagaattgaagagcattagagctttggtctagattgcgtcttsgctgaagataatgttgtggctgatttgactttctggccaaaccactaaaacattccaagtctcagcaataaggctgtttctctttcttattgttcctgtgttcactgtagtcgcagttttgatttccttcaag

SEQ ID NO: 182937 - DNA, 555 bp, Homo sapiens
tttgtttgttttctctgcttctaatgacacctacatcagaggtcatatttctccctggtcccatttctcaccagcagtaattctactgtgaaatggctcattactggatctctggaactttagtttctcccattgaccttactatcatgaggaaaggattagttctctgctagtgctaatactttcatcactagtccttgctttgtttcttagttattttcaccctgatgttacctgctccacataataaaatcagattgtttgtaagtcctagactagtttctgccttgctggctatatcctcaatgaagagcaaatatttacctcatgggagaaatagacctaatggatttaggagtttagcagtttacagggcacaaattaaatctcaataaatatttactctgagtaaaaaagtacaaaatagaagtacaattcttttttattgtcrttgatttcagagcaaaatgaatcaacagttgacaaattaaggattaacttatgcaagattattcaacaaatatttattattcatttgctctatgccagaaatgt

SEQ ID NO: 182938 - DNA, 628 bp, Homo sapiens
ctttcacatcttaaccttatcatagtatcacaatgctggaatgtttttactrggaaataagtaagctaattcaattataaattgcagtagaggaaaggatgaaggttaaaaaacactatctattcaaatccttagtcatgaggttgaattcattgaatcagaatgtgaatatatatctatatttgagacagaatgtgtatgtatgtgtgtgagtgtgagtgtgtgtgtacagtcattaaacatttgcctcatggacagtggaggaaaacatttgctgagctgctttcctaccttaaagatttacaactgcactgttttcaagatatactttttatatctcaaataatttaatatattatgtttagttgttgatataacaagatatctgaataccccataattgaaattatacctggaaataaatacttgaaatacttgcttcagtgacatttgtggaagtatacttatttaagttcaaattataggtatattgaacaaaatgatattggattcttcactggctgcatacttctgaaacttgtaaataatttgaaattagtttccaagaacagaaagacaaatattagataggaaataccaaattcttaagattcatacatataaaagt

SEQ ID NO: 182939 - DNA, 628 bp, Homo sapiens
ctttcacatcttaaccttatcatagtatcacaatgctggaatgtttttactaggaaataagtaagctaattcaattataaattgcagtagaggaaaggatgaaggttaaaaaacactatctattcaaatccttagtcatgaggttgaattcattgaatcagartgtgaatatatatctatatttgagacagaatgtgtatgtatgtgtgtgagtgtgagtgtgtgtgtacagtcattaaacatttgcctcatggacagtggaggaaaacatttgctgagctgctttcctaccttaaagatttacaactgcactgttttcaagatatactttttatatctcaaataatttaatatattatgtttagttgttgatataacaagatatctgaataccccataattgaaattatacctggaaataaatacttgaaatacttgcttcagtgacatttgtggaagtatacttatttaagttcaaattataggtatattgaacaaaatgatattggattcttcactggctgcatacttctgaaacttgtaaataatttgaaattagtttccaagaacagaaagacaaatattagataggaaataccaaattcttaagattcatacatataaaagt

SEQ ID NO: 182940 - DNA, 628 bp, Homo sapiens
ctttcacatcttaaccttatcatagtatcacaatgctggaatgtttttactaggaaataagtaagctaattcaattataaattgcagtagaggaaaggatgaaggttaaaaaacactatctattcaaatccttagtcatgaggttgaattcattgaatcagaatgtgaatatatatctatatttgagacagaatgtgtatgtatgtgtgtgagtgtgagtgtgtgtgtacagtcattaracatttgcctcatggacagtggaggaaaacatttgctgagctgctttcctaccttaaagatttacaactgcactgttttcaagatatactttttatatctcaaataatttaatatattatgtttagttgttgatataacaagatatctgaataccccataattgaaattatacctggaaataaatacttgaaatacttgcttcagtgacatttgtggaagtatacttatttaagttcaaattataggtatattgaacaaaatgatattggattcttcactggctgcatacttctgaaacttgtaaataatttgaaattagtttccaagaacagaaagacaaatattagataggaaataccaaattcttaagattcatacatataaaagt

SEQ ID NO: 182941 - DNA, 628 bp, Homo sapiens
ctttcacatcttaaccttatcatagtatcacaatgctggaatgtttttactaggaaataagtaagctaattcaattataaattgcagtagaggaaaggatgaaggttaaaaaacactatctattcaaatccttagtcatgaggttgaattcattgaatcagaatgtgaatatatatctatatttgagacagaatgtgtatgtatgtgtgtgagtgtgagtgtgtgtgtacagtcattaaacatttgcctcatggacagtggaggaaaacatttgctgagctgctttcctaccttaaagatttacaactgcactgttttcaagatatactttttatatctcaaataatktaatatattatgtttagttgttgatataacaagatatctgaataccccataattgaaattatacctggaaataaatacttgaaatacttgcttcagtgacatttgtggaagtatacttatttaagttcaaattataggtatattgaacaaaatgatattggattcttcactggctgcatacttctgaaacttgtaaataatttgaaattagtttccaagaacagaaagacaaatattagataggaaataccaaattcttaagattcatacatataaaagt

SEQ ID NO: 182942 - DNA, 628 bp, Homo sapiens
ttcatacatataaaagtgaaataaaaatcaaattaatcttatcatgaattttctactgtggcttaattttagaacttgttataaaaatagaaatgctattaatttaattacatttattaaaatctaaaaataggtgattatagctaggacattgacaagtgtaactatacatgagtaaatataactgaggatagcaacacatgaaatatatcataaaattgaattattctataaatagtattaagtctgtattacttggaacttgattccacttagaatgtccctgcttttatttatttatttatttttgtaaacaaaatgagcaagaggttattacacttcattcactgmgaaaaggtaacactacatcaaagataactcacatacttgcagaaatatggaaggtagttctttcttttttttgttaagaaatagggtctcactatgttgcccaggttgtagtgcagtgactattcaaaggggtcatcccactactgataagcagaggagttttattctgctcaatttttgagttgaccactccttaggcaacctggtggtcctctgctccctggaagctaacatattgatgccaaacttagtgcagacacttcatcagcatagttca

SEQ ID NO: 182943 - DNA, 554 bp, Homo sapiens
aaattaaaattataagttctatgagaaaacacaaacatttgagtaaaaaaatgagaaaggtttagtggtgacttcttcccatgttagaaaaaaggattcataatgaacaacttttttttcatgtatttcctacaattgagtaaaataataggactaggtaagtttactggtttgcattttttcatctgggtctggtttttcatttcaattgttagccattgtattaactrctttcaccattcaaaggaatgaatgatctgccatagtattttctgcagttccatctcttgttttcagtatcattccaattctgcatctgtctaattttgatctctgttctatttattttcctgattcataacattttgctttgtgctgagctcctaattgtctctctgtcattctcaacattttagccctatggtctaaaagatgcccaaaagaatgtagcatattctagtatatcagtgggacaacatgaacaacttgcttaattgttaatctatttaaaaatgaaacagtgtttttcattttttcaatcaatttaatgctga

SEQ ID NO: 182944 - DNA, 554 bp, Homo sapiens
aaattaaaattataagttctatgagaaaacacaaacatttgagtaaaaaaatgagaaaggtttagtggtgacttcttcccatgttagaaaaaaggattcataatgaacaacttttttttcatgtatttcctacaattgagtaaaataataggactaggtaagtttactggtttgcattttttcatctgggtctggtttttcatttcaattgttagccattgtattaactactttcaccattcaaaggaatgaatgatctgccatagtattttctgcagttccatctcttgttttcagtatcattccaattctgcatctrtctaattttgatctctgttctatttattttcctgattcataacattttgctttgtgctgagctcctaattgtctctctgtcattctcaacattttagccctatggtctaaaagatgcccaaaagaatgtagcatattctagtatatcagtgggacaacatgaacaacttgcttaattgttaatctatttaaaaatgaaacagtgtttttcattttttcaatcaatttaatgctga

SEQ ID NO: 182945 - DNA, 554 bp, Homo sapiens
aaattaaaattataagttctatgagaaaacacaaacatttgagtaaaaaaatgagaaaggtttagtggtgacttcttcccatgttagaaaaaaggattcataatgaacaacttttttttcatgtatttcctacaattgagtaaaataataggactaggtaagtttactggtttgcattttttcatctgggtctggtttttcatttcaattgttagccattgtattaactactttcaccattcaaaggaatgaatgatctgccatagtattttctgcagttccatctcttgttttcagtatcattccaattctgcatctgtctaattttgatctctgttctatttattttcctgattcataacattttgctttgtgctgagctcctaattgtctctctgtcattctcaamattttagccctatggtctaaaagatgcccaaaagaatgtagcatattctagtatatcagtgggacaacatgaacaacttgcttaattgttaatctatttaaaaatgaaacagtgtttttcattttttcaatcaatttaatgctga

SEQ ID NO: 182946 - DNA, 554 bp, Homo sapiens
aaattaaaattataagttctatgagaaaacacaaacatttgagtaaaaaaatgagaaaggtttagtggtgacttcttcccatgttagaaaaaaggattcataatgaacaacttttttttcatgtatttcctacaattgagtaaaataataggactaggtaagtttactggtttgcattttttcatctgggtctggtttttcatttcaattgttagccattgtattaactactttcaccattcaaaggaatgaatgatctgccatagtattttctgcagttccatctcttgttttcagtatcattccaattctgcatctgtctaattttgatctctgttctatttattttcctgattcataacattttgctttgtgctgagctcctaattgtctctctgtcattctcaacattttagccctatggtctaaaagatgcccaaaagaatgtagcatattctagtatatcagtgggacaacatraacaacttgcttaattgttaatctatttaaaaatgaaacagtgtttttcattttttcaatcaatttaatgctga

SEQ ID NO: 182947 - DNA, 608 bp, Homo sapiens
aaggtcaggcatggtggctcatgcctgtaatcccagcactttgggaggatattgagaccatcctggctaacayggtgaaaccctgtctctactaaaaatacaaaaaaaaaaaaaaaattcactgggcatggtggcaggtgcctgtagccccagctactcaggaggctgaggcaggagattggtaggaacccaggaggtggagcttgcattgagccgagatcatgccactgcactccagcctgggctacagagcaagactccatctcaaaaaaaaaaagaaaaagaaaaagaaaagaaaaaaccttggagaaataagagattctataaaaaatttccccaatttcactagagagattgacatataaatttagaaaattcagataatctatgtaagatgctatgtaagacaaccattgcagagacacaaagtaatcagattcttgaaggtcaatgcaaaagaaaaaaatattaaaggcagttaacgacaaggggcaggtcacataaagtggaaactacatcaaactcacaggggaactctcagcaatatcccacagtcagaagacattaagaatccatattcagcatttttgaaaaaataaaattttgaa

SEQ ID NO: 182948 - DNA, 608 bp, Homo sapiens
aaggtcaggcatggtggctcatgcctgtaatcccagcactttgggaggatattgagaccatcctggctaacatggtgaaaccctgtctctactaaaaatacaaaaaaaaaaaaaaaattcactgggcatggtggcargtgcctgtagccccagctactcaggaggctgaggcaggagattggtaggaacccaggaggtggagcttgcattgagccgagatcatgccactgcactccagcctgggctacagagcaagactccatctcaaaaaaaaaaagaaaaagaaaaagaaaagaaaaaaccttggagaaataagagattctataaaaaatttccccaatttcactagagagattgacatataaatttagaaaattcagataatctatgtaagatgctatgtaagacaaccattgcagagacacaaagtaatcagattcttgaaggtcaatgcaaaagaaaaaaatattaaaggcagttaacgacaaggggcaggtcacataaagtggaaactacatcaaactcacaggggaactctcagcaatatcccacagtcagaagacattaagaatccatattcagcatttttgaaaaaataaaattttgaa

SEQ ID NO: 182949 - DNA, 608 bp, Homo sapiens
aaggtcaggcatggtggctcatgcctgtaatcccagcactttgggaggatattgagaccatcctggctaacatggtgaaaccctgtctctactaaaaatacaaaaaaaaaaaaaaaattcactgggcatggtggcaggtgcctgtagccccagctactcaggaggctgaggcaggagattggtaggaacmcaggaggtggagcttgcattgagccgagatcatgccactgcactccagcctgggctacagagcaagactccatctcaaaaaaaaaaagaaaaagaaaaagaaaagaaaaaaccttggagaaataagagattctataaaaaatttccccaatttcactagagagattgacatataaatttagaaaattcagataatctatgtaagatgctatgtaagacaaccattgcagagacacaaagtaatcagattcttgaaggtcaatgcaaaagaaaaaaatattaaaggcagttaacgacaaggggcaggtcacataaagtggaaactacatcaaactcacaggggaactctcagcaatatcccacagtcagaagacattaagaatccatattcagcatttttgaaaaaataaaattttgaa

SEQ ID NO: 182950 - DNA, 608 bp, Homo sapiens
aaggtcaggcatggtggctcatgcctgtaatcccagcactttgggaggatattgagaccatcctggctaacatggtgaaaccctgtctctactaaaaatacaaaaaaaaaaaaaaaattcactgggcatggtggcaggtgcctgtagccccagctactcaggaggctgaggcaggagattggtaggaacccrggaggtggagcttgcattgagccgagatcatgccactgcactccagcctgggctacagagcaagactccatctcaaaaaaaaaaagaaaaagaaaaagaaaagaaaaaaccttggagaaataagagattctataaaaaatttccccaatttcactagagagattgacatataaatttagaaaattcagataatctatgtaagatgctatgtaagacaaccattgcagagacacaaagtaatcagattcttgaaggtcaatgcaaaagaaaaaaatattaaaggcagttaacgacaaggggcaggtcacataaagtggaaactacatcaaactcacaggggaactctcagcaatatcccacagtcagaagacattaagaatccatattcagcatttttgaaaaaataaaattttgaa

SEQ ID NO: 182951 - DNA, 415 bp, Homo sapiens
tcatgtacttgttactgttactcttttgaagtttaagctttagaaaaggcaggtgcatggatattgaatagtcttaagctggaccatcggctatttcagactggcttactcaggcatattccaaaactctggtagtttgactaagtacttgctcaatttggaacagctaaaaatgatatccccaggcttactcacaattcaggttttacattaaacctaycttctttaaggaaaagagcctgagatagaaggtgccttcctattctttttcctgacaagcagtgtaacaaaaccatttactttcctgtaacgacagtcacaaatgaccaaatgtccagtccttagttctgtggccaacattctgtgttattcaaatatgaaccatggctgagatcctatgatcaagaagcaagca

SEQ ID NO: 182952 - DNA, 414 bp, Homo sapiens
gaattctaggagcatccctagcacactcaatggggcaggacctgtaagttttccaggcatgactttgcccaccctgcatttcagtcaccccagattgcccacagataaagatgtagccctctggcacacacagaccccctgtgctagtattatttatgaggatgaaggtattggcactcactagctaagtctcattgatggyagtagttgcctgagttttcctcatacattttaccccatacaatcctaaagcctctacgcagagggctagcactctccgatacttcttctcttcatcatcatgaacacacatccttgtaattaaaggagcctggtgcatcaaagcacctgcccaccaaagattcgttagttgtggtcatgacatttttccacaaagttatttaagttaaaaga

SEQ ID NO: 182953 - DNA, 418 bp, Homo sapiens
gtaaaatcccatgggctatgtaagaggatggcataaattcctctcaagtgtggctatagttrcctcagcacccatatgattgacatatatttgtctttttcagacaacaagctgtttttcttagtccttgtcctcacatggatatcctctaacagtccaatccttccattgccattgtcctgatcagatggctaggcttttggcaatggcccataagtcactgaaaatatagcaagatatgcgatagaggtagcctgcatggccatcaccactgcatttagtttggcccattgggtagaatgcccatgtccagtctcagtcaaaagatagccaaccactggctgaatggtggtccagtgcatgtcgtctggcagagctatcagtaaaccatgcctgtcaggcctctgagcccaagcta

SEQ ID NO: 182954 - DNA, 418 bp, Homo sapiens
gtaaaatcccatgggctatgtaagaggatggcataaattcctctcaagtgtggctatagttgcctcagcacccatatgattgacatatatttgtctttttcagacaacaagctgtttttcttagtccttgtcctcacatggatatcctctaacagtccaatccttccattgccattgtcctgatcagatggctaggcttttggcaatggcccataagtcactgaaaatatagcaagatatgcgatagaggtagcctgcatggccatcaccactgcatttagtttggcccattgggtagaatgcccatgtccagtctcagtcaaaagatagccawccactggctgaatggtggtccagtgcatgtcgtctggcagagctatcagtaaaccatgcctgtcaggcctctgagcccaagcta

SEQ ID NO: 182955 - DNA, 578 bp, Homo sapiens
tcctctctttgctgagagctttcctttaacttaataarttctatacaattcagaacaatgtgctctccctccgtttttagagacatgtcccttaccccaacctccaatggccacaggtacacatgtgagacaaatgggagagtggcaactcccaacctccctcccctcccggctggggcacatagcccaagggccccacttggctaggtggccagcatttcctgctcactcttccctctccccatgcacccacagtgtctttcctcccctggctgagccagaaaggaggagacagcaattaaaatgttctctccctattggaggaactcatttgcataagaataaaaggtttctcctccaggcatcttccccaccctgcacttaagctgttttattttatttttcttttctccactttgtaaggagttaacttttatgagaggttttttgtttgtttttgttttttttttcttattaggccaggaccccaattcccaagatagccttttctctcccttgtttaaggaagacccagctccaaagctttaggttagcatgactaattgctgccgattagg

SEQ ID NO: 182956 - DNA, 503 bp, Homo sapiens
cctgcatcatttattgaatagggtgtcctttcctatttatgtttttgaatgctttgtggaggatcagttggttgtatacatttggctttatttctggtttctctattcctttcctttggtttatttatctacctttataccagtaccatgcatgctgttttgattactaaaaccttgtattataacttgaagtctcttaaaactatgcctccggatttgttctttttgcttagagttgcttttttaattcaagctcatttctggtttcataagaatttagaattgctttctctaattctatgaaaaatgatgtcagtattttgataggaaktgcattgaatctgtagattgcttttagcagtaaggtcattttcacaaatatgattcttcctatccatgagcatgggatgtatttccatttgtttatatcatctctaatttatttcagcagtttttgtagctctccttatggagatctttcacttatttggttaagtgtattt

SEQ ID NO: 182957 - DNA, 523 bp, Homo sapiens
acgttgctgcagttcttcatcttgttttttgtcctcaggagcttgaccttgtaaccacttgataatactttcttttggcctctgccattttacaatggtggcctgggtttaatcctggcttagggaatgagtatattttggccaatatctgtgtgacttctaccatttgctgattctcttcccctctrtaaacaactttagcttcctttcttaaatcttcctttgtctgaaccaactttaaagatcttagattctgtaaaaactgcttagcacctctttgaaaataacttttacacttacagttaagtcataaccttagttgaggcttgttggtttcacctgtgaggttatttttgataaagttcaaaagccagaaatattggctgctcggcatggctaaagttgggtaataaatatgaaacgattttcttagagcacagctgaattaaaagtggatatccaagttataggtatatttaaaggcctttaaatttttctctgcatgtatcttgtttttctggaa

SEQ ID NO: 182958 - DNA, 523 bp, Homo sapiens
acgttgctgcagttcttcatcttgttttttgtcctcaggagcttgaccttgtaaccacttgataatactttcttttggcctctgccattttacaatggtggcctgggtttaatcctggcttagggaatgagtatattttggccaatatctgtgtgacttctaccatttgctgattctcttcccctctataaacaactttagcttcctttcttaaatcttcctttgtctgaaccaactttaaagaycttagattctgtaaaaactgcttagcacctctttgaaaataacttttacacttacagttaagtcataaccttagttgaggcttgttggtttcacctgtgaggttatttttgataaagttcaaaagccagaaatattggctgctcggcatggctaaagttgggtaataaatatgaaacgattttcttagagcacagctgaattaaaagtggatatccaagttataggtatatttaaaggcctttaaatttttctctgcatgtatcttgtttttctggaa

SEQ ID NO: 182959 - DNA, 523 bp, Homo sapiens
acgttgctgcagttcttcatcttgttttttgtcctcaggagcttgaccttgtaaccacttgataatactttcttttggcctctgccattttacaatggtggcctgggtttaatcctggcttagggaatgagtatattttggccaatatctgtgtgacttctaccatttgctgattctcttcccctctataaacaactttagcttcctttcttaaatcttcctttgtctgaaccaactttaaagatcttagattctgtaaaaactgcttagcacctctttgaaaataacttttacacttacagttaagtcataaccttagttgaggcttgttggtttcacctgtgaggttatttttgataaagttcaaaagccagaaatattggctgctcggcatggctaaagttgggtaataratatgaaacgattttcttagagcacagctgaattaaaagtggatatccaagttataggtatatttaaaggcctttaaatttttctctgcatgtatcttgtttttctggaa

SEQ ID NO: 182960 - DNA, 572 bp, Homo sapiens
aaatattgtccaaatttacaaggaaagagaaaatgaattstgtgttcatcttacagtttctaataaaatccccaacattgaacttaaatgactctccagttgttcattaggagcatatgctgttggttgactgccagcatacattatctcaccttttctttctaagatagaacatattcaatacatccaaggcttccaaggcttcagtacttctctaagtttactgtctcgtcttcagattcaggtatgatgtgattactctaagtatagcctgattctttgccaaaaataagaacaaaaatacgcatatgacccaattcagtacaaaggcaaatcagggcaaattaccttaagagtttttaaaataaatgtttctcttggtgtctctttcttggtcttctgggtagggttgtatctgaatatgatgaccctaaatgtctgcagacatttttgcagcaatgttaagggtaaaagtgacacagccaatagcaaagaagtgccagaaaatacgtaagcaaactgtgacctctttttacctcttgattgacttttatgttaaataatgaatttac

SEQ ID NO: 182961 - DNA, 572 bp, Homo sapiens
aaatattgtccaaatttacaaggaaagagaaaatgaattgtgtgttcatcttacagtttctaataaaatccccaacattgaacttaaatgactctccagttgttcattaggagcatatgctgttggttgactgccagcatacattatctcaccttttctttctaagatagaacatattcaatacatccaaggcttccaaggcttcagtacttctctaagtttactgtctcgtcttcagattcaggtatgatgtgattactctaagtatagcctgattctttgccaaaaataagaacaaaaatacgcatatgacccwattcagtacaaaggcaaatcagggcaaattaccttaagagtttttaaaataaatgtttctcttggtgtctctttcttggtcttctgggtagggttgtatctgaatatgatgaccctaaatgtctgcagacatttttgcagcaatgttaagggtaaaagtgacacagccaatagcaaagaagtgccagaaaatacgtaagcaaactgtgacctctttttacctcttgattgacttttatgttaaataatgaatttac

SEQ ID NO: 182962 - DNA, 436 bp, Homo sapiens
gaattcaaagattttctgaytggcatttgacaactggctaaaataatttatctaaagaccggaatcaatagacaggagtgtatgggttaagataaggtgttttagagaccgaggttcttatgcagatgaagcttgcaggtagcaggcttcactgagaatagattgtaaatgatttttatcagacataaaaaggaaaaaggacttggaatcaggaaaaatcaggaaaaagacttggaaagagaaggggattctctacaaaatggagattttccccacagaaacagccttgtaggtccatttcaaaatatgtcaaagaaatgtatttttgtggtgaaatactttgatttctttcaaggcctgctatctgtcatgttgatatcttattgctacgaagagtctgttttgtcattcttaagtctctactttaatgttaaca

SEQ ID NO: 182963 - DNA, 408 bp, Homo sapiens
attcaaagattttctgactggcatttgacaactggctaaaataatttatctaaagacyggaatcaatagacaggagtgtatgggttaagataaggtgttttagagaccgaggttcttatgcagatgaagcttgcaggtagcaggcttcactgagaatagattgtaaatgatttttatcagacataaaaaggaaaaaggacttggaatcaggaaaaatcaggaaaaagacttggaaagagaaggggattctctacaaaatggagattttccccacagaaacagccttgtaggtccatttcaaaatatgtcaaagaaatgtatttttgtggtgaaatactttgatttctttcaaggcctgctatctgtcatgttgatatcttattgctacgaagagtctgttttgtcatt

SEQ ID NO: 182964 - DNA, 436 bp, Homo sapiens
gaattcaaagattttctgactggcatttgacaactggctaaaataatttatctaaagaccggaatcaatagacaggagtgtatgggttaagataaggtgttttagagaccraggttcttatgcagatgaagcttgcaggtagcaggcttcactgagaatagattgtaaatgatttttatcagacataaaaaggaaaaaggacttggaatcaggaaaaatcaggaaaaagacttggaaagagaaggggattctctacaaaatggagattttccccacagaaacagccttgtaggtccatttcaaaatatgtcaaagaaatgtatttttgtggtgaaatactttgatttctttcaaggcctgctatctgtcatgttgatatcttattgctacgaagagtctgttttgtcattcttaagtctctactttaatgttaaca

SEQ ID NO: 182965 - DNA, 436 bp, Homo sapiens
gaattcaaagattttctgactggcatttgacaactggctaaaataatttatctaaagaccggaatcaatagacaggagtgtatgggttaagataaggtgttttagagaccgaggttcttatgcagatgaagcttgcaggtagcaggcttcactgagaatagattgtaaatgatttttatcagacataaaaaggaaaaaggacttggaatcaggaaaaatcaggaaaaagacttggaaagagaaggggattctctacaaaatggagattttccccacagaaacagccttgtaggkccatttcaaaatatgtcaaagaaatgtatttttgtggtgaaatactttgatttctttcaaggcctgctatctgtcatgttgatatcttattgctacgaagagtctgttttgtcattcttaagtctctactttaatgttaaca

SEQ ID NO: 182966 - DNA, 408 bp, Homo sapiens
attcaaagattttctgactggcatttgacaactggctaaaataatttatctaaagaccggaatcaatagacaggagtgtatgggttaagataaggtgttttagagaccgaggttcttatgcagatgaagcttgcaggtagcaggcttcactgagaatagattgtaaatgatttttatcagacataaaaaggaaaaaggacttggaatcaggaaaaatcaggaaaaagacttggaaagagaaggggattctctacaaaatggagattttccccacagaaacagccttgtaggtccatttcaaaatatgtcaaagaaatgtatttttgtrgtgaaatactttgatttctttcaaggcctgctatctgtcatgttgatatcttattgctacgaagagtctgttttgtcatt

SEQ ID NO: 182967 - DNA, 408 bp, Homo sapiens
attcaaagattttctgactggcatttgacaactggctaaaataatttatctaaagaccggaatcaatagacaggagtgtatgggttaagataaggtgttttagagaccgaggttcttatgcagatgaagcttgcaggtagcaggcttcactgagaatagattgtaaatgatttttatcagacataaaaaggaaaaaggacttggaatcaggaaaaatcaggaaaaagacttggaaagagaaggggattctctacaaaatggagattttccccacagaaacagccttgtaggtccatttcaaaatatgtcaaagaaatgtatttttgtggtgaaatactttgatttctttcaaggcctgctatctgtcatgttgayatcttattgctacgaagagtctgttttgtcatt

SEQ ID NO: 182968 - DNA, 309 bp, Homo sapiens
tttcagtccttgtgaatgaactgcaacctaactcaataggtacacaagactaaaacctaacttaggaatatgcgcctgtaacaatcgctgagtcttggccaattccagcagccatacttcaactagtcgcatacagctgagtgttcaaataargcaagtgccaagccgtaaccaatccagctgtttctgtacctcacttctgatttctatacgtcactttactttgtattgtctataaattcattctgaccatgagacacccctggagtctctctgaatctgctgtgattgtgggggctttccaattta

SEQ ID NO: 182969 - DNA, 309 bp, Homo sapiens
tttcagtccttgtgaatgaactgcaacctaactcaataggtacacaagactaaaacctaacttaggaatatgcgcctgtaacaatcgctgagtcttggccaattccagcagccatacttcaactagtcgcatacagctgagtgttcaaataaagcaagtgccaagccgtaaccaatccagctgtttctgtacctcacttctgatttctatacrtcactttactttgtattgtctataaattcattctgaccatgagacacccctggagtctctctgaatctgctgtgattgtgggggctttccaattta

SEQ ID NO: 182970 - DNA, 490 bp, Homo sapiens
tgactatcaataatacagagatctgcaagaattcccacacaggtgaaatatgcatggtggaaagaggcaattcttaaggcaaagagccaagcatgtaccaaacaccaatgcccttgcataccaaagctaaagattctacaatttgccaaagataagaatgtamctttcacaacagcaaggacctcatatattgtcttattatatatccctaaaatctagcacagtgttgaataagaggaagtagaaataattttgagaaggaattaaacatgtatttgtagaagtcaagtcttacccattgaaaaagtatctcccccatatttgtaattcattaaattgtttggaagggaaaagaaactaaagggaatactccatagggaaagttgtttcagaaattatgcaaatttattctaataactaagaaatagtgaaaatgtattagaaatgttaggtagaggcacatttcagatttagactaaggtgcaaatgg

SEQ ID NO: 182971 - DNA, 490 bp, Homo sapiens
tgactatcaataatacagagatctgcaagaattcccacacaggtgaaatatgcatggtggaaagaggcaattcttaaggcaaagagccaagcatgtaccaaacaccaatgcccttgcataccaaagctaaagattctacaatttgccaaagataagaatgtaactttcacaacagcaaggacctcatatattgtcttattatatatccctaaaatctagcacagtgttgaataagaggaagtagaaataattttgagaaggaattaaacatgtatttgtagaagtcaagtcttacccattgaaaaartatctcccccatatttgtaattcattaaattgtttggaagggaaaagaaactaaagggaatactccatagggaaagttgtttcagaaattatgcaaatttattctaataactaagaaatagtgaaaatgtattagaaatgttaggtagaggcacatttcagatttagactaaggtgcaaatgg

SEQ ID NO: 182972 - DNA, 490 bp, Homo sapiens
tgactatcaataatacagagatctgcaagaattcccacacaggtgaaatatgcatggtggaaagaggcaattcttaaggcaaagagccaagcatgtaccaaacaccaatgcccttgcataccaaagctaaagattctacaatttgccaaagataagaatgtaactttcacaacagcaaggacctcatatattgtcttattatatatccctaaaatctagcacagtgttgaataagaggaagtagaaataattttgagaaggaattaaacatgtatttgtagaagtcaagtcttacccattgaaaaagtatctcccccatatttgtaattcattaaattgtttggaagggaaaagaaactaaagggaatactccatagggaaagttgtttcagaaattatgyaaatttattctaataactaagaaatagtgaaaatgtattagaaatgttaggtagaggcacatttcagatttagactaaggtgcaaatgg

SEQ ID NO: 182973 - DNA, 483 bp, Homo sapiens
atacagatatagacggccagagcacctacttgtagctcttgatagcagaattatcagtcaactgaaaagatattttaagacctccaagaataagtagataatttctattctgtattttgttaatgaaagaaaaccagggtaataactgcttgaattttcatcactagcatgtttcctacatacataaacatagtgagtagtgagtatattcacayataaagtaacaaagaattatagtaaaccccaacatccaatcgggaaaaatgttgtaactctatatattcattaaattgttcacaaactgacatcttttagcatataatatggtttcctttagcttgttaaagagcatggactcatgactaaaacataagaacacccaatgaagctcaactaaatcaattcaactatgaaaaataaactgactagtgatcatctctttattattattgaaagaataacttacaagtaaaaacattcaat

SEQ ID NO: 182974 - DNA, 483 bp, Homo sapiens
atacagatatagacggccagagcacctacttgtagctcttgatagcagaattatcagtcaactgaaaagatattttaagacctccaagaataagtagataatttctattctgtattttgttaatgaaagaaaaccagggtaataactgcttgaattttcatcactagcatgtttcctacatacataaacatagtgagtagtgagtatattcacacataaagtaacaaagaattatagtaaaccccaacatccaatcgggaaaaatgttgtaactctatatattcattaaattgttcacaaactgacatcttttagcatataatatggtttcctttagcttgttaaagagcatggactcatgactaaaacataagaacacccaatgaagytcaactaaatcaattcaactatgaaaaataaactgactagtgatcatctctttattattattgaaagaataacttacaagtaaaaacattcaat

SEQ ID NO: 182975 - DNA, 551 bp, Homo sapiens
ttcaacaaatctcaaaaaggaaacctaattatgtataatattctgactgattttgtttgctcaccaaattgaaattgaaaagaaaaaatacagcactctataaaaaaataaaatgatttcaaaatataattattgtctccctttgaaaatataaatgtttaaataatggtgaaatagagaacataaacattcacaaatattacatatccattcaacattttcaggtattattttgttttgttcaaacctccccttctgtcatttttctctcctttctttatctttagcataactgagctgctttccaaacatctatagttataccggacatagcattttccaacatcaaacatggtttttcttaaacaccagytccaaatattaattcccatggaaaatgacattttccatatatgagaaatattggaaccaatataacaaaactcattaacatttataacatttgaaaataatttcacaaaagttttatttaaaaaaattatattgtaaatttatgtaagaaattctctatccattatatgacttgtata

SEQ ID NO: 182976 - DNA, 551 bp, Homo sapiens
ttcaacaaatctcaaaaaggaaacctaattatgtataatattctgactgattttgtttgctcaccaaattgaaattgaaaagaaaaaatacagcactctataaaaaaataaaatgatttcaaaatataattattgtctccctttgaaaatataaatgtttaaataatggtgaaatagagaacataaacattcacaaatattacatatccattcaacattttcaggtattattttgttttgttcaaacctccccttctgtcatttttctctcctttctttatctttagcataactgagctgctttccaaacatctatagttataccggacatagcattttccaacatcaaacatggtttttcttaaacaccagttccaaatattaattcccatggaaaatgacattttccatatatgagaaatattggaaccaatataacaaaactsattaacatttataacatttgaaaataatttcacaaaagttttatttaaaaaaattatattgtaaatttatgtaagaaattctctatccattatatgacttgtata

SEQ ID NO: 182977 - DNA, 551 bp, Homo sapiens
ttcaacaaatctcaaaaaggaaacctaattatgtataatattctgactgattttgtttgctcaccaaattgaaattgaaaagaaaaaatacagcactctataaaaaaataaaatgatttcaaaatataattattgtctccctttgaaaatataaatgtttaaataatggtgaaatagagaacataaacattcacaaatattacatatccattcaacattttcaggtattattttgttttgttcaaacctccccttctgtcatttttctctcctttctttatctttagcataactgagctgctttccaaacatctatagttataccggacatagcattttccaacatcaaacatggtttttcttaaacaccagttccaaatattaattcccatggaaaatgacattttccatatatgagaaatattggaaccaatataacaaaactcattaacatttataacatttgaaaataatttcacaaaagttttatttaaaaaaattatattgtaaatttaygtaagaaattctctatccattatatgacttgtata

SEQ ID NO: 182978 - DNA, 624 bp, Homo sapiens
acaacattaaacggagaaaaattatatagctaagtaaattaaactaaatttagatctttgaagggatcaataaaattgttaaatctctggccagactatggagaaaataataggaaataaataatttacaaattttaagaatgatagaagtggctgggggtggtggctcatgcctgtgatyccagcactttgggaggccgaggcaggcggatcgtttgaggtcaggagttccagaccagcctggccaacatagtgaagccctgtctctactaaaaatacaaaaattagccgagcgtgatggcgcatgcctgtattcccagctactcgggaggctgaggcacaagaattgcttgaagctgggaggtggaatttgcagtgagtagagatgaggccactgcactcaagcccgggcgacagaacgggactctgtctcaaaacaaataaacaacaaaaaaagaatgatagaagtaacatttctattgtcctacaacagtttaaggataactaaatgaataccatgatgaaatttataaatgtaaattagttaatttagattaagtgtataaatccctcaaaagatacaaactaaggcaaactcaaaaagaaagcaataaagtgcacatc

SEQ ID NO: 182979 - DNA, 603 bp, Homo sapiens
tacaaattgggaaattaacacctaacctgcctaggtagaatttcatagcattaactaaaataattacttaaacttacaagatttattagaaaaatatgaatagaaaaataaaatgcattgttgcattttatgtaattttacttgaacttagtttataacatgtacatagattaagttgatttaaatattttatgtacaaaaaactatattgttgaagattctaagagyttaaaactaaaatacaatataaacatttacttaacaaaaagagtaaataagatgaagaatttgaaagaatttaagaattaatttcagtttcttttccaaaatgtatgtggttagcctacaatgcttttacaatctgttattttatgagtatgaatattgattttattattacctaaacatgtatgatttttaaaatatggcaaaagaattaaagttctatagtttgacaaagctgtaaagcagatcaatcctttgacagcttaatgaataaagcatgcatgtagttgacactaattcatttaataaacatttgtagaacatatatgtgtaagaaattgtgctaaggagatgaatggcacattaaaataagaagac

SEQ ID NO: 182980 - DNA, 404 bp, Homo sapiens
gagctgctcagtctatggcattttgttatagcagcccatgctaatgaatacagatgaccgtgtgtctgcagaccttcctaggaaattattgagtccttcattgaatactaaactgtgaatacatgagagaaaataactgaagcctggggtaaaatgccaacacaaagggtttgaagaacaattctcaaagctcagaaagctctgcaaatattattgttgccacaaaccaaagtagaagacagggtaatgtgtgagctattaggtagaatctttggaagaatcctgcttttgtgatggaactcrctcattcctaaacctaaagcaactcaacatcttctctaagaaaattttatagcaatctctaaaagcatcaaattgattccaaataatttaactgtgtttga

SEQ ID NO: 182981 - DNA, 404 bp, Homo sapiens
gagctgctcagtctatggcattttgttatagcagcccatgctaatgaatacagatgaccgtgtgtctgcagaccttcctaggaaattattgagtccttcattgaatactaaactgtgaatacatgagagaaaataactgaagcctggggtaaaatgccaacacaaagggtttgaagaacaattctcaaagctcagaaagctctgcaaatattattgttgccacaaaccaaagtagaagacagggtaatgtgtgagctattaggtagaatctttggaagaatcctgcttttgtgatggaactcgctcattcctaaacctaaagcaactcwacatcttctctaagaaaattttatagcaatctctaaaagcatcaaattgattccaaataatttaactgtgtttga

SEQ ID NO: 182982 - DNA, 598 bp, Homo sapiens
ctatgagaagtaaatttataagttataagttcatattattataaattataaaattatgttgcttataagccacaacaaaaaggtatttttctattgcagtcgaaatgtactaaggtacaaagaaataataaaatacatataagaacaaaaatcaataaaaattgaaagaacaccaaaatggaatatcaataaaataaaaagctaatttattaaaaaatgaaaaaattctagctatacttaacaaaaaagagaaaaaatgctaaatactaaagccagtaatgaaaggctgtcactaattatactataggttataaaatgatartaagcacacaatgtttaaactttatgcaaatacattttaaaagtttggtaaacggacacattacttgagagaaaagaggttacaaaattcacttaaaaataaagagacaccatgaataatcctgcatctattaaatacattaaatctataatttgaaactcacacacaaaataattccaggtcaggaaggtttcactcttgtattctcacaatgtttaaagaataaatagtaacaactctatgcaaagtcttccagaaataaaagaggaagcaacc

SEQ ID NO: 182983 - DNA, 371 bp, Homo sapiens
tctctgacccaatagaattaaatttaaaataaaaaaccaaaactacaatgaaatccccaaatatttagatataataaacttctaatgatgccttrtagcaaatagtaaatcaaaagataaattagaaagtattttggtctggataaaaataaaaacactacaacttcaggattcctttggagaaatacgaagtttttaatgtttgtattagaaaaaggagaaatgtctaaaattaatgacacaaatgtctacctgaaaaagtgaaaataaaaccaaattaaacaagaagtagaaagtaaaatatagagaaaaactaaaattttataaagacataacagaaatacaaaaggaaaagatgaaatttaaatctg

SEQ ID NO: 182984 - DNA, 371 bp, Homo sapiens
tctctgacccaatagaattaaatttaaaataaaaaaccaaaactacaatgaaatccccaaatatttagatataataaacttctaatgatgccttawagcaaatagtaaatcaaaagataaattagaaagtattttggtctggataaaaataaaaacactacaacttcaggattcctttggagaaatacgaagtttttaatgtttgtattagaaaaaggagaaatgtctaaaattaatgacacaaatgtctacctgaaaaagtgaaaataaaaccaaattaaacaagaagtagaaagtaaaatatagagaaaaactaaaattttataaagacataacagaaatacaaaaggaaaagatgaaatttaaatctg

SEQ ID NO: 182985 - DNA, 371 bp, Homo sapiens
tctctgacccaatagaattaaatttaaaataaaaaaccaaaactacaatgaaatccccaaatatttagatataataaacttctaatgatgccttatagcaaatagtaaatcaaaagataaattagaaagtattttggtctggataaaaataaaaacactacaacttcaggawtcctttggagaaatacgaagtttttaatgtttgtattagaaaaaggagaaatgtctaaaattaatgacacaaatgtctacctgaaaaagtgaaaataaaaccaaattaaacaagaagtagaaagtaaaatatagagaaaaactaaaattttataaagacataacagaaatacaaaaggaaaagatgaaatttaaatctg

SEQ ID NO: 182986 - DNA, 371 bp, Homo sapiens
tctctgacccaatagaattaaatttaaaataaaaaaccaaaactacaatgaaatccccaaatatttagatataataaacttctaatgatgccttatagcaaatagtaaatcaaaagataaattagaaagtattttggtctggataaaaataaaaacactacaacttcaggattcctttggagaaatacgaagtttttaatgtttgtattagaaaaaggagaaatgtctaaaattaatgacacaaatgtctacctgaaaaagtgaaaakaaaaccaaattaaacaagaagtagaaagtaaaatatagagaaaaactaaaattttataaagacataacagaaatacaaaaggaaaagatgaaatttaaatctg

SEQ ID NO: 182987 - DNA, 381 bp, Homo sapiens
catctctgctgtggcacgacctttgtcaaaaygctagaaagaagagagactggctcttagaccaaggggatttgggattcaaaaggacttccaattccagttctatagatttccttcccattagcctcttcatgtgcatcaaatgtaaatggcaggctaaacatacaggatgaagagagttgaaagactgctgcctaaaaatacccttttccaaatctgtgggtgcagaagcacattgaaaagcagctacccaacctggtggtgtggcacatgtctgcagtctcacatacttaagaggctaaggtgggaggactacttgagcccaggagtttgaggcttcagtgaattatgatggtgccacaacactccagcctgggaaac

SEQ ID NO: 182988 - DNA, 381 bp, Homo sapiens
catctctgctgtggcacgacctttgtcaaaacgctagaaagaagagagactggctcttagaccaaggggatttgggattcraaaggacttccaattccagttctatagatttccttcccattagcctcttcatgtgcatcaaatgtaaatggcaggctaaacatacaggatgaagagagttgaaagactgctgcctaaaaatacccttttccaaatctgtgggtgcagaagcacattgaaaagcagctacccaacctggtggtgtggcacatgtctgcagtctcacatacttaagaggctaaggtgggaggactacttgagcccaggagtttgaggcttcagtgaattatgatggtgccacaacactccagcctgggaaac

SEQ ID NO: 182989 - DNA, 381 bp, Homo sapiens
catctctgctgtggcacgacctttgtcaaaacgctagaaagaagagagactggctcttagaccaaggggatttgggattcaaaaggacttccaattccagttctatagatttccttcccattagcctcttcatgtgcatcaaatgtaaatggcaggctaaacmtacaggatgaagagagttgaaagactgctgcctaaaaatacccttttccaaatctgtgggtgcagaagcacattgaaaagcagctacccaacctggtggtgtggcacatgtctgcagtctcacatacttaagaggctaaggtgggaggactacttgagcccaggagtttgaggcttcagtgaattatgatggtgccacaacactccagcctgggaaac

SEQ ID NO: 182990 - DNA, 381 bp, Homo sapiens
catctctgctgtggcacgacctttgtcaaaacgctagaaagaagagagactggctcttagaccaaggggatttgggattcaaaaggacttccaattccagttctatagatttccttcccattagcctcttcatgtgcatcaaatgtaaatggcaggctaaacatwcaggatgaagagagttgaaagactgctgcctaaaaatacccttttccaaatctgtgggtgcagaagcacattgaaaagcagctacccaacctggtggtgtggcacatgtctgcagtctcacatacttaagaggctaaggtgggaggactacttgagcccaggagtttgaggcttcagtgaattatgatggtgccacaacactccagcctgggaaac

SEQ ID NO: 182991 - DNA, 426 bp, Homo sapiens
tgcaaacatcacaaagaagtttctggaaatgctgctgtctgctttttatatgtaatcccrtttccaacgaaatcctcaaagctagacaaatatccacttgcagattccacaaaaagagtgtttcaaaactgctctctcaaaagaaaggttcaactctgttagctgagtaaatacatcatgaaaaagtttctgacattgcttctatctaccttttattggaagatatttcctttatcaccgtattaatgagatctctccaaatgtccacttccagaaactacaaaaagagtgtttcaaacctgctctatgaaagggactgttcaacactgtgacttcaattgaaacatcccaatgaagcttctgagaatgcttctgtctagagtttatatgaagacaatcccgtttccaacgaaatcctcaaagcta

SEQ ID NO: 182992 - DNA, 426 bp, Homo sapiens
tgcaaacatcacaaagaagtttctggaaatgctgctgtctgctttttatatgtaatcccgtttccaacgaaatcctcaaagctagacaaatatccacttgcagattccacaaaaagagtgtttcaaaactgctctctcaaaagaaaggttcaactctgttagctgagtaaatacatcatgaaaaagtttctgacattgcttctatctascttttattggaagatatttcctttatcaccgtattaatgagatctctccaaatgtccacttccagaaactacaaaaagagtgtttcaaacctgctctatgaaagggactgttcaacactgtgacttcaattgaaacatcccaatgaagcttctgagaatgcttctgtctagagtttatatgaagacaatcccgtttccaacgaaatcctcaaagcta

SEQ ID NO: 182993 - DNA, 426 bp, Homo sapiens
tgcaaacatcacaaagaagtttctggaaatgctgctgtctgctttttatatgtaatcccgtttccaacgaaatcctcaaagctagacaaatatccacttgcagattccacaaaaagagtgtttcaaaactgctctctcaaaagaaaggttcaactctgttagctgagtaaatacatcatgaaaaagtttctgacattgcttctatctaccttttattggaagatatttcctttwtcaccgtattaatgagatctctccaaatgtccacttccagaaactacaaaaagagtgtttcaaacctgctctatgaaagggactgttcaacactgtgacttcaattgaaacatcccaatgaagcttctgagaatgcttctgtctagagtttatatgaagacaatcccgtttccaacgaaatcctcaaagcta

SEQ ID NO: 182994 - DNA, 223 bp, Homo sapiens
gacacttgaatgcaaacatcacaaagaagttactgggaatgctgctgtctgctttttatatgtaatcccgtttccaacgaaatcctcaaagctagacaaatatccacttgcagattccacaaaaagagtgtttcaaaactgctctctcaaaagaaaggttcaackctgttagctgagtagatacatcatgaaaaagtttctgacattgcttctatctagcttt

SEQ ID NO: 182995 - DNA, 600 bp, Homo sapiens
tgggaggtaattgaatcatgggggcaggtatttcccatgctgttcttctgatagtgaataagtctcacaagatctgatggttttataaagaggagtttccctgcacaagctctcttgtcttgtctgctgccatgtgagacgtgcctttcaccttgcgccatgattgtgaggcctacccagccatgtggaactgtgcatgtattaaacctctttcttctagaaattacccagtcttgggcatgtctttaccggtggtgtgaaaatggactaatacagtagcacacctcatagggctgaacaaaatggggaagatgagtggggagcaggagagagaaaaggggtctgtgggactctagcttttattgggcccagaacattacccaaataagttttccacggggcactwgtcggtggggtgagtgccagcaggcacatttcttgactcccgctgcaaccgagcaggtcactctggcgtgtgggggctgtccatgtgcgctgtgaggtctgtggggtgagtcaggtaggttgtatccaacggttccatagctggtagtcaccaggagggaggcaactgtgtagggtcaatatctgggccagcca

SEQ ID NO: 182996 - DNA, 212 bp, Homo sapiens
gtgacttgaatgcaaacatcacaaagaagattctgggaatgctgctgtctgctttttatatgtaatcccgtttcsaacgaaatcctcaaagctagacaaatatccacttccagattccacaaaaagagtgtttcaaaactgctctctcaaaagaaaggttcaactctgttggctgagtagatacatcatgaaaaagtttctgacattgcttc

SEQ ID NO: 182997 - DNA, 212 bp, Homo sapiens
gtgacttgaatgcaaacatcacaaagaagattctgggaatgctgctgtctgctttttatatgtaatcccgtttcgaacgaaatcctcaaagctagacaaatatccacttscagattccacaaaaagagtgtttcaaaactgctctctcaaaagaaaggttcaactctgttggctgagtagatacatcatgaaaaagtttctgacattgcttc

SEQ ID NO: 182998 - DNA, 318 bp, Homo sapiens
tcattctcagacaaaatcccccaacatttaactgattcctaatagcttaaaatcactttgaaaaatccatatatttataaccttttcttccctctatgatttctggtcagcttgggttttgtttttcattccatttacttcatcctcgaaaagatctattttacgtctatttattctcatttatggacattgagaaaagaaaataactttcatgtgagaaatgcaagtccttttaaataatcaggcccagagagatattcaaatgagacrgcagttctgtcctgctcctctttgagctgtgtgttcatctaggctgct

SEQ ID NO: 182999 - DNA, 318 bp, Homo sapiens
tcattctcagacaaaatcccccaacatttaactgattcctaatagcttaaaatcactttgaaaaatccatatatttataaccttttcttccctctatgatttctggtcagcttgggttttgtttttcattccatttacttcatcctcgaaaagatctattttacgtctatttattctcatttatggacattgagaaaagaaaataactttcatgtgagaaatgcaagtccttttaaataatcaggcccagagagatattcaaatgagacggcagttctgtcctgctcctctttgwgctgtgtgttcatctaggctgct

SEQ ID NO: 183000 - DNA, 535 bp, Homo sapiens
gaattcttaaaaccagtaagaaaagacaaacatcccaacagaaaagtaagcaaaagacttgaacagatattttacagaagagatggggatggaaaaaacttctctacaaactttcgcttcttcaaacttggctacataaaaattaaggagttttgtttgatgaaggacttcatggacaaagccagtagaatgttgaaaaaaacaggaaacaaagatcttttcggctgggctcagtggcttgcacctgtaatcctrgcactttgggagtccaaggtaggaggatcgcttgaggccaggagttccagaccagcctgtgcaacatgccgaaaccccatctctacaaaaaatacaaaaaattagccaggtgtggtggcacacgcctgtaatcgcagctactcaggaagctgaggtgagaggatggcttgagcctagggaggttgaggttgcagtgagccatgattgagccactgcactctaacctgggtgacagagttgagactctgtctcaaaaacaaacacacaaacaaacaaaact

SEQ ID NO: 183001 - DNA, 535 bp, Homo sapiens
gaattcttaaaaccagtaagaaaagacaaacatcccaacagaaaagtaagcaaaagacttgaacagatattttacagaagagatggggatggaaaaaacttctctacaaactttcgcttcttcaaacttggctacataaaaattaaggagttttgtttgatgaaggacttcatggacaaagccagtagaatgttgaaaaaaacaggaaacaaagatcttttcggctgggctcagtggcttgcacctgtaatcctgkcactttgggagtccaaggtaggaggatcgcttgaggccaggagttccagaccagcctgtgcaacatgccgaaaccccatctctacaaaaaatacaaaaaattagccaggtgtggtggcacacgcctgtaatcgcagctactcaggaagctgaggtgagaggatggcttgagcctagggaggttgaggttgcagtgagccatgattgagccactgcactctaacctgggtgacagagttgagactctgtctcaaaaacaaacacacaaacaaacaaaact

SEQ ID NO: 183002 - DNA, 511 bp, Homo sapiens
cagaacagcatgggaaagacttgccccatgattcagttacctcccactgagtccttcccacaacacgtgggaattcaagatgagatttgggtggggacacagccaaaccatatcaccatgatacctytaaaatatatgtgtatgtgtgtaactagtttctagtttttctttagtcaattatctctgtcacactgttactgttcttttttttttttttttttttttgagatggagtttcactcttgttgcccaggctggaggctggagtacaatggtgcgatctcagctcacagcaatcttcacctcccgggttcaagcgattctcctgcctgagcctcccaagtagctgtgattacaggcatgcaccaccacgcccggctaattttgtatttttagtagaaatagggtttctccgtgttggtcaggctggtctcgaactcctgacctcaggtgatctgcctgcttcgacctcccaaagtgctgggattacaggcatgagccaccccgccag

SEQ ID NO: 183003 - DNA, 595 bp, Homo sapiens
tcaaaaagtcccaaatgatccttggatgtatcatgcagaaagcatgatacatccatcacctccagaccattacaagcattattctccttgcctggggtgatggaaaataccaaatctacatctctggctcagacctctagctgaactctagacccacatatccaactacctatcagacrgctgtactcgttatcttcctttctccatcaaacatgacaaagggtgaggagaattgctattttatatatgatggttatggaaagtctccctcactaagtgacatttgaggtgagtctcaaagtgagggagcaagccatccagctatatggggaaggcttctcccacagagaggaaacagtaaatgcaaatccctgaggccagaatgtacttgatgtgttctaggaggagcaaagagatcagcacgcctatgcctagagtgggaagggtgagggaagattagtagtaaatgaaaccagagaggtatcagagggttacatcacgtggagtcttgcagaccatgttaaatattttgcattttactcagggtgagctgagaagatattgtagggttttgtgcagaggaatgacagaatat

SEQ ID NO: 183004 - DNA, 578 bp, Homo sapiens
atgcttcattgtttttattctttttttattttggtttctctgactgtgcattttcaaatagcctgtcttcaagctcactactaattctttcttctgcctgatcaattctgttatggaaagactctggtacattcttcagtatgcctactgcatttttcagctccagaatttcttcttgattctttaaaattatttcaatatctgtgttaagtttatctgatataattctgaattccttctctgtgttatctcatatttatttgagagtcctcaaaacagcaattttgaattatctgtctgaaaagtcagatatctctgtttctccaggattggtccctagtgccttatttagctcatttagtgrggccatgttttcctggattgttttgatacttgtagatgtttgtctgtgtctgggcattgaagagttgggtacttattgtagtcttcacaatctgagcttctttatacccaacctttttgggaaggctttccagatattggtaagacttgggggttgtgatctaagctgtatccactttagggggcagcagtaacactgtggttcttgcagactt

SEQ ID NO: 183005 - DNA, 545 bp, Homo sapiens
atgagtctgcaaaagtgaaagcattattggacttggggtccaaatccctttgaatacctggaaagtcttcctaagaaggacagacagaaacaagcccwtattttgaagactacaatgaatgcctaacacttcaacactcagacactgaagaacatctacaagcatcaacaccatccaggaaaagaaaacataatctcatcaaatgaagtaaataaggcatcagggatcaatcctggagaaacagatatctggcctttcagacagagaattcaaaatagctgttttaaggaaactcaaagaaattcaaaaaaacataaagaagaacttcagaattctatcagataaatttaacacaaagatttaaaaacttaaaaagaatcaagcaaaaattctagagttaaaaatgcaactgacatgctgaagaatgcatcagagtctcttcatagcagaattgatgaagcagaagaaagaattagtgagcttgaagacaggctatttgaaaatacaaagtcagaggagacaaaataaaaaagaataaaaaaatg

SEQ ID NO: 183006 - DNA, 445 bp, Homo sapiens
cataatttaaaacttcctcacaaaaacaatccccagttcctgatggcatcactggtgarttcctcaatgaaagggaaaaaataacaccaacattacagatttttttttaaatcttagggacagagtctcactatgttgcccaggctggagtcagtggctattcacagtcacgttccagttatcctcccacctcagcctcttgagtagatgggcctagaggatacagaaacttttaagagaacaaaaataaagggaactcctgagctcaagcacttctcccacctcggcctcccaaagtgctgggattacaggcatgaaccactgtgtcccgcttagtgtgctgtttttaaaaatgacttttgggctcgtgttcatgtgactgattagcctgtagttttactttttgtaattttttagactacttttggtatcaagtttattgtaa

SEQ ID NO: 183007 - DNA, 445 bp, Homo sapiens
cataatttaaaacttcctcacaaaaacaatccccagttcctgatggcatcactggtgaattcytcaatgaaagggaaaaaataacaccaacattacagatttttttttaaatcttagggacagagtctcactatgttgcccaggctggagtcagtggctattcacagtcacgttccagttatcctcccacctcagcctcttgagtagatgggcctagaggatacagaaacttttaagagaacaaaaataaagggaactcctgagctcaagcacttctcccacctcggcctcccaaagtgctgggattacaggcatgaaccactgtgtcccgcttagtgtgctgtttttaaaaatgacttttgggctcgtgttcatgtgactgattagcctgtagttttactttttgtaattttttagactacttttggtatcaagtttattgtaa

SEQ ID NO: 183008 - DNA, 445 bp, Homo sapiens
cataatttaaaacttcctcacaaaaacaatccccagttcctgatggcatcactggtgaattcctcaatgaaagggaaaaaataacaccaacattacagatttttttttaaatcttagggacagagtctcactatgttgcccaggctggagtcagtggctattcacagtcacgttccagttatcctcccacctcagcctcttgagtagatgggcctagaggatacagaaacttttaagagaacaaaaataaagggaactcctgagctcaagcacttctcccacctcggcctcccaaagtgctgggattacaggcatgaaccactgygtcccgcttagtgtgctgtttttaaaaatgacttttgggctcgtgttcatgtgactgattagcctgtagttttactttttgtaattttttagactacttttggtatcaagtttattgtaa

SEQ ID NO: 183009 - DNA, 411 bp, Homo sapiens
tgtgacttgtttctaactgacataatattgcaaatgtgatgggttgttactcctgtgatatgtgtgtgtgtgtgtgtgcacacagaagaaaggagagagaagaggagaggaggaggagagagacatacattaggatatgagatagacatattgctggcatgcacacaagattctccttgctgatttgatgaagtgtgtgaccatattgaggaagcccaacagcaggtggtgtctaggacctgagggtggcctccagccaatacccaataaaaaacatagctacacaatcatacagacataagraaatgaattttgtcaacaacctcaatgagcttgaacctagctcagctgacaccttgcctgcaaccttgtgaaaccctatgcagtgaacccagttgagttgtgaccaaa

SEQ ID NO: 183010 - DNA, 414 bp, Homo sapiens
actggaattcagtggattggagtggagtacagtggaatggaatggaatggaatggtgaaatgaaaagtgggctgagattgtgycaatgcactccagcctgggtgacagagtgagatcctgtcaaaagaaaggaatggaatctaatggagtggaatggaatggagtggagtagagtgcattggagaggaaaggagtggaatggaatggaaaggagtggagtggaatggaatggagtggagtggaatggattgcagtggagtggagtggagcggaatggaactgaatggattggaattgaatggaatggtgaaacgaaatgtcagctgagattgtgccactgctctccaggctgggtgatggagtgagatactctcaaaagaaaggaaaggaatggaatgcagtggaatggaatgg

SEQ ID NO: 183011 - DNA, 414 bp, Homo sapiens
actggaattcagtggattggagtggagtacagtggaatggaatggaatggaatggtgaaatgaaaagtgggctgagattgtgccaatgcactccagcctgggtgacagagtgagatcctgtcaaaagaaaggaatggaatctaatggagtggaatggaatggagtggagtagagtgcattggagaggaaaggagtggaatggaatggaaaggagtggagtggaatggaatggagtggagtggaatggattgcagtggagtggagtggagcggaatggaactgartggattggaattgaatggaatggtgaaacgaaatgtcagctgagattgtgccactgctctccaggctgggtgatggagtgagatactctcaaaagaaaggaaaggaatggaatgcagtggaatggaatgg

SEQ ID NO: 183012 - DNA, 414 bp, Homo sapiens
actggaattcagtggattggagtggagtacagtggaatggaatggaatggaatggtgaaatgaaaagtgggctgagattgtgccaatgcactccagcctgggtgacagagtgagatcctgtcaaaagaaaggaatggaatctaatggagtggaatggaatggagtggagtagagtgcattggagaggaaaggagtggaatggaatggaaaggagtggagtggaatggaatggagtggagtggaatggattgcagtggagtggagtggagcggaatggaactgaatggattggaattgaatggaatggtgaaaygaaatgtcagctgagattgtgccactgctctccaggctgggtgatggagtgagatactctcaaaagaaaggaaaggaatggaatgcagtggaatggaatgg

SEQ ID NO: 183013 - DNA, 348 bp, Homo sapiens
tgagcatgatggcatgagcctgtagtcccagctactcaggaggctgaggtgggagaatcccttgagccagggaagtggaggttgctgtgagccaggatcatacccttgcattccagtctgggtgatggagggagatcctatctcaaaagtctgaaggagtgtgatctaaacaatgtagtgtttccactgaagcacagatgttttccctgtgatttgtagtgattggcattttyaaactgcagattgctgtctatattaacttgacagtttgtaataactgcttgagattagcagtttgtctttcttcagttaattgtcatatttagctcctctgtgtaatatgagaaa

SEQ ID NO: 183014 - DNA, 348 bp, Homo sapiens
tgagcatgatggcatgagcctgtagtcccagctactcaggaggctgaggtgggagaatcccttgagccagggaagtggaggttgctgtgagccaggatcatacccttgcattccagtctgggtgatggagggagatcctatctcaaaagtctgaaggagtgtgatctaaacaatgtagtgtttccactgaagcacagatgttttccctgtgatttgtagtgattggcatttttaaactgcagattgctgtctatattaacttgacagtttgtaataactgcttgagattagcagtttgtctttcttcagttaattgtcatatttarctcctctgtgtaatatgagaaa

SEQ ID NO: 183015 - DNA, 574 bp, Homo sapiens
tgtcagtattcccctcacataggtttatgaagaagtcattttaaaaagagaacccctgtaattgatcarggaccccatctgccttctctgtgggcctaggataaattcttttgattgtttatgtctatttggtgtaaaaagatctgtagttaaaatataccattgcattatccataatagccaaaaggtggaagcaagccaagagtctatctgcaaatgaataaaaaaatatggtatatatacactatatgcagtagaatactattcaggcttacagagaaaggcaattctgacacatgctacaccatggatgaacatggaagacattatgccacatgaaataaaccagtcaccaaagaacaagtattttatgtgatcagcttcttgataatctccaaaatagccaccttagcatattgaatgtttgaagctgaaggaaactcagaaatgataggaaggacactctgaccttctcaccctcttctctgatgcaggtcacaaggcccttgggtgagaggtgccgtccctgtccctggaggaaggagcatctttgtctcttaagataacgctgaga

SEQ ID NO: 183016 - DNA, 574 bp, Homo sapiens
tgtcagtattcccctcacataggtttatgaagaagtcattttaaaaagagaacccctgtaattgatcaaggaccccatctgccttctctgtgggcctaggataaattcttttgattgtttaygtctatttggtgtaaaaagatctgtagttaaaatataccattgcattatccataatagccaaaaggtggaagcaagccaagagtctatctgcaaatgaataaaaaaatatggtatatatacactatatgcagtagaatactattcaggcttacagagaaaggcaattctgacacatgctacaccatggatgaacatggaagacattatgccacatgaaataaaccagtcaccaaagaacaagtattttatgtgatcagcttcttgataatctccaaaatagccaccttagcatattgaatgtttgaagctgaaggaaactcagaaatgataggaaggacactctgaccttctcaccctcttctctgatgcaggtcacaaggcccttgggtgagaggtgccgtccctgtccctggaggaaggagcatctttgtctcttaagataacgctgaga

SEQ ID NO: 183017 - DNA, 574 bp, Homo sapiens
tgtcagtattcccctcacataggtttatgaagaagtcattttaaaaagagaacccctgtaattgatcaaggaccccatctgccttctctgtgggcctaggataaattcttttgattgtttatgtctatttggtgtaaaaagatctgtarttaaaatataccattgcattatccataatagccaaaaggtggaagcaagccaagagtctatctgcaaatgaataaaaaaatatggtatatatacactatatgcagtagaatactattcaggcttacagagaaaggcaattctgacacatgctacaccatggatgaacatggaagacattatgccacatgaaataaaccagtcaccaaagaacaagtattttatgtgatcagcttcttgataatctccaaaatagccaccttagcatattgaatgtttgaagctgaaggaaactcagaaatgataggaaggacactctgaccttctcaccctcttctctgatgcaggtcacaaggcccttgggtgagaggtgccgtccctgtccctggaggaaggagcatctttgtctcttaagataacgctgaga

SEQ ID NO: 183018 - DNA, 574 bp, Homo sapiens
tgtcagtattcccctcacataggtttatgaagaagtcattttaaaaagagaacccctgtaattgatcaaggaccccatctgccttctctgtgggcctaggataaattcttttgattgtttatgtctatttggtgtaaaaagatctgtagttaaaatataccattgcrttatccataatagccaaaaggtggaagcaagccaagagtctatctgcaaatgaataaaaaaatatggtatatatacactatatgcagtagaatactattcaggcttacagagaaaggcaattctgacacatgctacaccatggatgaacatggaagacattatgccacatgaaataaaccagtcaccaaagaacaagtattttatgtgatcagcttcttgataatctccaaaatagccaccttagcatattgaatgtttgaagctgaaggaaactcagaaatgataggaaggacactctgaccttctcaccctcttctctgatgcaggtcacaaggcccttgggtgagaggtgccgtccctgtccctggaggaaggagcatctttgtctcttaagataacgctgaga

SEQ ID NO: 183019 - DNA, 472 bp, Homo sapiens
tatatgattccacttatatgagatatctagatcagtaaaattcatagaaacaaagtaggatagtcaggctcagtggctcaytcctgtaatcccaacatcttggaaggataaggcaggaggatcacttcagcccaagagttcaagaccaggctagacaacatagggagacctcatctctactttaaaaagaaaagtcaggtgtggtggaacatacctgtagtcccaactactggggaggctgaggtgggttggatcactcgaatctgggagttcaagctttcagtgaactatgatcatgccactgtactccaacctgggcgacagagagaccctgtcagaaaaaagaaaaaaaaaaaggtagtttggtggttgccagaggctggggtagagaggcatgagggcttattgcttactgggtacagagtttcactcgggatgatgaaaatgttctggagatggatggtggtgatgg

SEQ ID NO: 183020 - DNA, 472 bp, Homo sapiens
tatatgattccacttatatgagatatctagatcagtaaaattcatagaaacaaagtaggatagtcaggctcagtggctcattcctgtaatcccaacatcttggaaggataaggcaggaggatcacktcagcccaagagttcaagaccaggctagacaacatagggagacctcatctctactttaaaaagaaaagtcaggtgtggtggaacatacctgtagtcccaactactggggaggctgaggtgggttggatcactcgaatctgggagttcaagctttcagtgaactatgatcatgccactgtactccaacctgggcgacagagagaccctgtcagaaaaaagaaaaaaaaaaaggtagtttggtggttgccagaggctggggtagagaggcatgagggcttattgcttactgggtacagagtttcactcgggatgatgaaaatgttctggagatggatggtggtgatgg

SEQ ID NO: 183021 - DNA, 530 bp, Homo sapiens
cccttgccagtgttttccagctggcagtggttctgagcctttctgggacagagctttcaggggaagtgatgggtcaccatctttgctgtttcatagccttagctgttgttgccttcagggtctaaggagtctgaggtgactgaggactggagcagtcccccggcacagcacagcagctccacaaagaagtggccagactgctttttcacccaggtcttggatctcatttcttttcattgtgtggagtcacccgactgaggtctacaaccacccctgtcagtgtgtttaggtcagtaacaggtccatacytctctgggatggaattcccagtgggaggggcaggctgccatctttgctgtattgcagctttcactgttggtaccttcaggtgctggaaaatctggggtggctagggactgcagcagacccctagcacactgcagcagccctactcatacataggtccctgatcctgtatctcctcactgggcaggtcctcccaacctgggtcttcagctacccaccgctga

SEQ ID NO: 183022 - DNA, 530 bp, Homo sapiens
cccttgccagtgttttccagctggcagtggttctgagcctttctgggacagagctttcaggggaagtgatgggtcaccatctttgctgtttcatagccttagctgttgttgccttcagggtctaaggagtctgaggtgactgaggactggagcagtcccccggcacagcacagcagctccacaaagaagtggccagactgctttttcacccaggtcttggatctcatttcttttcattgtgtggagtcacccgactgaggtctacaaccacccctgtcagtgtgtttaggtcagtaacaggtccatacctctctgggatggaattcccagtgggaggggcaggctgccatctttgctgtattgcagctttcactgttggtaccttcaggtgctggaaaatctggggtggctagggactgsagcagacccctagcacactgcagcagccctactcatacataggtccctgatcctgtatctcctcactgggcaggtcctcccaacctgggtcttcagctacccaccgctga

SEQ ID NO: 183023 - DNA, 515 bp, Homo sapiens
gaattccgagggcggtcatggcctgctcccacccatgctgggtgaagccttaggtctgcatgtctgggagcagtgcattctagccccacctaggccagtgggattggccatgtggccataatccaggtgatctgaatttcactatgttttaatctgtaatatggaatgatttctatttgccaagcttagtacatagggttagggtgaggagtgacaggatctaaacacactttgagaaaggaaagtgttatgcttctccaccctgccagagtcagaggggtgatcrgggctgctccgccacaagctgaaggtttcactgtgctataaaggaaacttccatccaaaggaatcgttctgctagcaaaacacagacatgcacacagctgaaacaacttccacacacagtgtatgatttcctattctgcgcacagagagaaaggacagatgtgttagcagaggattactgttggaataattatgttagctaagacacaaatgggctcccatgccagctc

SEQ ID NO: 183024 - DNA, 514 bp, Homo sapiens
ggaagtgctagctggagcaactaggcaagaaaaagaaataaaaggcatccaaatataaaaggaagaagtgaaattgtctgtttgctgatgacatgatcttatatatggaaaaccttaaagaatccaccaaaaaagttgttagaactgataaacaaattcagtaaagttgcaggatacaaaattacatacaaaaaatcagtagcatgtctgtacactaacagcaaactacccaaaaagcaaattaagaaacaatccaatttacaacagcattaaaaaatacttaggaataaatttaaccaaggaaatgaaagatctgtrtacataaaagtataaaacattgatgaaagaaatagaagaaaacacaaaaaaatggaaagctgttctgagttcatgaattagaaggattaatattgttaaaatgtccatgttactcaaagacatctatagatttaatgaaattcttatcaaaattcaaaatccaattacatttttcacagaaattgacatcaaaaaa

SEQ ID NO: 183025 - DNA, 530 bp, Homo sapiens
acagtccgtgcacagaaaggctgcagggcaggggtgtgctctgcacgtggggattgcaggactcacagcggctccagcaaagtgctacaggccagagagggctggaagccaygggaagcacttcagatttggtgagttggaaggcatcagtaggtttgagaggaggagtgacatgtctgatctgtgtttttaaaggttaaagccaaatgatcctcttgaaagagtaaaccagaatattatcaagtctatgaaggcaggggtgatatcaaaaacaccgaacaactttccagacaagggctctgccagtctcagctgacactggtccttgcatagaagccaggtgccagagagcccacctgctggggcaagggccagttctggagttcctggatctgggtgaggtatctaagatccaggaggtctcagggaatgcctgtttgcccatctgtatggaagtagttaatattttaacaaaagaatgggtaaacacacgcacatataaagataaaatgaatatacataagagtcag

SEQ ID NO: 183026 - DNA, 546 bp, Homo sapiens
gggtttctgcgagtagaaacatgtaagctgcagagagatcatttttgtaaactccatgcagatagatgcacagagaaagagctggaagaacccacactgcatggttrgcactgggaaggaagaacaggctttcacgttttacctaaggtatttgttcactgattatgttttaagggtatatgctcattttgaaataaaaaaggacttttcaaaagatgcacccagtaattatatgcattggggaggtgacttagagcaggaatactgctgaataatttggttcaaacatgaaacctacacaagacaaagtcacttgacagaggatgactcttcagatgttcagggaaactcacgcactcactcacactcgatgcatcggccgggctccctgatgcccccaacgcctctcctatgtccaaggaaatacttctgcagagcacgttagagtttccaatgcatgtgtgttatctcagagacaaagggcagaaaggggaaaaaacagaaagtacagtacggtaagtctcaaatttcagcatcctgttgtct

SEQ ID NO: 183027 - DNA, 461 bp, Homo sapiens
atgccctatgtaaatgaagagggtgaagtaaagtcacttacttagtgtacaccctatgtaaatggagaggatgtttcatagatgaagtgtttccatttgatttagttctaggaagtcagygtgaattagcctatgtccctgcctccagaccctattctgtctcatttccccccagaaagatgtgatccccataaatctttatggaagcagagggaccaatggtctatcttctgtaactgcttcatgctggcttggggcacagtccctacctattgggaatcatggaactctcgcccctctctgtctagtggaggcagggtagctccttgatggccaggggtagtggctggaacctttgttgcatgatcatctgaagcttgatggtttctaggcgagaggaaatgaatttggttaaaagatttaatgggaacttcagggagtggatacctatgctgccagga

SEQ ID NO: 183028 - DNA, 461 bp, Homo sapiens
atgccctatgtaaatgaagagggtgaagtaaagtcacttacttagtgtacaccctatgtaaatggagaggatgtttcatagatgaagtgtttccatttgatttagttctaggaagtcagcgtgaattagcctatgtccctgcctccagaccctattctgtctcatttccccccagaaagatgtgatccccataaatctttatggaagcagagggaccaatggtctatcttctgtaactgcttcatgctggcttggggcacagtccctacctattgggaatcatggaactctcgcccctctctgtctagtggaggcagggtagctccttgatggccaggrgtagtggctggaacctttgttgcatgatcatctgaagcttgatggtttctaggcgagaggaaatgaatttggttaaaagatttaatgggaacttcagggagtggatacctatgctgccagga

SEQ ID NO: 183029 - DNA, 510 bp, Homo sapiens
aatgttctctttaacttgggatatgggttaagaggagtgaaccaatgttctgtttctgactgatgatgaggcaatgtgtgtaccattaaaatttctcacctgcattggaccttcatcttttatctgtcaaagtataaggttattcatatacgaggctggctgcaaaatccttcacaaataaaagtgtaccccataagtgcatacaacagacccccttttcatttctattgttcttggasgcataaacaaaaaatattcaaagataagactctcataatagtagaagtcttgatctgtgatcttgggaaaagctgttcacatcaaggatgccatgttcttctggggagcgacttccttggttagctttaccttaagggttcctatgggtgtacagttccaagagtgtggagggaccctcctcagttgtgagattatgaacccaaagttcagggttccaaagttttgctgcaatgtggatggcaaggacaatctttctccaatgttctcaga

SEQ ID NO: 183030 - DNA, 365 bp, Homo sapiens
ataaatacacagaagataaaggattcattccctgagccaggaattgaaccctaaacccaggccaccattgtgaaaagagaaartacagccacatagttacaaggtcaagctcccaaggacatgactgaccaattggctgggccatcttgaatagtgggcttttggggccctacacacgctttttatcctagggtacccctctttatgacagaaaaatacaggaagacacacagagcacaccagattcactacagcttaagaccagcctcagaattccttttgtattaattaaaactttatagaggagataaacagtgacatttacctttcatttaaccatttggcacaaattgagagaggccagt

SEQ ID NO: 183031 - DNA, 621 bp, Homo sapiens
cagccatgaatccagaggtcataagatttgtaacttccccaattactcctgtaaataacatcatcattgtagagcctgaaactggccttttgagatgtgtttacagacttttgcatttctgactgctggacgactccaccaggaccagcaactcctgtggtccccacccagaagcggactcagtgcatgaggaccattttccacacccccatgatcatatccccaaccagtcagcaatacccattctctagccccccgcccaccaaactatatttaaaaaacactagcctccaaawtttcagggtggcttatttgagtaataataattctccattctcctgttgagccagctctgtgtgtattaactccctctctactacaatttccctgtgttgggaaatgggccctctctgggcagtgggcaagaagaacctgttgtgtggttacaacatccaccacttcattaccaaacactaatgaaacagaaaggcctcattttagagggactgacccttgagtgagcagatccatctgccggagattttccaaggctcctggcctgctccccacgcccagtagccatcaagtcaactcttgaaggcagggtggatgtctgaattc

SEQ ID NO: 183032 - DNA, 574 bp, Homo sapiens
tctctgagcagctgttaaccacaccatttctcacttgcctccctatctagcaggagactatcatgagagtttcttattgcctcttggattctgatgaggtgtgagtcattctgccctactcctttggattacagctgcaggctgtaaaactttttagctgcatttatcattttttttttgtggtggcaacattcacaacctactctgttagtaatcttgaactatacaatacattggtatttgctataagtcaccctactgtctaatagaacacccagcttattcttcctgcctaactgtaactgactaccccaatttgatcattatactatttataygtgcaccaaaacatcacattgtagcccataaatatatacaattatcatgtgccaattataaataaaaattaattttaaaaaactgtggctgtagtacagcactgacttcttaggaacaggatgtcctctcacgcatgttgcagtcatttggccccttttattttgcccaatgcaggggacaatttgctactcattaaaaaatatgtatgtaagtaataaactctctgaatcggata

SEQ ID NO: 183033 - DNA, 613 bp, Homo sapiens
ccatctccttcatacacctgttatgagttcaataacctgatgaagatctgcacagggacagagagaatccagcaatcactgtgctttcttagagtaacagtgtgccaggaaccatcttargcactgggtcagtgaccagtgacactgatacaattgggtagtgatcattacaaccagaagatacaatgggtttctcaccagggcctttttctcctcctttcctcctctatctcctaacaacaaatctgtaaaggactaagaagaggcctgaattcacacaggcattcctgatcgtgcagtaaccacagggctatgggcttgcacctgtgttatcactgcagcttgcagcaatcctgcgggttggcataattatccccattttacagagggggacactgggctcagagagtccttacttgtctcatcctcccacgtcccacctttacatagaaagtagctccaggacaccaggagcaggacaccccactcactggggccaggagggtcctagctctctccctcatgaaacagtgagagcaacttgtttcaaactgggagtgaggggacttagatctgggatcccttcgtctccccacatcccaaggcacttcag

SEQ ID NO: 183034 - DNA, 449 bp, Homo sapiens
ctctgattgaaagttttcccacattctttacattcatatggtttctctcctgtrtgagttacctgatgtccgatgaggtctgagctgccctggaaagccctaccacactgattacaccaataagctttctcttcttggtgaattttctgctctcccctaagctcctcatccttgctgaaggttttctcacgttcttcaagtttctctccagcatgcagtctctgatgtttgaggaaagctgtgtgccacatgaagagtttcccacattccttacattcatagggtttctcaccactatgaattctccgacgttgaataaggagtgaacgccgcctgaaggctttttcacattcagtgcactgatagggcttctctccagtgtggattttctggtgtgtgacaaggtgggacctctggctaaagactttcccacattcactacattcatg

SEQ ID NO: 183035 - DNA, 565 bp, Homo sapiens
agatttcccacatttgttgcatacataaggtttttctccactgtgaattctatgatgtctcagaaggtctgagctctgattgaaagttttcccacattctttacattcatatggtttctctcctgtatgagttacctgatgtccgatgaggtctgagctgccctggaaagccctaccacactgattacaccaataagctttctcttcttggtgaattttctgctctcccctaagctcctcatccttgctgaaggttttctcacrttcttcaagtttctctccagcatgcagtctctgatgtttgaggaaagctgtgtgccacatgaagagtttcccacattccttacattcatagggtttctcaccactatgaattctccgacgttgaataaggagtgaacgccgcctgaaggctttttcacattcagtgcactgatagggcttctctccagtgtggattttctggtgtgtgacaaggtgggacctctggctaaagactttcccacattcactacattcatgaggtttctctccagtatgaacacgatggtgtttaataagatct

SEQ ID NO: 183036 - DNA, 594 bp, Homo sapiens
aaggtccatcctcattggctaagtgatttgcattatgtaaacatagaaaaatttcattactgccttgtaggaacttaaattagaagaaaaaccaaactcacagaatgcagcggcggcagcagtagcagaataatagtattctgaaaaagggttggacttactgccacaaaattctgattatagacttggcagtcactcattctctgcgtccagccttcagcttttggaggctgctttcttcatttgcaaaatggagactagaaaacaacaaaacaagacaaaacaaacaacaaacaaaaaaccactaatgcatgaggtctgaaaaacaaaggtgggattgctgagagtgaagggaagaataatgagccaaggtaaataaaatgagaggttaggctaatgtatacacctcagattccacccgctttactctcttccatagtccacaactatatgctggagaatgaattgacactgrtcactgaaggaaaagcgtagttgcatgacggaaaggatgaccacaatcatctcacctctccaattcaataacgatcttaaggtgctatcatatgcaatgagacaagaaaaacaaacaag

SEQ ID NO: 183037 - DNA, 600 bp, Homo sapiens
gggcaaccctgtctctaaaacaaaatttaaaatttaaaaattagccaggaagctgggtgcggtggctcacgcctctaatcccagcactttgggaggccagggcgggtggatcacctgaggtcaggcattcaagaccagcctggccaacatggtgaaaccccatctctactagaaatacaaaaaactagcctggcatggaggtgggygcctgtaatcgcagctacttgggaggctgaggcaggagaaccgcttgaacccagagggcggaggttgcagtgagctgagattgcgccattgcactccagcctgggcaacagaagtgaaactccatctcaaaaaaaattagccaggcatggtggtacatgcttgtagtcccagctacttgggaggctgaggtgggagaattccttgagcccaggagtttgaggttgcagtgagctatgattgtgccactctgcatgccaagtctgggtgacagtgaaactgtctcaaaagaaaaaaaagaaaagaccgtaaaaagaggaaaaaagggtcatataataataaaggggtcaattcagcaagaggacaattataaatatctatgcacctaacactggt

SEQ ID NO: 183038 - DNA, 578 bp, Homo sapiens
atcccagcacataacaggtggttgttatgtgcrttaaagtttgagaagcactgctgttttataatatcacctcccattactcatcaagacctatttaaacttccccatttaggaaaaaaatcactctctagggaagcttttatagtggtggtgaacagctctcacagtaatgaagtcttttcttacattaattaaagatcagcttctctgttacttccagctaatttgtcaagattcttccccttaagtcattcagaataaattcagtttttctcttttagcaaaatattttagataattgcaaatagaacctttgtcttcttactcacctccagttacttcaatcacttttctaaggtcataatatttactatccctcaacatgttggtgctctattctaaaatctgccttattttttttcccatgaaagtatgacttccagaattgaatgcaatattctttgtacagtctgaaatttgcagaatttaaaatgattgtctcctcacttactctccatatttgacctctattaatatagccaaatttattttctgtagagaaggggggatagtatctt

SEQ ID NO: 183039 - DNA, 588 bp, Homo sapiens
tgcattttcataacatcccagcacataacaggtggttgttatgtgcattaaagtttgagaagcactgctgttttataatatcacctcccattactcatcaagacctatttaaacttccccatttaggaaaaaaatcactctctagggaagcttttatagtggtggtgaacagctctcacagtaatgaagtcttttcttacattaattaaagatcagcttctctgttacttccagctaatttgtcaagattcttccccttaagtcattcagaataaattcagtttttctcttttagcaaaatattttagataattgcaaatagaacctttgtcttcttactcacctccagttacttcaatcacttttctaaggtcataatatttactatccctcaacatgttggtgctctattctaaaatctgccttattttttttcccatgaaagtatgacttccagaattgaatgcaatattctwtgtacagtctgaaatttgcagaatttaaaatgattgtctcctcacttactctccatatttgacctctattaatatagccaaatttattttctgtagagaaggggggatagta

SEQ ID NO: 183040 - DNA, 588 bp, Homo sapiens
tgcattttcataacatcccagcacataacaggtggttgttatgtgcattaaagtttgagaagcactgctgttttataatatcacctcccattactcatcaagacctatttaaacttccccatttaggaaaaaaatcactctctagggaagcttttatagtggtggtgaacagctctcacagtaatgaagtcttttcttacattaattaaagatcagcttctctgttacttccagctaatttgtcaagattcttccccttaagtcattcagaataaattcagtttttctcttttagcaaaatattttagataattgcaaatagaacctttgtcttcttactcacctccagttacttcaatcacttttctaaggtcataatatttactatccctcaacatgttggtgctctattctaaaatctgccttattttttttcccatgaaagtatgacttccagaattgaatgcaatattctttgtayagtctgaaatttgcagaatttaaaatgattgtctcctcacttactctccatatttgacctctattaatatagccaaatttattttctgtagagaaggggggatagta

SEQ ID NO: 183041 - DNA, 555 bp, Homo sapiens
ttatagtggtggtgaacagctctcacagtaatgaagtcttttcttacattaattaaagatcagcttctctgttacttccagctaatttgtcaagattcttccccttaagtcattcagaataaattcagtttttctcttttagcaaaatattttagataattgcaaatagaacctttgtcttcttactcacctccagttacttcaatcacttttctaaggtcataatatttactatccctcaacatgttggtgctctattctaaaatctgccttattttttttcccatgaaagtatgacttccagaattgaatgcaatattctttgtacagtctgaaatttgcagaatttaaaatgattgtctcctcacttactctccatatttgacctctattaatatagccaaatttattttctgtagagaaggggggatagtatcttgtaaacttatactgagkttacaaatctctagaatcctagttattttctacttatgacaatgtgtcttcttctttattactcatgtcagattgattatttgtatcaggtgaagcatt

SEQ ID NO: 183042 - DNA, 567 bp, Homo sapiens
ttacatgaaaaggtttattagactaatgaattccatcaataagcagctaacaccacacatcagaagcaggaagaaaaataagcaattggtgagagtgggaaagatgtatcatttggttgctccatcaaaagaattggtaaatatgaactctttaaaatcttggaaaataattaaactgaatgtcattttcttttttctttttcttttctttttttttttttttttttttttgagacrgagtctcgctctttcgcccaggctggagtgcagtggcgctgtctcggctcactgcaagctctgcctcccaggttcactccattctcctgcctcagcctcctgagtagctgggactacaggcgcccgccaccacacccggctaattttttgtatttttagtagagacggcctttcaccgtgttagccaggatggtctcgatctcctgacctcgtgatccacctgtctgggcctcccaaagtgctgggattacaggcgtgagccaccgcgcctggcctgaatgtcattttcaaagtgattttaatcttaccttcaggtaacctgaacagagc

SEQ ID NO: 183043 - DNA, 567 bp, Homo sapiens
ttacatgaaaaggtttattagactaatgaattccatcaataagcagctaacaccacacatcagaagcaggaagaaaaataagcaattggtgagagtgggaaagatgtatcatttggttgctccatcaaaagaattggtaaatatgaactctttaaaatcttggaaaataattaaactgaatgtcattttcttttttctttttcttttctttttttttttttttttttttttgagacagagtctcgctctttcgcccaggctggagtgcagtggcgctgtctcggctcactgcaagctctgcctcccaggttcactccattctcctgcctcagcctccygagtagctgggactacaggcgcccgccaccacacccggctaattttttgtatttttagtagagacggcctttcaccgtgttagccaggatggtctcgatctcctgacctcgtgatccacctgtctgggcctcccaaagtgctgggattacaggcgtgagccaccgcgcctggcctgaatgtcattttcaaagtgattttaatcttaccttcaggtaacctgaacagagc

SEQ ID NO: 183044 - DNA, 567 bp, Homo sapiens
ttacatgaaaaggtttattagactaatgaattccatcaataagcagctaacaccacacatcagaagcaggaagaaaaataagcaattggtgagagtgggaaagatgtatcatttggttgctccatcaaaagaattggtaaatatgaactctttaaaatcttggaaaataattaaactgaatgtcattttcttttttctttttcttttctttttttttttttttttttttttgagacagagtctcgctctttcgcccaggctggagtgcagtggcgctgtctcggctcactgcaagctctgcctcccaggttcactccattctcctgcctcagcctcctgagtagctgggactacaggcgcccgccaccacacccggctaattttttgtatttttagtagagacggcctttcaccgtgttagccaggatggtctcgatctcctgacctcgtgatccacctgtctgggcctcccaaagtgctgggattacaggygtgagccaccgcgcctggcctgaatgtcattttcaaagtgattttaatcttaccttcaggtaacctgaacagagc

SEQ ID NO: 183045 - DNA, 623 bp, Homo sapiens
atattagaccattgattttgaaattattatagattttcaaaatggtttatgcatttaacaaatggggtcattaacatttaacgcaaaattaattgtccttggatgatcttgtgctatgaatgtcttttatactagattcccaatcaaaagtcattagaagaatgagattttggcattcctcattttggartttgttaactggttcagtgtttaaatttgtcataggtatggaatttccctataaatttcagcaatcttttaatgataacttatcagattagcagatcgtgttgagtttttaaaggaacatataaaaatgatctcccaatattcttgtaaagagatttatcttacaaccttctgatatataaacacaaggccaaaatgtaaatgctataattggttccacagattattttattaaaaatatattgaatagaaaaaatggataaggcctactatttgatagcacaacaaggtgactagtcaaaaataaccgtagattttaaaataactttaaggatgtagttggattgtttgtaacttaatggataaatgtttgaggttattgatgtcccatcctacatgatgtgcttatttcatatttcatgcctgtatcaaag

SEQ ID NO: 183046 - DNA, 623 bp, Homo sapiens
atattagaccattgattttgaaattattatagattttcaaaatggtttatgcatttaacaaatggggtcattaacatttaacgcaaaattaattgtccttggatgatcttgtgctatgaatgtcttttatactagattcccaatcaaaagtcattagaagaatgagattttggcattcctcattttggaatttgttaactggttcagtgtttaaatttgtcataggtatggaatttccctataaatttcagcaatcttttaatgataacttatcagattagcagatcrtgttgagtttttaaaggaacatataaaaatgatctcccaatattcttgtaaagagatttatcttacaaccttctgatatataaacacaaggccaaaatgtaaatgctataattggttccacagattattttattaaaaatatattgaatagaaaaaatggataaggcctactatttgatagcacaacaaggtgactagtcaaaaataaccgtagattttaaaataactttaaggatgtagttggattgtttgtaacttaatggataaatgtttgaggttattgatgtcccatcctacatgatgtgcttatttcatatttcatgcctgtatcaaag

SEQ ID NO: 183047 - DNA, 629 bp, Homo sapiens
aaaactttttgttatattcatgacaatacccataatacctactgcagagtctaccatgtagtaaatctgcagtaaatatttataaaattgattaaataaatgaaataaaatagtcaccatgcccaaatacttattatgatttattattattttattatttattactctctcaataatagaaaacaaactaatatatctccagttgtccacatattgtagtaaagacaaagtgttgttgtgtcttrgactccttctatttaacaaataccaacatgatctgccctatctttacatatatttgatgtatcactttcttcatgactaagtagaaatatacttacacttctcttcaatgacaggcaaatgatatgtgagtttatacatgtgttttctccagcaaggaattcataattttcatgagctcgtcaaagatttgaatatgagactctaaaaatgttttaatcactctcttacctcatgaaaacataattattttatcatagttttaagtatataactatttccaaaattgacaggatgctagcctaaatagttgaagtttaactgtttatatttttaaagcaagtaataatactttaaaaaattaaatatctactttgtacaagtac

SEQ ID NO: 183048 - DNA, 629 bp, Homo sapiens
aaaactttttgttatattcatgacaatacccataatacctactgcagagtctaccatgtagtaaatctgcagtaaatatttataaaattgattaaataaatgaaataaaatagtcaccatgcccaaatacttattatgatttattattattttattatttattactctctcaataatagaaaacaaactaatatatctccagttgtccacatattgtagtaaagacaaagtgttgttgtgtcttggacyccttctatttaacaaataccaacatgatctgccctatctttacatatatttgatgtatcactttcttcatgactaagtagaaatatacttacacttctcttcaatgacaggcaaatgatatgtgagtttatacatgtgttttctccagcaaggaattcataattttcatgagctcgtcaaagatttgaatatgagactctaaaaatgttttaatcactctcttacctcatgaaaacataattattttatcatagttttaagtatataactatttccaaaattgacaggatgctagcctaaatagttgaagtttaactgtttatatttttaaagcaagtaataatactttaaaaaattaaatatctactttgtacaagtac

SEQ ID NO: 183049 - DNA, 629 bp, Homo sapiens
aaaactttttgttatattcatgacaatacccataatacctactgcagagtctaccatgtagtaaatctgcagtaaatatttataaaattgattaaataaatgaaataaaatagtcaccatgcccaaatacttattatgatttattattattttattatttattactctctcaataatagaaaacaaactaatatatctccagttgtccacatattgtagtaaagacaaagtgttgttgtgtcttggactccttctatttaacaaataccaacatgatctgccctatctttacatatatttgatgtatcactttcttcatgactaagtagaaatatacttacacttctcttcaatgacaggcaaatgatatgtgagtttatacatgygttttctccagcaaggaattcataattttcatgagctcgtcaaagatttgaatatgagactctaaaaatgttttaatcactctcttacctcatgaaaacataattattttatcatagttttaagtatataactatttccaaaattgacaggatgctagcctaaatagttgaagtttaactgtttatatttttaaagcaagtaataatactttaaaaaattaaatatctactttgtacaagtac

SEQ ID NO: 183050 - DNA, 579 bp, Homo sapiens
tctggttcataagttatcttgaatgtactgatgatgtcaggtttcacaccctagtttttaactacttactttgggtttctctaaatttaatgtctgttcacattttcttaaccaatgaccatgcagtccataaagaatggttttggctaacaagtgcagtaatagaaactgtaaataagaatatctgttatttgggtattttattcacttgttttgaatctcacgtgtacaaacttggactaagtatgattttatcttcatgacacactctaagcattgatccttcctggtccacattattcatttattgaacgggaaaagwaaaactcagtctgaatcaacttgattataatgaaactgattattatcatgagacactacagacaaaaactgaagcacaacaatcttttgtttttaacccttatctttttacctgaagggagtaaacatacacacatttgactggatcattttgatataacattggcacaatgatgtttcaatcatcaatactacggtaaataaatcttaaaaataaacatctttctacttaactataacaccatttgttttacaacc

SEQ ID NO: 183051 - DNA, 433 bp, Homo sapiens
tcatctcttgtaggtagcagactgttgggtcttatttttttaattcacttttccagtttacatcttttaagtacagcatttaggcaatttatgttcaaggttaacrttgacatgtgaggtttgttcttgtcatagttttgttagctagtttccttggagtctgaattgtgtaattgccttataggatgtgtgagctctctacctacatatgcttttatgatggacaatattgtcttttcatttcatgtttagaactcttctgagcatttcttatatgaccagccaaacagtgacacattcccttagaatttgcttgtatgacaaaaactttatttctccttcgtttaagaagcttagtttggcaggtatgaaaggaaaatatcttgggctcccaaaatcactaagctaaagggaaaagtcaagctgggaactg

SEQ ID NO: 183052 - DNA, 433 bp, Homo sapiens
tcatctcttgtaggtagcagactgttgggtcttatttttttaattcacttttccagtttacatcttttaagtacagcatttaggcaatttatgttcaaggttaacattgacatgtgaggtttgttcttgtcatagttttgttagctagtttccttggagtctgaattgtgtaattgccttataggatgtgtgagctctctacctacatatgcttttatgatggacaatattgtcytttcatttcatgtttagaactcttctgagcatttcttatatgaccagccaaacagtgacacattcccttagaatttgcttgtatgacaaaaactttatttctccttcgtttaagaagcttagtttggcaggtatgaaaggaaaatatcttgggctcccaaaatcactaagctaaagggaaaagtcaagctgggaactg

SEQ ID NO: 183053 - DNA, 588 bp, Homo sapiens
ttattgtgctggttccttcttatctgtagaagctgtcacttattattttttcattactttaatttgagtggaatttttttttcctttccttcctgaaagtgtccctgtcatgcaagttaggtgtcatcctttggctttgyacctattggttttagggatcaaaggtattatatgaatttcttggcatgaagagccttattgtaatggttgtctcaaatgctagttgtttgtcctttgtagtaaaggcatgctggacacatggtcaggctcactgacttctacggagatggggaggtggacatcttggaaggcttattccccagtgctgtgcattgctgtcagcaggaattatactggattttttagttcaccttaaaggccagtagatggttgttgcagattagagccaggtgagcactgtacactgatatcaccagatgttgtaataggaaatgcaatttgatcttcagatcagtaggtgacacttgcaagcaagaggcaattgcatacaaaatagcagtgaaattttttacttggcctttgttgattggagaaggtaccagggtgtcccttgggacatggtaacct

SEQ ID NO: 183054 - DNA, 588 bp, Homo sapiens
ttattgtgctggttccttcttatctgtagaagctgtcacttattattttttcattactttaatttgagtggaatttttttttcctttccttcctgaaagtgtccctgtcatgcaagttaggtgtcatcctttggctttgtacmtattggttttagggatcaaaggtattatatgaatttcttggcatgaagagccttattgtaatggttgtctcaaatgctagttgtttgtcctttgtagtaaaggcatgctggacacatggtcaggctcactgacttctacggagatggggaggtggacatcttggaaggcttattccccagtgctgtgcattgctgtcagcaggaattatactggattttttagttcaccttaaaggccagtagatggttgttgcagattagagccaggtgagcactgtacactgatatcaccagatgttgtaataggaaatgcaatttgatcttcagatcagtaggtgacacttgcaagcaagaggcaattgcatacaaaatagcagtgaaattttttacttggcctttgttgattggagaaggtaccagggtgtcccttgggacatggtaacct

SEQ ID NO: 183055 - DNA, 588 bp, Homo sapiens
ttattgtgctggttccttcttatctgtagaagctgtcacttattattttttcattactttaatttgagtggaatttttttttcctttccttcctgaaagtgtccctgtcatgcaagttaggtgtcatcctttggctttgtacctattggttttagggatcaaaggtattatatgaatttcttggcakgaagagccttattgtaatggttgtctcaaatgctagttgtttgtcctttgtagtaaaggcatgctggacacatggtcaggctcactgacttctacggagatggggaggtggacatcttggaaggcttattccccagtgctgtgcattgctgtcagcaggaattatactggattttttagttcaccttaaaggccagtagatggttgttgcagattagagccaggtgagcactgtacactgatatcaccagatgttgtaataggaaatgcaatttgatcttcagatcagtaggtgacacttgcaagcaagaggcaattgcatacaaaatagcagtgaaattttttacttggcctttgttgattggagaaggtaccagggtgtcccttgggacatggtaacct

SEQ ID NO: 183056 - DNA, 474 bp, Homo sapiens
ttaggtgtcatcctttggctttgtacctattggttttagggatcaaaggtattatatgaatttcttggcatgaagagccttattgtaatggttgtctcaaatgctagttgtttgtcctttgtagtaaaggcatgctggacacatggtcaggctcactgacttctacggagatggggaggtggacatcttggaaggcttattccccagtgctgtgcattgctgtcagcaggaattatactggattttttagttcaccttaaaggccagtagatggttgttgcagattagagccaggtgagcactgtacactgatatcaccagatgttgtaataggaaatgcaatttgatcttcagrtcagtaggtgacacttgcaagcaagaggcaattgcatacaaaatagcagtgaaattttttacttggcctttgttgattggagaaggtaccagggtgtcccttgggacatggtaacctgg

SEQ ID NO: 183057 - DNA, 411 bp, Homo sapiens
ttctgtggaaacaattccattttttttcgcagagttgggaaagcaaaatctagcaaacatctagctaaagacaaatcatccatacttttaatggtsaactttccaggacatttgcttttctttatttccatggtaaagtcattcttgtttcaagtatttctggagctggctaagaaaatggtttcactgctggacatgaaattaccaccttctcccttaatctaattttatagtaacaccttgggacgtcatttttgtaatgaataaaatttctcattacacccaatcatttagaatattagggaaatatgtcgttatgcataaattgtctgccaaatgtcagacattgtgcttagtgattcatatttgttgtcccgcttactacataagaaaatccatagagaaatatat

SEQ ID NO: 183058 - DNA, 596 bp, Homo sapiens
tattcagttaaaagaagaaattaagtcctgaacatgttacaacattataaaaaattatggtaagttaaaaaagccagacatgaaagacaatatattataatgttatttgtataaaacatccagaataggcaaacccatagaaaaagaaagtagatcaggggttgccaggagatggggataagggagaaatgacaaggcaaggagtttcttttggaatggtggaaatgtcctataattagacagtggtgatgattatacagcattgcaaatattctataagccaattaattgtacactttctaatagttaaaataatgaagtttatattatgcaaattttatgttaataaaaatttgtttktaaaaattaaaggatgtgacatcaaatatccggtgcctaggtcacaaatatcctcttctatgaccatggttgatatcactaacatctaccaacagtctatccttctaagtctgcgagtgcttcagagggttttcaacacaattctccaagtagctcaaaaaatcaattcaagaatgtgtattgctacttagttattatccttggtgttgtttatctctagaatttctttcaaccat

SEQ ID NO: 183059 - DNA, 596 bp, Homo sapiens
tattcagttaaaagaagaaattaagtcctgaacatgttacaacattataaaaaattatggtaagttaaaaaagccagacatgaaagacaatatattataatgttatttgtataaaacatccagaataggcaaacccatagaaaaagaaagtagatcaggggttgccaggagatggggataagggagaaatgacaaggcaaggagtttcttttggaatggtggaaatgtcctataattagacagtggtgatgattatacagcattgcaaatattctataagccaattaattgtacactttctaatagttaaaataatgaagtttatattatgcaaattttatgttaataaaaatttgtttttaaaaattaaaggatgtgacatcaaatatccggtgcctaggtcacaaatatcctcttctatgaccatggttgatatcactaacatctaccaacagtctatccttctaagtctgmgagtgcttcagagggttttcaacacaattctccaagtagctcaaaaaatcaattcaagaatgtgtattgctacttagttattatccttggtgttgtttatctctagaatttctttcaaccat

SEQ ID NO: 183060 - DNA, 565 bp, Homo sapiens
atttatttatagtaactttcaaatgacttcctgtgctggtctctaaaatcattggctaagggaaagctgtaggatgatgttatgttatagaggtgataaattgactttactatccttaagctggggcttctatttttctttcctgycctttctaccaagctaaattttaatgactttcaggaccactcaatttctagctttacagggagctacttctgattattttacttctcatccaaagtaatgcgatttaaagcttgctttgactcttgaggcagatagatctggactgaaaccttggctttatctgtctccaactatgtaaacttggcaagttgattaacatctatgttatcagtttcctcacatgaacaatgagaattgtttcaacatatttctcataaagctgttaagagacttacatgtaaaggacataggactgtgtatagtacattttaaatactctccagttactatattcatcatcatcattataccacaatgcttaattctacctatatcacatccaccacactctggactttctgctattaattaattattc

SEQ ID NO: 183061 - DNA, 568 bp, Homo sapiens
tagtgtacaggttgcagaagtagacaggaaaagcaaacttgaaattcacattgtgtcaaggttactattgcaggcatcagggtagttagaactttttctttgtctcagaccaagatagtcagaacattaacatttccattatctcagccctagtcacaataattaataatttgtgactgtagaaagggattttactgtgtttatacatctaatgaatttatgctatctaataggtcatatgtataaatataatggtgtgataagattaccggtttgttaattaagtcattaccaatgaaatcctgagtgtagagtggtgtgtgtgtgtgtgtgtgtgtgtgtgtgtgttggagagtcagtactgaaaccaacactgaactttaccatgatatcaatacatraaaaattcatattttgtgttctcattttctttctcttaaaataagcagtctctaggagaaaaaactctaaaggcggctcagattacattgctcatatattttcctttcaattttgtgcctgtattgaaagaactcatttcttcagtgggatgacagtctgttttttc

SEQ ID NO: 183062 - DNA, 331 bp, Homo sapiens
tatctagtatatttataaaacagcaaagaaaatgctgtttctggaacakattttaaacgaggggagttaatagaaaatgcagacagaagggtgagcgtggttctatgtaacttttgtaggcattttaatcactttgacaatgtatctatgccaggtccatgttgattacatttctcaattttaatggtaaactctatcccaagctaagaatgagtttgagtataaatgggtaatcaactggatggctaaatagagagggggaaatttttagaagaaaaaaacagttttatttttttcttctgcattgttgattcaccttttttcctctctt

SEQ ID NO: 183063 - DNA, 519 bp, Homo sapiens
ttttttcctctcttgtggactgcttcagggagattttttttttttttttagtggattaggttgattcagattatatcacaagagaatgaaagcatgctgttttctgctaatgtttgcttagaggaaaagaggtcttagaaaagttaccaaagaggatttctgttgtttctaaatgatttccatcacaactaactaaacagcctcatatgcatttgagacaaatgaagggagaaagcataattttgcyatcatagtatatcctatcacaaccttcagaataaaggtagataaaggatactggatttttaccttagcagatattcctagctccatgccaaccttaataggaaactgctgcatagattaattttataccaatctaacctctataagaggtaatcatattgcttctgtcttaggtttgtgttataaggattgagataatgtctgttgcaagactaacatgagctattcaagatgcctagcaagtaatagctgctcaccaatgacaagagaggc

SEQ ID NO: 183064 - DNA, 519 bp, Homo sapiens
ttttttcctctcttgtggactgcttcagggagattttttttttttttttagtggattaggttgattcagattatatcacaagagaatgaaagcatgctgttttctgctaatgtttgcttagaggaaaagaggtcttagaaaagttaccaaagaggatttctgttgtttctaaatgatttccatcacaactaactaaacagcctcatatgcatttgagacaaatgaagggagaaagcataattttgccatcatagtatatcctatcacaaccttcagaataaaggtagataaaggatactggatttttaccttagcagatattcctagctccatgccaaccttaataggaaactgctgcatagattaattttataccaatctaacctctataagaggtaatcatattgcttctgtcttaggtttgtgttataakgattgagataatgtctgttgcaagactaacatgagctattcaagatgcctagcaagtaatagctgctcaccaatgacaagagaggc

SEQ ID NO: 183065 - DNA, 368 bp, Homo sapiens
ctttgatttgaagaacttagcagatccaaccayaaaaaaaacaaaaacaaaaacaaaaaaacaaaaaaaaactgaggtaagagtttttcagaaaaagggaagagtaagtagaaggcttaagatggaagactcttgtatacctgagaaagaaatagaatgtcagtgtggatgtcttggcaaggagctacttcagaaaagagataaaggaagagaggaaggcggagcttagatcatggagcacacagtgatataatgtttcacatgagacactttatacaaatatcaaaaggaaattaaaatagaaaagatccagtaatcacactccttgttaccccccaggagttgaaaacatgtttacacaaagatct

SEQ ID NO: 183066 - DNA, 600 bp, Homo sapiens
aaaaaaatgaacaaaccaactaygtaatttgtagttagttatttcagctataaaagggtagcactccctcaatcttaaaaataattttaaaaaaatgtttcttaagagtcagattgcaaggtctatatataattgggcaaacaataatgtagtttttgtttctatagatgtatgtattctggacattttatataaatggatcatacaatatgtggtctttgggactggcttatttcacttaacatcttgttttcatgacttagcttggtttagcatgtgccagtacttcatttcttttttattgtcaaataatattaccatgttatatttattaatatattagctgatgagcatttggggttgtttctactttctggctcttacgaataatgctgctatgaatatccaggtatatagcttgcatgagcatatgttttcacttatcttgcatgtatacttatgagtgttttcatttatcttgggcatatacctaggcattgctgggacatatataaatctacgtttaatatttgaagacttgccagactgtttcctaaaacacctgcagcattttacattcccaccagcaaagtacgaaaa

SEQ ID NO: 183067 - DNA, 600 bp, Homo sapiens
aaaaaaatgaacaaaccaactatgtaatttgtagttasttatttcagctataaaagggtagcactccctcaatcttaaaaataattttaaaaaaatgtttcttaagagtcagattgcaaggtctatatataattgggcaaacaataatgtagtttttgtttctatagatgtatgtattctggacattttatataaatggatcatacaatatgtggtctttgggactggcttatttcacttaacatcttgttttcatgacttagcttggtttagcatgtgccagtacttcatttcttttttattgtcaaataatattaccatgttatatttattaatatattagctgatgagcatttggggttgtttctactttctggctcttacgaataatgctgctatgaatatccaggtatatagcttgcatgagcatatgttttcacttatcttgcatgtatacttatgagtgttttcatttatcttgggcatatacctaggcattgctgggacatatataaatctacgtttaatatttgaagacttgccagactgtttcctaaaacacctgcagcattttacattcccaccagcaaagtacgaaaa

SEQ ID NO: 183068 - DNA, 600 bp, Homo sapiens
aaaaaaatgaacaaaccaactatgtaatttgtagttagttatttcagctataaaagggtagcactccctcaatcttaaaaataattttaaaaaaatgtttcttaagagtcagattgcaaggtctatatataattgggcaaacaataatgtagtttttgtttctatagatgtatgtattcwggacattttatataaatggatcatacaatatgtggtctttgggactggcttatttcacttaacatcttgttttcatgacttagcttggtttagcatgtgccagtacttcatttcttttttattgtcaaataatattaccatgttatatttattaatatattagctgatgagcatttggggttgtttctactttctggctcttacgaataatgctgctatgaatatccaggtatatagcttgcatgagcatatgttttcacttatcttgcatgtatacttatgagtgttttcatttatcttgggcatatacctaggcattgctgggacatatataaatctacgtttaatatttgaagacttgccagactgtttcctaaaacacctgcagcattttacattcccaccagcaaagtacgaaaa

SEQ ID NO: 183069 - DNA, 555 bp, Homo sapiens
aaatcttccatttaatcttcaattctcctaaatgttatatatttttgagtgagttaaagagcttaaaaataacaaaaattggtttttgacatctcctttgacaattttgcatcaagatttttctcatctcactttggagcccagcatatattatcttagtgcactagccaaaattccaacctaatattgtttttatacaagtgcattagaacatctcactaagacctagtcacttatcctctgagaacttaactaaaagtttgcttaattaataatcccagactattcttgggatggttgcagtaaactactaatggtagtgaacactaggatgtgggaatagagaggatcagataatttttacttccttatcatgtgtatatatatatatatatattatatatatatacaactttatacattttatactttttgaatttgccttcagaagcatatactatttatgtaatttaaaatatgtygaagatttaaaatataaataaaacacagccattaaaagtttaagaataaaataatttcttaaaggagaaagcg

SEQ ID NO: 183070 - DNA, 550 bp, Homo sapiens
gaaataccaagaaaatgaagctggacatgtattcttttggattcagtgttgtcaattgtggtcactctactgaccttctttagctccatccctgacaatttcaccagtttgctgcttcacaagaacacagatgtagtagactgtcatagtggcgtgatattttatcttaggtctgtccagactttttaacccaataagaacattcaagaacttgagagaatctgctttagtatcaaaccttagatattcatarattcaggtgaaaaataaaaaaaaaaatttattcacaaaattgctattatatgagtataacattgcaatatctctagtgatatttaaccactgttgcctttaatttttaggtccaaaataaggtgaggataatgatgacaatgtggtagcttagtcaagcgtctcacacttcatctgctgcaagccagtgtttaatttgcaacctttacagcctactgtacttatttgaaaatagaggccgggttaataggggaaatgcacaaacctcaggtgcatatacctgtttgatgtgacgcag

SEQ ID NO: 183071 - DNA, 397 bp, Homo sapiens
aggcagtattacagtgaggggaaatagatctcagagtgcaagacaggttggtttggaagttaaacacttaattataactatgtgatgcaagctatgtcatcacaggcaagtcacttaactgctctgagctccggtttccacaactgaaacgcgtgttaattaaacctccaattgttcttatagcttgaagtgctattcaaatataaagaatattatttttcaggttaaatcagacaagaaatttggcatttggatggaacactcttggccaagaaacaatacattttttagagaaaaaaagccaatattttatttctttacaagataaataaattgcartaggttaattggttcctagaaaacttactcctcattgctacaattctctgattgagat

SEQ ID NO: 183072 - DNA, 612 bp, Homo sapiens
ccttagtatgtttcaaacaatccaaattttgtatatcttcaaatatgttgttaatttaatgcttttattatgttggggcagtgggaagaagggacaggttaggtggtacaggtaagttacatcctttttctctccagtttatactcacagaacatctagaaagttcattttactcctttacatataagacagaatcagtgtgttaaagtgggatttaggagtgagatgaagcaacatttactgggcgtctatgatatgccaggcacagtaattctgtaaatttaaatattatatattaagtatcatayatagtatgtaaagatatgtctgggtatatattcgtacgtatacattctgtctttgtgtgtgtaatttaatttaataaagatataattccaatctgccttcaaagctcaaccttactgtttagttaccatgtggtttggggcaaattatttaattactctgactttcaatttattctattaaatgaatatacctacttaacaagattgttctgagaagtgaatggaataaaacattaaaaagtatttaacatacttctcagaacacaataggcactcaataaaatcatgtctattatgcaaatac

SEQ ID NO: 183073 - DNA, 531 bp, Homo sapiens
agttgttggtgtccgtagtcatgttgccctagtatttgcttacagtgtcacccaggacaaagttatttacctctgagcatcaatttacttttctattaatagtagctgacactaaaattgttatttttatgtgcaaagaattcttatatatgtataatttgatatttgtgataaaccctttcttagatcttatttttattctcattttttaatagtggatactaaagcactaatactaaagtgccttgcccaagatcacacacttggtcagtggctggcattggtacccaagcagtctgattccagagtgaatagaacttattccacaaggttgttgtgatgataaaatgctataaactstataaagcattcataccagttatacggccccaataacgattactaaatgttaactaatcaggacataatagtatgtgtatgcaggggatgggagggtgaggccttgagtttagatttttgatgtaaaataaagtacagttacccatatagacataaagtcattgcttcttt

SEQ ID NO: 183074 - DNA, 434 bp, Homo sapiens
ctttttccttttaaatcttacaagcctctccatttctctagggccaacactacaactgcctgattagcacagttttgttaattccaaagacatgaaaaaagttaatggatatgtcaaacaggaaatgccaaaggacagtgtcctaggaagaacacttacttaaagaaggttgcatgtgaacgggattttggtgatgaatccaagcaaatgaaagggatgggactgaaagagttaatatggcatgytgggggagctacaagtagttcagtatacctggagggtaggctgggatataaatcagaggttaatatgagaatagactgagacaagcaataaatggccttgctaagaagtttggatttttatatgaaattaatagagaattatttaaaagtttaggcagagagtggtgtgatcagacttgcattctataa

SEQ ID NO: 183075 - DNA, 434 bp, Homo sapiens
ctttttccttttaaatcttacaagcctctccatttctctagggccaacactacaactgcctgattagcacagttttgttaattccaaagacatgaaaaaagttaatggatatgtcaaacaggaaatgccaaaggacagtgtcctaggaagaacacttacttaaagaaggttgcatgtgaacgggattttggtgatgaatccaagcaaatgaaagggatgggactgaaagagttaatatggcatgttgggggagctacaagtagttcagtatacctggagggtaggctgggatataaatcagaggktaatatgagaatagactgagacaagcaataaatggccttgctaagaagtttggatttttatatgaaattaatagagaattatttaaaagtttaggcagagagtggtgtgatcagacttgcattctataa

SEQ ID NO: 183076 - DNA, 647 bp, Homo sapiens
tttcctgaaaaccccaaacaacagtctatctggtaattgcttcttgtaaaatgcgtatcctacaaaatcacttctgtgggattactgccaaaaatatataacctgaaactaaccatgaggaaacatcagaatgagtcaaattgagagacattctacaaaataactgcccagtactcttccaaaatatcacactcgtgaaagacaaagaagggctgagaaactgttcctgattaaagaagactaaggaaacatgacaactaaatgcaacatgtgatcctggactgaatcatggacaaggaagaaaaaaattgtttttgctaacaaaagatataattgggacaatcagtgatatttgaatcagatttgtggattagctgataatattataggaaagttaattttagagttagayaattgtactgaggtgatataagagaatgtctttgttttaaggaaatcattaaaggtaaaagtgattatttttgtaactatcaaatattgcaggaaaaatgtatgcgtgtgtgtgtgtgtgcattgttcttatgagaccaattttgcgtgccttaacaccgtattaaattacatgtggatttatcagattacaacagccaacatgttcacatttgaagcattgaacatgcattagc

SEQ ID NO: 183077 - DNA, 647 bp, Homo sapiens
tttcctgaaaaccccaaacaacagtctatctggtaattgcttcttgtaaaatgcgtatcctacaaaatcacttctgtgggattactgccaaaaatatataacctgaaactaaccatgaggaaacatcagaatgagtcaaattgagagacattctacaaaataactgcccagtactcttccaaaatatcacactcgtgaaagacaaagaagggctgagaaactgttcctgattaaagaagactaaggaaacatgacaactaaatgcaacatgtgatcctggactgaatcatggacaaggaagaaaaaaattgtttttgctaacaaaagatataattgggacaatcagtgatatttgaatcagatttgtggattagctgataatattataggaaagttaattttagagttagacaattgtactgaggtgatataagagaatgtctttgttttaaggaaatcattaaaggtaaaagtgattatttttgtaactatcaaatattgcaggaaaaatgtatgygtgtgtgtgtgtgtgcattgttcttatgagaccaattttgcgtgccttaacaccgtattaaattacatgtggatttatcagattacaacagccaacatgttcacatttgaagcattgaacatgcattagc

SEQ ID NO: 183078 - DNA, 570 bp, Homo sapiens
cttatttgaaaagaataaaaagtgtcatgaaggcataaaggagagactgtacaggtacagaagggattttagaaagagcagtgtacaactctataaggtamgtgtgaaaaaaaatctaaaaagaggaaaagaccaaacatcacctctttttctttgaagaatgaagtattgtgtcccacttcccgaaagcctgataatcacagggtctatcatgctgtaaagggagtaggggcaggccaaatgatcatattctagttcatataatttatgggattgaggggtttggaaatttcaattatgattagcagtttttgaaatgcacatcatgtttattgagttctttcacagagcctggcacgaatccagggtgaatcatcaacctattgttggtttgttaatattctgtaaatgcttattggtgtccttataccatacactcttcccgaaggagttaaggtccgtataaaataaggggtagaaaacgtagcacaaaataattcactcatctgtttcaaaagaagtgataattttctccttggaaaatctattcagattataatttccacattg

SEQ ID NO: 183079 - DNA, 445 bp, Homo sapiens
attagggtctgttctcaagtagtttaacatgtatttactttagtcctcatgtgagagagagactatatggaagctaagagaagttaaataattcactcaagatcccatcactctgtagctaacctgagatatactcgtggaaaatgtactgtcacsttgagtctcagtttgcctgtcaataaaatgggacagaattacctgttttaagtttgtagttcaaatggaaccttctgaaaaggaagtgtggaacaggtcgaaagtatacaaaagggggacttttcagatcaggaatatgattaaaacactgctttatgtaatttctaaatttaaagacagtagcattaggtaggcctgagtacctcatatcattctagaacactaaatctgcatatagttacatgagtgtacatgggccaggtttggtgaatactgcatttctgagaaa

SEQ ID NO: 183080 - DNA, 558 bp, Homo sapiens
tgttatttcctggaataatcattaccaatttcttcatcacrttttcttaatgacacagtttcaaacgttttcttcatcttgattgctgtcttctgtgtatatgctggtttgtgtgaggttttactaaaccagtatgtggattaatctagtttcacgagtgacaggtaagtgatttagaaagatccgttcctttagcacgatgttaatcttgaatcgtttggaggtagaatgcctagagtgagggtgaaagagaggacctggggacaggaagagagggcagctggagcaattatgctccttccctcagaccgttttggcctggactctgactcttggacttctaccagacagagaggcggtaggcttgtggccatgttttgcgaggaaaatcagaatctaagaatctctaaggcaagagcaagaatggattgggataggggaagtgataggaaaacagaggcactaagaagagggttggttttcatgtactgcatagttcatttccttagttgagaaatcaggtatctcaacctcagatatcttctgtccagcatatcg

SEQ ID NO: 183081 - DNA, 596 bp, Homo sapiens
ttgaatgccttctatatgccagtcattgtgttaggcactgggagtatgagaattaataattttagtctgttgacagataatcataataagggctaatgagtaacacaggctcagggttataagaacagagggggtatcaaggctgtttttcacaggaaataacatttaagttgagacttaatgaarttttagggcttagccatgagaaagtggggaaaagcattttgggctgactgaacggcgtgtacagaggtctggaagtgagaagtagtgtactatagcattttctaggagctgaaaggcgtttagcaagagtatagtgcataaaggagagagcttgagatgaaacaatttctcagtgtgttgtttgaatacaatgtatactgtcaaaatctaagaattcaagaatcatttaatatatctttatgttttactagtcataaaagcatatacatatatttaaatatggacaagatactgtttagtagtttagaaagtgatttataaggattgcaatcccttgcaataactccacagcccataccttgggaacaactgagctaactcattcagttttgtccattacatcgaagggt

SEQ ID NO: 183082 - DNA, 596 bp, Homo sapiens
ttgaatgccttctatatgccagtcattgtgttaggcactgggagtatgagaattaataattttagtctgttgacagataatcataataagggctaatgagtaacacaggctcagggttataagaacagagggggtatcaaggctgtttttcacaggaaataacatttaagttgagacttaatgaagttttagggcttagccatgagaaagtggggaaaagcattttgggctgactgaacrgcgtgtacagaggtctggaagtgagaagtagtgtactatagcattttctaggagctgaaaggcgtttagcaagagtatagtgcataaaggagagagcttgagatgaaacaatttctcagtgtgttgtttgaatacaatgtatactgtcaaaatctaagaattcaagaatcatttaatatatctttatgttttactagtcataaaagcatatacatatatttaaatatggacaagatactgtttagtagtttagaaagtgatttataaggattgcaatcccttgcaataactccacagcccataccttgggaacaactgagctaactcattcagttttgtccattacatcgaagggt

SEQ ID NO: 183083 - DNA, 471 bp, Homo sapiens
tatttccaatgttatctttattccaatccaaacaacctattgttaagctttactgtcatcacagcttaaaatattttcactttagtgaagaaaattatttctgacttgaaaaaaaaaatcttgtttataacattaaaaaactaaatcctggtgtcagaacagatctcactggaaaaaagttgtaattacattcctggtaagaaataaaaatgtgttggataaactcacttaaaatgcttactaagcaagtacctccaccaaagcaaagaagaactactcctcacaaaaatgaaggaaaagaagagaaatttcatattaccaaattttatttctccagcatcttccctgaaataaaaagaatggatacatattcctcttaaaaattttcaattgaggcagaagaaaaaaaaattatttgcaggaaacctagaaaarctattatgaaattatctcacagccttcctcaaacaa

SEQ ID NO: 183084 - DNA, 619 bp, Homo sapiens
gcttttaaactttatttaaaaacattaaaaatacttgaattatattctctataaagtatcacattgaagatttttttgcacattatcaagataagcatttattttatcaaatgctgaaggcaaacacagagaatagacagacttgaccattttcttttctagtactttagtatctggatttttcttgacagtctgatcactgatcattgtctgcatagttttgacagcatgcccattgaccctgggccattgatagacctggtatgtcttcatttattattttgccaaagaattagaagcctgataagctaggcagtgtcctgtgctttggctatgaagaggcaggagtgatatttaaagtatttaccagtaagtacaaaatagggaccaaccagttaagatggctgtagcactggatcacgatcttgaagaaccccttcatcctttatgctgtgtcaggctttcttgttttacctgctgggttgtagtggtggtggggagactgggccatcagtaggcaccttaggactggtggagtttgaggcagtgacacgttaccagactatgttacggaagtatttcmgtacttaagtatgacccttcaggctctgttggtgtg

SEQ ID NO: 183085 - DNA, 493 bp, Homo sapiens
tttatatttacacttaatcttagccaaaaggccaagaagcaactgtatatttgttacataataaccttttataaatatctccactggccaggcatggtggctcacggctgtaatcccagcactttgggaggccaaggcaggtagatcacgggaggtcaggagttcgaggccagcctgatcaacatggtgaaaccctgtctctactaaaaatgcgccaggcatggtggcgcatgcctgtaatccccrctactcgggaggctgaggcaggagaatcacttgaacccaggagacagaggttgcggtgagccaagatcacaccattgcactccagcctgggcaacaagagtgaaactccaactctaaataaataaataaataaataaataaataaataaataaataaaatgtctctgccttcattgttttcaaaagtttcaagggatgaaattcaaaggtctttcttctctatttattatcttacaaatgttgtaac

SEQ ID NO: 183086 - DNA, 463 bp, Homo sapiens
ttacaaatcagtgttgagacttttgaggatattgggatggggtgaatatgttttgcatgtggaatagaggtgaattttggggagccagggggtggactgtggtagacaaaataatgccccccgccacccgcccccaccaaggatgtcaacatccgaatcctcagaacccgcaaatacgttaggttacayggcaaagggaaattaaggttgctatcatctgaccttgagattgggagattattctggaatgtcagcccaacattatcacaagggtccttatcagtaaaagaggaggatagaagagggagtatcacaaccactgctggctttggagatggaaaggggccatgagccaaggaatatgggcagccctttgaaattggagaaggcaaggtataaaaaactaaaataaaggattcttccctagaccttccagaaaagaatgcagccctgccaactggcc

SEQ ID NO: 183087 - DNA, 582 bp, Homo sapiens
gatctgtttgtttgcccactaaatattggttgagcacataaaaggtgggtgccaggtattcagatgtgaatataatatgactctgaatttaaggagcatacaatccagttgaggagacagatattgcatacataataatacagttatgcagctcccttacaaaggtctgagctaaatgccctaacaccataaaaagagaagtgcctacctccacctaggatggaatggggaaggcttcaatgagaaagtgacctttgagctgaatcttgaagggtgttaggcagacaaaaagggagtagtattccaggcagaaagaaggaaatttgtaaagacagaggtgtggaaaaggtagatcattttcagagagtttggtatgactggaatccaggggaatttagaggtgagaaggaatgtggctgaaaagataggctgggaccacctcattacagctctatgttccatgttgaggcayttagattttattctaatggtcatgctacaaactaacttgtgtcccctagcctgcagtgtgatagtatttggagataggcctttgggtggtaattaggattagatgaattc

SEQ ID NO: 183088 - DNA, 366 bp, Homo sapiens
gttaaaaaaacctcgttttgtcatattaccagaattgtttttctggttctttctcatttgggtggacgtcagagggaagacctgggatttggctgctgttcatattttttggtcccatggggtgctccgctttatgtggtgctctcccttccatctggggatgaggcttcctgagacctgaactgcagagatttttatttctcttctgggtytatccacccagttgagctactgggctccaggctggtattgggaagtgtctgcacagagtcgtgtgatgtgacccatttgtaggtctctcagccatggataccagcacctattctggtggaggtaccaggggagtgaagtggactctctgagggt

SEQ ID NO: 183089 - DNA, 601 bp, Homo sapiens
gctgattctcagttatacaacccctcctctttcagttggcatgctaatttctgaatgtcagattcctttggtgtgtctacgaatgtttcatctgcttaccacagactgcctacagtgatttcagggcagaaggactgtctgtaaggcaacatggcctggtcttctggktgtggagaattcaccctccaatctgggttctgcccaagagcccatgcgtactgcccaacctgggggctaatgactccactagtctaccacctgctcatcagggagaaggagtgacctcttagatggtcatttattggtgcttggacaaatcttcccaagagttcatctctagggtcccttagagtcctctttatttcctaccacagaacttggggcatccctgcaacagttaccaccttttgcagaagttctctaatatacagatttggggcattgtttttgattttaaattcactctcatttgtgttctatacacagatatttctcttaatttccagtcccctgagggtatctctattgtagataaaacaacaacaaaagattttctgtcatctctcggattaggggcagacctgcctgtgtactcagccca

SEQ ID NO: 183090 - DNA, 443 bp, Homo sapiens
tggctttttaaatatgtagtacactaaccataagggcaatctgataatcaacagagctgagaacttactatttctgtactatgatgtcaactttaagcatttaagaagcaatattttaaggaatcaagttgaagtgatgattcaatttattttgtggagaaaatttcagatttttcctagtctcaaaaaatttgttacgtgatggtgacctttagctttggttttgacctcctcatgaagattgaattcaagcttggccctttagcaatgggccaatgcgacatttctattaactcttgagtaaatrcaaacgaatgctcatgaaatatatgtaaggcataagtaatcaaaatacaagaaacatcaattacctaccatccaatttaagaaaaagaacaacacaccattattaagtccctttcttgcattccctcccttgtccc

SEQ ID NO: 183091 - DNA, 516 bp, Homo sapiens
agaattctttgttctttatcctctctcctcccagaaagactgcatgcgcagtgtctcctccccagctcaccctccccctttkccagggcgacagggagaagaggtagaatcctggtgggagggaagtgtgttgaaaagatggaggggactatgagtggggcctggggagaagaggatgagggagggagcccagagagtctggtttctttgacactcacccctgctagacttaggatacaggggataattaaagagctgttttgctcagcttctagtctcggtgtatgtgtgattacctaattgtaggggctctgtttctgaaaatggttgtactttgatgcccttcaaatagttaagggcacaggcacacagtcccaatgcgttactcagatgaacataagggccgctttggtgagggagtggaagacaccaccaatcttccagacttccagttctgcagaatcctgggactctgataagtgcagtttcaacatctaaagaataaagtcataattt

SEQ ID NO: 183092 - DNA, 578 bp, Homo sapiens
agtggttcagctccttgcaaattctcatcattagcatagcaatgagattctcagggtctactttctcttttctcaattctgccttaaattcccaacttatactgaaataaaagaaaatccactggccttactggaatatcagagagaagaatgaaakagaaattttggctctcagggccatttcagtttgtcattttgtgaaattagagacagatgggtgatgtctgcatgttgtgggaaattctgtcctacattccagccaatgctgggagctctggaagaggacagagaggagaaagagaaagcaatttggatgaggcagaatacatgctaattctgtgacaaagatagcatcaaatctgcaaacattaattctaggcaagtcttattcttagccagcttgctttcccttttctagcttccacagtattaagcgaatttaaactgggtgctaatggaagataattcagaagtcatctggtttgtcttctactgtaggacatcagttttataagtgataggggaggagaaggggccaatggtggcccagtaattaaactgtatttacagcaaattat

SEQ ID NO: 183093 - DNA, 498 bp, Homo sapiens
agcagtgtaattttactcttgagtttcagttccatagcataatgtgaagcagagatttggctattgtccaggaaatctgatgctgtagacagctaaataatccaaaaatatccacttctgcaggtaaacctatarcagcagactttcaattggccacttcatcttgagtttttctgggcaataatcatgcccaggaacatggctaagaagaatgcgtagactaaccaggtacaaatagtgagaaagggttgcacaaagccatcagttttctaacagttgcataaaacgttcagaaatctgtcagaagacagagatctacaggggactgaatcaatcttctctggtttagaggctcccttcagagaagccatttgtagagcatttcagtagggtttgatccctactgagaaaagcccttcaagagcaaaggcgcaatgcaactgacaagtctcatcacttacatgaatgagttttgagtatttaagaatcatcttacat

SEQ ID NO: 183094 - DNA, 498 bp, Homo sapiens
agcagtgtaattttactcttgagtttcagttccatagcataatgtgaagcagagatttggctattgtccaggaaatctgatgctgtagacagctaaataatccaaaaatatccacttctgcaggtaaacctatagcagcagactttcaattggccacttcatcttgagtttttctgggcaataatcatgcccaggaacatggctaagaagaatgcktagactaaccaggtacaaatagtgagaaagggttgcacaaagccatcagttttctaacagttgcataaaacgttcagaaatctgtcagaagacagagatctacaggggactgaatcaatcttctctggtttagaggctcccttcagagaagccatttgtagagcatttcagtagggtttgatccctactgagaaaagcccttcaagagcaaaggcgcaatgcaactgacaagtctcatcacttacatgaatgagttttgagtatttaagaatcatcttacat

SEQ ID NO: 183095 - DNA, 416 bp, Homo sapiens
ttgggcctatatcacatttcccactgtatgatattcttgaccaggggaaacaggaggagatagaagagggagagtgtgtgttgtttggagatggtccacagatgattctggaacaccaccacccccttttattatamgaatactgaagggagtaaaattgcccagtggttagctggagtttcatggtgtttgctcttaccatgctcatcaggttcttgcagcaatatccaaggccgagagaggcagcgtggaatgaagggagccatggaaaaagcctctgcaatgcagtgataggatctgattaaggaacaggcagaatatttgcacagatttctgtgttatgtcaatttttggaaacccacaacctccctgttggcttcttagtcacatgcactaaaagcatcctctcctcccac

SEQ ID NO: 183096 - DNA, 576 bp, Homo sapiens
ctagaatcatttgtctaaaaattgatgctttttcatggccttacttggcccctagcctaactcatgacatctttttatggactgtaggctgccaaatagttcagtctttaatttcagcttctcaagaacgagttacttattgaacttgtttatcttttcacaaaagactatgtcacaggttgttgacartgctaagaatcagtagcccttgaatcagatgcctactcctagttgacactgctgtggctagaaagaagcaaatcacctggtggaagggcctgattatgacctttaggagtacaaagaatcaaaaactatagtgtgaaatgataagcttacatgtgtgctctaattaaaatagattgattcaataacttcaaatcttaaaactctggatagatttattagagtgaaatctccctccttcttactccctcccttcctccttccttctctcttttgtgtacccacacttttctggtcacttaagctgagcaattgtttggtctgagtactgggaatatggcactgtctggtagaaaacaccactatgtggtcaacaatggctgtgtaaag

SEQ ID NO: 183097 - DNA, 438 bp, Homo sapiens
ctacataagtatcatctttaaattattagtgtatttatctgtctagtacctactttgtggataattaatggtaagtttatatagattattacaaagtgagtcatgtcataatgaaggtacttatgaatttaaattgggaacttagtaaaaaatggcaataatataaactaaaatataaaatatcaaattagccatgacattaatacgaaacaggttttctactttttattttattttaagatactaatcaatcataacatcagtggkaaaagcaagaaaacctcattatttagatattatatcaaaaaggtctttcacttattgagtgttctttcagaagaaaacaaataacaacactgttagaaaaagatactttattttcatttgtcagaaaattattataatacactgagtttgctggaataacatgctctatgg

SEQ ID NO: 183098 - DNA, 623 bp, Homo sapiens
agactgacagatttaaaattttttatgtagcagcaaaatgtcagaaaaaatgtgaagaaaaaatagtaataagggggactataccaactaccaacgaactctcaaattatgctataaaactatataagtaaaagcagtgcagtactggctcatgaaaataagaatgcatttcaaaagtccagaaatagactcatatatatatatatatatatgagaatttaacatatatatgtaaaaattgaattacaaatcagtgtggaaaagatttgcaattcaataaacaacgtttgggaaactgcatatttactccatatctcacactaaaataaataccaattrgatcacaaattttaatgtaaaaagaaaaaattaaaaggaaaatcaaaactattgaagtatgagaagaacctgtactatgctcaatactatcagaatggagaaggtcttctatgatggaaagctgacagagaggtacagaaggctgcctccttgcctcagggtaggattaattttgtgtagtttgtgctccagagattctgtatgatcagactgaagctaggctccagtccagaccacacctactctatcctgctgctgctcttgctccttttcctatgagcact

SEQ ID NO: 183099 - DNA, 597 bp, Homo sapiens
cctgtctttcaaatgcctaaaactattctagtggtacctacttcttctttggcaagtgtgttggaagaagacagatgaagagagtggacaggcacatggagaaagtgaaaagtaataatatatgtctttttgacaaggaaacatatttttgtgcatacgtacgtgaatccttgaaactagtaagactatctcattttaagtaaacyccatataataatatttaatactgaaaattattattcactaatttattttaattaacaagcaatcccagggcactaaacataaaattcaatttacacataatgctttaaaatgtttcaaatactgccccgattccaaaagcagaaacagaactatgccaaatatggatcaatagtgatatatctacagttctaagggtctaaggtagacaagaatgatcatagttctataggcctaattaccgtgggtagaaaggttttcctaagctatttgtaaagtgaaattacacaagttaataaagagtaagtttttgctcaataagtggaatggctgaattggaagtattttctagcattgtcatctataatattcagaaaatgttttataatatac

SEQ ID NO: 183100 - DNA, 445 bp, Homo sapiens
gttgtattaaatcttaaagctcttaatgagatgattaaatattaagcatcatacataataagaatatggaagtttataatagggtagcataactattatcagctagataagtcaagcaagccctcttggttgaagtgatatttgagctgagaattatagaatagagatttagataggcaactctgaaataaagagctacaatagaaaattgtgtgtgctcagyggattgtgaatagattcattcgatcaattaatttacccactcagtcatttcattgtgtattaaacaactatatagtgagcacctggcacatagcaggtactcaagcagtcagtggagataaaaaagatcaacgaaataggcacagtccttgccacagtggaattacaatatggcagggtcaggcgaatgggaaatgagtctgtaacttgactacaaggactt

SEQ ID NO: 183101 - DNA, 643 bp, Homo sapiens
tattttagccattcaaatagatgtatatttgtttctcattctgtttttattttgtatttctcttacgactaatattgttgggcatcttttgatgtgcttattagttatttgagtatctttttgctgaagtgtctacttaaatgttttgtgcactcctttattaggttgttttctgtgtgttattgccaagtgggaatatttctggattctatattctagtccattattctgtgtctatcttttcacatcactttgaagtgagataaaaattatcagactgtcttgatgactgtagctttctagtaagtcttgaaatcaggtagtgtgagccttctaattttcttttgcaaaattgcactgatgactttaattcctttgctyttccttgtaaatttcacagtcaaactttttgataccaagaaaaaatctgctggggctttttctgacactgcattaaatttatagattaatttgagaagaattaacatcttaacaatatcaagtctttcaatatatgaacgcagtacatttatacatttattcaagtcttctcttctataaatcagtattttttagcttttatcatacagatactgtaccctgttttttaagatttattcctaagtatttgatttttggcaaa

SEQ ID NO: 183102 - DNA, 643 bp, Homo sapiens
tattttagccattcaaatagatgtatatttgtttctcattctgtttttattttgtatttctcttacgactaatattgttgggcatcttttgatgtgcttattagttatttgagtatctttttgctgaagtgtctacttaaatgttttgtgcactcctttattaggttgttttctgtgtgttattgccaagtgggaatatttctggattctatattctagtccattattctgtgtctatcttttcacatcactttgaagtgagataaaaattatcagactgtcttgatgactgtagctttctagtaagtcttgaaatcaggtagtgtgagccttctaattttcttttgcaaaattgcactgatgactttaattcctttgctcttccttgtaaatttcacagtcaaactttttgataccaagaaaaaatctgctggggctttttctgacactgcrttaaatttatagattaatttgagaagaattaacatcttaacaatatcaagtctttcaatatatgaacgcagtacatttatacatttattcaagtcttctcttctataaatcagtattttttagcttttatcatacagatactgtaccctgttttttaagatttattcctaagtatttgatttttggcaaa

SEQ ID NO: 183103 - DNA, 555 bp, Homo sapiens
tttgaaattccagatgattcatatccacattaaaataaggaaaacattgatttagattactaaatgttagcacctatcctaatttatctcataaggcccaatcctgtttccactgtcatttgcttgtggaatatcttcacctgtatattctaatgaggaccttgaattcaacttgaactaacaattgaactaatcttctttgtttctccaatcgtgaatcattttttcttggtctttatcccgctagtcatatgtctattcatcctggctttatacctcataaagctttttttttctttaaatcctccacacacagtctcaaygtctgtttatattatgcttttccatatctttcatgttttattcctttttatttgtaccactaattcagacataattgcctctcacttaaacttttaagatagcttcttgatagttcgtattgccttctgtcattcatcattttaatttatcatgcatagttgggttagcttaatctccctaacacacatcagtgtcagctggcaaagaagaggttaacctaagagtagtgat

SEQ ID NO: 183104 - DNA, 432 bp, Homo sapiens
cttttcaattatataaaagtttcagtgaaactttaaacattagccaagtaatgagcctatgcttgagtcatgggaccaagtggtggggtccaaaccatctcaatgtttctgaaggacctcttttcttgccttttttktgctgcttaccagctcctgtgattggagaccacacagcacccagagaaaggacagaaatcaactcttgacacctcagatctaaaaatggtgtcatcttctggaaatgtggagaaacaaatgaagcaatgggaacattggtgcagcttggaaaaacagcaaggaagcagtgactttcagagggtgtgaacagctgtgatactgagggggcctgactgcactgtggagttgcacagagaggccagggagaggagcattccatgcatctatcttggttacatgtgtggcctcttgtag

SEQ ID NO: 183105 - DNA, 494 bp, Homo sapiens
tgacttagtaagtggtattttttcccctgaaagcagacaacagataggaartttgtatgcctaatttttagtttattattctgaaaacaagagactcatatttcttactaaagacgtaagtttatcaaactgaggaggataatactttctacatataattttttggattggctctatttaaagtaagtctttgtttcttatgtatttctttcagaaaacattatatttcaagctgcatagatatttgcaaaataaattttaagaatcatttaatccaatggtttctagactttggagttcatgaaaatttaaaatgccatttaagacaaaggaaaaaattttatttcccacttcttattttgccaaaaaagacctttaaaactaagaagcaaaaaagaacaagcaagaagcaaacaaaaacctattgcctataaccaccatcaacataatgtaaagaacttcttaataccaaaattccaaaagcattgtattga

SEQ ID NO: 183106 - DNA, 623 bp, Homo sapiens
tgtttgtctgcatttgtgttgttcattttatgatctttttccatatctatatgtagtaataaaatatttgatatttatgcttttactttatcagacataaaaataaatattcttttataaaaccttgttccatttatatgcatatgtatggagtgtctctgtgtgtatgtgtgtgtgtgtgtatgtgtactaggtgagcatagaatatgtatttcagagacagaatactgtaaaggctaagtcaagagcatgaaaattggaccacattgcctgatacgtgacgttagtaaacttacttaattattttcttttttttttgcctcagattccttatctgtaaaatgagatatctgtaaaatgagatagggaamgagtcacctacatttttaggaagattttacttggtaacctgtatcaggtctatatatgttattcctttcgtgtttttctccaatattataaaatttttcagccagaaatttttctgtaaggcattaggtctatgataataaatctttctcacatgaaatatacctgtgaatttgccttagtggtttgttgactcaaataaacatgcaaaaatataagaaagttacaaaataagactactattgaaagaagag

SEQ ID NO: 183107 - DNA, 519 bp, Homo sapiens
gggaattccctgatcccttgcatttcccgggtaaggcgatgactcaccctgctctggcacgctcagtgtgctgcacccacatcctgcacccactgtccgacaagccccagtgaggtgaacctggtacctcagttggaaatgcagaaatcacccatcttctgctgggagctgtagactggagctgttcctattcggccatcttggaaccacctcctctcaaacgcttgagcccaagtgatccttctgcctcagcttcccaaagtgctgggattacaggcatgagccaccatgctgagctgaggcctctgttgttgttaataagtggctgccttattaatgattcttacacagtcttttttctatgcttatgcatccctggcatctctgggtgcatgcagatttcctcttcttataaggacaccaaccagattggattaggacccaccctaattacctcatttttacttaatcacttcttgaatggcctaycttcaaatatggctgcattctgagttactt

SEQ ID NO: 183108 - DNA, 383 bp, Homo sapiens
tgaatttagtttattactgcagcttgttaagtgttaaattctgattctgtcttgtcaaktattgagattctgccaagcttcatgttatctgaatatctaaagatgtcttctattctaagccacagacggatgtgtttaactacaaaagatcaacttgtaacctgttttcaggtttgtaaaagtatttacttatgtttaaatctaatcatttagtaaggtgctcatctacccaaatgatatggtttgactgtgtccccacccaaatctcatcttgaattgtagttcccgtaatccccatatgtcctgggagggaaccagtgggaggtaattgaattatggaggcagatttccccatgctattctcatgatagtaagttctcacg

SEQ ID NO: 183109 - DNA, 383 bp, Homo sapiens
tgaatttagtttattactgcagcttgttaagtgttaaattctgattctgtcttgtcaattattgagattctgccaagcttcatgttatctgaatatctaaagatgtcttctattctaagccacagacggatgtgtttaactacaaaagatcaacttgtaacctgttttcaggtttgtaaaagtatttacttatgtttaaatctaatcatttagtaaggtgctcatctacccaaatgatatggtttgactgtgtccccacccaaatctcatcttgaattgyagttcccgtaatccccatatgtcctgggagggaaccagtgggaggtaattgaattatggaggcagatttccccatgctattctcatgatagtaagttctcacg

SEQ ID NO: 183110 - DNA, 502 bp, Homo sapiens
gtttgagacaaacgcttgttttcaagtagttcatttggaaagaagagagaatggagagtggaagagagaaggaaaaagccaatacaagaatattttaattacctactacaggtggctggggattaatccaatgtcgttgtctgaggagatctatgaaatgtgcctccaacctgtccatccaggggacaaggtagaaagaattgatccattagctcctggtcccattggtcaaggatgggttaatttgcattagttctgcagccttcccagttgtgccagcctgagtgctaasaatgtcctgcacgatcaaagatgccccatagcaaaagcagaacactgggataaatctgagggaggagctgacaaggtgcacctgcatgaaacagtgatggttccgtgaactggtttttgcaggagtagctggagtaagaagtggaacaaatctgaagtagtacatagttggctttgaatacactagacaaagccagtcctgataccctga

SEQ ID NO: 183111 - DNA, 502 bp, Homo sapiens
gtttgagacaaacgcttgttttcaagtagttcatttggaaagaagagagaatggagagtggaagagagaaggaaaaagccaatacaagaatattttaattacctactacaggtggctggggattaatccaatgtcgttgtctgaggagatctatgaaatgtgcctccaacctgtccatccaggggacaaggtagaaagaattgatccattagctcctggtcccattggtcaaggatgggttaatttgcattagttctgcagccttcccagttgtgccagcctgagtgctaacaatgtcctgcacgatcaaagatgccccatagcaaaagcagaacactgggataaatctgagggaggagctgacaaggtgcacctgcatgaaacagtgayggttccgtgaactggtttttgcaggagtagctggagtaagaagtggaacaaatctgaagtagtacatagttggctttgaatacactagacaaagccagtcctgataccctga

SEQ ID NO: 183112 - DNA, 526 bp, Homo sapiens
aatagcacattgaatagtttaacatccagagttaaatttaaataaggtaatgccatgtttacttgttagcactaaaaatggtgtcgtgtatttttctttctttttttaatgaattcttcaagaagatatatttacttagtgctggtgagtttcttttggctaaaatacatgccatgttttgattcrtttaagattgtcatatttcagtcatttagcttcatcttttctcttctgtccagccatcctctgttctttctcggttgtttgctaatatcattagaggtcattacttaaaatatcttgcctacattttgcctcttgtttgtatttaatttgttactactaaaacatagtgtatctcttcaaacgtaaatagagttatgtcaaactcttgaagcagaacggcaaagtattttatataatcatgcatcgcttaacaatggggttatattctgataaacgcatcttaggcaattttgttgtgtgaacatcttcgattgtacttacacaaacataggtggtagag

SEQ ID NO: 183113 - DNA, 594 bp, Homo sapiens
cctttcttgtttgttttatctctgtttgaggaggacaaaatgtaagatattaatactgacttaaaaagagaagggacatcacaatggggtttcatatactaggcatctggacttgaagttctaaaacatatgtattgtgactaaagtcttgaaactatctgagttgcattttcttccaaagagacacccatatggaatataacttcttccctccctcctcttctgttccttccttgaagttttaaatacaatgtcaaagagagaaagaatcccaaagattatctgttccaatcttgttttatagatgacaagaaagctttcaaaaaatggaataattaattaaaaaaaagctaataaagaggtgctttgatttgctcatgtttgtcccagacatttctttgttctacaatactgcattcttcctgctctagcaagtagaatttgaagatctaagacttttccctttattacattttattctgaacattattttaatagcactattacctttatgaacactttrttggataatatttttattttttaatagtattacatttgttttgcccttaattttagttaaggattttcact

SEQ ID NO: 183114 - DNA, 540 bp, Homo sapiens
gaaactccagatgaaatattgagaaaattccataagcagcatagcagatttttctaaaagcaaaaagaatcttgtcctacacatataattaaatatgtaatacattaaattattttattagaaaaacagcttgcctttatgaatagagggacccatggcaagcattttgttcaactttttttttttttttttgagacagagtctcgctctgttgcccaggctggagagcagtggtgtgatctcggctcactgtaagctctgtttcctgggttcacgccattctcctgcctcagcctcccgagtagctgggactacaggcgcccgccaccacgcccggctaattttttgtatttttagtagagacagggtttcactgtcttagccaggatggtctcgatctcctgagctcgtgatccgcccgcctcggcctcccaaagtgctgggattactggtgtgagccaccgygcctggcttgttcaacattgttaagatgactaggcataatatataaagaaggtagcaaacttagcctaaaagctt

SEQ ID NO: 183115 - DNA, 456 bp, Homo sapiens
aagcatgagtcaatataaaacattcaggmgaatacttggaagataaggttgaggttctcttgaagaaatcccaacaaaaatcatagaaaaggaagaaagaaaaaaaaaactattgaatatgataagaaacatccgaatgtaaagagttccagaaagattttttaaaggagtaaattattgaacaaagaatatacaaaaatctcctggaagcgaagtttctgagttttcagattatggcagcagtggaggtttgtcactaggatttcccctcagtaagaacttgctgttcagctgcaaggagtacagtcagcctccagctgtttccagcctcatcctatacctcagctttcatgccaaggtcttgctcttcccaggcaacaaccaaccagtgactcagaatgacaggggtactaggtcttggccaattatactcaattatacccaatgttagagtcc

SEQ ID NO: 183116 - DNA, 442 bp, Homo sapiens
ataaaacattcaggagaatacttggaagataaggttgaggttctcttgaagaaatcccaacaaaaatcatagaaaaggaagaaagaaaaaaaaaactattgaatatgataagaaacatccgaatgtaaagagttccagaaagattttttaaaggagtaaattattgaacaaagaatatacaaaaatctcctggaagcgaagtttctgagttttcagattatggcagcagtggaggtttgycactaggatttcccctcagtaagaacttgctgttcagctgcaaggagtacagtcagcctccagctgtttccagcctcatcctatacctcagctttcatgccaaggtcttgctcttcccaggcaacaaccaaccagtgactcagaatgacaggggtactaggtcttggccaattatactcaattatacccaatgttagagtcc

SEQ ID NO: 183117 - DNA, 600 bp, Homo sapiens
cttcagccatataatttaactatctatctatctatctatctatctatctatctatctatctatctaaataggttcatttgaaccataggaagtttctatttgtaggacacaaatgaataaaaattgtcaatgtcataagatctaactgaaaatatatatgctttaattcacacacagacacacacacacacacacacacacacacacacacacaatttaatgatggggtataataagagaaaggccaacaaatttataaagcacacagggtatacagacacccaaacaatgaaaatttagattattgcttttttgaggtttcctgtgacaaatgtacacaaaggaaattgtctaagtaggtaattttgctcttcacttgtagataaactttaaaagtagactaccaaaatggcatttaaacattctggttattgctcraatggaatttatgctgcactcaaaactataaaatggataaaagtggacacattttaatagaagctagaagaacaagtcactccggtgtgtcatgatgttctacagtttgagtggaagtataataggagaagggtatgtaatcaggtagatttagtagggcat

SEQ ID NO: 183118 - DNA, 567 bp, Homo sapiens
caaacacaattctgccttcatagaacattgaagtaagagaagaaatgcaattttaaaataagtaaaatattaagtatgtcttgtggtcagtgmatttgagaaaaatacgtagataggaaggatgaaggtgtgaaaggagtggggggtgtcattttagtaaagaacatagtaatatttgcacaaagatataaagagtgaggcagttagacacacaggtaaactggaggaagaatgatcaccacagaaaactttaaaatgcacaatctggatttgcattgaactgttacctaagcgtgaaagaaactgaaattttggagttatattcttggagcagctaccaaaaccctaccattgactgccagtttgtaaggcatagagtgttttgtgtttttatttccttgccaatcctttctccccctttccttcctttcccccggtaggcactctcgcgctcgctcgcttgctctcgctctctctctgtccctgtctttctctctgtctctccatcattttcaccattggttattagagaagcaagaaatcctggtttggttaaacagcaatcgg

SEQ ID NO: 183119 - DNA, 484 bp, Homo sapiens
taagtatgtcttgtggtcagtgaatttgagaaaaatacgtagataggaaggatgaaggtgtgaaaggagtggggggtgtcattttagtaaagaacatagtaatatttgcacaaagatataaagagtgaggcagttagacacacaggtaaactggaggaagaatgatcaccacagaaaactttaaaatgcacaatctggatttgcattgaactgttacctaagcgtgaaagaaactgaaattttggagttatattcttggagcagctaccaaaaccctaccaytgactgccagtttgtaaggcatagagtgttttgtgtttttatttccttgccaatcctttctccccctttccttcctttcccccggtaggcactctcgcgctcgctcgcttgctctcgctctctctctgtccctgtctttctctctgtctctccatcattttcaccattggttattagagaagcaagaaatcctggtttggtt

SEQ ID NO: 183120 - DNA, 423 bp, Homo sapiens
ccaaacgtgctctgacttccatttttttttaaattagtaaaatccaactgagatggtggaaagagcaatatgawaagtattacaccatagaattgtgttcccattgtctctataagacttttcctggatagagtactgcagaatgaacatgtgttaaagaaagaaaagctatttttgaaactatgaaagtcaaatattaggggtaaggcaaacatttgttaccaattgcaatagacaaagcagttgtgtttcccgaaaattcacatgttgaaattccaatacttaatggttcttggaggtggggcctttgggaagtatttaggtcataagagtggaatcctcatgaattggaggagagagcagagagctagctagccctccttctaccatgtgaggatacaacccaaaagagggccctcacca

SEQ ID NO: 183121 - DNA, 424 bp, Homo sapiens
ttttttctttagcaattttgtcctgatattagaaaacaggtcattttcttgtgtcattcttttgcatcctgtgtttacattaatgcagtcaaattagaacttgtggaaaatatatacttttgtaagagtataaagaaaataactgagaaccacaatcccactcatcagaagcaatcctttttcatctcttattatatttccttctaattgcattgctatatattttacatgatgaaatcaccttgtatgaataattgtatatgctatatattttawttaaaattttatatttaatattcccccaaaatcactaagaaatctttgtacccattcattttataaactatatttcattgcaaagttgtattctaatttgcttatatccgctaataacatattaaatattttatttttcacaattata

SEQ ID NO: 183122 - DNA, 549 bp, Homo sapiens
tactggcatcttatacactaaattggtatgttttcattaattaatgaaaaagccatcttaaaggaatgaaataaaataaaaccctggggcagggaaaaatattagagaaactaccactcttttggaacctgaacatttgaatctatcatcttcatttgatagggtcctaaagtggtactgggtcaaagcaggctgttaggaatggaggcttttagaggaaraaaggtagcattaaccaaacgtttgttgagtactatttttaagaatcatctctaatgctgtgtgctcctagtcaccattatttaatgcagttgccactgccctgcagacactaacctaatttgcaaggagcgtttggtgacttacaattgattggcttccaaagtctccaagaaatcagtcacaacagtcttttaacccaaacaccatttgatatggtttggctgtgtcctcacccaaatcccaacttgaactgtgtcttccagaattcccacgtgttgtgggagggacccaaggggaggtaattgaatcatgggggccagtctttcc

SEQ ID NO: 183123 - DNA, 457 bp, Homo sapiens
ctatactcatatttcttcttgcaaaataccaacttttacttttctccattttctgcatctttaagtttgatcatttatttcccttcatttcaaggtatgaaaacaataacaaccttttctttgatcgtcctaaattctttatatcacrtctgcattgattggtgttcactttttattctttttaaataaatgttttctattacccgttcataaatatttgaatgctcaaagccatctttggagagaaagagaatcactgttttgtattttgtctttctatcaaatatgtctagtaatataaacaagttttaaaaaatatttaattagttcatgctgaaatcataccactgtgataattttcagtaatcttatttttaaaatgtcttactctttttaatgcccttttaaggtctgtaattattttatcttttatagctatgaattataaaatcagtac

SEQ ID NO: 183124 - DNA, 281 bp, Homo sapiens
cgttttacactgggggcactgactgattcagctgtgatttattcttgatgtttatatttcataaacagcttaaaatattaacatatattaatataaatggtctttttctttcwttctataaatatagttaactaaagacttaagtccttgttaatacagatttcatgatctctaaaaataaaaaacaagttatcctccatcaaaataaatgatataaatcgtgaatacaacaatatttcaagactagttcaagttgaaggcagttactagaatatgcatcc

SEQ ID NO: 183125 - DNA, 414 bp, Homo sapiens
tttgatagcaacttccagctgtgctggtccctgggagcttcctcatccgtcactgtctcccttgaccctggcttatgcttctgtatatagttcttttattaaattctctacaagtacccctttcagtgtccatccgttttacactgggggcactgactgattcagctgtgatttattcttgatgtttatatttcataaacagcttaaaatattaacatatattaatataaatggtctttttctttcattctataaatatagttaactaaagacttaagtccttgttaatacagatttcatgatctcyaaaaataaaaaacaagttatcctccatcaaaataaatgatataaatcgtgaatacaacaatatttcaagactagttcaagttgaaggcagttactagaatatgcatc

SEQ ID NO: 183126 - DNA, 530 bp, Homo sapiens
cagctgagcaaactcagctgttaatgatccgttaacaacaacacttcttccttactctggctctatgcaaagytgtcctacagctgtttagggctcaaattgctcttgaatgagaattgaaattgcagttcatctatagaattatcttttggggaagaaagagtgaagatagactgaaaatatgttgccttttacaatttgttatttggagcacaaagggttaacaggacacagctgtagggagttctcccctaggaatttgcttttctgctgggtaaatgactctcaccaggtgacttctaggctccttataaaggctgtttttctcaaatctggtagttctcctattcctgaattttttccctatgttttctcctggcagaagaggacctctttgtccaggggcagggctgatcaggggctgattccgcagctatagtagtacagaacctttctgcaagtaagttagtgaggttgagataactctctctcacttgctttgcattaatagattctctgctgtgtgggat

SEQ ID NO: 183127 - DNA, 541 bp, Homo sapiens
tcatttaatagatacttttagatgctgttgtgctagccattttttctggctctgagatcgtaggtctgagaaaaaatggtccttatattttcctgggagtcatttttgccttagtggccatgtctcctcagtttcatyagaggacgcttcttctggtcttttctttaaatactgctgttccccagcactctgtcctcagacttcatttcccttagatttattactctaagatatttttcactgatcctgtgacttcaaccatagacattagtttcacaactctcaagccctattatcagggcaggagtcattttccctaggatgcagaagtaggtacatgtcccgattctcgtatgtaaagtcacaggtgaaaaagtgaagcttatcttccaactgagatccaaggcttgactcgaagatccatagcttttgttttgtcttgcattgcctctcaattcaaaatttccagccactatctttctttgcgtgtgtgtgagaactcaaagaggcttcctgtattgaacatttttccttcttctca

SEQ ID NO: 183128 - DNA, 541 bp, Homo sapiens
tcatttaatagatacttttagatgctgttgtgctagccattttttctggctctgagatcgtaggtctgagaaaaaatggtccttatattttcctgggagtcatttttgccttagtggccatgtctcctcagtttcattagaggacgcttcttctggtcttttctttaaatactgctgttccccagcactctgtcctcagacttcatttcccttagatttattactctaagatatttttcactgatcctgtgacttcaaccatagacattagtttcacaactctcaagccctattatcagggcaggagtcattttccctaggatgcagaagtaggtacatgtcccgattctcgtatgtaaagtcacaggtgaaaaagtgaagcttatcttccaactgagatccaaggcttgactcgaagatccatagcttttgttttgtcttgcattgcctctcaattcaaaatttccagccactatctttctttgygtgtgtgtgagaactcaaagaggcttcctgtattgaacatttttccttcttctca

SEQ ID NO: 183129 - DNA, 417 bp, Homo sapiens
gtttggccaaatatgaaattctgggttgaaaattcttttctttaaaaatgttgaattttgtcccccaatctcttctggcttgtatggtttccactgagaggtctgctgttagtctgatggacttcgctttgtaggtgacctggcctttctctttggctgcccttaacatttttttttaatttcaaacttggagaatctgatgattatatatatatcttatggttgatattctcctggagtatcttattgggattctctgtattttatgggggaattgctccagaaccactgggcttcctggagccaggaggctagaacggctgactcaaactgaagagatggccactgtccctccccctaggaactcggtctgtmtcaggcagtctcctgcctgctgccactggccacctagaattc

SEQ ID NO: 183130 - DNA, 584 bp, Homo sapiens
agctaattcactgtatttgttatgagccactcctgtccacctctagcgttaaaattttccttccaattccagataatctaacttccactacatcattataacttacaaactgtaacttttctgacacccacttccacaagcaaacttcgggtctttttcaaggtaaggaactgtatttattgcagtctttatgtatttcttaatcatttagaacatacagaacaatgctaccctttttactttcttttcttttgtgtatcactgatcaaacattttaaagttatgccccttgcctccttttccccataagttctgtggtttatatactatggatttatgcatactgcagtgatttagatcacatatgtcacactgtaacagaactggctctatattgtcacttaatttcttgcraaggtgcaaaagcaattccatggagaaaaagcagtcttttcaacaaatggtaccagaacaagtaggatagagatatagaaaaattcatcctcataccataaataattaactcaaaatggatcgtaaaccatgtaaaacctaaaactataaaatttacaaaaaagaaaata

SEQ ID NO: 183131 - DNA, 530 bp, Homo sapiens
agagatttgactaagaaattatgtatgtatccggagaatgtgatttaatctatattttaataaaattcataaaataatgtacaagtttttatctgttacaayatattgtactgccctaaggtgtatgagataatagcctgcacataaaaaaattagcctttttaggacatttcagtggttttataggaggacagaatatttgagatagtgctcttctgttatgtatagcatatatggtcatcataaaggtcctcataaatattctaacagatttatacagtagacataagagcagagtatagaataaccattttaatagccaaatatttaatattgacttaatcttgtggacctaaactacttagtattatggcaacttctcactggaaaaatgttaaggtgaatatgtaccatatgaacatatcaacaacagacattaaaatgaaaaatatataatatgtccgtgtttagattaatggttaggtaaacagttttagattaatggttaggtaatcaaacccagagagtag

SEQ ID NO: 183132 - DNA, 435 bp, Homo sapiens
tgataaaaatctcatacacacacatacacacacacacacacacacacacacacacacacacacaaatagttccttgattatttcccacctgtactttcacagagaaagataagttacggaaatgaagggtaaaggaaagagggggaagaacaagtcttagtttttatctggaagattactttacttttttgtatttttttaaagaaagggctcagagaaggtagtttgggcctgggggtgtgaagtgtgacagaagcagstggtgccatgtaagaattttttaaaagaagataaataaaatagatgatgactcattcataaagtctttcatatccatcctttctattttactttttataatcaagattttgtttttccaaacctcttttacttaatctcttaaagccttgcctccattctctctctctactactc

SEQ ID NO: 183133 - DNA, 568 bp, Homo sapiens
aaactaactgagggcagaaattgcatctgtgttgtttatccttgtttccccagcacttagttttttttgcataaaatgcattcaataaatactgaatatgtaaattaaygcatgaaacttacacagatggtccctgacctaaaatagtttaacttaagagtttttttaatttatgataggttgctcagagtattaaatacaatttcaacttatgattttttgacttacaataggtttattggaaggtaaccccatcaaaagtgtaggaacagccatatttacctattcatcttctataatcctattacaaagtaataattaaataagataatgcccaaagtttatatgaaaatacattatgggcaggcacatgcttgtattcccagtcttcaaaacactaattaatataacacatagcatttctattaaactttatggagtatatttataaatcaaggaagtttaccataatgtaattaagaagaaatgagtatgaggcagtataggagtgggcccggtaaaggagtgacaagagagaaatgaagtgagaagtaacaattgaaatata

SEQ ID NO: 183134 - DNA, 585 bp, Homo sapiens
tgtttttcttcacgtctattaatttttataatatattggatatgatggatgatatgttttatagatcataggttccattggmttcttgtgaagactgtttttgttctagcaggttgtaaattattagccaataacctagcacttattagaggttggctttacaccagttagggggggtctgtttcaaatttacctttagttttagcatgaatctcttaatctgtaggtattgttttacacctaatcatggcccttttaggccttcaatggaaagcttggattatttggtttttccttttatgtttggttgacacatagtggttgcacatatttatgggggtacagagtgttgatacatatgtacagtatgcaatgatcagggtaattagggtattttttacctcaagcatttattactttgtggtgggaacattcaaaatcctttcttctagatttctgaacatatacaataaattattattaattatatttatcctacagtgttatagaacactagaacttattcctcctatctagctgtgtaattttgtatactttaaccaacatcttcctatcctcctctcc

SEQ ID NO: 183135 - DNA, 560 bp, Homo sapiens
agaaggagatccaccttccttacttcaatttccagaatcacaaagagctcctgtgctgtaatggcagtatgagtcactggagctgtgggtctgagccccgggatgcatcagtccagttgtactatctgaaagactgattctgaacctgctgacctttgtttctgggggcagcccaatttccagtggtcccctgccacatgctggacagggtcatggtgatttcttcttgctgcctgggcactccttcttaaagtaccctgacatgcygcaccaatagcaactagtggatgcacctcagggatcctggattttgcaagtgtgcgaagcagctactagagactctgtccttctcttttgcttcctctctttctcctggtcctcctccttgtccctattataaaagactgaagtggccaccttcaggaggttctctaaggtgctatctggtcctatagcctgcttctgtagtttccttctaatatcaggagctccctgtataataaacttgtcctttaggatgagctgtccctccattgattcaggggataggtaagtgtgct

SEQ ID NO: 183136 - DNA, 560 bp, Homo sapiens
agaaggagatccaccttccttacttcaatttccagaatcacaaagagctcctgtgctgtaatggcagtatgagtcactggagctgtgggtctgagccccgggatgcatcagtccagttgtactatctgaaagactgattctgaacctgctgacctttgtttctgggggcagcccaatttccagtggtcccctgccacatgctggacagggtcatggtgatttcttcttgctgcctgggcactccttcttaaagtaccctgacatgccgcaccaatagcaactagtggatgcacctcagggatcctggattttgcaagtgtgcgaagcagctactagagactctgtccttctcttttgcttcctctctttctcctggtcctcctccttgtccctattataaaagactgaagtggccaccttcaggaggttctctaaggtgctatctgstcctatagcctgcttctgtagtttccttctaatatcaggagctccctgtataataaacttgtcctttaggatgagctgtccctccattgattcaggggataggtaagtgtgct

SEQ ID NO: 183137 - DNA, 506 bp, Homo sapiens
tggctttgtagggttcagcctctgtggctgctctcatggtagtgttgagtgcctgtggctgttccaggtgcagggtggatctaccattttgctgctggtggatctaccattctggagtctggaggacgatggccctcttctcacagttctactaggcagygcagcaatgggaactctgcctgggggctccaacctcacatttcccctccacactgttctagaagaggttctccatgaaggttctgcccctgaagcaggattatttctggacacccaggcttttccatacatcctctgaaatctaggcagaggctcccaagcctcaactcttacactctatgtacctgtagacttaacatcatgtggcagccaccaaggtttacagcttgtaccctctaaagcagcagcctgagctgtacttgggcctgtgtgagccatgtctggagtgactgggatatgaggagcagtgtccctaggcctggcccataaaaccatttttccctcct

SEQ ID NO: 183138 - DNA, 255 bp, Homo sapiens
tgattttccaactgctgcttttcataaacactacaaggcatttttctcttttcatcacggatacctttaatactatagattctgccagtttacatggcccaaatggcagggatgtttgttctgtagcttgcactttgatacrgtttggctctgtccccacccaaatctcattttgaactgtagttcccataatccccatgtgttgtgggaggcacctggtggaaggtaatttaatcatgggggcagttaccctca

SEQ ID NO: 183139 - DNA, 578 bp, Homo sapiens
catgctaaactgtgagtaaattaaaccactttcctccacaaattaccctgtcctgtgtatgtctttattagcagtgtgagaacagactaatatagtaaattgttactggtagagtggagtgctgctgtaaggatacttgaaaatgtggaagtgacttcggaactgggtaagaggcagaggttggaaccctttggagggctcatggaagatatgggaaagtttggaacttcctagagacttggtgaatgtctttaactaacatgctgatatggacaatgaagtccaggctatggagatgagaaacttattgggaactagagtaaatgttactcttgctatgttttggcaaagaaactggtgccatttttgccctagccctagagatctgtggaactttgaacttgaaagagatgatttagggtatctggaagaaacttctaagcagaaaagcattcagggtgtaacgtgggtgctgttaaaagcattcagtttttatgtattcacaaagatatggttcagagttggaacttacgtttaaaagggaagcagartataacagttcagaaaatttgcagcct

SEQ ID NO: 183140 - DNA, 444 bp, Homo sapiens
tggctcttttttccctgttaaggagtttgtgaatttatttttaggcatagcatcaaatatgtgtttttaaaaawttctttatttgttatccacccatctgcacactgattttctattttttaaaaaaatttacttacatagcataatacatgcaaataatacatgtaaacccttgtgatggctacttttatgcatcaacttgcctgggccatagtacccagatatttggtcaaacattattctagacatctctgtgaaggtactttttgatgagattaacatttaaatcagtagactttgcataaaacagatggccctttataacatgggtgggcctcatccaatcagttgaaggccttaacagagaaaaagactgacctccctggaggaagagcgaattctgctagcaccctgatgttgaattcaaactgaagctcttcccta

SEQ ID NO: 183141 - DNA, 546 bp, Homo sapiens
tgatgtttcttggtttcttattgtttaaacaaaactgtctattttgattctagcatataggaaatgtaagaagttcaaatatactagtaaaaatgaaaggtattttcatttactaaagctataatcaagacagaaggcattaattaagtaattacttaagggaatagaaatgtttttgagtttgttaaagattcttccccgccaaggggtggctagagctctgtctttactgtaacatatgcaaatacatacataagtagagcaaaccctgggtttttcttacttctggaagaaaacagtagttcaaaaaaaataaatctcaaaataaattttgtttgatttggtagtgcagcagcagcacataatttgggggcagttggtggatttattttgtgagcatgtgtgtgttttaacacttaatctaaaacaagagtaacattaatytttatttcttagcacactactcattacttaagaaggtgtttcagaattgtgttaaaagaaaaggtagttaatcaggaaggggggagtgtgtgtgtgtgtgtc

SEQ ID NO: 183142 - DNA, 565 bp, Homo sapiens
cattgtttacaacttacatgcttatatatttagctgaaaatactttcaaacaaaactttgaaggtgtgacctgatttcttgttgccatttagaataaaatgtgagaagaaaaagataaattgaagaagagaccattaagcacaaagaaaccagcacttgatgattcaaaaaaatcacatctattcagattccaaaacgtgctaatgttattcactgttagagaaactrtgctctgaagacaaggaaaagacgaggctgaaagatttttgctgaagaaattaagtgtgtgactcttggggtcccctcaaccatctcagcagaagccagaaacagaaatggagttatctaggaaagacctgtagaggatcctcttgtctaatggtgtgaaaccttatggtatatgtgggagaccgacaatgttgttgagaaaattatataagcagaaacactgccaacttaaactaaaagggatttcacaaagtgaaagaagactatcagacttccaaaattttacagtcaggaaatggactgatagagctactcaactgcaaacatgtgctacact

SEQ ID NO: 183143 - DNA, 565 bp, Homo sapiens
cattgtttacaacttacatgcttatatatttagctgaaaatactttcaaacaaaactttgaaggtgtgacctgatttcttgttgccatttagaataaaatgtgagaagaaaaagataaattgaagaagagaccattaagcacaaagaaaccagcacttgatgattcaaaaaaatcacatctattcagattccaaaacgtgctaatgttattcactgttagagaaactgtgctctgaagacaaggaaaagacgaggctgaaagatttttgctgaagaaattaagtgtgtgactcttggggtcccctcaaccatctcagcagaagccagaaacagaaatggagttatctaggaaagacctgtagaggatcctcttgtctaatggtgtgaaaccttatggtatatgtgggagaccgacaatgttrttgagaaaattatataagcagaaacactgccaacttaaactaaaagggatttcacaaagtgaaagaagactatcagacttccaaaattttacagtcaggaaatggactgatagagctactcaactgcaaacatgtgctacact

SEQ ID NO: 183144 - DNA, 573 bp, Homo sapiens
caacatgataacataacaaggacatataatttcaatatattagtgatttatataggcacttcaaatggtcttgaaatagaaaatcaagcccaaaacatccccagtagatgtatggatctgagcatagaagttctaacaactatccacatmacaaaaacagaggtgaccggccattacatgccccttgttggaggaacacatcacttcctttgtatttctccccatctccccaaaaagaactggaacattatcaagctatgtaactaccgatttacaagaaacccagactacaggacgttctgtggatcaaatgacctatgttctacaactaacacattgcaaaaaagtttgcaaagaaatgaagatgaggaaggatgtttagatgaaagagacttaaatgacacattaatcaaaagcagagccaggcatgtagctcaagcttgtaatcccagtgactcagaaggctgaggtgggaggatcacttgaggccatgagttggagaccagcttgggcaacatagcaagaaccgccccccacatactctaaaataaataaatgaaagcaggcaaaact

SEQ ID NO: 183145 - DNA, 604 bp, Homo sapiens
agttacattatctctatgttataatgtaaagttgcaagaaacaccaacctacagagagttgcattattcagatgtttctttaaagttttcctgagcttcatacccttgaattttctgtgcactaagatgtgaaatccctgagctttgtgacatttctgtgatcaagaaaaagaaaataacaagaaatcctatctaaggaaggaggcagaaacatcaaagcagataagtaaaggagaaacatccatatcccaaacatgtcgaccgatggtttttattgtcacaaaatagtgatatcaagcacattctttcagagcaaagtctaaagacagctacacaaaaatgaaagctgagtgggaaaacttaattggagatttgattgtgtccaatccctaacttttaatcttatttttcattgaactctgcacatacaacatacatatcaacaaatatatacacatacagatatataaccccgggtttgcttaactacagaatatgaagtaaataagaaccaggcaaccacttcacacttgccactagacacattatttgagtaasttgtgatggacactacgttgttcttatatgttaatcgggtcaaggc

SEQ ID NO: 183146 - DNA, 451 bp, Homo sapiens
gccttagacttaaccatgtctgttcctaccttgacatttggatggaggattaaaatagttctttatataattgtatctatgatatagaagaataatattctatcattcattcattcatctatttactcaacattctatgtgcatagaagttgatgaagagctttcactcatagctaagagcattaatttgcccattctatgcccattcagttgattaatatgcccattgatttattgtaggttgagtgtttatcacttagyactctacatccatacagttggttaacagcacaggttttattattagacagtttctgattttggctccactattttctaattatcttatcttgaacaaatttctttctgactgtctctagaactcattgtctcaccataaaacaaagaaagtaatatttttttctcataagatggtttaacgattaaagga

SEQ ID NO: 183147 - DNA, 629 bp, Homo sapiens
ctgcagcatcacttttaatgtggtttctgatgtccagcccttaggtgtttccaagttttatcatctttctacacttgatctcccattaatattgtgaaccccataacagctcagtaaatttcactttagctgaagatagccagtgttgatgtctactgtttgaaatcagaattgatagagtgyataaatgcatcagtggaataccatcgcctatctttggggtgggtatgggggtgtggaatagaaagggtggttgataaattattgaaaaaatgcgagctctgattctttgtaatattctatatcaaatacttcccctccactaccatctctctaccttgtctgcccacccccaccccaactccttgacctgcagcctcgtgacaaagatgtgaagtgtccagcactttagacctaggggcaattgctttggtaggctttattctagggacgactgtcgacaccaataagaacagacaacagtaataggagtgaataagatggtgggaatgtgaacatcaaagcaaagaacaatattcagcttgaaacaaggtcactagctcttgatgtaaggtgagagtgggaggaggatctcagaccacagatttttaagttagcaagaaaccaaa

SEQ ID NO: 183148 - DNA, 549 bp, Homo sapiens
gcctctataatcacatgatccaattcccttaataaattccctcttatatctatatatatcctattggttctctttctctggagatctctgactaatacagaatatatcttaaatctccatactaacccaagaggtaaagtctattattatcaccattttataaataagaaaactgacatccatagaagtcaaataattttccccagatgacacattatataaaagaggggccaggatttaatcccagaaagataaaaaggtaaaaatctaagccaatcatttaacatctgagtcaagaagcagagaaaaatcagtgaacacctttaaaagttcttttggggttaagggagtctggcatacaagtaggatttccacttctatgcagttcagacaggaaaggagatggtcccaaagtggtaggtgtggctgggaatacaaccaatttgaatcaaaaggaggaaagaaaatcagttccagatccagaatactatgtgtctctcccaagrcctattcccctcccacaaaaaaattgtccaatttttaaaattt

SEQ ID NO: 183149 - DNA, 494 bp, Homo sapiens
tccaataacactgctctgctcagaaagcaagaggcctaatcataatctactctccggtagcctccarcaggtgaaatgtgttcaacagtccccagccttcaggagggcaattcagtgtgcacgtagatacagccaatagcatctgttatctgttccatcaaacttgcccaaggggtggtgttcaggaactcaaaccacgtttttcccctgctctcacgtcgacagcataacaatcaacacagaagacttctgtgaccccaaaacatgtgaagatttctccccactagcaaacaaggaatccattctgcagcagacaacagctcggtgtcctccaattcgattccggctttatctgcttgcagacagcgtcagatccccacaagtagagggctcaatcatgaaaactggcccctgcttcagccaccagccacaagcccaggccctcagaaatttgactgaccagctttaagttggggtttccgtgacccacctct

SEQ ID NO: 183150 - DNA, 494 bp, Homo sapiens
tccaataacactgctctgctcagaaagcaagaggcctaatcataatctactctccggtagcctccagcaggtgaaatgtgttcaacagtccccagccttcaggagggcaattcagtgtgcacgtagatacagccaatagcatctgttatctgttccatcaarcttgcccaaggggtggtgttcaggaactcaaaccacgtttttcccctgctctcacgtcgacagcataacaatcaacacagaagacttctgtgaccccaaaacatgtgaagatttctccccactagcaaacaaggaatccattctgcagcagacaacagctcggtgtcctccaattcgattccggctttatctgcttgcagacagcgtcagatccccacaagtagagggctcaatcatgaaaactggcccctgcttcagccaccagccacaagcccaggccctcagaaatttgactgaccagctttaagttggggtttccgtgacccacctct

SEQ ID NO: 183151 - DNA, 576 bp, Homo sapiens
tacttattataaaaacagaaacccattatagaaaagctagaaaatacaagcaaaagaacaacaacaagaaatgcatctttttgcccacccttaggtaaccactgttattatcttggcttatatcattccaggttcttttccttgcctttcattgatctgacaaaggaagggactgtgctrcaaagtagtgagctctccgttttcagaagttttcaagcagaagtaggaaaatctatcagagatgtgtcagagatatggtataaaagaaaggttaaattttataatgtctagtttttttcaactttaggattctaagaaaaaaaacgataaatgccattgtaatgctcacaaggattgttcatttatattgtatttgtgggattcagctgaaaaataacttctaaaattccagctctgattggtaattcattctgtcgtttctgaggtattggcttgaacgcctatatttgatttctgtgcttgagtaaacccacccactggccagactgaaccccagtgtgtttgacattttcccttttgaacagcatccagcataatgtagcttactggaaaaaa

SEQ ID NO: 183152 - DNA, 576 bp, Homo sapiens
tacttattataaaaacagaaacccattatagaaaagctagaaaatacaagcaaaagaacaacaacaagaaatgcatctttttgcccacccttaggtaaccactgttattatcttggcttatatcattccaggttcttttccttgcctttcattgatctgacaaaggaagggactgtgctgcaaagtagtgagctctccgttttcagaagttttcaagcagaagtaggaaaatctatcagagatgtgtcagagatatggtataaaagaaaggttaaattttataatgtctagtttttttcaactttaggattctaagaaaaaaaaygataaatgccattgtaatgctcacaaggattgttcatttatattgtatttgtgggattcagctgaaaaataacttctaaaattccagctctgattggtaattcattctgtcgtttctgaggtattggcttgaacgcctatatttgatttctgtgcttgagtaaacccacccactggccagactgaaccccagtgtgtttgacattttcccttttgaacagcatccagcataatgtagcttactggaaaaaa

SEQ ID NO: 183153 - DNA, 425 bp, Homo sapiens
gaggaggagaacagtcaaaggtaagtcatttyaaattttcactatcaagaattcctttaaaagtttctccgttgacccatgttttgatagcttttactctactaagtagatggtatttatcactcaataacttatttctccacttttattaatcgaagacctatatgggattgttaggaatactgattagcatgagctaagtgtaggggaggtagggatacccttcactgcacctttactcttctatgggctctttggctgggtctgggagccaaactgacacgaggcaaattagcaagagaaaagcatgcatgttttacctgagtgtgggggcatctccaccagagtgtgaagtcccaagaaatggccaaagcttttataatttttagacaaaaataaatttgtgaagaaatgacaggacaaag

SEQ ID NO: 183154 - DNA, 605 bp, Homo sapiens
ttctcaactctctagggccagtgatgacccaacagctagggctacaggtaatagggacatggtcagaggccatggtatgttaagctgattcctgcactatggtgtaggactaggtttagaggaaggttgaaagagatgactatgagggaactcttcttgagggctttgccaatgaactctagtgacagctaatatccaggttcctttttctgttctgcaaaataattctmttctgttatccccaaacctttggtaatgttttgctaactacatagtctagtcttagaagtgcttacaaaattaactgtgtccacattgagacttaagcaatgtaagcatatccgtagcagcctggggaaacagtttgaaattgctggaatccacccatattgaagcctagagagcattaagccagacagggagaaggcaagtaagagctcattaaaggctaggcttcttcctgatttgggggtaagaagagagcttgtgtgctattaataggtattaaataaaaagtaacccctggagaacttgagtcatctcagtgttgatcacatatgagaccatgaaagcttagatttcgggctttataaattaaaaaccta

SEQ ID NO: 183155 - DNA, 622 bp, Homo sapiens
agcaaggccaaagattcaggatttcaagagtctttcctactgttagtcattaagagcccagttaggaatcaaatatgcacttaaatttaggtaaaacatgcatggattttgcaggcagagagcttgagtttcgatctaccttactttgggcaagtttcttcacctctcttcatctggaaaatggatgcaatactagtaccaatctcacagagctactctgaggagtaattgaaatagtgcatgcaaattgttcacttaccrtactgacaagactatatatgttttctgttttttgttttttgttttactagacctccacacggatttctgatgatagcagctggattagctattctctctctctggctatttctcatttctgcagctacttgactgagggaatggccccactcttttttcctgctcccttggtgtcaggctaattgaataaaaataggaatctacaaattaaaagtctcacacatgctgctatagcaacgctctctctcccattcctctgattacatgcatccatcctcttgtaggcttaagacaaatgtaatagtgatttgcaagggctctagggtcaaactagggtgaccaactgctccagtttgcccag

SEQ ID NO: 183156 - DNA, 622 bp, Homo sapiens
agcaaggccaaagattcaggatttcaagagtctttcctactgttagtcattaagagcccagttaggaatcaaatatgcacttaaatttaggtaaaacatgcatggattttgcaggcagagagcttgagtttcgatctaccttactttgggcaagtttcttcacctctcttcatctggaaaatggatgcaatactagtaccaatctcacagagctactctgaggagtaattgaaatagtgcatgcaaattgttcacttaccatastgacaagactatatatgttttctgttttttgttttttgttttactagacctccacacggatttctgatgatagcagctggattagctattctctctctctggctatttctcatttctgcagctacttgactgagggaatggccccactcttttttcctgctcccttggtgtcaggctaattgaataaaaataggaatctacaaattaaaagtctcacacatgctgctatagcaacgctctctctcccattcctctgattacatgcatccatcctcttgtaggcttaagacaaatgtaatagtgatttgcaagggctctagggtcaaactagggtgaccaactgctccagtttgcccag

SEQ ID NO: 183157 - DNA, 595 bp, Homo sapiens
ttcgtggtacccattatggtgccatttggccctacaaatcctctatacagaaagtgcaaataatacacaagtgctyatcaggttaatctgagtggtagctgtgtccacgtgtgcctgtccatgcatccctcccaaagattagctaagcatccgctccaagcatctttcatctgctgaaccctcttgctctgcctttactctggtccttatatccacatcactaagagggaaggttagtgtagaagacagacaggatgtatgaagtttggataacacaggatttggggagtgtggtctttctgcccacatgcaccctgccctaagtgagttatgttcttctttccccttgtttattgctctgttttgaattgattcaatgaagtatgagattccaacatattcattccagctatgagccttcctgttctgtgacctctgtaataacttgcctggtatggtacttgtaggctatccttgcatcagagtgatttcccacaagacattttattggcttcatctgtattttaccttatgattacatgctactattcttttttgcattttcagatttccctttaataattttgtaatctag

SEQ ID NO: 183158 - DNA, 595 bp, Homo sapiens
ttcgtggtacccattatggtgccatttggccctacaaatcctctatacagaaagtgcaaataatacacaagtgcttatcaggttaatctgagtggtagctgtgtccacgtgtgcctgtccatgcatccctcccaaagattagctaagcatccgctccaagcatctttcatctgctgaaccctcttgctctgcctttactctggtccttatatccacatcactaagagggaaggttagtgtagaagacagacaggatgtatgaagtttggataacacaggatttggggagtgtggtctttctgcccacatgcaccctgccctaagtgagttatgttcttctttccccttgtttattgctctgttttgaattgattcaatgaagtatgagattccaacatattcattccagctatgagccttcctgttctgtgacctctgtaataasttgcctggtatggtacttgtaggctatccttgcatcagagtgatttcccacaagacattttattggcttcatctgtattttaccttatgattacatgctactattcttttttgcattttcagatttccctttaataattttgtaatctag

SEQ ID NO: 183159 - DNA, 633 bp, Homo sapiens
ctgcatttgcctttctctacttctgtttaattcctttcagcccctagacctcctctcactgacctttagactcttccagccctttccacgtggcatcttaattctaccttttgagttcacaacactatctttttttcctctggtctgtgtttggctcctccttcctggcacatttacttacttctgtaccttcatgactatcccttgtaatgtggccctgggattttctcctgstggggagcctcagctggtacagcctagagactatgcctctagcccctccccagattcctgaggcctagattccggagaccaatgggttttaacagagagaaaagacttctcctaccaactattgtggaacaaaacatttcctgctttatcttattttttaagtgattccagggtcttctataaaagatacatggctcatcatttgggaaaagttatttcttttttaaaataactttactatatgcataaccagcacaaaataaatgacatcaacataatcaagagagtgaatatattaatcacctcaaaagttactgtgcccctttttaatctctcactacctcccttacctgcctcccccatccttgctgtgggtccaggcaatccctggtctgcttc

SEQ ID NO: 183160 - DNA, 622 bp, Homo sapiens
tggtttcatttcttcaatatctctctccttcaatctattattatgctgatgcttgattaatttaccctaaaaattctttgattgattcacttagtaattcattcattaatcttataatgcccgtacaatttatcatttttttctcctcttaaaaagtcatcagtgactctgcattgctaacagaatgaaagtcacagtccttatattggccttgaaggcctttgccatccaacctcagcctgtctttctggtctcatctcctgctcccaggtataaatctttgctccttgaataagtgtctgggagggcttaagtgtaaagccctagrgtctgccttgattgggtctcagctctggcacatgtggctgtgtgaccttgtgcaagtcatgtaacttctaaggctcagtttctttatctgtttagcccatagggttatttgaagaccaaaaacataataagccatgtaatataaagcctggtgcatatattactccaggaattatattaaatgagagttcgataagtattagatagtctcatccagccaacccatagtttgcctgccatacattcttatgtaaaaaaagctagacagaggcagacgttctaagaccaaggcttt

SEQ ID NO: 183161 - DNA, 544 bp, Homo sapiens
ggaagggcagccctccactcttctcattgaggggaaggggaaccagcttgctcctagtccctccctgcagtgatgaaagccccccactttccccctcctgtcattggccctgacccacgtcaaggtctctctggttcccgtccctcccctttcttggagctggccgcgtgcttggggtattaggcaatgggtgtgcacccacagccctctccaggccccgcctgtcccaccgccctctagccgcctgcgggtcagtgctcaggccagccggtcgggctgagggcactgcgggccagctcrggccacccagtctgccggcctgtggcctcttgtcccagagttgggcttcagtagagagaaggagcaggactctgggtccttggatttggaacagtcctgcttggggagacctagggtcaccaggaagttgaaacctattgtagtagttctgcccctcgccccttcttggcacctggctgtatgctggagcctgacaagggtagaatcagaaggcaaaaaataatcccaaacctaagggggaccc

SEQ ID NO: 183162 - DNA, 610 bp, Homo sapiens
cccccttcccccataacacacacatacacacacacacacactcagatacataataggattgcagggtgatcaatacacataatcaagggaaaaataggaattctgctattaaaaggaaggtaggtagggaaagggagagttcctaaccactgtcaactatatggtagggagcattctctccccagaaaggagtatgtaccctctgggcacctgttggaccaagcccaccttatacccatccagggcaggaggctactgccctattggtagaggggccagaaacaaaaaacaaaaggggggtaatatgaacaaartactactcaaaactactttccgcttcctcctctaaccaggagaaaaggccagaaagaaaacagtaatttcaggatttgagttccctatctgaaggcagagggattggactgtggcctttctcctttaccatcatcccacttccaagacattgttaggaagtaggccagagtctcacttagactctcctttcttcatcctcttagatgtcgtctacaagtcaagggcaaagatatctccaaattattttagctcttgccaaggtttgattttttttaagttaatgcaattctttaag

SEQ ID NO: 183163 - DNA, 610 bp, Homo sapiens
cccccttcccccataacacacacatacacacacacacacactcagatacataataggattgcagggtgatcaatacacataatcaagggaaaaataggaattctgctattaaaaggaaggtaggtagggaaagggagagttcctaaccactgtcaactatatggtagggagcattctctccccagaaaggagtatgtaccctctgggcacctgttggaccaagcccaccttatacccatccagggcaggaggctactgccctattggtagaggggccagaaacaaaaaacaaaaggggggtaatatgaacaaaataytactcaaaactactttccgcttcctcctctaaccaggagaaaaggccagaaagaaaacagtaatttcaggatttgagttccctatctgaaggcagagggattggactgtggcctttctcctttaccatcatcccacttccaagacattgttaggaagtaggccagagtctcacttagactctcctttcttcatcctcttagatgtcgtctacaagtcaagggcaaagatatctccaaattattttagctcttgccaaggtttgattttttttaagttaatgcaattctttaag

SEQ ID NO: 183164 - DNA, 579 bp, Homo sapiens
tttgattttttttaagttaatgcaattctttaagactaatctgtaactaggccccaagcctgatcaggacaactctaggacaaggcagtaacagttccaaggcccaaactctatggtttccttaatcctctaaagtatgtaatctaaatcagtctatacagtctaaatagtaccttctgggataaggattgatacatgcacagcaagggtgaragaatggacaaggaccaactccatccccctgtgtgtcaatcagcctttactgctcttctacttaggtcctaaccggcagtattgaaatggaggtgggaagatacaactccttatgaagtaagacacagcaagagggcacactagcaaagcagtcctatataggagaaatgcttataggcatgacactgcattttaaatacaaaaaattaagttctcttccaattccaatctcaacagagggagccataagaaagattctcctctgagtcttctacaaaaacaagggaaaaagaaagaaaaaaaaaaaacagaggccaagaaaaaagaaattgggcaggcttcggaagcaggagcattaagagctga

SEQ ID NO: 183165 - DNA, 583 bp, Homo sapiens
ttttttttttttttttttttttttgagacagagtcttggtctgtcgcccaggstgaagtgcagtggcacgatctcggctcactgcaagctccgcctcccaggttcacaccattctcctgcctcagcctccccagtagctgggactacaggtgcccaccaccacgcctggctaattttttgtattttttagtagggacggggtttcaccatgtccaggatggtctcgatctcctgacctcgtgatctgcccacctcggcctcccaaagtgctgggattacaggcgtgagccaccgcgccccgcctgaggcaggatgttttttattcatcgtagtctttgtataatttatatgttctacattcaaaaattggcatcatattttgatataaattgaaatctccacatagccacatgctagcccatattatgattaaatgtacaagttctttggtcagactgtctcctacccattactgtctgtgtgatcttgtcctgtcaacttctgtaaatctcagttttcctttaataaaatgtcaataacagttctcatcatataagtttgtggtgagatttaaaacatgaca

SEQ ID NO: 183166 - DNA, 583 bp, Homo sapiens
ttttttttttttttttttttttttgagacagagtcttggtctgtcgcccaggctgaagtgcagtggcacgatctcggctcactgcaagctccgcctcccaggttcacaccattctcctgcctcagcctccccagtagctgggactacaggtgcccaccaccacgcctggctaattttttgtattttttagtagggacggggtttcaccatgtccaggatggtctcgatctcctgacctcgtgatctgcccacctcggcctcccaaagtgctgggattacaggcgtgagccaccgcgccccgcctgaggcaggatgttttttattcatcgtagtctttgtataatttatatgttctacattcaaaaattggcatcatattttgatataaattgaaatctccacatagccacatgctagcccatattatgattaaatgtacaagttctttggtcagactgtctcctacccattactgtctgtgtgatcttgtcctgtcaacttctgtaaatctcagttttcctttwataaaatgtcaataacagttctcatcatataagtttgtggtgagatttaaaacatgaca

SEQ ID NO: 183167 - DNA, 408 bp, Homo sapiens
tgaactattgttagttggggatgagttgcatttttaaaatatgttttaaatggcgtatgaaactgcctctgaaggtgataagctatttsttaaataaaaatagactattattgatgtcctcttcttctgtgaaaaagtctacatagtagtatagaaaaagataattgtttataatttatgtagatataaggttgggcctagaaaagtgtacatttgaatgctgaaaataatttatgattaggcagcataataggtaacagttaaaggagactaccaaaaacccttatcttaaaggaatttcaaacttttaaaaattgcaagaatattaatatatactttctatatacctatcttttactcagatttactcatgaacattttgccacttttactttatgtctttccatt

SEQ ID NO: 183168 - DNA, 250 bp, Homo sapiens
ttttcctcctttccctctctcatcaatatttatcaacatcatttatcaactttcttaacaagaaaagagtcttactttgtcaacatagtgcagggaaaccattcttaggctaaggcaacagataagtttcaacggagggagtcttttgcttcacctctcatacygtaaactggggagactaaggattcttttcagatgcctcaagtctagtgtttcaccagagaagcagaatagcaatggttaattgcat

SEQ ID NO: 183169 - DNA, 250 bp, Homo sapiens
ttttcctcctttccctctctcatcaatatttatcaacatcatttatcaactttcttaacaagaaaagagtcttactttgtcaacatagtgcagggaaaccattcttaggctaaggcaacagataagtttcaacggagggagtcttttgcttcacctctcataccgtaaactggggagactaaggattcttttyagatgcctcaagtctagtgtttcaccagagaagcagaatagcaatggttaattgcat

SEQ ID NO: 183170 - DNA, 552 bp, Homo sapiens
tagtatttgcttagtctcatatgaagactcatttattgggtaattgttacccgacaatctgtctttatttagaaagctgtttttattcacatcacatcttaaaggctgagaaataaaagtcataaaaatatcagtgacagataaaacagagaaaattgctctgaacaaactcttctagaatagtgtggtgcatataaattatgaaaacactaagacttgatcaaaaaggaaggtctttaactttcatttaaatgcatgaacagatgtggcagacctaatgtcaatggataaatggccccaaaatgtgraatatgagaacgagatctctgaatgtttttaaactcatgccaggcatggctggattcctcccacaataaatgaaagacctagggtgcatgtagggcaactgtcaaggcttatagagctttggccacgaaagaaaattgagatggctttgtgaagagaattattatcacttaaaaattaatttactgtttcacagtcaactgtacatatgaagcatataaagacaagttgaaccccaattaaaaa

SEQ ID NO: 183171 - DNA, 568 bp, Homo sapiens
tgtaatttcatacctctatacttttcatcatgctcttctgtccatgtaaaatgtcccttattccacctatatttgctgataagctatattcttttcccaattcctaaataaagggttttattcctatgaaatttttccttctctgtacatagaattgaccacttcattttggatatgcctactgaattctacacatacatttattgtagttctcctaattattgatttgattagtttatgtttatttctctatctccactaagtatctctttggaagagagactggactcatttatcattgtatctctagttccaaacacacacatacacaaacctcaatatttactgaacataggagtaagtgaaaactggggttgtttgaattcagagactaatatttcctccacatcattataagaaataaaaatatgattatgtttaatgcacaatgctcttttaaacaatttacactttattttatttcacaataccrtttcatgaaaaagtgctattttaatgtccattttacagatgatgtaactaagtcccagctgttactaaaattgcc

SEQ ID NO: 183172 - DNA, 591 bp, Homo sapiens
acctctttgctttttcctctgccattttcttattttccagttgtcttcactctacctgttcacacttccaagaagaccaagctcaaaacttacttgcaccaaagacattttttatgaacctattttaggagtagtgcttcttttaaacttcacagaagtcttacagtgtgcttcactgtgaaaaattgtatgtaaagtcgattttcattattcatggtaattatgttctctaaagtcaccgtgaacactgaattagcaataattgaatcattgcttctttgtgaaataaagacgaaattgagagttaggtttctggaagcctctggtacataacattgtctttaaccaataagttgtaatcttgttttatgtatgtttctgttttaagacacattattgaatatatattgttgattcattatgctgaattcatggataacaacactatacttcgtgactgaatgacatttacctcacacaggtattttttcctaaggcacatmagagctgtttcgacacttaggaaccttagacaacactacaacactaagcttgggggttattttatcacgttagacagtaaaatcacca

SEQ ID NO: 183173 - DNA, 588 bp, Homo sapiens
taactatagacacaatgttgttcagtagatctctagaatgtatacattttgaataactgaaactctatactcattgaacagcaattccccattctcacttccccaacccctggaagccacacttctactctgtttctatgagtttgactattttacagacctcatgtgagtggaatactgtagtattagttcttgtgtgagtggcttatttcacttagcacaatgtcctttgtgctcccatgtatattgtagagaaataacaaaacaagtaaataaatgtggtktgtctgaatgaagatgtgctttaagcatagaatacacactaaattttaaagactcattacaaaaatgtaaaatacttcatttatttttcttattatttttatattgaatgataatatttccagtatattaagttcaatgagtatactaaaattaatttcacctgcttctttttacttttctaatgtgctactacaaaattcaaaattacacatgtggctttcgtctgtgggttatgttacacttctgctgtacagaactgatccataatccaaagtgggcagtgcaaaccgtagggaatgcata

SEQ ID NO: 183174 - DNA, 588 bp, Homo sapiens
taaaattgggaatgtttccttgaacctcaattatctaatacagggattttaatacatgacttgtctatacacattttatttaatttactgaaaatcaataatatgtcaataacagagaaacatatgctacaatttttagttatttaatcatcatgaaaagcatcatgtaataggctttaytgcgatttcatgtttgattaagctgagccccaaaaacctcaccaatttatgtagactaatgcaagtagcagaaatcgtactcaaatacaagctgcctctcaaagtcaatgttcttgttttataagtaacttgatttttgttgtgtttgttttaaaacttttgcttacacaattgaaaaaaatcataatttcccaaatcaaaatgaagctcactttctttgaaaaatctacaggaagttccccatagacatttttgcttgcacattgaatttatctgttgaatctgatgggcttgcatgaaagatcattcataatatactagaatctcatgaacggagaagacaacataatccgaccttaatctgatgatatactacctttctcaaaatagcgcagaattggttaaatc

SEQ ID NO: 183175 - DNA, 572 bp, Homo sapiens
cagctagaaaggatgaagccaagatgaaaacctatttattttgactccaaagttcactcaactgayctgctaaattataattcaaacattcaaaaacttagttaattttctgtgtttggaaagaaaacattttcttttctcactgaactacaaactttgtagcatattgaaccatgtataaaaatgggcatattaaaatattttataagatgatttctgcctgcagatagttacacaagcattgaggagtaaaaatctttttttttttagattaaaaaggaactagaattttaatagacagatagacaaggaagacacttcaaaaagacaaaatcaagactataggaggaaaaatcatagtgaatattcatgggggaataagaagactttttatgtttctggatagaggatgatatgctgagtagtgataagagataaagcttttaaagggggttgggttcaaatcataaagatcttgaaagtgagtttacaaaacagggacttggttcctttgagaacagaaaatatggataattttgaataggagagtgacaaacatagattaaatatgt

SEQ ID NO: 183176 - DNA, 609 bp, Homo sapiens
tgtcttctctaacaagtctttgcctaatctaaggtcacaatgatattctcctttgttttcttctagaagttttattgtttggggcttatatgtttcaagttaatttttgaatgtggaatgaggtttggcttactttttttcctacatagataccaagtttatccagcattattcattgaaaagactgtcctattgccattgaaatacctggacaattttgttgaaaatcaactgactatgaatgtctgagactatttctgaattattaatttagttctatttagtctatgtagaacaaaattgtatatgtccrtacttacatcaatatcagaccctctagaatattttagttttggagcaagcttggaattcagtacaatgaattcttgatacatttcttctttttaaaacttgtttctgcaaaacatagcaaaaacatatttgtaaaataaatatttgataaaacatttgtacccagaatatataaataactcttaacaacacaacagtaaaaaggaaactcaaataatagtgagcaagcagtttgaatagacacttcacaaaaaaatgttgaatggtcaataagtaatacaaagatgcttaatatca

SEQ ID NO: 183177 - DNA, 609 bp, Homo sapiens
tgtcttctctaacaagtctttgcctaatctaaggtcacaatgatattctcctttgttttcttctagaagttttattgtttggggcttatatgtttcaagttaatttttgaatgtggaatgaggtttggcttactttttttcctacatagataccaagtttatccagcattattcattgaaaagactgtcctattgccattgaaatacctggacaattttgttgaaaatcaactgactatgaatgtctgagactatttctgaattattaatttagttctatttagtctatgtagaacaaaattgtatatgtccgtacttacatcaatatcagaccctctagaatattttagttttggagcaagcttggaattcagtacaatgaattcttgatacatttcttctttttaaaacttgtttctgcaaaacatagcaaaaacatatttgtaaaataaatatttgataaaacatttgtacccagaatatataaataactcttaacaacacaacagyaaaaaggaaactcaaataatagtgagcaagcagtttgaatagacacttcacaaaaaaatgttgaatggtcaataagtaatacaaagatgcttaatatca

SEQ ID NO: 183178 - DNA, 573 bp, Homo sapiens
aataacaaattacagagaagtaacttttttcyagaaaatataattgatatgtatcctttgagtataattaaaagtcactatcataacattacattaaacagaggatgatttatgaatgttccacaacatctcttcgttgaaaataccagtgaactttcggtttatacgcaatattcatgtgcactgactggtctgagacaaattgaataaaacacattgatgtttaaaaagcctcatatatttctgaccttaattaattttgacaacatcactgtgaaggtactgtggtagaaattattattccttttttagatgtgagaaaacgaatttgagagatgattttgccaaacatcacaggacttttgcagtagaactggtagagccacctgtttttttttttttttttcctagtctggggctttaacttaattccaaaagtttacttaaaaatcatctaataaattggtttgttccctctgtgtgattgcatttgaattcttttttagatcaaagggcattttcattaaatgatgctcagaagccattttactgattctctagctgaactgctca

SEQ ID NO: 183179 - DNA, 573 bp, Homo sapiens
aataacaaattacagagaagtaacttttttccagaaaatataattgatatgtatcctttgagtataattaaaagtcactatcataacattacattaaacagaggatgatttatgaatgttccacaacatctcttcgttgaaaataccagtgaactttcggtttatacgcaatattcatgtgcactgactggtctgagacaaattgaataaaacacattgatgtttaaaaagcctcatatatttctgaccttaattaattttgacaacatcactgtgaaggtactgtggtagaaattattattccttttttagatgtgagaaaacgaatttgagagatgattttgccaaacatcacaggacttttgcagtagaactggtagagccacctgtttttttttttttttttcctagtctggggctttaacttaattccaaaagtttacttaaaaatcatctaataaattggtttgttccctctgtgtgattgcatttgaattcttttttagatcaaagggcmttttcattaaatgatgctcagaagccattttactgattctctagctgaactgctca

SEQ ID NO: 183180 - DNA, 367 bp, Homo sapiens
gactgagtctcactctgtcgcccaggctggagtgcagtggtacgatcccagctcactgcaacctccatctcccaggttcaagtgattctcctgcctcagcctcccaagtagctgggattacaggcactcaccaccamgcctggctaatttttgtatttttacatcgtattttgtatttggtatgttggccaggctggtcttaaattcctgacttcaagtgatctgtccacctcgacctcccaaagtgctgagattacaggcgtgagccaccgcgcccggccacaacttaccttttgcactttcagtatcttgaaatatctgacataacacctaatgtcgtttattgacagctttgtttcttctgaaa

SEQ ID NO: 183181 - DNA, 576 bp, Homo sapiens
cacttgaccaaattgaattggtatggagcagtggattgtaagcaatgaatgtttaaatacaaatggtagcctggattcggggttacaaattgctttatgactacacatcccatttcatactcagtacaaatgtacaactgcaataattcatttcttgcaagatgtctctttttacaagaaaatcgtaagaatcacatatagaatcattcagccagggactggactgctgtccagtccagcaacacaacaatgaatttccacagtttgttactagaatgatttgttagaattctgggacttgaatgtagtgcaatactcagactatgaatcaccattaaagatgtgtatcaaaaaatttcaaccaccaccaaaattgctcccaagtcagtattttattctcatctcaacaaatgataggctgaaatataatagttttatgccttttctgattttttttcttctcacaccttccattcattgctctttctttagcttcttccyctttatcttctgcacatttgtatatgaccatgaaacataagcatttatgattcaatctgaggactagattagaat

SEQ ID NO: 183182 - DNA, 542 bp, Homo sapiens
ttaacaatattaattctttcaatacatgaatactgatatctttccatttatttgtgtctttttcttttcttttttctttctttttgtttgttttgttttgtttttcgagatggcatcttgctctgttggccaagctggaacacagttgtgcaatcttggcttactgaaacctctgacttctgggttcaagtaattctcctgcctcagcctcccaagtagctgggactacaggcctgtgccagcatgcccagctaattttagtatttttagtagagacagggtttcactatgtcggccaggctggtctcaaactcctggcctcaagtgatctgcccgcattggcctcccaaagtgctgggattacaggcgcgatttttgtttcttttgtcagggttttatagttttcatcatacaggtattctgccytattggttatatttattcctgaggttttttttttgtagatactgtaaacaggatagtttatttgattcttttgatagtttcttgttagtatatagaaacactactgatttctgtat

SEQ ID NO: 183183 - DNA, 633 bp, Homo sapiens
gttcattggtcaagttgaagtataattataatttcattatttttcccattaattcaaatatcagatagttttcatctacattttaaaattgaatgaataacaaggtcgtatatgtgcttaaaaataacattaaattttttcttttgaaattgatacataattttttcttattctctaagactatgctatttttctgagatcttagtgttgcttttcagtggacttaaatgaacaatgtgagtattaatgttattaatcttaaaattttaaagcataaggtctaattctactckttttaatttgtctggaattaggaaattggtttgagaagaaatatagtatttatgtcatatttgtcatttaattcagtctaagtttgaacttctcatctgtggcctcttatggtctggagaagccctctgggactcaaagcgtgatttgattcagtcattaccatataatcctcttggatggagcaaagaccattgctgtgaagctcttagagcaagagaggactgaagaagttaaatatatgggccatagactataaaacataatctattagaaaacaaaccctacagtatctagtcggatacctaattaaataatcaattaaacatactaaatcattga

SEQ ID NO: 183184 - DNA, 552 bp, Homo sapiens
tttttttttaaattagctaggcatcatggtgcatgtctctagttccagctattcagaaagttgatggaggaggaatgcttgggtctgggagttagaggctacagtgagctataatagatctcctgcactccagcctggacaagagagcaaaatcctatttcaaacaaacaaacaaacaaacaaacaaaacaagaaaagaatgcaacccaatagaagacataaaacacatgaaataaaaatagtgattatcctatgagtactacaaaagcatgtctatcatttaatgatcacttactatgtacaatgtattttgtgaaatgttttgcatgtattatcccatttattcctgacagaaaacttggcatgcaggcatttttaactcattttactgaygagaaaactgacacttgggtacttaagtgattgccacagcatcagatatttagcaaataaacatttcaggatttgatgtcagatatatctaaatttgaatcctgagctcttatctacaaagtctttcacaaataaatatatttcaaggcaagttatgat

SEQ ID NO: 183185 - DNA, 604 bp, Homo sapiens
  misc_feature (1)...(604): n = A,T,C or G
gttgnctatatttattggcattcatgctgttgcatatttcctaggagaaccaaaatcaagtcgttgatctctctgcttttaaaagtagaatctctttcagctttttctgagttaattcwgaatcagtattaccgaggcttaactgtgatttcatacaacatactgttaccttgaagacacagagatttttttttaaaagtacaaaatctggcttttgtcttaaaggcattttcccaagcaggagagtttaagcacgatttttaaggtttcacagaggtaagaaaataagacaaagccgaaggtgagaagtttaatgggaggcctcccataaagccaggaccttaaagagttacaccttagcacacagatgaactagaaataaacctatccccatcctcaggggactacaaagaaattacctgttccaaactttggcagcaagtaaaaacggaaagaaaatttctcctgaaaatttgcaactacaagcaacctttgactggcatcggatctcagatgaaaaccatcttggtacactgtgaacctcaggccaggatttaatttaaaatggctggtcctggactagaaggtatccccagacaccata

SEQ ID NO: 183186 - DNA, 488 bp, Homo sapiens
cccatacatcttagttccatcatctcagggtctacagtcaccactgtgtggtacctcataccccactgtgttttgttggttccaggtcctgcattgctgctgtatcctgctccaggaggccttagccwctggagaacctattttcccccagagacatgtcaatactgtgcctggacccttaggatcaaaactacagccacaccccagttccctgggtccaggttgctgggatgtacctcagagcaacagttcttagcttagtgggagaactgcatctactcataccttggaaagtgaagctgcacctcaagtcccaggtgctataatagttagttttacaagaccctgatcccagaaacctgtcttcacagtttctctgatcacctgtgctttgactccaagtaccacgtgcctgtgggccatgtcagacatgacaccaagagagatcccctcagataagactcctactgtagggaagataagaagag

SEQ ID NO: 183187 - DNA, 393 bp, Homo sapiens
gagagattacgaagaagagacagattcaagaaaatattattttcgtaagaatcacattcccattattttttcttattttaatatgttaaaaatatgaaaggactgacatatgctatatgyattttatacacatcaatattatatacatcaacatacacaataaaatattagaaaagaaaaactagaaaaagtatgaatttcatcatgtaactaaatgtgctttaaactactttatgaataactttcaaatattcaagtatttggcattttgttgcaaaagtgaatgtttacattattcataaaatatgtggcataataaataactttttaaaggctaacactatgctcaactttcagacaaaatatctgacactaaaactttataaaactaat

SEQ ID NO: 183188 - DNA, 574 bp, Homo sapiens
gctgactccttcagtacttttatggagttggctactctggggataattaaacttgggggaagcaaagtttctgaaatacaaattgtaacacctgtgacaggttcagcttttgttggcaactcacagcacagcaaatggcaactcccacttaatcagatgcctagagatgcaatgtccaacactaacttagcaaccacaaattcatcattgccatcaggtgttatgaataactttgttaaaaaacataaccctgaataaccattctgaatcctaatttggctttgaacattccatatgaggtttttcaacatgaacccagagaccaggatttaactatttcagatttaactttcaaaattattctttrtgcttttttgcacttaaatgaataaatttgggaataagatttacaaaatataaatgtgcattttattttattttttaattttttatttgagacaagatctcactctgtcactcaggctggagtgtagtagtatgatcacggctcactgcagcctttacctcccaggctcaagtgatcctccttcctcagcctcctcagtagctagga

SEQ ID NO: 183189 - DNA, 574 bp, Homo sapiens
gctgactccttcagtacttttatggagttggctactctggggataattaaacttgggggaagcaaagtttctgaaatacaaattgtaacacctgtgacaggttcagcttttgttggcaactcacagcacagcaaatggcaactcccacttaatcagatgcctagagatgcaatgtccaacactaacttagcaaccacaaattcatcattgccatcaggtgttatgaataactttgttaaaaaacataaccctgaataaccattctgaatcctaatttggctttgaacattccatatgaggtttttcaacatgaacccagagaccaggatttaactatttcagatttaactttcaaaattattctttatgcttttttgcacttaaatgaataaatttgggaataagatttacaaaatataaatgtgcrttttattttattttttaattttttatttgagacaagatctcactctgtcactcaggctggagtgtagtagtatgatcacggctcactgcagcctttacctcccaggctcaagtgatcctccttcctcagcctcctcagtagctagga

SEQ ID NO: 183190 - DNA, 537 bp, Homo sapiens
atttcaaagaagcacttaaaaataagattaaatacaaaccaacagataaaagtcacaggtgctatggttgtttgatggagaatggggaaggaaatctgtcctaaaagacattataaacacagtgacctaagtggaactaaattggatcgaggaaatgataggaataggcctcatttttctgttgaatggttcaggaacctttttttttttttttttttttttttttttgggctgctctagccactttctagctctgtagtttaggctggagtgctgkggcatgatcttggctcactgcaggttctgcctcccgcgttcaagcgattctcctgcctcagcctcctgaggagctgggactacagacacctgccaccacacctggctaattttttgtatttttagtagagacggggtttcaccatgttgggccaggatggtctccatctcctgacctcgtgatctgcccgcctcggcctcccaaagggctgggattacaggcgtgagccaccgtgcccagccctgccacatcttttttgt

SEQ ID NO: 183191 - DNA, 582 bp, Homo sapiens
aagtaattggcaataatttttttagctctaaaaaagaaaaaaaaaaaaggtggtgtgtgagcgaaagtttaccgggccaccacaaatactttcagtaggaatttaataaaaatttgggtccattttatgaacacaaacggcgagccagttttctttcttttttaaaaaatcaactttctgaagctcttcttaagattttcttctaatgaaccaaaagaacatctgcagcatgacacactggctgatgaagcatgacacttttaacattatttaagtaaaataaagatttaggtaaattagaaaaaaatcagaagttagaaataaaagccatgccctttaaaaagtggaaaacccaactcctgtaattgaactacagtaaaaacagaagcaacttttttggatggttggtgtgccccccaccaaaaaaaaaaaaaaaaaaaaaaaaagaatctgcaaagcctgctatgaacagccttctatgtaraaagcactgctatgtacttgttgtaaaagcacagctctagtacaatagcttctgttcgctgctttatgactaccttaccagtcactaagaaatgggaa

SEQ ID NO: 183192 - DNA, 520 bp, Homo sapiens
ttcttgtgtttactaatgtgaaataaagatagagtaactcttaagatatggaagtttgtaaagagccagcaaaaagtgacaaggtgtggggayccaaatacagagcctagggaaaatagaataaaccaagttgtttttatgtctcttttccattagactgtgagcaagctgaagtcgagtcccagaacttatttatgtttatatcctcaaagagactatagtgcctggttcatcgtagctgtggaataaatgttgaatgaatgaatgatacacctcttacctttgaagctgacttcttgtgttcttcatgctgacattagaaataggaaaagtcagtcgagtacagtagttcaagcctgtaatcccagcactttgggagaccaaggcgagaagatcgcttgaagccaagagtttgagcccagcctgggtgacaaagtgagaccccatctctacaaaaagaaagaaaagaaagaaattggaaccgtattatttgtagaaaaaatactagatctagaaccag

SEQ ID NO: 183193 - DNA, 469 bp, Homo sapiens
taattttatttgtgtttagagtatcttgttgtaatatacttctcccccatcttgtgctcctaaatttgggataagcatagaatccttttaagaatgtaggttattttccagtttactagaaagcatgacacatataaattagcgactaaggattatagcgtcctttcctaaaggttatcatgaaaaaaagttaaaatgtcaaagaagatcctactccagtaaaaacaatttactctgtaaaatcctgatacctcataggaagctttggatcttgttctcagctaccaaaattctttaaatatgaaagttaacatgacaggaaagtggaatayactctgtgctgaagacccactgttcaaggtgtgtggttattaatctgggtttgaatttacaaattatatggtctgattaatttgtagataggggtcggtggaggttagacgatgggctttagaacaaagaggctgat

SEQ ID NO: 183194 - DNA, 498 bp, Homo sapiens
gattcttctctgaaaacatctgacaagccaaaagaaaagatctaaagatgctgatattaggattatccaacaaacagctcagcctgataatcctacaagtgagctaatggtcttgaagccccacccacaatacagagtctcattcagctttttagggccccaattttaaatataaatgaacagccaatgatcaccttttaaagaaagcctctaacatgaaaggcagagactaaaaacaaagagattaaagtaacttagagaaaacagaaattagataagaagacaaaaactatcagagagttaagagaatatattgtaaacatgaagcaataggatgctattttcaaatggcacattcatacaacaaaagagtcttagcaattaaaaacrttatgttataaattaaaaatccagtaagaaggttggaagtgaaatttgattaaacctttcaaaagacaacaaaatgacaaaaaataagagagaaagggtaaggaaatt

SEQ ID NO: 183195 - DNA, 603 bp, Homo sapiens
ccacaactcagcatttttactgcagagagttgttcccaagctgcttcaactgtagactctctgatatttgacaatttcccggcctgtgcagctaggttttaatgatkcgagttccttctagtacagtctctttagacttctccattccaacagccttgcttctttctcttctgactattactcactccacttcccacctctattacctacttgcaggctctccctgaattctcaacacaatcattatctccacttctgcgtgaaccacaggcaaggaaaaataccttacttctaaaaagacaaagttagacacgatgagaacagcaatggattcacacttcaagtaaataaatgcctgaactgaagaggtattatagtgaatgaacattctttggctggaagaacttagtggcagagaattcttaaaagaaaaagaaaacagctttctaccctgttgatccaaccaattaatgaaagtacaacattagtagaagtaatttgaaaaaattgttttagtctaagggtaggaagtgaaaggggatggagctaacttattaatccattaatcactcttttggtgtattcattaagagggtcagagga

SEQ ID NO: 183196 - DNA, 568 bp, Homo sapiens
atctttttcagccctgctactagtaaagaatataagcaaaatctatttggtaatatgttttggcagtaacagattccaacagagaattaattcttaatgaaaggaaagaagttctatgtgttctaccaggctagatatcttgttatctcatttgattttatcacagccctgaaaggcagaacaaaataaagattcatcaataattcaaattatgatattaactaacaaattcacctactcctaaccagatctttcagtttctctgccacctaagttcctttccctcttcccaactagtgtccaaagagatgctgacaaagagtgaaccagccaggacacaagcacttgaggaggagtgggagaatctacaggcctaaaggcrtctgcccccttctccaaaatagactgtatgtgccagcaatgagcctgctgagatttcaggaggctaaagcaattttaaaagttcacaactttctcatttcacttaaatattgctttacacgttagagcacaaaaactgcttaaggccctcaacatcacagaacagagcagaaggtggaaatcactt

SEQ ID NO: 183197 - DNA, 408 bp, Homo sapiens
gcaaggatctatacttaataagaatgcactaaagcccaatttcctcctgagaattycactaaaagctgctcttcagaaatatcctatggaaggccaaacagctaaatgactacatcataatctctggcatccctgcacctgaaaataagtgaccacatgattggtccccctacacacacagtatggatttgttgctgggaagtggttgtccatccagggattacattacccagcccaccatacatctaggtattggcatgaaaggttcacaccaatagaatgtgagcaaaagtgatgtgtatcatatctaagccaaggttttttagaagaagctgtaccttctctaagctgtctttcccttttgtctcattggttagatacaaataacaataaaaccctaagaaatta

SEQ ID NO: 183198 - DNA, 457 bp, Homo sapiens
aaggatgggcacaaagtcacactgcaaagacttgaataaataactaattcgttaataagcagacatcagtgtacatccacaagcattcagaacaatcagggaaytatgacctcaccaaagagacaaaataaggtaccaataacagaccctaaaaagatggagatgtgtgatctgtcagaataaaaatcaaactagctgtgttaaggatcatcagtgaacttcaagaaaatacagataaacaattcagaaatttatcagaaaaatttaagagagacgctggaaaaaaaaaaaaaaattccctagctagaatgtgcagtgaaagcagtgaaaaatgcaatagagcttcaacaacagaattaaccaagcgaagaaacgatgagtgagctcaaaggcaggataagtgaaaaatatacaggtagagaagaaaaaaaaaaagactaaagaggaatgaagaaag

SEQ ID NO: 183199 - DNA, 652 bp, Homo sapiens
actgttcaatgctttcaataatatataaaaartagtttcaaagttattaagatgaccactggaacaaaaatgcaaacctttcaagttcaaaacacatgcatacacaaagaatatatatacaggccatatagtgaaaaataaatgagcactacaaacaaaacctaacaaaaaaacaaaagataggtaaagtaagataaaagatgacatgaccttcttttcaatgagcactgaaaattttcaattaattttctcaactgggatatcagggcaaatctcaaccttgtgctatatacataagatacagtgaaaacaaaatgatttagaaaggtggaaaataaaaagataggtgaaggcataccaagcaaattaaaaccaagatcaagattttatctccaagttaaattcaagaaaaaagtattaaataagacaaagataggcactttataaaacatgagatgcaaaattaagatttcatgcttatgaatatcaatgtaccaaataacataaaattgaaatttataaaggaaaactacatcaaattcaaagagaaatccacagaaaacatgactagttaatttatctcatccagaacagatcaagttgtcaaaaattaagtaggatatagaaggcctaaataacataattagcaagg

SEQ ID NO: 183200 - DNA, 509 bp, Homo sapiens
aatgatttagaaaggtggaaaataaaaagataggtgaaggcataccaagcaaattaaaaccaagatcaagattttatctccaagttaaattcaagaaaaaagtattaaataagacaaagataggcactttataaaacatgagatgcaaaattaagatttcaygcttatgaatatcaatgtaccaaataacataaaattgaaatttataaaggaaaactacatcaaattcaaagagaaatccacagaaaacatgactagttaatttatctcatccagaacagatcaagttgtcaaaaattaagtaggatatagaaggcctaaataacataattagcaaggtagattgtatatgtacatttatatatttataagtttatataaatatgtgagcgagaataatacattttcttttcatgtaccatagactagtcacaaacattgattaagtatctaaaggtgcttcagataggcctaaaaattttgtctctaatggacaagggaaatgctcc

SEQ ID NO: 183201 - DNA, 393 bp, Homo sapiens
cccctgaagccatcttacatagtggctgctttttttcttccactgtccttatatatctgggcctacatttggggaaggccacctctttgctcctcgttgccactttcagacttttctcacttgcctccctaaaattytcccaagttaaatcgcatgttatcagattaactcacccaaaaatgttcatttttgctgtcatctattgacacctgggtcagtctttttcatttctcaatgctattagctccagtccgataatatctctctttagtcttaattcttagagatttcaacaactaaggtaggtgatccttccaacaccatagtttgtcagtttttttttaacttctttgctcaaataaccttgttctccaccatacctcagtcactcac

SEQ ID NO: 183202 - DNA, 398 bp, Homo sapiens
tatgcttcccctgaagccatcttacatagtggctgctttttttcttccactgtccttatatatctgggcctacatttggggaaggccacctctttgctcctcgttgccactttcagacttttctcacttgcctccctaaaattctcccaagttaaatcgcatgttatcagattaactcacccaaaaatgttcatttttgctgtcatctattgacacctgggtcagtctttttcatttctcaatgctattagctccagtcygataatatctctctttagtcttaattcttagagatttcaacaactaaggtaggtgatccttccaacaccatagtttgtcagtttttttttaacttctttgctcaaataaccttgttctccaccatacctcagtcactc

SEQ ID NO: 183203 - DNA, 408 bp, Homo sapiens
tgaggatatgcttcccctgaagccatcttacatagtggctgctttttttcttccactgtccttatatatctgggcctacatttggggaaggccacctctttgctcctcgttgccactttcagacttttctcacttgcctccctaaaattctcccaagttaaatcgcatgttatcagattaactcacccaaaaatgttcatttttgctgtcatctattgacacctgggtcagtctttttcatttctcaatgctattagctccagtccgataatatctctctttagtcttaattcttagagatttcaacaactaargtaggtgatccttccaacaccatagtttgtcagtttttttttaacttctttgctcaaataaccttgttctccaccatacctcagtcactcaccc

SEQ ID NO: 183204 - DNA, 637 bp, Homo sapiens
ttatttctctggtccctatttgtctgtaagtggtgcttgttccctctgctcctgtcytccagcaggtaaatactaggaagaccctcccgctctgggattgggagatgagagcccacagctattccatgggtttgatgtgggggctagaggagaggaatgagaactccattttggtctcaaatccaaaccttaaccaaaccaatctaactttatactagttattagttataaagttattttgaccccagactccagtgtctatttttttaattggttcagaaaacttacggcaaaaaagcatattttttcctctttagacctcaacaagtaccaccattcttcctttcacatagtctggaaagcgaagtcttgttttttaaattttacttggcttcatcctctaaatccagtctgcctcattatgccaccttttagtttccacggtcccttccccagttcggctcctcactgccacagtctcagtcctgcaatgactgccctgtctgcagctcccccatctcccatggttacggctaagatattcctcttgctgaagaccttatctactgccttaggtccagttcaaggacctctggggcagttagctttattagagctaacagcccttcaagctaat

SEQ ID NO: 183205 - DNA, 587 bp, Homo sapiens
atatgatcaaataaatttatggaaatgctatttgtaggaggataacaagctgaaaacaacttgaattcccaccagtaggaaattggttgaataagttgtggtacatcctatactagttaggataatgctagttgctataaaaaataaacacaaaacttcagtggcttaacactatggttttaaaattgtgcgccaaggtgtcccaaggtactacaatcaaatttactggctactattggtattttaaatttctgagggaaacacagagatacatctgtcagataccacatgaactgctagcttgagttggttcacaatttcaacatgaggtcgcactaattccttgcagtgacatcatatctttgcaaaggtacattttcagtgattgctatgataaaaggcaagtaccgtgtgaaaatcaatgtgactgaaatgagggtgccagtctacaatctgwatcaaactttaaagtttgagaagttgtgcagtgtccaacacactcacatatcttatacgtaggtcaatgtggttacttaagaatagacatttttctattaagcatgtcactttttcaaatggctgctaag

SEQ ID NO: 183206 - DNA, 587 bp, Homo sapiens
atatgatcaaataaatttatggaaatgctatttgtaggaggataacaagctgaaaacaacttgaattcccaccagtaggaaattggttgaataagttgtggtacatcctatactagttaggataatgctagttgctataaaaaataaacacaaaacttcagtggcttaacactatggttttaaaattgtgcgccaaggtgtcccaaggtactacaatcaaatttactggctactattggtattttaaatttctgagggaaacacagagatacatctgtcagataccacatgaactgctagcttgagttggttcacaatttcaacatgaggtcgcactaattccttgcagtgacatcatatctttgcaaaggtacattttcagtgattgctatgataaaaggcaagtaccgtgtgaaaatcaatgtgactgaaatgagggtgccagtctacaatctgtwtcaaactttaaagtttgagaagttgtgcagtgtccaacacactcacatatcttatacgtaggtcaatgtggttacttaagaatagacatttttctattaagcatgtcactttttcaaatggctgctaag

SEQ ID NO: 183207 - DNA, 398 bp, Homo sapiens
tctggggaacatagggagactcaatctctacaaaaaatttaaaaaataaaaaattatttgggtatggtggcatgtgcctgtagtcctaactactcagaaggctgaggtgggaggattgcttgagcccaggaggttgargctgcagtgagccataatcccgccactgtatttcagcctgggtgatagagtgagattttgtctcaaaaaaaaaaagtaacattaaaaaatatgtaccaattccaccacctctcaccacctccagcactaccgtactagtgcaagtcaccattagcgctggcctgggttgttgcattattttctccaaggggccctgcttctgtgcctgttctcctacagataccctccccagagccatcctttctaatctcttcacaaca

SEQ ID NO: 183208 - DNA, 363 bp, Homo sapiens
ggattccctttttattattatccataggcactggaagacaagatggatctttttaaatgctagaagttttaaccagttcttaacatgtctttgttgaggcaccttccagaatataagataaaacaactccagtttctgttatagtgacttgaatctcagagtcaagagcccagtgtcaaagaaaattggctttgactttttgtaatctaggagcacsagtctgtgaggtgtttattcaaagagttaaagagcctgttttgtaccaaacaataaactgtaaaaagaaaaaaaaagtgaattttgagagtatgaaagaatagccaacagatccatatatctggaaaaaacgtattatagtatagg

SEQ ID NO: 183209 - DNA, 531 bp, Homo sapiens
ggaattcaaattattatgcataaataaagcacacaactacatatttggctctccctgtccagttcctttccaactcatgaaacacagcatgaataatatattctgattttttttgattgaactgtcagcatgatttatttcatagcatcttcttctctctcccttttgtaaataatggtgcgtctgcagagctttttgctaacatttktcttgctaatttgtctggggggtgggaggatgatggcattttttttttaccctcttataatgggttcggaggacacttttttctgcatagcgttgggactctaaaaaatcaaggttatacagtgcattgattactcgctgttttacaaaccggctcagactcatttcacaacttgagaataattctaattggaaatcacctcctttaaaaccatcagattaatggtattcccattacacttcctgcccaaccatgtgaacaatagagcctgaactgcaactgctagaattgtgcatcaaagtaaataatgcactaacgagaca

SEQ ID NO: 183210 - DNA, 479 bp, Homo sapiens
actgttttccatagtagctatgctagtttacattcccaccaacaatgtaaaagagttcccttttcaccacatccatgccaacrtctattattttttagttttgattattattattattgttattttttctttgagacaggtggggtcttgctctgttgcccaggctggagtgcggcggtgtgatctcatctcactgcaacctctgcctcctaggttcaagtgattctcctatctcagccccctgagttgctgggacaacaggccaccacgcctggctaatttttgtatttttagtagagacagggtttcaccatgttagccaggctggtcttgaactcctgacttcaagtgatctgcctgcctcggcctcctaaagggctgagattacaagtgtgagccactgcgcccgtcctcttttgattttttaaccacttttttgtttaacctttcctgctctgttcactaccttccactctgtg

SEQ ID NO: 183211 - DNA, 302 bp, Homo sapiens
aaagatcttcacttggctcaarattcaaaagatagaagagggtaaactgaaaagtctccttgcctcggcttcccagccacttgctttctttctctctttttaaaatatcttgttttattttcggctgagcgcagtggctcacgcctgtaatcccagcattttgggattgggaggctgaggagggccagcctggccaacatggcgaaaccctgtctctactaaaaacacaaaaaattagccaggcgtggtggcaggtgcctgttatcccagctgctggggaggctgaggtaggagaaccgctt

SEQ ID NO: 183212 - DNA, 410 bp, Homo sapiens
tgtgattttttaaaacatggatcatgtcttcatggcctctcaatttttcttgtgttaatctgtgaaatttcattaaatactaagattgttgatgctatccaatttcttgatttataatttgtttttaatgtttagtgttgtatttcagcattatgcatctagatgctgttacttgtgcatcttttcttgcattttatccttctacaaagcctttccacacactgacatcagttacttatcaatattttccactagttcttttatmctcttacattttttaaaaaacatttaaccacttttaaatttagtttcatagttgtgaggaagacatcaaacctccccccaccatagtcaactcactgttttagctcagtttattcttgcaccattttttgtgggaggggggaaat

SEQ ID NO: 183213 - DNA, 482 bp, Homo sapiens
tgggaaaagatgcaaaggttatacgcaaatactaggacactttacataagggactcgagcatctgcagactttggtatcctagggaagttctggaaccaatcccccacggataccgagggacgactgtattgtgcttgcgtgaatcagtctgcgcctgggtaaagtctgacttgtccaaaaacaatggaatccacatgaatgaagcttttctatatttagtaatagagccatcgatgaaaaaaatgataaactcattgtgagatgtaatcaacgtgcttatctctgaacatcattttatttcttcctcgtcaggtaccagtgcccagcaggctgcctgaaccacaaggcgaagatctttggaastctgttctatgaaagcgtgagtgtggccagtcctcctctcaatggcttgtgtgggatcctgttgcatatgtttaaagcaggtggttggctttagtaggaaaagattttctttccactc

SEQ ID NO: 183214 - DNA, 504 bp, Homo sapiens
atcaattaaactcaggagttctcactattataccatctgctaccctctgcctctgtcctttatattttatttcaataatgtgttttcacttaaaagtaattatttatttattaagtatcattattattattttagatggagtctcactgtgtttcccaggctggagtgtagtgacatgatcttggctcactgcaacctccgcctccctggttcaagcgattcttgtgcctcagccaccagagtagctgggactataggtgtgtgccaccaaacacagctaatttttgtattttttgtagggacagggttttgccatgttggccaggctggtcttgaactcctgacctcaagtgatccacctgcctcaacctcccaaagtgctgggattacaggcatgagccaccgcacccrgcctaaaagtaatacattttgatcttttttcatatgagccacataattgccaaccaatttatttaatatttaaattagatgatttattgaatt

SEQ ID NO: 183215 - DNA, 441 bp, Homo sapiens
ttttcccttgccactttgtcccttgtattaatttgctggagctgccataaaggagtcccatagactcagtgccaggtggggatcttgaggatccgagagatcagggacttgacccacacaaagaagcatctggtagaggcatcaggatttgatgcttggctcaggaaaagatggtacaagatggtggagacacagggagggaggaatcagagatgatgacagtgcygaacagctcagcatctcacccccactccttctgtctcagtcatttccaggataaaagattccagagtttggtcccgaagtcagaaacaaaggagggagcaggagataaaattatgacatcaaggaaaaataaaccgaacacttccttctgttctgtcgatgagtgtgtgaatgattaaactttccttgttttaaatttgtggaaatgacgaatta

SEQ ID NO: 183216 - DNA, 480 bp, Homo sapiens
gaggcttcaatgtagaggggcaaaaaaaaaaaaaaaaaattcccacaagatgccagcatgatggtatcattagctgagaattaaaatgctgctgccctaggtaaaagtgagggtgccttccttgggggccacagtcaggttctaaacagaaggccttagaagaaaaatagctaaccttctatcatggccccacagatgctgatctatatagataaagccttgggaaagaacattatcatccaacaaggacgctggaaaactgcccagatagcaattcctggatgagtaaccacagatcctgcaataatgatggacccattttctcaaagattccagagctcttggcttgcttactttttctttccttccttccttccgcctgcctgcctgcctgcctgcctkccttccttccttccttccttccttccttccttcctccctccctctctttctctctttctctctttctctctcttttct

SEQ ID NO: 183217 - DNA, 583 bp, Homo sapiens
cagcatggtaacccatggcaccactcaagaccctgggaagaatgagcaaagtttgttttcagtgtgctgggcagtaggaagatggagtgagaagggattaattgtattacctgtttatctctaagatttgacctatgaatgtttctgttcaaaccatggtgtttagccatgctcagctaggcataaaactccatctgctccttgggttttcagtgcacagagcctgsgggggaggggcaaatcacctttcagcctcacaaatgtgctttgcttttttgctaccttgagtggttcaccttgcagaaacaccagtgatggctcaaggaccaactaatttgtcttctgttttttaatggaagagtagtgaggcatttcttgcaaaacgtttctggatagaaacttgagtagggacagagtggatcctaaagatgataataattcttaaaaatcattgctgtattggaggaaaggtagctgatttgctttggggctgctgcactaaggtgaaatatgaaaaggaacaaatttttaaagtaggatcaactcaaagcatctaagtagcaaagatttagctctgatctac

SEQ ID NO: 183218 - DNA, 421 bp, Homo sapiens
gtttctcgcagttggggtttcgactgggattggaagttagcatgttctggtggagatttgccaggtggatgttttgtgctgctgattacaggtgatttagaaaacactgacaagcagtaaagggtcraattctccaggcttacatagtctccagtcccaggtctcacaggagcctgcctttgagaattcaaggccctgaacatgggctcacgggctatatcacccccacatcagccctggcgggaagcatattcagtctgacaaaaatctctcaggaccatgttgcactagatctttttaattgtttcttgacatgccatttaagctgtcacactgaaatgtgattcccatctctatttatctaaagtcactggaggaggcacttggagaattgttacgaccaggcatcaacccgcaaacc

SEQ ID NO: 183219 - DNA, 458 bp, Homo sapiens
gagccaccacattctgtatgatttttaagggagtgaattgatcagtgaggaatacctaataagtatttaataaatattaactgttgtaatattgtcttgtcttatttgcatgtaattctcattgtgactgtacaagccaaggtactagtgttttagtggaggatcctttcaccatgagccacagagatgaagaggtggagacacaggcaagatatgaatctgtttgtttgtttgttttttgagacraagtcttgctctgtcacccaggctggagtgcaagggcgtgatcttggctcgctgcaacctccgcctcccaggttcaagtgattctcctgcctcaggctcctcagtagctgggactacaggtacatgccaccatgcttggctaatttttgtatttttagtggagatggggtttttatgtgtatcacctctgtcctccccccactgcagtgcag

SEQ ID NO: 183220 - DNA, 474 bp, Homo sapiens
catgccatttaagctgtcacactgaaatgtgattcccatctctatttatctaaagtcactggaggaggcacttggagaattgttacgaccaggcatcaacccgcaaacccactgtctcccctcagcgatctctctctaccttctggaatgtctctgtagctgctcagcaactggcaaggtctttagcagcaatttttggaaccagcgttagggaaagcaagcagctggctggttgcccatgatgcttgatccttctcctggagattcagttacacgtagccttgcacctcctctatgccagccactgagatrggtggtgggagatgctcatgggaaggaagggggatgcatgcccttaggcggctcaccattaggtaggtgaggccagcatacccacatgtgtgatatcccatgtaaagaagggcccagcaagtgtgatgcaagggacatagactttgtgacagcggagcaatg

SEQ ID NO: 183221 - DNA, 474 bp, Homo sapiens
catgccatttaagctgtcacactgaaatgtgattcccatctctatttatctaaagtcactggaggaggcacttggagaattgttacgaccaggcatcaacccgcaaacccactgtctcccctcagcgatctctctctaccttctggaatgtctctgtagctgctcagcaactggcaaggtctttagcagcaatttttggaaccagcgttagggaaagcaagcagctggctggttgcccatgatgcttgatccttctcctggagattcagttacacgtagccttgcacctcctctatgccagccactgagatgggtggtgggagatgctcatgggaaggaagggggatgcatgcccttaggsggctcaccattaggtaggtgaggccagcatacccacatgtgtgatatcccatgtaaagaagggcccagcaagtgtgatgcaagggacatagactttgtgacagcggagcaatg

SEQ ID NO: 183222 - DNA, 593 bp, Homo sapiens
aatctttttgctggactcacacaccccttgggacttgccattagactttgggagtcatgtgtccccacaggttccccccagatgtattagtttataattaaaggccttttttcctcttatttatatktctttgagtttagtctcttggactgtcaattgcattgccacttcatggaaataacaatagtgaactcagcagaatgactgcaaggagtaagtgatgtggcttaagtgcatctctagcaaacagcctggtatgggagagaccctcagctcatgtcaattcttcctccttagtaattctgtttgtatgaagcaagagagaagcttcctttgtttcttttcccccctttgctgaacagcaataccagtctcctgggggttccctacctgctggtaactttctaccttctcccagtatcgtatttctcttctggtcctctaactccctaagcaataaacttgctacaggataaaatttgcagggagtaaatttccattaatcaccctaatgctagttattattgtgaatgacaaatcaaatataatatgatagtcaccgtttatttcatgtctgcctgatgcctagtact

SEQ ID NO: 183223 - DNA, 595 bp, Homo sapiens
ttgctggactcacacaccccttgggacttgccattagactttgggagtcatgtgtccccacaggttccccccagatgtattagtttataattaaaggccttttttcctcttatttatatttctttgagtttagtctcttggactgtcaattgcattgccacttcatggaaataacaatagtgaactyagcagaatgactgcaaggagtaagtgatgtggcttaagtgcatctctagcaaacagcctggtatgggagagaccctcagctcatgtcaattcttcctccttagtaattctgtttgtatgaagcaagagagaagcttcctttgtttcttttcccccctttgctgaacagcaataccagtctcctgggggttccctacctgctggtaactttctaccttctcccagtatcgtatttctcttctggtcctctaactccctaagcaataaacttgctacaggataaaatttgcagggagtaaatttccattaatcaccctaatgctagttattattgtgaatgacaaatcaaatataatatgatagtcaccgtttatttcatgtctgcctgatgcctagtactatgtgaaat

SEQ ID NO: 183224 - DNA, 598 bp, Homo sapiens
gtcttcttatataatttccagaataagccaggatcttcatctttgaaggtgttgcagtctcrgtgtgttggtaagaattaacaacattaaattgcttataaagacctttcttcatcatcatctttttgctgtatgtaagagcgtcccacttgaaaacaggaaaggctctatttagaatccatcctggaacaggttgcttgacttgcaaaccctgcttaccagcattttgactccaaatgtccaaactgtctacctttctcagaaatacctacagatgctcattaattaggaacttctcaacacaatgcaaatattagttgagaggattcaatttactttatgaaattttccaataagcttaagcatatttatctgtctgtctggtcagtttactacaaacaggtcgaaggtggggctggttttttgacccttgtctttggactccagggtttcctttaggagcaatgataatgagaacgtccaggttctgagctgcttcatgaccttatcccattacatggttcttcattgtctgttggtgcctgactgcagcctaacactaatggtgagaaatagagtggaggaagttaaaacagaa

SEQ ID NO: 183225 - DNA, 527 bp, Homo sapiens
gagcaagtacagaacactcttctatattcatataaattattttctctttacatattacacatttgcacttatctttcagatcacacttcaaccattcttcaccagagcttttcctgatcacttgaccctcacttttataagttcttatagccctatttctttctgctatgtagctgtgatcaaagacaatggaaacatatttatttgtgtgatcattttatttatgacattctctctcactgtctttgttccttgaaagtggggtctgggtcaatttttgctcaatattgtattctcaggacatagcccaaagctggcacataatgggcacatgatcgactttattggataaatgcatgatcaaatgaatgctgtagctctaagtaggggaggtggaagcatttttaatttctagaaagaagcttactgtaattaaaagactttgaactcagacacccagagttttgaattcagaagcttctgttttycagttatgtggctttggcaaaatcagattagctgacctt

SEQ ID NO: 183226 - DNA, 309 bp, Homo sapiens
ctgtggcgctgttagtggggagtggggtcccaaycgtggcatgaggtgcagctgactctgtggtgccggctgtggacagggtctcggcagaggctgtgacctcagtgatgtgtggttttgcttcagtggagtcaggcagagctggtggatcggaggtggacgaggccttcaccccttccgtggggatgagatctatgtctgaggccccagggatgctggaagttgttgtttctatttctgtgatgctgcaattaataacctcgatgtttgtgacagtcaccaggggcttcagcgaggagagtgacatca

SEQ ID NO: 183227 - DNA, 309 bp, Homo sapiens
ctgtggcgctgttagtggggagtggggtcccaaccgtggcatsaggtgcagctgactctgtggtgccggctgtggacagggtctcggcagaggctgtgacctcagtgatgtgtggttttgcttcagtggagtcaggcagagctggtggatcggaggtggacgaggccttcaccccttccgtggggatgagatctatgtctgaggccccagggatgctggaagttgttgtttctatttctgtgatgctgcaattaataacctcgatgtttgtgacagtcaccaggggcttcagcgaggagagtgacatca

SEQ ID NO: 183228 - DNA, 448 bp, Homo sapiens
gaattcctcttaaaccttctcaaagcaaaacatggctctacttggctgcagttgccctctcaatgcagatcgcaacgaaaccctctcaatgcagatctctgccttcccgcctcaacactgcacccgggagccctcctccaagggtcagtgcccgataggtttgagggcaagcccccgccagggtgaagccgcctcctcctctgggcttgggacgtgctgggagggagggaacgcggtcccccggggagtcacatgcccccattcccggggtcacccagggacaacgggcaggaatagacaggtaaggaccctgcagctgagcgagccctgtggcsggatgttccaggtaggcttttccggaaatcgccaccggaggatagaacgctcctagggtgaggggcggggcctcgacaggaaatacctgaaagagtcccctctgagtgggctg

SEQ ID NO: 183229 - DNA, 581 bp, Homo sapiens
agcaccttcaaataataagcagaaagaagcagagctgccctrgtggaagaggggcagggtatagggggtgctaagaagacatgtttagagcctgctcgtgatccattgtgatggtttccagcatcactcctgctccatctgctaggtcacccatgctcctgttgggcactgctcgtctataagcagtacagcacagcaagacccaacagaaagactcctctcagcagacttctctactgacctgaagcctaaaagcaatcaaggctccaaacgtagtatccaacctccaatgatgtaacagtctccatgtaccatccaagatccattctcttccaggggcagccttgatgggaggcacaagcctaccttgcctgttcatcttatctttcctctgcttcactccaccattctctttcccacttctacccccctctgtttcttgaagaaccttcacattctttcttgcatttaggcattcccctgtccgccaacccttggataacctcaccttcttggaaaagccaactctatagcatttataagcaaaggctttcaaaaaaaaaaaaaaagtcctattatgt

SEQ ID NO: 183230 - DNA, 581 bp, Homo sapiens
agcaccttcaaataataagcagaaagaagcagagctgccctggtggaagaggggcagggtatagggggtgctaagaagacatgtttrgagcctgctcgtgatccattgtgatggtttccagcatcactcctgctccatctgctaggtcacccatgctcctgttgggcactgctcgtctataagcagtacagcacagcaagacccaacagaaagactcctctcagcagacttctctactgacctgaagcctaaaagcaatcaaggctccaaacgtagtatccaacctccaatgatgtaacagtctccatgtaccatccaagatccattctcttccaggggcagccttgatgggaggcacaagcctaccttgcctgttcatcttatctttcctctgcttcactccaccattctctttcccacttctacccccctctgtttcttgaagaaccttcacattctttcttgcatttaggcattcccctgtccgccaacccttggataacctcaccttcttggaaaagccaactctatagcatttataagcaaaggctttcaaaaaaaaaaaaaaagtcctattatgt

SEQ ID NO: 183231 - DNA, 581 bp, Homo sapiens
agcaccttcaaataataagcagaaagaagcagagctgccctggtggaagaggggcagggtatagggggtgctaagaagacatgtttagagcctgctcgtgatccattgtgatggtttccagcatcactsctgctccatctgctaggtcacccatgctcctgttgggcactgctcgtctataagcagtacagcacagcaagacccaacagaaagactcctctcagcagacttctctactgacctgaagcctaaaagcaatcaaggctccaaacgtagtatccaacctccaatgatgtaacagtctccatgtaccatccaagatccattctcttccaggggcagccttgatgggaggcacaagcctaccttgcctgttcatcttatctttcctctgcttcactccaccattctctttcccacttctacccccctctgtttcttgaagaaccttcacattctttcttgcatttaggcattcccctgtccgccaacccttggataacctcaccttcttggaaaagccaactctatagcatttataagcaaaggctttcaaaaaaaaaaaaaaagtcctattatgt

SEQ ID NO: 183232 - DNA, 581 bp, Homo sapiens
agcaccttcaaataataagcagaaagaagcagagctgccctggtggaagaggggcagggtatagggggtgctaagaagacatgtttagagcctgctcgtgatccattgtgatggtttccagcatcactcctgctccatctgctaggtcacccatgctcctgttgggcactgctcgtctataagcagtacagcacagcaagacccaacagaaagactcctctcagcagacttctctactgacctgaagcctaaaagcaatcaaggctccaaacgtagtatccaacctccaatgatgtaacagtctccatgtaccatccaagatccattctcttccaggggcagccttgatgggaggcacaagcctaccttgcctgttcatcttatctttcctctgcttcactccaccattctctttcccacttctaccccmctctgtttcttgaagaaccttcacattctttcttgcatttaggcattcccctgtccgccaacccttggataacctcaccttcttggaaaagccaactctatagcatttataagcaaaggctttcaaaaaaaaaaaaaaagtcctattatgt

SEQ ID NO: 183233 - DNA, 538 bp, Homo sapiens
cattttacagatgggaacactgaggcccagatagtggagatttttgaccaggctcacatagtgagcaagtgtcagggacaaccctggaatcacgtctccctcctactttctcaacacagagaaagtagaaagaaaagaaaaagttatggtggctttggttttcttttgttttaaatgmagtgttatttttcccccacggatatactcttggggttttttgttgttgttattgttgttgttcttttggagatggagtcttgctctgtcgtccaggctggagtgcactggtgcaatctcagatcactgcaacctccacctcccaggttcaaatgattctcctgcctcagcctcctgcgtagctgagattataggtgcacaccaccacgcctcgctaatttttaaaatatttttagtagagacagagtttcaccacattggccaggatggtctctaactccttacctcaggcgatctgcgtgcctcagcctcgcaaagtgctgggattacagatgtgagccaccgcactcagcttattctt

SEQ ID NO: 183234 - DNA, 538 bp, Homo sapiens
cattttacagatgggaacactgaggcccagatagtggagatttttgaccaggctcacatagtgagcaagtgtcagggacaaccctggaatcacgtctccctcctactttctcaacacagagaaagtagaaagaaaagaaaaagttatggtggctttggttttcttttgttttaaatgcagtgttatttttcccccacggatatactcttggggttttttgttgttgttattgttgttgttcttttggagatggagtcttgctctgtcgtccaggctggagtgcactggtgcaatctcagatcactgcaacctccacctcccaggttcaaatgattctcctgcctcagcctcctgcgtagctgagattataggtgcacaccaccacgcctcgctaattttyaaaatatttttagtagagacagagtttcaccacattggccaggatggtctctaactccttacctcaggcgatctgcgtgcctcagcctcgcaaagtgctgggattacagatgtgagccaccgcactcagcttattctt

SEQ ID NO: 183235 - DNA, 688 bp, Homo sapiens
ataaacataggatgtttagcagcatttctggcctctacttcactaaatgccagtagcagcccccaaaatgcaacaaaatgttgtgagatttccaaatgtttcctggtgggtaaaattcccctagktgagaacctggataaatagtacagattcccagtcctattctgtgacatttttttgttgagtgcccatttttttttgagagtctagagggctcctcttgaacctaatgtaagtagtttatccttaactgattttacagctcttcttccataccccagtcaatctttgctctccacagattcaagtcctccatgattgggcacagaaactgagactcatttcttgcatagttctagacctggaagataaaaacttgcagttccattcatttgtagatgtctagtctcttttttagggctgataaatacttgcaaagccataacttctgggatgattttatacgtagttttccaggaactggccctgcaatatgtataaattgtctctagatggtgacagagaatcatgagcccatgctccagtcttggagttataaactgcaaagtagcttttaagttacttgggaatgtcagtcttacctgattttaaaatgataaatctaggacactacaatggctatctgaagtttgcaataaactaatggggatatgggggggcagagctc

SEQ ID NO: 183236 - DNA, 688 bp, Homo sapiens
ataaacataggatgtttagcagcatttctggcctctacttcactaaatgccagtagcagcccccaaaatgcaacaaaatgttgtgagatttccaaatgtttcctggtgggtaaaattcccctaggtgagaacctggataaatagtacagattcccagtcctattctgtgacatttttttgttgagtgcccatttttttttgagagtctagagggctcctcttgaacctaatgtaagtagtttatccttaactgattttacagctmttcttccataccccagtcaatctttgctctccacagattcaagtcctccatgattgggcacagaaactgagactcatttcttgcatagttctagacctggaagataaaaacttgcagttccattcatttgtagatgtctagtctcttttttagggctgataaatacttgcaaagccataacttctgggatgattttatacgtagttttccaggaactggccctgcaatatgtataaattgtctctagatggtgacagagaatcatgagcccatgctccagtcttggagttataaactgcaaagtagcttttaagttacttgggaatgtcagtcttacctgattttaaaatgataaatctaggacactacaatggctatctgaagtttgcaataaactaatggggatatgggggggcagagctc

SEQ ID NO: 183237 - DNA, 688 bp, Homo sapiens
ataaacataggatgtttagcagcatttctggcctctacttcactaaatgccagtagcagcccccaaaatgcaacaaaatgttgtgagatttccaaatgtttcctggtgggtaaaattcccctaggtgagaacctggataaatagtacagattcccagtcctattctgtgacatttttttgttgagtgcccatttttttttgagagtctagagggctcctcttgaacctaatgtaagtagtttatccttaactgattttacagctcttcytccataccccagtcaatctttgctctccacagattcaagtcctccatgattgggcacagaaactgagactcatttcttgcatagttctagacctggaagataaaaacttgcagttccattcatttgtagatgtctagtctcttttttagggctgataaatacttgcaaagccataacttctgggatgattttatacgtagttttccaggaactggccctgcaatatgtataaattgtctctagatggtgacagagaatcatgagcccatgctccagtcttggagttataaactgcaaagtagcttttaagttacttgggaatgtcagtcttacctgattttaaaatgataaatctaggacactacaatggctatctgaagtttgcaataaactaatggggatatgggggggcagagctc

SEQ ID NO: 183238 - DNA, 688 bp, Homo sapiens
ataaacataggatgtttagcagcatttctggcctctacttcactaaatgccagtagcagcccccaaaatgcaacaaaatgttgtgagatttccaaatgtttcctggtgggtaaaattcccctaggtgagaacctggataaatagtacagattcccagtcctattctgtgacatttttttgttgagtgcccatttttttttgagagtctagagggctcctcttgaacctaatgtaagtagtttatccttaactgattttacagctcttcttccataccccagtcaatctttgctctccacagattcaagtcctccatgattgggcacagaaactgagactcatttcttgcatagttctagacctggaagataaaaacttgcagttccattcatttgtagatgtctagtctcttttttagggctgataaatacttgcaaagccataacttctgggatgattttatacgtagttttccaggaactggccctgcaatatgtataaattgtctctagatggtgacagagaatcatgagcccatgctscagtcttggagttataaactgcaaagtagcttttaagttacttgggaatgtcagtcttacctgattttaaaatgataaatctaggacactacaatggctatctgaagtttgcaataaactaatggggatatgggggggcagagctc

SEQ ID NO: 183239 - DNA, 535 bp, Homo sapiens
tttgtctcctttagcaagaggaatgtaaacttcatgagagataggagatttttctgtctgtcttacttttyttttttttttttttttttttttttttttgagacagagtcttgctctgtccctcaggctgggagtgcggtggcacgatctcggttcactgcagcctccacctccctggttgaagtgattctcgtgcctcagctgcccaagtagctgggattacaggcacctaccaccacacccagataattgttttcttttgtatttttagtacagatggggttacaccatgttggccaggctgttctcaaactcctgacctcaagtgatccactgcctaggcctcctaaagtgttgggattacaggcatgagccaccgcacctggcctatttatctgtaatgcctggcacattttcaggcatagaataaacagtcaatatgtgtttgttcaaagcaaagttaaacgaatgggatttgtcaatggattcttatgtatgacaccaaaaacagaagcaacagcaacaacaaaaaata

SEQ ID NO: 183240 - DNA, 577 bp, Homo sapiens
tttcgggtggttaattaagccattctcaccaccaccaccaccaccattttctttctgataaagtaaatgaagcaaggcgtgtgataatgagggctaaagggcctctataaaccaggaccccaccccgggccccaccatagagcctaagctctgtgatctgctggatgcctcagatctgagaacagccacagaagaaagaaatgtgatccctttctgaggacccaggaccctgagttactgtatatattcagttyatcaattatcaagagcatttcctgtcatatccacacatttaacagtatcctccttctcaagagcccattggcacactcgattttaaaatgtccttgtaaaaaagaacaacagagattttctacaaggcccatctgccttttaattttatttctgtccctaggtccctagtggtttttgttttgtctggttctacatttacgtggaattgctcagggatgttttttatggttagaaagtgcctgatttctgtagctatctatgtgtgaacataaacctcaccagtttacaagaagcttggacgttccaaatggtagaggaatgg

SEQ ID NO: 183241 - DNA, 577 bp, Homo sapiens
tttcgggtggttaattaagccattctcaccaccaccaccaccaccattttctttctgataaagtaaatgaagcaaggcgtgtgataatgagggctaaagggcctctataaaccaggaccccaccccgggccccaccatagagcctaagctctgtgatctgctggatgcctcagatctgagaacagccacagaagaaagaaatgtgatccctttctgaggacccaggaccctgagttactgtatatattcagtttatcaattatcaagagcatttcctgtcatatccacacatttaacagtatcctccttctcaagagcccattggcacactcgattttaaaatgtccttgtaaaaaagaacaacagagattttctacmaggcccatctgccttttaattttatttctgtccctaggtccctagtggtttttgttttgtctggttctacatttacgtggaattgctcagggatgttttttatggttagaaagtgcctgatttctgtagctatctatgtgtgaacataaacctcaccagtttacaagaagcttggacgttccaaatggtagaggaatgg

SEQ ID NO: 183242 - DNA, 616 bp, Homo sapiens
cttcaagctgtagctgctcactttttagatgagactgttggggctcaaagaggtaatggaatttgcccaaattcacaggacaaggaactggcagacccaatacaaggacccatggctccctgttccccatctgccgagtgaagctgtctaagaaggttggggcaatattcctctcttctcctgttccaaatgtggttttatcctgccaaatctagcctgtaggtattggccaactgggacaagaggggyctcagcttgccaacttcgaggccaagaccatctggtgtgtgagaaagacatgtgtgatgatgacctcagggatgagatgacaccagccccaaagcccctggggaccctgcagttccgttcttccaaagagtccagtgatggtctcttccttcctatgacataggagactaccctgtgtttattgttcccacagcccagtcccagggtgggccttctgtgactgcttctcagccccaccctgtctaaacatgcagcccctactgagctctcttcagccatcccagcagaactttgctaaaccctactgctgacaaaagccaaaagccatttaacaaatgccagagatgtctatgtcattttgtttatt

SEQ ID NO: 183243 - DNA, 501 bp, Homo sapiens
taggaaaattatttcctagactcctgtacgcaataagtcatctgtccatttacagtgtcatgcataatactactgagtcatgaatggtggatccattcaaagaccaaaacctacaaagaatgcattagcccaaatttttcctcacagggcttttctttttttcattttgtaatcaggacatctgggaattctataaaatcaagtgctttgatatgaagaaaggaaaagcctattagtttgttttcatatacaagcaaaacagattcacagatttatcaagagaattctgctataatgatacctgagctgggacagtgaatctttttgaaacttatgttaagggtattcccttaagcaccagaatttaccctcagcagtctagatagacaatcccaaatgtaacaaacaaatcatayggatgaaaactgggaagacagatttacaaaaggatgggggaaattgtgttcctctttctctcttgctctgtcctgaaatgtggct

SEQ ID NO: 183244 - DNA, 569 bp, Homo sapiens
ctcaaaccccaaatggttttcaataaatcaggctgcctccatgaagttctgatatacactctccacaaagatatttctgcatttggaagctaaaakgatctgacatttatcacgtgacttaggtttgtaaaacacaccaccactgaaagggctatagatcatgactacaaagactaagatgagggatgatactaaaaggcacactttgccagggatgaatagtattattccataataaagcaccgtatcgaagatgagaattctgggctatcctttttcactaaccagctaagaatcttgaacaaccgcttcacatacctaggcttctattcctttgcccttaaaacacagttggatggtatcattagacaccttcctcactaggcctttgtgataaacaaaatagtatatgttaagatgcctttaagagaacaaggtgatgctttatgaatgcaatgtttgagaagttttaatgtatattttgaattttccttccagccgtaggttcaggtaactaaagcccaagccaactaaccagacaattacctaacctataattcacttttgat

SEQ ID NO: 183245 - DNA, 610 bp, Homo sapiens
tatgcacttaaccaggtaatataaggttgtttaatagtggaacaaagaggtaattaagtcccttcttaaaggaaaaacctgagacctatttatttattcattcaatgaatcatgaytagttatgaaaagcaagagaaataccgggagctttgactctgacccttcctgatctttcttaagcattaaaagtcttcaatacaaggaggttggggaaaggaaagagtcaaagcccaaccctgagccttattcccttccccaaagtaggaagaaaccagtagaatagagtattggatgagcctagacaacctcaccccagtgaaacgtggaatgagagaagtcaggaattggaaacaaagatgcagcacttcttctgcctcatttagtcatcctcactctacacatgaccaccaggaatgtcaaatgacagtttccctgaatatttttcatgtgacaattggccttgtaacaataaacaaagtggcaaaaataaaataattggttttaaactactgcttaattgcattcatttattagctttacttgtcttctttgtctagtcatcacacggcctccaaatttgttagagtaataataacttatgattgaaaat

SEQ ID NO: 183246 - DNA, 557 bp, Homo sapiens
ttaggagatttgtccaaggaaatacagtgttatgcatacatcatgttttatcattttttttgtttatttgagatggagtcttgctctgtcaccagactggagtgcagcagtgcaatctcagctcactgcaacctccacctcccaggttcaagcaattctgctgcctcagccttccaagtagctgggactacaggtggtgccaccacacccagataattttttttatttttagtagagacggggtttctccwtgttggccaggatggtctcaatctcctgactctgtgatctgtctgcctcggcctaccaaagtgctgggattacagatgtgagccactgcacatgacccacatcatgcttttaagctgtgcggtctccttattcccatgttgctttgttaactgactataaaattttatggaatcacgtcactagcacccatcttagtatactcagtcatcctgtgttacactcatgcagcctgaccttctgcgaagaaatgaaatatgggagggagtgttcaaaaagaaccatagacagtagtaggtaggagctaa

SEQ ID NO: 183247 - DNA, 557 bp, Homo sapiens
ttaggagatttgtccaaggaaatacagtgttatgcatacatcatgttttatcattttttttgtttatttgagatggagtcttgctctgtcaccagactggagtgcagcagtgcaatctcagctcactgcaacctccacctcccaggttcaagcaattctgctgcctcagccttccaagtagctgggactacaggtggtgccaccacacccagataattttttttatttttagtagagacggggtttctccttgttggccaggatggtctcaatctcctgacyctgtgatctgtctgcctcggcctaccaaagtgctgggattacagatgtgagccactgcacatgacccacatcatgcttttaagctgtgcggtctccttattcccatgttgctttgttaactgactataaaattttatggaatcacgtcactagcacccatcttagtatactcagtcatcctgtgttacactcatgcagcctgaccttctgcgaagaaatgaaatatgggagggagtgttcaaaaagaaccatagacagtagtaggtaggagctaa

SEQ ID NO: 183248 - DNA, 607 bp, Homo sapiens
gtgagactccgtttcaaaaaaaaaaaagaaaaaagaaaaaaaagagagagagaaacatttgcaaaggccaaacagagttaacagtttctctagctttgatgggtataaagttacctttgaggacacctgattataacagatttcagtagtagaaaaacatatattttacttcaataatcagaagatactaatgaacaaaggaagtcccacacaatcactggcttctattccacggcagttagaaccagtggcagtgaragacaatggtacattgcacgtcagctccagacacctagacgtcttctctgtactgctgatgggagtagcaaccatacaatcataaccaaggtaggtaaaaatcattgcttcaaactccattttttcctttagtttcctctcgactaatttctgaaagcaagtggggccaaataaactttctgtatagagaagaaaatgcaaaatgaatttcaatttcctgagtgcctacgaaacatcttaccccatgctgcgtttggtaacctcatttgatcattgcttatgactgcggaaggaataagggaaccagggcccaaagaagtcaagcaagacagacaccatgagaaacggg

SEQ ID NO: 183249 - DNA, 545 bp, Homo sapiens
tgttcagtggacatctctcgaatgatcacacacctgacctctggtgcaggcaaggttctgcatcttctctcaccccctcacgcacgcgcacgcacacacacgcacaacctaggaggctacaccaatgaccaccaccagccctggccacatgcagattcagggcactgatggggtgctaagctgggctgattctgggccactccctgtgttcaggaggttaataaggacctaggctctgcctggggaaagaggcatcgtggggccagggaggcgggaagggactgggcaccagggcttccaggagagaagccgtctgagagctgtctgtagagggcagtgtgtcccagtgtgaggccagtaaccaagtgcccagcctagccaggtttttatgtggccccttgtgatgctggggctcctcacatgccttcatycaaaaatacacggagcagccaggcacctactccatggcctcgcacgacaatcggaatcactaaatcacaaacacgtgtgcaaattacagccccgaccaccgaccgcccaccatc

SEQ ID NO: 183250 - DNA, 606 bp, Homo sapiens
gagaagcacatttgtaaagaatcatgcttctcaccttcccaccttacctcagttactaggctgctctggaagcatggggagcaggcatttaggaccttgtggcacacattttgtgtacaacagccttacaccaagtttctccttatttcccatttgatctagtttctgtcttccttactaatatttgtggcaaattatattttctaaaattgacaacaacatttctggtcccacaggcaccttcaaaaccttgctactctcttccccttgaactaaggtgggtgtttgtagctaccttgacaagtacagtayggtggaagtgatgccatgttactagcaaggctaggttataagacatgatacagattggttccagttccagataagatggagtaagcacacttttccttatgtctcccactaaatgtagctatcaaacttggacacaatacagggggcagctatttgaggactctgagaagtaagagtagcaggcagattcaagaagagcaaaatgtaaaatatcactgaactgagggtgagtttattttttcccctggttcttccaccactttgccctggatactgttatggaagtatatggca

SEQ ID NO: 183251 - DNA, 551 bp, Homo sapiens
acgctgtcataataaataattgtgctgccagttgaaaatcaatatttgtgttatacacacattaacacagaaatttggtgtttttacagttacaatgcttccgagaagatatcgcatgatctcttgatgaaataacatatatttccttccccttaggttgcttatgagtggccttaagagtggggtttacatttttatttgtttctgtatttctactgcacctggcattggtctttgatcatagctgttggttgaaaatgcctatcaaattggacagtgaggttagtacttgaggttgcaagtatatgaatatattctaagtctaagaagttgtttacargaagaggtcaagtatagtggtagtattacaggtaggatgactaactgtcctggtttgccagtgtgggtgcccaggacttaggacttccagggccaaaacccagaaagtcacaggcttgggcaccagagtctagctttgaatcctgcttccaccaattattaactgcatgactcagttttctatttgtaaagggtgaataataacacattta

SEQ ID NO: 183252 - DNA, 477 bp, Homo sapiens
ccttctgcaagggactgagtgtggtgaactgagtagatggaatgcccctgctatgagtccagtgaaggagtcgagaaaaatcctgcattaaaatgagcaagaagcatrgcatacaggggattagaggtagattatataaggctttattcatggtaaaaagttttattcatagtgagatggtagccattggaaggctttcagcagggaagtacatcatctgatttacgttcctaaggggtcactctggccactgtgcggagaagagactggggaagggtacactagagtgtacatggggagacctggggaggctcctgcaggccatcccaggctgtggcttgcatccaggtggtggtattgagaaccttcagccccaggaagcagcaggacctttactggcaatttctaaaggatcagtgaaacctgtataaaactggcactggtttggaagaacttatacattagcaacagacaaga

SEQ ID NO: 183253 - DNA, 589 bp, Homo sapiens
ctccagaaatggagctttaagttaatcagtaattggtttgtgtcctggagccctgggtgtttgaagccacatagcactactttgcacagtccatggttgatcctgtcgaagaaaattcattttgtaatataaacaaggacgagaatttgggacacagaaatactcaaataaaaatggaatatcctgagtcctactttttcccccaaccaggctttccctgagcccacttatttatggtttttccaaccctactgggactgtaagatggagataatactgtccccttaacagagttctcaagagctctgaagaggacagagaatgtacataaatgtccacatggtgtttggtatacaraagcaaaatatgtggtaggcttcctactctttctcctccttctcctcatcctcattgtcatcttcatcaatatcattatcatctgtcatctgaatgactcatatgtgcctccaaaaatatcttcttccagcttgattgcgggaaggaggactcaattcttgcctttcaagattggtaaagaaatctatggccttcaggtttcgggggcaggctggaggcagggaagggagca

SEQ ID NO: 183254 - DNA, 569 bp, Homo sapiens
tagtgatgattatgatgatggcaactattgtatgtttctatgccaggcacacatttctcacaatacatgagggatgagggagattatcagccacttttctctgataaagaagtggatagccaagaagccagttcacttgctgagggtctcagagtgaatgtttgagcctgagtcgatatgaaagaaaggtgttctggcatgtagttgtcatgagtgagatgattttgttttgttttgtttgcccccaaatcattttcctttggacaaagaggacatttttcagcctcactgcccagagagccacatgacccttagtctgtgtgatgtcatttttaatgattttggcctaagtcacaaaatcagtgtcaacttaagaggacatgcaaccctctcaggagccaaaggaaccatagaatcaggaagatttgcawctgtctaaacccataaaatgtacaacaccaagagtaaaccctaatgtgatcatgctgtgtccacgtgtgtgtccactccaggagaaaccagtgtgtctgaaaatgggcctgagctatgattgtctggacctgcgcaca

SEQ ID NO: 183255 - DNA, 569 bp, Homo sapiens
tagtgatgattatgatgatggcaactattgtatgtttctatgccaggcacacatttctcacaatacatgagggatgagggagattatcagccacttttctctgataaagaagtggatagccaagaagccagttcacttgctgagggtctcagagtgaatgtttgagcctgagtcgatatgaaagaaaggtgttctggcatgtagttgtcatgagtgagatgattttgttttgttttgtttgcccccaaatcattttcctttggacaaagaggacatttttcagcctcactgcccagagagccacatgacccttagtctgtgtgatgtcatttttaatgattttggcctaagtcacaaaatcagtgtcaacttaagaggacatgcaaccctctcaggagccaaaggaaccatagaatcaggaagatttgcaactgtctaaacccataraatgtacaacaccaagagtaaaccctaatgtgatcatgctgtgtccacgtgtgtgtccactccaggagaaaccagtgtgtctgaaaatgggcctgagctatgattgtctggacctgcgcaca

SEQ ID NO: 183256 - DNA, 561 bp, Homo sapiens
tttataaaggacagttctgtgcacacactgtcttgcctgccaccatgtaagacatgccacctttgctcctcctttgccttccttcatgattgtgatgcctccccagacatgtggaactgttgagtccattaaacctctttttctttataaattgctcaatcttgggtatgtctttattagcagcgtgagaacagactaatrgagtgagtgaatacgaggatagtataaaagacatatggcaagagactgccataaagagcccccaaaccagattcagactgcagccattgtgtgggcctcagggtgctggtgcacagctgtgatgggtgaggtcataaatacatgcacgtgcatgcacatacactctcagacacatacatgctcatagagagacatgcatagccccatgatcacacagcacatgcaggcatacatgcaaagatgcttcccccacatacacacatgtgtgcatgcacatttgcaggtaaatacacatccctccacacttacaccacacacacacatacacatattcacaggtatacacacattccctcctct

SEQ ID NO: 183257 - DNA, 578 bp, Homo sapiens
tggttttataaaggacagttctgtgcacacactgtcttgcctgccaccatgtaagacatgccacctttgctcctcctttgccttccttcatgattgtgatgcctccccagacatgtggaactgttgagtccattaaacctctttttctttataaattgctcaatcttgggtatgtctttattagcagcgtgagaacagactaatagagtgagtgaatacgaggatagtataaaagacatatggcaagagactgccataaagagcccccaaaccagattcagactgcagccattgtgtgggcctcagggtgctggtgcacagctgtgatgggtgaggtcataaatacatgcacgtgcatgcacatacactctcagacacatacatgctcatagagagacatgcatagccccatgatcacacrgcacatgcaggcatacatgcaaagatgcttcccccacatacacacatgtgtgcatgcacatttgcaggtaaatacacatccctccacacttacaccacacacacacatacacatattcacaggtatacacacattccctcctcttcttacacacaga

SEQ ID NO: 183258 - DNA, 566 bp, Homo sapiens
ttctgtgcacacactgtcttgcctgccaccatgtaagacatgccacctttgctcctcctttgccttccttcatgattgtgatgcctccccagacatgtggaactgttgagtccattaaacctctttttctttataaattgctcaatcttgggtatgtctttattagcagcgtgagaacagactaatagagtgagtgaatacgaggatagtataaaagacatatggcaagagactgccataaagagcccccaaaccagattcagactgcagccattgtgtgggcctcagggtgctggtgcacagctgtgatgggtgaggtcataaatacatgcacgtgcatgcacatacactctcagacacatacatgctcatagagagacatgcatagccccatgatcacacagcacatgcaggcatacatgcaaagatgcttcccccacatacacacatgtgtgcatgcacatttgcaggtawatacacatccctccacacttacaccacacacacacatacacatattcacaggtatacacacattccctcctcttcttacacacagacacata

SEQ ID NO: 183259 - DNA, 582 bp, Homo sapiens
gcctctcactgcctcattgacagatggacacacttgtcttgaatgaccctgactttctccaccagaataagttgctcttttgaacccataaccttctggtctgtgttgtattttaaaccagaagggtggtttcaggattaggagttgagtctgtagctgcagcatcattttataacaaattagacctaattcctgatcctccagtgaagtaacttgggcacattgcataattttcttagcctctattttctcatctatgaaccatgattgataatagtacctgagccatatgctgtagaaagatttgattggttaatgtgagcaacatgctcagaacaaggacaggtgcatgccaggtgctgcctgaaataagctgttctcattgctgtgctgtggtgcgtgttcatgctgttggctttctcctggtgagatgagaccttgggcatgcaaacctgcacttgcccctttttggggatgctgatggcaaaacagttggaagggaccttgggagatttcargggcctcttatgtgtccatgctggacacccctggagggttggtcaccgtgttttgagcatttgg

SEQ ID NO: 183260 - DNA, 633 bp, Homo sapiens
tgaattacttaaactctttctgtctcattttattcatccaaaaatgggtataatagcaacctggcgcagtggctcatgcttgtaatctcagcactttgggagactgcggtgagtggatcacttgagcccaggagttcaagaccagtctgggcaacatggtgcaaccccatctctagtaaaaatacaaaaattagttgggcatggtggtgcatgcctgtggtcccaactacttgggaggctgaggtgggaggattgcttggacctgggatgccaaggttaccatgagtcaagattgcgccactgccctccagcctgggcaatagaatgagaccctgtctcaaaaaaaaawttttttaaaggggcataataatagtccctgccaaacatggttttttgaggattagatgagtgaatatttagtaagctccttaaaaagtgtctactatgtgtaaacctatgtaaaagtatgataaatatatcatttctgatgactcagtgttagaaagttcttctattaatctaaaattcatttttttctactcactggagtctggtaaagtccctgggtttgaaaagtcttgggttttgtgcccattatcacatagactgtttcccagccatgctgtgttgaga

SEQ ID NO: 183261 - DNA, 585 bp, Homo sapiens
ttttgctctgtcacccaggttgaagtgcagtggcgtgatctcggctcactgcaacctccgccttccgcttcaagcgattctcctgcctcagctcccaaggaactgggattacaggtgcccaccactgcgcccagctaatttttgtatttttagtaatgatgggatttcaccatgttggccaggctgatctcaaactcctgaccgcatgatctgcccgcctcagcctcctaaagtgctgggattacaggagtgagccaccgcgcccggcctttctttcttgcttactctctgaactccaaaatcctgtatttttagatataaatgtgaaaacttcatattgcaaatgtataatagttgtatcattgttgttttcgcttcatgtactaactaatgaagatgaaacctaaatttatattcgaatattaatatcttaatacttatgaactttccatgtcaggtagtcaataatcaaatcaatgttgagaaaactgattataatagttaaaagactgatagcagtaatgattaagaacaygtgtgcatgagtgaaaaagaacagctaattagactagatatagtaagtct

SEQ ID NO: 183262 - DNA, 581 bp, Homo sapiens
ataccattagtaaaactctgtaaaactcaatttgtgatatattgactttgatatgctagtgagacatcaaaattgtaattgtagtaggaaattaaataaatgattctgaagctttgggaaaagatgtgagccaaagataaatattagagtgttataagcttacacatgctagttcaacgattggaattaaggagagtgttcaaggatagtgtggagagagaaggaaacaatggacagaggacagaactccaggataaccctatatgatgkcacaagatgcaaaagcgagttcaaatgtgactaagaaacaatagttgagagagaaaaggagtaagaggaaataccatggaaggcgagtgtcaacagtatcatgtgcagctaaaagtgcttgtaaaattcaggacctaagggatcctgtgtatttgaaatcatggacttcagaacttccaaggcattttgtgatgcttaataaatatgttaaataactaaatgagtagaaaaattaagtactgccgtaattcaggttctttgaggggccagagaccaccacacatgcagttataaagagaattagactgggc

SEQ ID NO: 183263 - DNA, 530 bp, Homo sapiens
catattctggtccataaaacacaccttaacatatttaaaatatatatactatataaagtatacactcagaccatttgttagtccatttttgtcttgctacaacataatatctgaggctgggtaatttatagagaaaggaggtttatttagctaatgattctggccactgacaagtccaagaggatgacaccagcatgtgcacagcttcaggtgagtgccttgtgctgtatcacaatatagcagagaagcagaaaggtgaacaggtatgtgcaaagagccagggaacaaggaggcggacctgccttayaactacctgttcttgtgggtaggtcataaagtcataaaacaagtccattcctgtgagaactaatccagcctcaggagagcaaaaactgactcaccacctggagcatggcatcaatttattcatgcgggacctaaacacctctcactaggctccaccagccaacatggaaagctccatggcattctatctctagggtgaccaagaaaaaaaagagaaggtacaa

SEQ ID NO: 183264 - DNA, 568 bp, Homo sapiens
ttagttccaccatctgtggactcatagaatacattatctgtgtgacacttcccatagctttgcttctaattgaggaactctttttacaacaaagaaagtacagaaataggctcagacctgtaaaattaactgatctttccacatacctgatcactcaaaaggggttaggctaaatgaaaggtgaaatagcttattgaaaactcagtcatggtacaagttgggagacaatggaattctgttttacataatcrcagaatatacttttgcatctcctgactccccaaagagggttgcatagcagagtgccaccagccacgtacttccacatgactagcttcccagtggaatctacagaacatctttataactaatgagttcagcaaggttgtaggatacaagatcaatattaaaaatcaattttattactatattctggcaataaataattggaattctgaattttaaaaaatagtgcaattacaatggcttcaaaaagtgaaatagttacacatctaataatacatgtacagaatctatatgtagtaaactacaaaacactgataatata

SEQ ID NO: 183265 - DNA, 608 bp, Homo sapiens
ctttccctctcaattatcttgggctgcacaacagaataccatggactggyggcttcaacaatagaaatttattttctcacagttctggatgctggaagtccaaaatcaaagtgccagcagggttggtttctggagaggtctctctttctggcttgcagatggcagccttctttctgtgtcctcacatggtctttcctccatgctcacatggacagagagatatctggtgtctcactcttcttataaggacaccaattttcttggattacagccccaccattatgaccttatttaagtttaattacctcattataggtcttatatccacatacagttacattgggtatagaggttcagcttatgaatttggtaggggggccacatttcagttcatagcaccttttcagccaggccttctctgggaaccctttatacattacaacctccatactttgatttttttttatgtacttacaatgctttgttttcctttatagcacttatcactttcaaatatactatacatgttttgtatttctctctttgttacctgtctccatccactggaataaaagctcaagaatgatgacaatttgttcactgtggta

SEQ ID NO: 183266 - DNA, 506 bp, Homo sapiens
ggtcaattcacacaaccctcccccagagttatttgttactaactttttaaccacatttcttccaagtccctgaccatccaggcatgccattgatcacagcccattaatcagtatttaatcacatgtctggccatttctctttccaaacgaagtgaataaccagggacactgatcaaatttctgctcatgaggaggatttcccttcaccactgtcctgcagggatgttcccaaaaggggctgtagtgctgcagctgtccagtttcaggtgatgcctgcatattatgcagaaccatcatgcacaaaggaggcccaagtcttctctccacctgtcaactgatcatagsgaatgcctatgaggccataggggcaggatgggagagagaatgccatgttgcagaggtgaggaccatgggcatttgtgccactctttaatgtacatgtgccttcagggcctgctttggcctggttacatatgtaccattttcatttgatgatagaatgctgc

SEQ ID NO: 183267 - DNA, 577 bp, Homo sapiens
taaggtatactgtcaacgagcatgagcattactgtagaagcagaacataatgaactatcagtaactggggcatttatgaaggtgtgaagatgctttcacctggtactaaaaggcctggcaaactgtaaccccaactagatcttcaaagatttcctgttacttccacatatagaattcatatatcctaagcactaattataattacctgaaaacacacttttagagatttcttatcctcacttttttgtttgtttttgatsttttctacactccattttcacctattgaaatactatcactcttctaaaatttaactcaaataatgccttcatgcatgtttcagttcaatcatcattcaggagcaaaggagaatattgaacataaagaacaagtatattatcttaagctggataatgtctaatcaaagccagcaaagagagacactgagaacaaatgcaagataagcttattgttgacgctgtgacatttatagggaggccacagattcgagatcatgagggtcttcatttaagatggcactggtaaccacactaaaatattcaatacatttgaaaat

SEQ ID NO: 183268 - DNA, 512 bp, Homo sapiens
tttcatttattaattgatttattgtttactcatgctcaattatttcatcttattcaacagatacttgttaagccactcatatgaacctatgtgcagggcacttgtatgggtgctggaaattcactggcaataaagaaaaatcctctgtatttatattctgaatatattctacatagaacaaatacttttggtccttgtacgtgcttttcacccgcctgggttcagcatgactgatgtacagttacatcaccatgccaatgtcccacctcataggtttaccaaagccctgatatatgaatgaatgtctcagcttccccatcttttgactggataactctaggacactatcctctgcagtgtggtttatgcactcaaccaaatggatgctgtttggtgctatgttcccaatggctagrctacatggatctgggaactaaggggcagaatgaaagaacctttgcactatcattcccaaacaaccacttgcagactgcatgcattctgtccccata

SEQ ID NO: 183269 - DNA, 568 bp, Homo sapiens
taaataattgaaatctcataggcattgaagcaatgttggttttgctaacgtagatgtgtcatagtttattcaaaacatttcttcttataaatcgaaacatttgtaagatttcccccatttaaatktgaatcattttataaaatgaagattcctctttcaatttataaactgaaaatttatcagtagggaagattatctattgaatcatatttttttataaatttgagaccaaggaatgtgattctactttccctctcaaaataaggtattcctgcattgctttttaggactttttacaagtcaatatccttttattaatgaaaatacttaaggcacgagaatcgtaaaagtgaatggcaatccagttactgtacacagattctggtatttttctattccattttttatagataactatagattcacatgcagttataagaaataatagagaaattacagatgccctgcgtccagtgtcttccagggtattcaactataacacagtatcacaaccagaaatttaacattgaaacaattcacctaccttcttcagatttcaccagtttta

SEQ ID NO: 183270 - DNA, 493 bp, Homo sapiens
aagactgacccctcctcttcctcttcttcctcagtctactcaatgtgaagatgataaggatgaagacctttatgattatccacttccatttaatgaatagtaaatctattttctcttctttataactttcttattaacattttcttttctctagcttmatttattgtaagaatacagtgtatagtacctataacatacaaaatacatgttaattgactgtgttatcagtaagacttccagtcaacagcaggctattggtagttaaattttgggagagtcaaaagttatatgcagattttctactggagggaggtgcccctagttcaagggtcaacagtaaatattaaatattcaacagctgatataacactgatatctctttaattttcatatgctagaaacattgacatgcagatgacacgtgtctcttttgacctgtcattgctcctagacatgtttattgtgctcacttgagagacaaggagccagagaa

SEQ ID NO: 183271 - DNA, 428 bp, Homo sapiens
cactggaatttattgtttatactcaggcataaatatgggaaatatcactgttactctctagagccaacattactctttgggcacctcagtctgggtttccttctaatcttgaaaaccagacaagacatctgctcccctctgtgctttcttctttagcaactctgttgtccttaatccctcctttcactcatttctttccacctggggccaagttgctattttccatagtgttactaatctgtacatctaatgagccagtattttatcctattctgatatgtcagagaagggggatgaytgggagtaagatagtatacatgacacttttctctattgagaacttttattcctcgaggtgacccgttgtctagattgaagatcaacatatacaagagaactcaagaattcccaacatcactatggattat

SEQ ID NO: 183272 - DNA, 572 bp, Homo sapiens
agtctatgtttaaagagaaacaaaccatttttaatgatttgaagtgtaattttttctccctcctttccaataatttattcctatgaggttgagaagaactaacttttattaaggaggatgtactttgttttgaactttttttttttttttttttgagagaggctggagtgcagtggcatgatcatagcttactgtaacctcaaactcctgggctcaaatgatcttcccactttgatctcccaaagcactgggattacaggcatgagccacctcacccagcctgttttgatttttgacaaaatgtgtcattgattaaactggaatcagatattttgctgttttctgttaccaagattagaattaccagtcattcccaaggatatgttttggactaggtgttaatgagtactgtacaaacrgatgacaccttgcataaaacccagcctccagcatgtaggggcttgtagtaacgacagacatacagaattctaacacagagatggctttggcaaatgctagaatgaagtaaaacagttaagttgaaggagaggaaagaaaaacagaggcaaccg

SEQ ID NO: 183273 - DNA, 547 bp, Homo sapiens
ccattttaccgcatagcttcctgggtctccttttgccttcttcctacaaaatggttcatacatccagaaattccttcagggtttgaaatatcagtagtaatttcagacataaatgcattttggtttgacacatcttccaatggacatgttcatcattgctcattaatcacatyaagtaggcataacatttagtccatctacgtggagtgtcacacctgggaggactttgaaatataattcaaggagaaaaatatttcttaaaccaagtgccaatcaacaccatttatggtgaagtattgtaatcaccatatgaagtctggattacttaaatatatctagcagtataaatgagacatcagttttctacccatctactttgaccctgagtcaggtcattcatatgtctttggacttcataaatgcaatgagtcatatctttaaaaattatttttatagggtgtcagggataagagtagctttctgtggtaaagggaaaatacccagaaggcataggggcctctaaaaatctcagtctttatcccatgaa

SEQ ID NO: 183274 - DNA, 487 bp, Homo sapiens
cacagcacaaacctgttttatccactgaagcaaactttgtatggtgttatggaggcataacacctagggtagtgcttctaaaacactgaaatatgtaaaaatcagcagataacgtaaaaagtagagtctgtgcagttaggaagggatgaggtctgaaagtttgaatttttaattatcttctgtttgtagcagatgctgctagtccagagacctctatggggacaattttcatctatgaaaaatctctgttagggtgaagttatcctgaacttcargactgattttcagtattaataaagagtaaaatgtagggaagggaatagaatttcaatctagttgggcaagtagattacctgttcattcaacttgatatatattcttggccaatctgttacatattgcttagcctccatgcctttggcaataacatggaaataaccatcatgaaaaagcaattaatctatagaaaatcttgctacatggtaac

SEQ ID NO: 183275 - DNA, 457 bp, Homo sapiens
ttcctatttattgacctacaatgtggtttctgtacctgagcaaaagacatattttttctctatatttgagttggtcttttgagaccggcaaagctgtggaaacaaagctttgcttaaggaaaatggccacaatctattgttagaaagaagcctcaagtaccatgaaaatggaccacacaggtcagggatttctcaaaatgtttcttttcccaggaaaatattgaaactaggactattgtggaattacacagtttatgattgccacttatgaactacaccggaatcargcttgaagggttctgaaccataagaaacttcctctggaaatgaatgtggtagctgagtccacatgtgtgggaggccaactgcatagctgggagttgtcacaattaacttctgcagataattccatgtttattaaataagtgatttaagtgtgacactattgtatgtgcaa

SEQ ID NO: 183276 - DNA, 623 bp, Homo sapiens
ttaataaacattgaattctctgtggaagttaattgtgacaactcccagctatgcaattggcctcccacacatgtggactcagctaccacattcatttccagaggaagtttcttatggttcagaatccttcaatcttaattctggtacagttcatattttcaaccccccatgatactgtatattcctgtatttagaccaatgcattggagataaacaaagatagctatagtaaattttcttatctgaattatattttgtttctggtttgaagttgtgggcaaagttaacagaccaaaatgtttgcagacagccagaaatggtttaatgatgtaccagaaacaagcttcaagcttgttgctkgaagacgggtgcatagaaatagtgaaaaggctatcaactatgaaaaatgtaaggaattggacattacatgggaaaaaaatcagatcagaaaaaattgcccatagaaataacaaagatgccactttcacattgtcagaagaaatcagaagtcaatgtctgaatgtcctgatcattttcaccaagatttggacattagttctaaagcagaaggaagacttagagaagtttttactagatgtaatagaagtttatgatgaatttct

SEQ ID NO: 183277 - DNA, 623 bp, Homo sapiens
ttaataaacattgaattctctgtggaagttaattgtgacaactcccagctatgcaattggcctcccacacatgtggactcagctaccacattcatttccagaggaagtttcttatggttcagaatccttcaatcttaattctggtacagttcatattttcaaccccccatgatactgtatattcctgtatttagaccaatgcattggagataaacaaagatagctatagtaaattttcttatctgaattatattttgtttctggtttgaagttgtgggcaaagttaacagaccaaaatgtttgcagacagccagaaatggtttaatgatgtaccagaaacaagcttcaagcttgttgctggaagacgggtgcatagaaatagtgaaaaggctatcaactatraaaaatgtaaggaattggacattacatgggaaaaaaatcagatcagaaaaaattgcccatagaaataacaaagatgccactttcacattgtcagaagaaatcagaagtcaatgtctgaatgtcctgatcattttcaccaagatttggacattagttctaaagcagaaggaagacttagagaagtttttactagatgtaatagaagtttatgatgaatttct

SEQ ID NO: 183278 - DNA, 620 bp, Homo sapiens
ggatctgaataagtctggccagccggctactgctttactaattctatcttttttctttgggtcctccagaaccactcttgaaagaaagtgtatgcagaaggcatcataagaatagctgctgctctgtttgcaakcaattagagatggcagaggggttatctacttcctcatcagaggccagcagcagcactgttccaaatacaatcaaatgtttgatttctttgggtggccacatgagtaaacgtgaccagaggctgctactttccctctcagttgaagcttctgctaaatgaatcatagcagctctatgagaaagtgaggggaaaacccaccaatgactagccaagaaactttcaagtataactgaggaagtcattggaagaaaagaaaagaaagcctaccaaatcagctgcttttcagatggcacctcctatgacccctgaatagcctaagagttctctaaaatagaacatgtattgcactaccttgattggctttattaaattagagtgtaaactccctaaggacaaaatctcacctggcatagtggcaacagtagatttggtgagtcagactacaggggtttgatcacagcatctgttacttatacatctataacc

SEQ ID NO: 183279 - DNA, 620 bp, Homo sapiens
ggatctgaataagtctggccagccggctactgctttactaattctatcttttttctttgggtcctccagaaccactcttgaaagaaagtgtatgcagaaggcatcataagaatagctgctgctctgtttgcaatcaattagagatggcagaggggttatctacttcctcatcagaggccagcagcagcactgttccaaatacaatcaaatgtttgatttctttggrtggccacatgagtaaacgtgaccagaggctgctactttccctctcagttgaagcttctgctaaatgaatcatagcagctctatgagaaagtgaggggaaaacccaccaatgactagccaagaaactttcaagtataactgaggaagtcattggaagaaaagaaaagaaagcctaccaaatcagctgcttttcagatggcacctcctatgacccctgaatagcctaagagttctctaaaatagaacatgtattgcactaccttgattggctttattaaattagagtgtaaactccctaaggacaaaatctcacctggcatagtggcaacagtagatttggtgagtcagactacaggggtttgatcacagcatctgttacttatacatctataacc

SEQ ID NO: 183280 - DNA, 620 bp, Homo sapiens
ggatctgaataagtctggccagccggctactgctttactaattctatcttttttctttgggtcctccagaaccactcttgaaagaaagtgtatgcagaaggcatcataagaatagctgctgctctgtttgcaatcaattagagatggcagaggggttatctacttcctcatcagaggccagcagcagcactgttccaaatacaatcaaatgtttgatttctttgggtggccacwtgagtaaacgtgaccagaggctgctactttccctctcagttgaagcttctgctaaatgaatcatagcagctctatgagaaagtgaggggaaaacccaccaatgactagccaagaaactttcaagtataactgaggaagtcattggaagaaaagaaaagaaagcctaccaaatcagctgcttttcagatggcacctcctatgacccctgaatagcctaagagttctctaaaatagaacatgtattgcactaccttgattggctttattaaattagagtgtaaactccctaaggacaaaatctcacctggcatagtggcaacagtagatttggtgagtcagactacaggggtttgatcacagcatctgttacttatacatctataacc

SEQ ID NO: 183281 - DNA, 500 bp, Homo sapiens
agctgtaaagcgtcagaactaggattctaaacccaaatgtccaataattcaaaatcttacctatgtttcatcatacatcactgtgaacccctctctccttgctttttcatatttgcttatttagaaagggaagggttcaactttaacctrttgaaattgctaaactcaggcttttctcttcaagatgaagagtttcattgcattttattcagaacttcaagtctttctgactttccttgtgctctttgttttcttgtgaaacttatctgaagcaactgttcatgaagaaacaggcacagggcatttctgaacacttacggaaacttttttttatagtaataacttgtttatgcaagtaacactgttctctgctctaaaatttcccagtgactcctcctaatgaatgaacctaattaacaaatctcatcactcagccggaaacaagttttttcctatgctgaacaactaaatggacaggtcaatatatacatagtcaccag

SEQ ID NO: 183282 - DNA, 562 bp, Homo sapiens
tgacttttcatgtaatgcattataaggggacagctctcctgattaggaatatgtgtttaatatttactgcctaaattattcctaggttgtgtggggggtgtgtgtgtatttagcctccagtgccactgcctatgtacattagctcctctactgctataccctttagcatggtatctgtcccttaagtatctaatggagaaaacaaataaggattgtctgccagctccgctgtaatacactcacaaaagcttgtgaatctttaaaagaaacaaagcaaagaaaataaatgcatgtctaagcacatttcctgaatatgtgaaagtcctctggcctttctcttccctacaaagattaccatcatctttaacatacatacctcrcaaacatccgccaagtgctgtattgaataatttagtatgatttagtgtggctgcttgttctctgttagacttgtgtggaatgaaataaaagaaaggacgtaaggcagacacagaggagcacaattataggcaaatcacactaggtttcattcatcattctgtgctttcatgccaggaactat

SEQ ID NO: 183283 - DNA, 500 bp, Homo sapiens
agctgtaaagcgtcagaactaggattctaaacccaaatgtccaataattcaaaatcttacctatgtttcatcatacatcactgtgaacccctctctccttgctttttcatatttgcttatttagaaagggaagggttcaactttaacctgttgaaattgctaaactcaggcttttctcttcaagatgaagagtttcattgcattttattcagaacttcaagtctttctgactttccttgtgctctttgttttcttgtgaaacttatctgaagcaactgttcatgaagaaacaggcacagggcatttctgaacacttacggaaacttttttttatagtaataacttgtttatgcaagtaacactgttctctgctctaaaatttcccagtgactcctcctaatgaatgaacctaattaayaaatctcatcactcagccggaaacaagttttttcctatgctgaacaactaaatggacaggtcaatatatacatagtcaccag

SEQ ID NO: 183284 - DNA, 473 bp, Homo sapiens
atctcatgcttattgctggtgacagaaataaactcttttggagcatctaagtacctggcaatgggtagagctattaacctggtccaggtgaacggcctgagagtaagttagtcatcaggctcagcagaagagctgatggcctgggagctgattcagacaagaaagaggggcttaactggtggcacatggcagggtttcagacgttgtaaaaaraagagccttgtttctaggtgttaagaggcatatacaggccatattgtcagaggcatttgaaacagagcagctccatcttgaatagaagctgggtaaaatgaggctgagatgtactgggctgcattcccagatggttaaggcattctaagtcacaggataagagaggaggtcagcacaaggtacaggtcataaagaccttgctgataaaacagcttgcagtaaagaagtcggctaaaacccaccaaaatcaagatggccac

SEQ ID NO: 183285 - DNA, 560 bp, Homo sapiens
ccacttccaccccagcctctcttttgctctcatactgcctttccttattcccacaggtgtttgtttttcaagtcatttgcactccttgtcatctatttgactgattgatataagacccagtcagattgctagttcttacagaagaagctcattatcaattgtttaataatgttctttcacttatttattcattcctgaatcattgtgtgttgatcaatttctgttaatggcaaaacaaataattgaagaatcctagarttgaaaggaaactttgagatcatgaaataattttctaatcttccgcccaagtcagatgagaggtagagatagaagtctaggaatctttgtcaagcagtctttgtcaaattgcctatgggacatagagcatgaaaagtggggataacaagagaggtaaataaaatatatagacaggctgccaagaacaaattgttagtttgaaaatgctaagctgaaatgtaacagaaaccggggagacgataagcctggagaaattggccaggggtttgtttttttagggacagttgtgcacagtgtaaaga

SEQ ID NO: 183286 - DNA, 430 bp, Homo sapiens
tttacatccttcaatccaatcaagttgacactcaatattaactatcacaatggctgtacttatagtcttcatgacttatcatactgtccactaatgccaataaaagtaggactttctttaaacacatcttgaatgtgtatacagcaatgtcttgacgaaagtagagttcagtacatgtatactttgaacatagaaaggtggcttcaaaattatacataaatagatgttaagggcagcaatctggctaagccaggaaacttgtcaggaagctacatttgcagagcaagtgtactgytcttatttagattgtatattatattcaataaaatggcaatattttgtaggattttatttagcctttatataagtatggcaaagcataagtccttcacatgaaaaaatattatttttattaggatatagttataaa

SEQ ID NO: 183287 - DNA, 552 bp, Homo sapiens
cctcactgggcaggttctccaggtctgggcctgtagccaccccctgccagagctattgtgccagtagcaattaagcaactccctggaaagagcctccagaggcaactgaaagcctctctgccactgtctctgcagtggaactatccttgcyacgctcagactaacaaaggagcaaagaccataagcttctcatccatacctcgaacagtcaatgcaaggagaggaggccagcctgtctcccatgggtcctaaacacccccattacttgttaccagacagggaactcctggcttcagcccacaacacaggccctccatcctgaccaattgctgacccatatctctctggaatggagccccaggagtcaagccagctgatgtggagaccagaagctttggtgtaggagagtctgtagtggagtgtggccagggtcaattatccttctaggctcaacttactcccataagactttagtcctaggggaattgtcagatctgatctctgtggggtagtcttgaacatcagatggggctggtccaacctgatggttgg

SEQ ID NO: 183288 - DNA, 552 bp, Homo sapiens
cctcactgggcaggttctccaggtctgggcctgtagccaccccctgccagagctattgtgccagtagcaattaagcaactccctggaaagagcctccagaggcaactgaaagcctctctgccactgtctctgcagtggaactatccttgctacrctcagactaacaaaggagcaaagaccataagcttctcatccatacctcgaacagtcaatgcaaggagaggaggccagcctgtctcccatgggtcctaaacacccccattacttgttaccagacagggaactcctggcttcagcccacaacacaggccctccatcctgaccaattgctgacccatatctctctggaatggagccccaggagtcaagccagctgatgtggagaccagaagctttggtgtaggagagtctgtagtggagtgtggccagggtcaattatccttctaggctcaacttactcccataagactttagtcctaggggaattgtcagatctgatctctgtggggtagtcttgaacatcagatggggctggtccaacctgatggttgg

SEQ ID NO: 183289 - DNA, 477 bp, Homo sapiens
ttaccttttccctccaaagctttctgcgaggcctccctctgggagcttgctgaccgtgtgcgtgtggtgccatctgttcagagcccacrgctgggacacacagtcgcacatgttcgcattgatgtatgggggaaggcaggacagaatatcgagaacggtgtggcctcctgggggtggaggggactcaatgggactcttcttgggatgggacttgggtttggcctggcctgtgtgggtccctgaggaagagcttttcactcagagctttggggaaactaagaccaggggattgtgttgcgctaagaagtggatgaaaatctgaaggctacacaccctgcaggaaaatctgaatgggtccgctgagtggccagaagcagggagttgaacaagagagtggactcgttccacgtggaggtcctgggaagtttctgggggacatccctacgtgccaccacggttcatgggagagctggttgg

SEQ ID NO: 183290 - DNA, 477 bp, Homo sapiens
ttaccttttccctccaaagctttctgcgaggcctccctctgggagcttgctgaccgtgtgcgtgtggtgccatctgttcagagcccacggctgggacacacagtygcacatgttcgcattgatgtatgggggaaggcaggacagaatatcgagaacggtgtggcctcctgggggtggaggggactcaatgggactcttcttgggatgggacttgggtttggcctggcctgtgtgggtccctgaggaagagcttttcactcagagctttggggaaactaagaccaggggattgtgttgcgctaagaagtggatgaaaatctgaaggctacacaccctgcaggaaaatctgaatgggtccgctgagtggccagaagcagggagttgaacaagagagtggactcgttccacgtggaggtcctgggaagtttctgggggacatccctacgtgccaccacggttcatgggagagctggttgg

SEQ ID NO: 183291 - DNA, 477 bp, Homo sapiens
ttaccttttccctccaaagctttctgcgaggcctccctctgggagcttgctgaccgtgtgcgtgtggtgccatctgttcagagcccacggctgggacacacagtcgcacatgttcgcattgatgtatgggggaaggcaggacagaatatcgagaacggtgtggcctcctgggggtggaggggactcaatgggactcttcttgggatgggacttgggtttggcctggcctgtgtgggtccctgaggaagagcttttcactcagagctttggggaaactaagaccaggggattgtgttgcgctaagaagyggatgaaaatctgaaggctacacaccctgcaggaaaatctgaatgggtccgctgagtggccagaagcagggagttgaacaagagagtggactcgttccacgtggaggtcctgggaagtttctgggggacatccctacgtgccaccacggttcatgggagagctggttgg

SEQ ID NO: 183292 - DNA, 477 bp, Homo sapiens
ttaccttttccctccaaagctttctgcgaggcctccctctgggagcttgctgaccgtgtgcgtgtggtgccatctgttcagagcccacggctgggacacacagtcgcacatgttcgcattgatgtatgggggaaggcaggacagaatatcgagaacggtgtggcctcctgggggtggaggggactcaatgggactcttcttgggatgggacttgggtttggcctggcctgtgtgggtccctgaggaagagcttttcactcagagctttggggaaactaagaccaggggattgtgttgcgctaagaagtggatgaaaatctgaaggctasacaccctgcaggaaaatctgaatgggtccgctgagtggccagaagcagggagttgaacaagagagtggactcgttccacgtggaggtcctgggaagtttctgggggacatccctacgtgccaccacggttcatgggagagctggttgg

SEQ ID NO: 183293 - DNA, 326 bp, Homo sapiens
attatctgtgatggtcaaagggaagcgctgacaaagaaaaacgagttcagttcacatcttaaaatatgaacaaacccattctacccaatgagttcaaaacacsctgggttgaacattttcctagagcttcttgaaggtgcacttcaggaagcactgtttcttctccaccacttggctgtggtgtaagcaagaagccagcaaatagagacacagagaggaagcggagactgcacaaggctacagacacattccatttcccagattacgggtgtcagctctctagcttcagggcctgggatttgctcctgcctattcccaagaagctt

SEQ ID NO: 183294 - DNA, 438 bp, Homo sapiens
tatttacctcccacaagaagagactgcagcgataccagggtgggcttccagagcaggcttccagagctgggggtgaggggtgaaggggagagcaagctggggtttgcagaagggggtatgtataattgtgccatgctctttgggctgtcagcttccaccccttccccagctctttgacaccttggtgggggtccaggcatttgtaggtaccctcaggagcacaggcacccacaacctgtcactgggccatgcaccccagggcccaggcagagctgccacctcgctgtctccaagcygaccttgcctggcgctagctctggagcctgctgcagtccccatcctgtcctacctgcccagtgtgcgcccattccacatactgctcttgttggcagggtgggctgtggtcctgctgggagggacctgggagcttcaaggcag

SEQ ID NO: 183295 - DNA, 422 bp, Homo sapiens
ttgcagcagcagtgagctcattatgcttctcccrgaaagttctcttaaaggaagatctgaccggtccatctccattggctaccacagtgggccacaagaagttcagggttgataacaagaagcagggaccttggcccatgtagtagcagatgtagtaaaaataacgccagtaaccgggtataacaaagcgaccccagcacctataggggtgatgtgtgatacacatgcagatggcaggtggaggctggaagaggaggccccaccaggtcaaacccaggaacctagtctcggccctcaccctcttcaagtctctgttgcagtgaacacctttgacctttctcttttctctcaaaacatcccttgcttgtctctgtgctggtgcacttcttgttttgttcttccaacctttggatggcttcttc

SEQ ID NO: 183296 - DNA, 553 bp, Homo sapiens
tttaaagtactttttaaataagtgttgatgatggcaaaaaaaaaaaaaaaaagaggggaacttcttttatttgttgataaaatattggtgaggttggtgcygctactgaaactgaacacactagggtacaagagaaggaatgcttctcgctggtggtcttcttagactcaaagagagaagtatctctccctctccccaggaactctacagagcaaggacaaaaccacttctgacttagagggagggctgaatgcagtgaccctatttaccaaatcccaaactgggtcatgaatttttttaatgacatttcagtttgaaaagaaagctggaagatggagtttgtgtgctgacatgttggaattcctggggcattatgagggttcccatgggggccaaagaagagaagatttaatatggtgatgtgttgtcataaaacatttgattgtttttgctcggattctttgaagatttagtctattatcgataagagaaacactaaagaactcttggttgtgtatttggccgctctcatttcggcaagtgtttaaatgtg

SEQ ID NO: 183297 - DNA, 505 bp, Homo sapiens
acattttatatttgtattagtaaatattaaattatatatggtctaaaggagtcaattgttttgtctataaggcaaaggagaaaatgcagaaaaaaaagtcaatttgtcaaactattgatgctagatagaatcacatgtgtacaactgatcatggacagtagcaggcattttggtgtcttggtagcagtgaactgaatcccaatttgttaattccactccagaacattattttttccagattgttttctgtcatttgttgtatgatttttattttatctgaaagtggmcattagagatctatctctgttaataatttgggtagatgtgagctctattaatgagcagaagaccccaaaaagactgtttgtgactttttgactgtagttgactaattgggtggcagctaactcatttaattgaattaggaaggattagaaaatatatttagcaacatggaacaccaaaaagaagaggtggttaaatatgaacgatgtttcgactatgt

SEQ ID NO: 183298 - DNA, 505 bp, Homo sapiens
acattttatatttgtattagtaaatattaaattatatatggtctaaaggagtcaattgttttgtctataaggcaaaggagaaaatgcagaaaaaaaagtcaatttgtcaaactattgatgctagatagaatcacatgtgtacaactgatcatggacagtagcaggcattttggtgtcttggtagcagtgaactgaatcccaatttgttaattccactccagaacattattttttccagattgttttctgtcatttgttgtatgatttttattttatctgaaagtggacattagagatctatctctgttaataatttgggtagatgtgagctctattaatgagcagaagaccccaaaaagactgtttgtgactttttgactgtagttgactaattgggtggcagctaactcatttaattgaattaggaaggattagaaaatatatttagcaacayggaacaccaaaaagaagaggtggttaaatatgaacgatgtttcgactatgt

SEQ ID NO: 183299 - DNA, 583 bp, Homo sapiens
tattgcctctctttccttcactccattaacacttttatataactggagttttgaaattatgtatagaattctacactttattgtctcaaatcacttggttggataaagccttttattctaggatgaagctattatatatctaaatttataataactatggttggaatgtttcttaaattttctttcaatgtcactaaaaaaaaattaaaacatgatttttatctggaaataaatttaaagtagtttgacagtcttgttagggggttcgattgtgactggccagaggccaagcagttgtcaaatggatattggcagtagataaaaaagttaaatctcttgcaatttcttttcttgtctctgaacataaatattattcttcttttctcagcttaaatgcacagattttaagaacaaagtactgttttgtagggaggaaataatgagtcatcraatcattacaacaattctttatgaacaaatacaactatcttgcaacttaaatttcagtcttattattcatggattaattaactaattttttctgtgccaactaaaaaacgtttttttttttttttaaaaaagg

SEQ ID NO: 183300 - DNA, 589 bp, Homo sapiens
aattttaaatgtgtgcttcagtgatttttagaaaaagttttagtggagtgttgataactaaaaccatatgtcagtaaatttgggagtgattattaatcatgaaaatagaattggcatgtttcatctactttgggcccagaaaagagggctcttactccaggccagaagaggattatttgttaataatgtatttatttttctttacgaaggaagagactttagcatgcttatagtacaagggcacagatccagtggggagagagagagaaaggaggtaatttatgagatagakcagatccacagcattggccttgagcagagggagagccccttgtcttctaagactggtgatatggtttggctgtgccccatccaaatctcaactgggattatatctcccagaattcccacgtgttgcgggagggacccaggggaaggtaattgaatcatgggggaaggtctttcctgtgctattctcataatagtgaataagtcttatgagatatgataggtttatcaggggtttccacttttgcttcctcatcattctctcttgctgctgccatgtaagaagtgcctttcaccctcc

SEQ ID NO: 183301 - DNA, 589 bp, Homo sapiens
aattttaaatgtgtgcttcagtgatttttagaaaaagttttagtggagtgttgataactaaaaccatatgtcagtaaatttgggagtgattattaatcatgaaaatagaattggcatgtttcatctactttgggcccagaaaagagggctcttactccaggccagaagaggattatttgttaataatgtatttatttttctttacgaaggaagagactttagcatgcttatagtacaagggcacagatccagtggggagagagagagaaaggaggtaatttatgagatagagcagatccacagcattggccttgagcagagggagagccccttgtcttctaagactggtgatatggtttggctgtgccccayccaaatctcaactgggattatatctcccagaattcccacgtgttgcgggagggacccaggggaaggtaattgaatcatgggggaaggtctttcctgtgctattctcataatagtgaataagtcttatgagatatgataggtttatcaggggtttccacttttgcttcctcatcattctctcttgctgctgccatgtaagaagtgcctttcaccctcc

SEQ ID NO: 183302 - DNA, 417 bp, Homo sapiens
ttttctggccacatgaggctgtgggattgctccagtcagcagctcaatgacctcaaagcccagagaagccctggagctgtgaatatagatgaggggggccttgggaacctgcttggtcaggacttcctcagcagatggctctcrctttatgtcctgatttatattttgtgggaggagtaaggataaaaatagtattttactgaggtttttgtttggttcatgacttaaataagctgcacagaatcttagggaaggcatgagaaggcctcaaacaaatatttgctgtccatcagtcatctgcagcaacaggatgattgtagacttaaagtcctacaacccaaaaagctattttatgagacaggacctgatggcttctatgctggtcaattattttggtgctattagccaatttcttgt

SEQ ID NO: 183303 - DNA, 560 bp, Homo sapiens
atatttattcacaatttttactttgcatcctcatttttgttttgggcaagcactgttctatgccatgaaattatagcattgaacaaaactaatctaatgagaggagttattttaaataaacccatcatgaaattccttcctagggcgttgacayttgaacagtgactgagaagatgggaaggagcaaatcacatgaagatataacaaagggcatttcccattggtcagagcagccactgtcaagattggggtagggttgacttcgtttcattgagaagcatcaacagtactcatgtggttagagtggagtgaatgagtgagtgaaaaagcatcgagaaccattaagtgtaaggcttttacaatgaaaactgaagactttttatgttattcacaatgtgaggagaagccttcctagggttttggcttgatagtgagtgacagtgattaaatcttgcagaatactatcatcatatatttttcctttttaaatacatctttaacagctttgtggagaatatactatgggagttataaataaactagagagaacaattagaaaa

SEQ ID NO: 183304 - DNA, 548 bp, Homo sapiens
taagtatcaaagaaagtcatagctattatatatcaatactaacaatatttctattattgatactgctcttacatcttcccacacagtaagaggaaaaaaaaaaagaaaagaaataggaaaaaaaaaagacattaaaaagtaaacaaaaacaaacaatcaaaaaactatccggcagctctctttaacccaattttacaatgagtattctgaggttcaagtaggttaagtgtatggcccaaaatctcagctaatatgtggtgattgtacagaagtatccccacatatttcactgactatataataatttgaatccacatttccaccttctataaattaaggtctttcttcataaaactctagcattttctcaaattattttcaaatattctatacatttttaaaaaartcatacctggctgtccttggaggaccctgattcccacacaggccacgttgaaggttttgttgttgttgttttttaaatcccttaatgcaatactccatgtcttataaggcaaattagtgtcctcatttctccaaatgactta

SEQ ID NO: 183305 - DNA, 602 bp, Homo sapiens
ctcaatttcagtgcattgctattcattttaaaaatattcaagttggagaaataattttcagaaactccattatttagaaatactctaatctcatttartgttcatgtgttttctcctgggaagatgcttctaaattatatagctaggatttaagattttcaaatagttttcttaatatatctctgaatatgatagctgttgctgcttaaacctaatctacatgaataatttaattgtagtaatttactcctccggaatacagaaaaataatttggttaactcttcattaaatagaagctttcactatcctggaagaacatcagttgtatttggaaacatatatggctttttgctttgacaactgccagagctaccatactcaaaggcttgatgatctactactgaatttgaaagggaaaaccacaaaaaatttacaagcacactacagaaagatgtcaaaatttcccagaagaggtagatgtgactgaatagtttaaacgcactgtcgtgaaattctagacacatcgaacttaatgcaaacgagtaaactcatgaattggaatgaagtaacacttctttaagaatgcaaattaaaaaggaaa

SEQ ID NO: 183306 - DNA, 602 bp, Homo sapiens
ctcaatttcagtgcattgctattcattttaaaaatattcaagttggagaaataattttcagaaactccattatttagaaatactctaatctcatttaatgttcatgtgttttctcctgggaagatgcttctaaattatatagctaggatttaagattttcaaatagttttcttaatatatytctgaatatgatagctgttgctgcttaaacctaatctacatgaataatttaattgtagtaatttactcctccggaatacagaaaaataatttggttaactcttcattaaatagaagctttcactatcctggaagaacatcagttgtatttggaaacatatatggctttttgctttgacaactgccagagctaccatactcaaaggcttgatgatctactactgaatttgaaagggaaaaccacaaaaaatttacaagcacactacagaaagatgtcaaaatttcccagaagaggtagatgtgactgaatagtttaaacgcactgtcgtgaaattctagacacatcgaacttaatgcaaacgagtaaactcatgaattggaatgaagtaacacttctttaagaatgcaaattaaaaaggaaa

SEQ ID NO: 183307 - DNA, 450 bp, Homo sapiens
gaactattccctttggtcagaggctattgtgtcagcggttatgccgagtcaatcaaaaagaagraagagaaagagagaacagcaactgtgagaatggagctgtcaagctgattgactagacagcaatataaaatttgaaatgctctatgtgataaggtaaacacacaatttttatctgagcattggcaaaaactaaatgcaacaacttgaaaatctcatggaagtgtcattaagaaatatagaaaaacaaaattatttctgcatacaattgaaaacaacaacaaaaattccctatttaatctcattgtttgatactgcggagagctttgaagaaaagtattaagaccaaatttcagaactgaatgcatgcttatagtggcttttttcttttctaccactttgataaacaagtgccttgtcaaatccacaaggtttgctttagtagtcagt

SEQ ID NO: 183308 - DNA, 450 bp, Homo sapiens
gaactattccctttggtcagaggctattgtgtcagcggttatgccgagtcaatcaaaaagaaggaagagaaagagagaacascaactgtgagaatggagctgtcaagctgattgactagacagcaatataaaatttgaaatgctctatgtgataaggtaaacacacaatttttatctgagcattggcaaaaactaaatgcaacaacttgaaaatctcatggaagtgtcattaagaaatatagaaaaacaaaattatttctgcatacaattgaaaacaacaacaaaaattccctatttaatctcattgtttgatactgcggagagctttgaagaaaagtattaagaccaaatttcagaactgaatgcatgcttatagtggcttttttcttttctaccactttgataaacaagtgccttgtcaaatccacaaggtttgctttagtagtcagt

SEQ ID NO: 183309 - DNA, 563 bp, Homo sapiens
gtatataaagatgtatgtacaactacattgcattactattcataagcacaaaacattacaatctaaatgttgcaataatagggaattcgttacataaattttaactaactgtrtgagagactactatgtagcacttaaaaatcctagcctagaagaaaaaaaatgacagagaaaagctcgtagcgaatatttcaataaaatatgtatattggtttgttgaataaaatatgtaaacgtcgaagtagatacaaagactggaaggaaatccactacatcttgtcagtggctctttcggggtagtctttattttgattctgtatgcaattattttgttttgtcactaagttttctataatgaaaatgcaatacatttatagtaagaaaaaaagttgcatctgaatacgaaccaacaggagaaggctacaccacaagggggcggtgtagacacagtctgggtgagggcagctgctgaaggccccgctagttggagctctcacgagctggctgctgcgttgtagacaagcaccagaacacgacaggcacgcagagccgtagggttccac

SEQ ID NO: 183310 - DNA, 559 bp, Homo sapiens
tacctttggaccgcaaaagggacccagtgcttcatgaagctggttttttttgttttgttttgttttktttccgttgttttgtttcggctttaccaacctgactgggtgtttttcaatatccaccattcagactttcctcaacagcagaggatgtggcagtggcaaagacaaggggatggggggagacgaaagggaaaggggcctgcatgaaagaccatgtctgtcttcctgctggtgccagttccctgaacctcatcttgttgttcagccccttactgcagcctgcccagggctccactccatggcttcatcctaggccagaccagcacccagcccgggggctccatccactttggctgcaacgccggctaccgcctggtgggacacagcatggccatctgtacccggcacccccagggctaccacctgtggagcgaagccatccctctctgtcaaggtgagaagcaggtggaaagggggtcacaaggtagctcggatccaactcatatcttgggtttgtcccaggactagtcacttccaaatgtgggtttcctctttg

SEQ ID NO: 183311 - DNA, 518 bp, Homo sapiens
acccagtgcttcatgaagctggttttttttgttttgttttgttttgtttccgttgttttgtttcggctttaccaacctgactgggtgtttttcaatatccaccattcagactttcctcaacagcagaggatgtggcagtggcaaagacaaggggatggggggagacgaaagggaaaggggcctgcatgaaagaccatgtctgtcttcctgctggtgccagttccctgaacctcatcttgttgttcagccccttactgcagcctgcccagggctccactccatggcttcatcctaggccagaccagcacccagcccgggggctccatccactttggctgcaacgccggctaccgcctggtgggacacagcatggccatctgtacccggcacccccagggctaccacctgtggagcgaagccatccctctctgtcaaggtgagaagcaggtggaaagggggtcacaaggtagctcrgatccaactcatatcttgggtttgtcccaggactagtcacttcc

SEQ ID NO: 183312 - DNA, 547 bp, Homo sapiens
agtgcttcatgaagctggttttttttgttttgttttgttttgtttccgttgttttgtttcggctttaccaacctgactgggtgtttttcaatatccaccattcagactttcctcaacagcagaggatgtggcagtggcaaagacaaggggatggggggagacgaaagggaaaggggcctgcatgaaagaccatgtctgtcttcctgctggtgccagttccctgaacctcatcttgttgttcagccccttactgcagcctgcccagggctccactccatggcttcatcctaggccagaccagcacccagcccgggggctccatccactttggctgcaacgccggctaccgcctggtgggacacagcatggccatctgtacccggcacccccagggctaccacctgtggagcgaagccatccctctctgtcaaggtgagaagcaggtggaaagggggtcacaaggtagctcggatccaactcatatcttgggtttgtcccaggactagtcacttccaaaygtgggtttcctctttgataattatttcat

SEQ ID NO: 183313 - DNA, 594 bp, Homo sapiens
ctttatgtaaagtgcaagttttccttcttaatttttgtaaggcagtttttttattttaattcttcttttggctttttatatatgggatggggccataaaataatgagaacttctcaaaaaacaatgcctgaaattagtcttaataacttcttaagggttacagaaagcaagacccaagccagatattgtagcttgtgcttgtagtcccagctattcaggaggctgaggtcggaggatccattgagcctgggaatttgaaacaagcctgggcaacataatgagatcccatctcaaaaataataaaaaataaagwtccatctgtattcagtcactctttcagatgtgtctaaataaaacatgtttagtttcacccagaagaacatgcagatgccctcaggaaattggtgcacgatgtatacaaagagatttaggtaataaataatagagactgtcggggtctgggtggagaatgtctgcctggcctaaagacattgaacgttagactggacctattcaaggcagtgagtgaagtagttaggcactcaggtgtggacccagattgcctgggtttacatctcagctctaccatcagat

SEQ ID NO: 183314 - DNA, 605 bp, Homo sapiens
ttcactaatctattttgaagattaaagaacatgcaggtraagtcatgagtggaagtaatcatcataaaaacaaaagcaaaattgctgctacttactgaggacttaataaggtcccgtatcctctcagtccttatgatgaacctactaggcaggcatttccattcctcttttacagataaaatgtaacagatacccatagacaataaagtgatagttagattttaatttttacaaataagctctgtattgatcctaaaaaagacttggtaacagaattattcccagctgtgtttgtagtaaaatttcctccttagaagtaatcccagggactactcccatttctgccagccacaaaccaagttactaggttctgcaccaaccagtcttttaagtttctctagtaaattctcttcttccccttcctctatgacatatctttactattaagtgtcattctgatatcaaaaaaaatatttttggctaggagccaaggctacattatcagtcactacaagtttaatctgatgacagatactttgctaacattacaaatacattaaaggttcttcaccggcttatatgttagtgacgtctatagtaacagt

SEQ ID NO: 183315 - DNA, 604 bp, Homo sapiens
tcagtaagtaaaaaaaaaaaaagtctgacaaaatatttcattcatttgctcgaagtgattttacacaatagagctacagaacacaggcttggttccatctttcctcttaaataaccaaaaaagagtacttgatctaatctctttcatgtaattagaaatcacctgaaaaatgcagaatctggctgtgagagtgatttgagaattgatggatctgcttccctgcttgtaagaatgaatagcagtacttactccacaaagatgagaagcacacattttcatgggtgcctctctaatgtgttaataaaacaatgaaatgctratttcatttttttcattcaacaaatatttagtgaattgcaactatgagccaaacatcaaggcaaaatcaagcaaaatcagacccaacttctgccgtgatgaagttcactagctctttcatccattagaaagctttaaattggaaatctccactagcatcggttgtctaacttgacaactaatatttgtaaagcattttacaggttagaaagtactatccaatatatcatctcaggaaatcctcactgtaactctctgacttgtattggtaattcatctcctatgc

SEQ ID NO: 183316 - DNA, 565 bp, Homo sapiens
aatgattgtcagggatgagagagaggagagaatagtgtgttactgattactgggtacggggttttcttttgtagtgacaaaaatgttttggaactagagagaggtgrcagctacacaatattatgaatgtactaaatacatctgaattgtcaattattaaactgcctattgttatattatgtgaatttcatctcattaaaaataaataaaagttaaaaaaaatgtatagggaagaccaaaacaccaatggggaactggtaaagtaatgatggtggacttcattactttaccatgacataacgagacagtggtaccagtgtaaacgggcatcttctgaatcccgttgcctctctgtgaaacactctaagagctattgccaggggaaaaggaaacctactcaaaaccaggggtggtaaataatcactggctccgtgacagcaaaatgatccattgccagaaacaaaagcctagttcagcttagcataggggctcagaggacagccagccttggttgcctttagtcttttctctacccgaacttaacctacagtgatgtacattaaaa

SEQ ID NO: 183317 - DNA, 673 bp, Homo sapiens
aaaaaatatgtcagctaaaacttttgaaattacagtgtaattactaaagtgtaaaacaggaaaaattatcctgacttttttttctcttttctctgtattctctccttgctggttcaaaaatttgccattgtttccttgttacctttcttttgcttctatcaccaatgcggttatcttccttccctgttttctcctatcattttaagaaacctttaaagcttcatttttccttttttttttttcctgagcagatgattatttgttatcacatttttcaacctctatcaagccataagaaactgagccagctgcaaatcgccaatgtaccaatttttttaaatgatatttttcacctcataaatagatcaatgtcagagttagaatttctacagaacattcataaaatattgatagtaaaatcyaggcatttcaatattttcatgtctcaataataaaaaccttcaaaataatgtgtagctaagcaaaaaattctgactttcttcatcgtcaaacttgttaacatgagtgctgaaaatatgtaacagcagtattaaattcattacataacccagtgatctgaaattactttcaacattttaaaactctgtaatatctactgctttactcatacttggacctttggtacagtatataaaaatttagagtttcaagt

SEQ ID NO: 183318 - DNA, 511 bp, Homo sapiens
atgtatcttttcaacaaatgatgctggaactggatattcacataaaaaataaataaacttagactttataactttcataaaattaactcaaaatggatcacggatctaaattcaaaaaaagtaggagaatgtctgtgtgtccttgagtttggtgatgaggctttaggtaaaatccccaaaccatgattcatgaaagaaaaaaattgatgaagtgaacattattaacattaaatgctcttgctctgtctttaggagatataaaaactcacattcacacaaatacctgtacacatattcacacggctgtattcatgatagcaaaaatcagaaacaactcaaatgtcctcagagttaacggttaaacagattatgtacatgaataacaacaaatgaacaaattacagacaraagcaaccacctaactaaatttgcagagaattattctgaatgaaataaggcaatctaaaagatcataggttgtgtaactgcatttatataacattcttgaaat

SEQ ID NO: 183319 - DNA, 224 bp, Homo sapiens
aactaatttcataatatctttctatttaagcacatcagcagattagatgatattaaattgtctcattgatattcattatatgattacccaaaacaatacacagaaatactaaaaatyagccaaaaaccttggaaatttaaagaaaacatatttgttaaaatctgagtgggtttgtaatttttgaattactgatagcaaatcattaaagatgatctatttagaca

SEQ ID NO: 183320 - DNA, 470 bp, Homo sapiens
  misc_feature (1)...(470): n = A,T,C or G
tggcttttctccccataactgtgttgaatatatttagaaaagactatcaaaagaagaagtaaagtgaaaattatttcagaaatggtattacattttaaacaattgtacaacaactgtcatttaacatktggtgacccaatataatctagagcaataaattataaacccgatatacattaatgataaagaagtgttggttaataaatttgcattaagaaaaatttacatatattaaaaaatggagagacagaaaatataaaccctagtacacccaatgcctaagttaaaaaagtttttcaactcatgaacaatcatctatcttcctatcctcccccaaatctaaattattttgagtcaagtccaataattcatacctttatattttaaaaaggtctagtacgtttccccaaatataaatattattttggagtatgagaatatcactannnnnnnnnnnnnnnnnnnnnnnn

SEQ ID NO: 183321 - DNA, 437 bp, Homo sapiens
gctaagctatatagtatggtctattgcttctatgctacaaacttgtacagcatgttactgtattacatacagtaagcaactacaacacaatggtaagtatttatgtatctaaacatagaaatggtaaaacaaaagtatgttatgaagattaaacaattgtacacatatatggggtacatgcaataaatggagcttgcaggactggacattgctctgggtgaatcagtgagtgagasgtaagggaatgtgaaatccaaggatattattgtacagaactgtaggctttataaacactgtatacataagcaatgctgaatttattttaaacatttttttttttttgagacggagtcttgctcagtcacccaggctggagtgcagtggtgcaatcttggatcactgcaagctccacctcctgagttcatgccattctccca

SEQ ID NO: 183322 - DNA, 495 bp, Homo sapiens
  misc_feature (1)...(495): n = A,T,C or G
tttcactgagtggtcattttgctgagacaattgcaacanctgtgcttttgtgaagagttaaactctccatgactcttatcctttaacttctgaaattttaagagacttgattatcaagccagtgtgatttttactattatatgcctcacaaacaaatgtaagcctttaaaggattttagattttttctacaattaataatatttcagataacttaccaataaagaatatttccacttaygaaatatttaaaatagaaataaaatattttaaggcatttgttacatgataagccatttttgtcattgaatattgttttgaatttttgaaatatttacttaacttgtaaagtgccctttgttttctgaactttttatatatgcagactgaatgattttttttttatatcagagggtgcaatttaagaatttgtagcctaaaatttatgcgaatatcattaaccaatctcttcccattacccccaccctcagcctctg

SEQ ID NO: 183323 - DNA, 629 bp, Homo sapiens
atagctgaagagaggatttttagtgttctcatcaccaagaaatcacaagtgttttaggtgctgaatatgctaatgaccaattcaattattataaaacatatatatgtattgaaaattcacattgtaccccataaaaaggtacagttgttacataccaattaaaaacaaaataaaacttaaaaaactaataaaaataatgacactagtgtaccagttttatcacctaaatgccgcaggaataaatagatcatttactaagattactgggctttttgttggcttctttgttcatttttaatctgcaaatataaaagattgtgttacataattctttaggttgaaacatgaaatgatgaaagaagacttcaacttccaggagagatttattagctagtggatactcagtgctcccaccaaaaccactagaaaaaaatgtatttaaaacaaataaatcaactagttcaaggaaatagagagctgaaaaggcaaagagaccttgacgaagtaagactccagataaggcaacacttagtgaggtgaactgacttttaaagactttatccttggatkcatttcataattctgggcatgttttaggcagaataacagtatttaaatcctgtaaaaag

SEQ ID NO: 183324 - DNA, 584 bp, Homo sapiens
aattaccaatttcttagacaatagtgatgtgccaaaacttaaagatttcattttttaaaaatatatcatccatttattgacaatcacttaaaaacactgttcagctgataatgatgaaattgttctatatttgctcaatcaaatacatagcagcaagattctatttgttttgaactgtgcaccaattgcttttagccactatcaggaacttgcctatagagattattactgtgatgctctaagcatggacwtttttttattttactaatttcttctacatttggtaattggaattattctgcaaaaaagagttgccccttctcctcattcataatgcatcagaatgagttaaaaatactcatttcacttattaagctatgatccaatattatgattcataatgcatcagaatgaatttaaaatactcatttcactcattaagctataatccaatattatgattatttactttgctacacaaattgttctaggattgaccatttagaacttcagatgtcacaggatccttggggtgttgcttcatcagccagaaacttctatggctggtggcaccttctgcctga

SEQ ID NO: 183325 - DNA, 308 bp, Homo sapiens
agctataatccaatattatgattatttactttgctacacaaattgttctaggattgaccatttagaacttcagatgtcacaggatccttggggtgttgcttcatcagccagaaacttctatggctggtggcaccttctgcctgagtattgcttgcacccactgggctcattccacccactcagcctggaaggttgcacttggcaggtgctaccagcccagatatcacacctgccaagggcragccagctgtggagtggtgaggggtgtgtgggtgagcacacacagggcctggccactgcacaaaacc

SEQ ID NO: 183326 - DNA, 512 bp, Homo sapiens
gattgcattgtgaagttcttgtaatacatttttcaactctaacaagtcagttatattcctctctaaactggctattgtgatggtcagcacctgtactgttttataataattcttagcttctttgagttgttttgcaacatgctcctttagttcaggaaagttcattgttagccaaccttctgaagatgatacccatgcctccctctgggactccatcaggtcttagggagggtccrcactgttgctggtagctggctggaatttgaaaccaatgtatcttatcttgtgaggtgctgtggaattggggctaagcccctgctggaaaagtattatgttcatttggagaaaaaggggtactctggctttttgagttttcagcctttttgtgattctttctcatctttctgagcttatctacctccaatctttgaggttgctgatctttggagagttcttttgtgtgtgtgtttggggggggggtttctattgccatggttattgttttaggttcg

SEQ ID NO: 183327 - DNA, 512 bp, Homo sapiens
gattgcattgtgaagttcttgtaatacatttttcaactctaacaagtcagttatattcctctctaaactggctattgtgatggtcagcacctgtactgttttataataattcttagcttctttgagttgttttgcaacatgctcctttagttcaggaaagttcattgttagccaaccttctgaagatgatacccatgcctccctctgggactccatcaggtcttagggagggtccacactgttgctggtagctggctggaatttgaaaccaatgtatcttatcttgtgaggtgctgtggaattggggctaagcccctgctggaaaagtattatgttcatttggagaaaaaggggtactctggctttttgagttttcagcctttttgtgattctttctcatctttctgagcttatctacctycaatctttgaggttgctgatctttggagagttcttttgtgtgtgtgtttggggggggggtttctattgccatggttattgttttaggttcg

SEQ ID NO: 183328 - DNA, 562 bp, Homo sapiens
agggggaaaaccatgcttctccctcagatctttgcaacccatgaatcaggagatctcctggtgaactcacaccatcagggcctcaggtcagacacacacagctgtgtggagtctcagcagagcagctactcagacttgcacagagacctaggagctttacatagtccctccctgggatccctggcaaaggtggctataactcaggcaaggcaggaggtccacatatacccctaggaatgggactgaatccaggggactgagctatatcagtctgtgggtcccacttccatggcacctcacaaaataagacccactggcttggaatttcaaccagccactggcaacaaggtggagcctgccatgagatgggatagagcccccaagggggatgagtgggccactatttatttgtctcagtcattccagcctgcaggatttgaagggtccaaatggtctggacgaggaagtgtccccacagcayagcacagctgccttgccagaatgtggccacattgcttctataagtggtgccctgatctgctcttcctcactgggtgagtcc

SEQ ID NO: 183329 - DNA, 554 bp, Homo sapiens
tcagttcttattaacttctcgtcacaacaggaatagtctgttaatctaatttgcctataaacttatttttttctttccttggttttctacccataacattccccaacttaatttgctgcttggaacttctatattgaagaccacccatttccttatctattmcctgctcattcttcactgtgtctatggatatatctgatgctctctattcttaaaaggatgagaaaataagaaataggaagaaactgaggggttgttttaaaactcaaccaataaattattgacattacacctagctgatacaaatctatacactcgtgggttcaagaaatttcattttcttttacgatcacgatttaaaagtgtaattctaactctgagacatcttcccattgggatgacaggaaattcaatcccaggcactctcggtactccccatcttctctccctcctcttcccccaggcccagagtgttaaggaatagaagtcacaaatatgatgtggaaacagtaaaaggtggcaccttttcaagattgtgcccctcctctacatag

SEQ ID NO: 183330 - DNA, 425 bp, Homo sapiens
actccccagagaacgtaaatgtaaagaaagaccagggaacttttgctatgcatatgggaaaggtagagtactagaaatagcaaatgagagaagaaaaagtcagtactccataccaagcaattaaagccatcaatggaccatagagaaaagaatacactgaaatgagaaggggaataaattgaatgtttattgaaygtaggtctcaaagccttgcatttagatttacagaagcacttttacttaatccttacaataatgtatttaataactattactatccactaagtcatgatagtcaatctcactccaaaatccattcttttatcagacaatgtaaagagagagaaggtatcataaagtccctaatcacgagctgtgtactacatccagactatcaggagaaacccttgaagaatttgcaaaag

SEQ ID NO: 183331 - DNA, 421 bp, Homo sapiens
agaacgtaaatgtaaagaaagaccagggaacttttgctatgcatatgggaaaggtagagtactagaaatagcaaatgagagaagaaaaagtcagtactccataccaagcaattaaagccatcaatggaccatagagaaaagaatacactgaaatgagaaggggaataaattgaatgtttattgaatgtaggtctcaaagccttgcatttagatttacagaagcacttttacttaatccttacaataatgtatttaataactattactatccactaagtcatgatagtcaatctcactccaaaatccattcttttatcagacaatgtaaagagagagaaggtatcataaagtccctaatcaygagctgtgtactacatccagactatcaggagaaacccttgaagaatttgcaaaagagcat

SEQ ID NO: 183332 - DNA, 574 bp, Homo sapiens
tagtatgagcaaaagacatagaaacaaaagagtagacatcatttaggaaaacaagggttgttgtgtttagaacatatattttacaggaaaatagtgcaagaaaaaatggataattttstggaaaattctgaatgcctggctgggaagttttgacattataagaaagggcactgtgaaacaatattaaacaaaaatgtgtatgttttgaattctttttttcccccatttatagttgaagtcatggcaatacatttaaatatgtctattaatatgattttctttctttaattttttggggtacagtccttcaggtagcctcactttatctcaaggaagatcggcattgctatatcagagactaaaacaataatgagagagacagagaagacaaagaacatcagtactaattttgacttgcaaaattctgtttctgtgttcttagcaaaacaatagccttaatattttagtgttgctacaatataagaggattttctaattttctgtagcttcactgagagatctggtgccagtgatctgactctattgtagcgttccttcaccagtgtggagtgga

SEQ ID NO: 183333 - DNA, 574 bp, Homo sapiens
tagtatgagcaaaagacatagaaacaaaagagtagacatcatttaggaaaacaagggttgttgtgtttagaacatatattttacaggaaaatagtgcaagaaaaaatggataattttctggaaaattctgaatgcctggctgggaagttttgacattataagaaagggcactgtgaaacaatattaaacaaaaatgtgtatgttttgaattctttttttcccccatttatagttgaagtcatggcaatacatttaaatatgtctattaatatgattttctttctttaattttttggggtacagtccttcaggtagcctcactttatctcaaggaagatcggcattgctatatcagagactaaaacaataatgagagagacagagaagacaaagaacatcagtactaattttgacttgcaaaattctgtttctgtgttcttagcaaaacaayagccttaatattttagtgttgctacaatataagaggattttctaattttctgtagcttcactgagagatctggtgccagtgatctgactctattgtagcgttccttcaccagtgtggagtgga

SEQ ID NO: 183334 - DNA, 561 bp, Homo sapiens
cttccgccttttacttttatagtcaagaatgcataacttctttgggatagacactgccttcaaatgacaagttctgtgcttccatgttctagaaatacaatatctctcagcctacagagctattaaaatctgctagcaaacctcagggaagcagaaaacatactacctctcttgttttattttaaacagaagttaaatgataattctgaatgctttcgtgagaggaaaaaayctcctaacatctacactcaagcctcttaagttgtcttttatggcatgttgcaaacaaggctaatgccacctctacaatatgcatgttacattgttttctgaccaaaacttcatgttcaacccagatcacatagcacagcggtccccaaccgccaggccacagactggtccaagtccttggcctgttaggaactgggctgcacggcaggagatgagcagcaggcaagccagcactgccacctgagctccccctcctgtcagatcagtggcagcatcagattctcataggagcaggaaccctattgtgaactgcacatgcaagggttgcac

SEQ ID NO: 183335 - DNA, 566 bp, Homo sapiens
ggtcacattgccttatcttcttcttctgtcttaacgctcccacttattctctcttgtaaggttacatgttattgcatttagggcccacctgtgtaattcaagataatctccttccttcaaggttattaacttgattacatcatttgcttcagatggtaatattcagtcttttgctgtatcaggtaatattcacagacctcagggattaggttacagacatggctttttgggggacaccgttcagttcactatagtcattctatctaaagatttgtcaattttgttgttttattcaaagaactatttgtttcatagyttttttccctatataatttgttttctattttgttgatatctgctgtagtctttatatttactttcttttgcttgctttgggtttgttatttttattttagtgtcttaagagaaaagctaagtttacagatttaaggcctttttttcttttctgataaaggcttttaaatctataaaggtctctctaagcattgttttagtactgcagcccataaatttctgcagtttcacttgcttcaaattcttctcta

SEQ ID NO: 183336 - DNA, 565 bp, Homo sapiens
cacaccaacatggcacatgtatatatatgtaacaaacctgcacattgtgcacatgtaccctaaaacttcaagtataatttwaaaaaaaagatttttcttccttataagaaaacccttaaaaaagtagttttccccacatctgacacaatcatttgagggggtgttgagccttttaggtttctaaccagctaaaggcatctgatgagcatgacagcaggaagaacagtcaacacaggagcaacagccacaagacaagaaatgcattatagtgcttcaattcttaatctaacagtggttctcaaacttgagggtgcatcataatctcctgcagagcttgttaaagggcaggttgctggacctcacccccagagcttctaattcagttatgtcaggaatggggtccaagaatgtgcatgtatgttactttccctggcaatgcactctgagaaccacatctatgcttagttttggaagtgaaactctatgtgcaacttgtgaccaataaatagcctcattgtttataaaggactatccttcctgtgtggagttaacagttcaaaacagg

SEQ ID NO: 183337 - DNA, 565 bp, Homo sapiens
cacaccaacatggcacatgtatatatatgtaacaaacctgcacattgtgcacatgtaccctaaaacttcaagtataatttaaaaaaaaagatttttcttccttataagaaaacccttaaaaaagtagttttccccacatctgacacaatcatttgagggggtgttgagccttttaggtttctaaccagctaaaggcatctgatgagcatgacagcaggaagaacagtcaacacaggagcaacagccacaagacaagaaatgcattatagtgcttcaattcttaatctaacagtggttctcaaacttgagggtgcatcataatctcctgcagagcttgttaaagggcaggttgctggacctcacccccagagcttctaattcagttatgtcaggaatggggtccaagaatgtgcatgtatrttactttccctggcaatgcactctgagaaccacatctatgcttagttttggaagtgaaactctatgtgcaacttgtgaccaataaatagcctcattgtttataaaggactatccttcctgtgtggagttaacagttcaaaacagg

SEQ ID NO: 183338 - DNA, 191 bp, Homo sapiens
ttttagctctcacatatgagtgagaatgtgcaatatttgcctttttgtgcctggcttatttcacttaacacagtgacttccgtttctacccatattgctgcaaatgtagggtttttttttttttgaccaaataatactctattgkgtatataccacattttccttacctatatctattcatctgttgatgg

SEQ ID NO: 183339 - DNA, 394 bp, Homo sapiens
ctgaaagccaagataggctaaaggtaggcctcttgtatcaaatagatagccaagttgtgaatgcaaaggaaaaattcttgaaggaaattaaaaatgcgactccaaggaacacatggataagaaattgaaacaatcttattgctgatatggataaagtggtccggataggatatcaaccagccacaacwttcccttaagccaaagcctaatccagagaccctaactgtcttcaagtctatgaaggctgaaagtggtgagaaagctgcagaagagaagtttgaagctagcaaagactgctttatgaggtttaaggaaagaatcacgaactattatatcaggcaacataaaagtgtaaggtgaagcagcaagtgctgatgtagaagctgctgcaagt

SEQ ID NO: 183340 - DNA, 395 bp, Homo sapiens
ctgaaagccaagataggctaaaggtaggcctcttgtatcaaatagatagccaagttgtgaatgcaaaggaaaaattcttgaaggaaattaaaaatgcgactccaaggaacacatggataagaaattgaaacaatcttattgctgatatggataaagtggtccggataggatatcaaccagccacaacattcccttaagccaaagcctaatccagagaccctaactgtcttcaagtctatgaaggctgaaagtggtgagaaagctgcagaagagaagtttgaagctagcaaagactgctttatgaggtttaaggaaagaatcaygaactattatatcaggcaacataaaagtgtaaggtgaagcagcaagtgctgatgtagaagctgctgcaagtt

SEQ ID NO: 183341 - DNA, 420 bp, Homo sapiens
tagtctgttttacacaagtcattcagtaggcaatcatattacatttttaattagccacataccctcttattacccaaaaagatgtttgctaaaatgaattaatactgttaaaatagaaatataaatggaaaaagttgaattcattctttctgatactttctgtgaagtactaatcccatcttcctcacctttgccccaaaaatttgcactttagactactttggggaataaatagaaacctgacctcagtgattctcagtggaggacatayaccccttttggagtggggagaggaggactggtatgaagagcatatatcagaatcttcagggatagttctttttacctatccagtgcatgcctaccataaaaatcattgatgggaagacccctcactatcaaagggggtgaaccatttat

SEQ ID NO: 183342 - DNA, 420 bp, Homo sapiens
tagtctgttttacacaagtcattcagtaggcaatcatattacatttttaattagccacataccctcttattacccaaaaagatgtttgctaaaatgaattaatactgttaaaatagaaatataaatggaaaaagttgaattcattctttctgatactttctgtgaagtactaatcccatcttcctcacctttgccccaaaaatttgcactttagactactttggggaataaatagaaacctgacctcagtgattctcagtggaggacatacaccccttttggagtggggagaggaggactggtatgaagagcatatatcagaatctwcagggatagttctttttacctatccagtgcatgcctaccataaaaatcattgatgggaagacccctcactatcaaagggggtgaaccatttat

SEQ ID NO: 183343 - DNA, 420 bp, Homo sapiens
tagtctgttttacacaagtcattcagtaggcaatcatattacatttttaattagccacataccctcttattacccaaaaagatgtttgctaaaatgaattaatactgttaaaatagaaatataaatggaaaaagttgaattcattctttctgatactttctgtgaagtactaatcccatcttcctcacctttgccccaaaaatttgcactttagactactttggggaataaatagaaacctgacctcagtgattctcagtggaggacatacaccccttttggagtggggagaggaggactggtatgaagagcatatatcagaatcttyagggatagttctttttacctatccagtgcatgcctaccataaaaatcattgatgggaagacccctcactatcaaagggggtgaaccatttat

SEQ ID NO: 183344 - DNA, 460 bp, Homo sapiens
ggtaatagttacttaggatggggaggaaacggggtgaactatggggataaaatataataaagagaggactcttgcgtgaccagtgatgaaaactggaataacaacattatttattgaatacaacacaccaattataagaatgaaaagattggaataattctagaatgccacaaaataacatatgtcatgtggcctggtacagactataagcataatagttcagaaaagggagatttgcagatagaatcatgtggaagcccttcctgatgaaggtgtcacttgcactgggccttgaaagaaaggaatttagacagatgaagagaagcttcaggaggccaggttccaggtcagttttgttttattcatcactgaatctccagtgcctgcctagcattgtgcctgctgatgtctgttcaactactccagccaatgartggtagaagaggtatatataaattaa

SEQ ID NO: 183345 - DNA, 548 bp, Homo sapiens
caacatcattactcattagaaaaacacaaactgaaaccataatgaggtaccatttcaaacctccttgactggctaaaataaaaatggcagacaataataagtattcatgagactgtggagaaatcagaaccctcaaacatatctggtggttatgtaaaatgatacagctcctttgggaaacagtctagcagttcctcaaaaggctaaacatagagttaccatataacccagtaattctactctcaggtatacacccaacagagataaaaacatatatgtctacacaaaaatctgtacacaaaagattcatagaagaaatattactaacagccaaaaaatgaaaacaacccaaatgtccatcaatgaatggataaatgtgatatatccacacaatgaaattagactataaaaaggaatgaagtactcatacattctacaacatggctgaaccttgaaaacacactaagtgaaagcccgttacaaaasgccacatattgtattttcccgtctatgtgaaatgtccaaaataagcaaatttatggggacag

SEQ ID NO: 183346 - DNA, 548 bp, Homo sapiens
caacatcattactcattagaaaaacacaaactgaaaccataatgaggtaccatttcaaacctccttgactggctaaaataaaaatggcagacaataataagtattcatgagactgtggagaaatcagaaccctcaaacatatctggtggttatgtaaaatgatacagctcctttgggaaacagtctagcagttcctcaaaaggctaaacatagagttaccatataacccagtaattctactctcaggtatacacccaacagagataaaaacatatatgtctacacaaaaatctgtacacaaaagattcatagaagaaatattactaacagccaaaaaatgaaaacaacccaaatgtccatcaatgaatggataaatgtgatatatccacacaatgaaattagactataaaaaggaatgaagtactcatacattctacaacatggctgaaccttgaaaacacactaagtgaaagcccgttacaaaaggccacatattgtattttccygtctatgtgaaatgtccaaaataagcaaatttatggggacag

SEQ ID NO: 183347 - DNA, 505 bp, Homo sapiens
actcttgcttcccctagaaatttatgccttctctgctgttgttaagactgaccttgtttataygtgtgaattctgaacatatgattcagcttatttagagatggaggccttttctgtttatctaaaattacctatttaacctcatacttcagtaagtgttaccaagaatgctgctttataatgaatgctaaggtattggtccttttactaaagctgctcagtcctaaattccctaacgaattcctttatgggagtttcttcccatcactaatctggaatgctgtcaaatttccttctgaaactaaacccccaaaatgttttggtttaaaagaactttagatttcatttatttcctccttatttgctgttaaaaagaaaggccagtagcaactaagacaaagacaaacacatttgactgataaacttcagaagttttctgtacttgagtctcctgaacagctagttaaaagaaataatggcttgattttgttctagtcctgaaaat

SEQ ID NO: 183348 - DNA, 577 bp, Homo sapiens
tgtgaaaagtgatgcagtgaacatatgcatgcatatatctttactgttcttaatcgtacctcatattcaagaaaaatgacaattttttttcctttcctttttttttttttttgagacggagtctcactctgtcaccaggctggagtgcagtggtgcgatctcggctcactgcaacctcygactccctggttcaagtgattcttctgcctcagcctcccgagtagctgggattacaggcatgggccaccacacccagctaatttttgtatttttagtagagatggggtttcatcatgttggccaggatggtctcgatctcctgacctcatgatctgcccatctcagcctcccaaagtgctgggattacaggagtgagtcactgtgcccagccgacaattttttaaaataccatatataaaaagaaaggtgaagagttagaggctggagtcatctctagtccaatagcgggtgcataaaatcagccaacatagaaatagatactctttaaagacattatgatcaagactataaaatgttcattattttaaaaaatattagacaaaaaagggcaaaaatg

SEQ ID NO: 183349 - DNA, 666 bp, Homo sapiens
atctttactattgtgaaaagtgatgcagtgaacatatgcatgcatatatctttactgttcttaatcgtacctcatattcaagaaaaatgacaattttttttcctttcctttttttttttttttgagacggagtctcactctgtcaccaggctggagtgcagtggtgcgatctcggctcactgcaacctccgactccctggttcaagtgattcttctgcctcagcctcccgagtagctgggattacaggcatgggccaccacacccagctaatttttgtatttttagtagagatggggtttcatcatgttggccaggatggtctcgatctcctgacctcatgatctgcccatctcagcctcccaaagtgctgggattacaggagtgagtcactgtgcccagccgacaattttttaaaataccatatataaaaagaaaggtgaagagttagaggctggagtcatctctagtccaatagcgggtgcataaaatcagccaacakagaaatagatactctttaaagacattatgatcaagactataaaatgttcattattttaaaaaatattagacaaaaaagggcaaaaatgttatcaatttagtagaataagggaaatgctttttcatatcttgataaaatggtgttcatatagaagtatacatttatc

SEQ ID NO: 183350 - DNA, 548 bp, Homo sapiens
atgaataaaagaatttatgaattcaggagacaatgtagcagtaaatcaaagaagttacctattttgaaaaactgcatttccaaaggagggagaaaaactgaaaaatacctattctaatcctgctttatgcagtcacttaaagtraaactggaagggaagacattactcttcaggacttcacccccttttctttagagtagtttacaacagttttcatagctagcattaattagataattttaagtaaaaattttatgtaattttacttaattaagagaaagacaaaattcttaatgtttcagctagataaattgtcataaagtaaaagcaaacaagaaaacaaacaaacaaaaaccatgtagccaactccaagattaagaaacataaaactactgccagcagtttctctgtcaggaaagagaaactacatcacactgtgaagttttggggtggcttgttgcacagcagtggaaaactgaaacagactgtactcttttgagccatggacacttttggcagtctagtgaaatttataaacctttcagaat

SEQ ID NO: 183351 - DNA, 455 bp, Homo sapiens
tttatgctgctttaaacattgtgaacatgaatacatgtgtgttgtttaatacagaaaaatttaataagaacctaccatgttccaaaaaattatgcttggcatggcagcatatatcatatttgcaaaacaattatctaggcagtccccatactaacagacaagcaaatgaatgtccagagtttttttatagagattttaattcgttttcctaattttaaacagcaaaaagtggcaaagagcttaatctcatactcgtgacattaacactactcctcactccacagtctcaaactcaaggcaggtattaagtaaatataggcagctgtaataaaccacagattttaaaattccataaacgggaataaaacatatgaagatgaggccaggtgcartggctcatgcttgtaattccagcactttgggaggccgaggtgggcggatcacagggtcaagag

SEQ ID NO: 183352 - DNA, 606 bp, Homo sapiens
tgtgtgcagccatgctgtcaggttgccaaagaatggctgactttgtatgcacccagattgaaaatggcattctgctcttagccctgggtcttggaaaatgtttgcagttcttcctaatatctttctttcacagcattcccaagcctctccccaagttgacttcagggcttgggagaagcaaactgctctccctcggcatgggtcacttggatctacagtgcaaaggtgaattacagagaaagactctgcctctctcatgtactgggcttcactcacttttatcagccagacgccgttacagtggctgtttgccagtgttctcctctccaggatcaggtgtgtccttcaagattctggtggattctcattttccttcttgaattacagttcacagagttcatctttatgagccatcttgctatttccaagtgcctgagacacactaaaggcctttaatctgccctcttggaaaaacaacaacaacaacaacaatattcaattggtcttaactagaaaagagagaaacagaattttgatctcatggctgattgattactctaatgattctaatagctakcattactcaatgtgctgaacaatttataa

SEQ ID NO: 183353 - DNA, 597 bp, Homo sapiens
aaggcttatgggctggggcagtttcaagttccsagtgcagactgcctggaacctagctagctgctgctagtataacactgcagatgtgagatctgacttgctaagtgtgtggcagctgagtggggcttactgccacctgctgctccccatgccctctgtggactcttttgtacaagagaagcagttgtgctcctccctggaacattactccactgacgagagaacttccctttgattagcactggggctgctgcttgcccctcatttggagagccagatctggctttgcccccgccacctgaactggtagcttaacagaaaggacagaaactttagggagcactatggccctgcacattgtgcaatgtaccagagtacttcccctgggtaacataaggcaaacacacatcccactgctactactgcagctggtgaacttttgcaagtaccacctcatgcctggaggccaagttatgcagtcctttacagtatccgtagacagaataacacaacacccagaaaggagaaaacatgtgcatgacctcagctatcaccattgtctgcatcacccagactaaacaggaggtcctgagtttg

SEQ ID NO: 183354 - DNA, 597 bp, Homo sapiens
aaggcttatgggctggggcagtttcaagttcccagtgcagactgcctggaacctagctagctgctgctagtataacactgcagatgtgagatctgacttgctaagtgtgtggcagctgagtggggcttactgccacctgctgctccccatgccctctgtggactcttttgtacaagagaagcagttgtgctcctccctggaacattactccactgacgagagaacttccctttgattagcactggggctgctgcttgcccctcatttggagagccagatctggctttgcccccgccacctgaactggtagcttaacagaaaggacagaaactttagggagcactatggccctgcacattgtgcaatgtaccagagtacttcccctgggtaacataaggcaaacacacatcccactgctactactgcagctggtgaacttttgcaagtaccacctcatgcctggaggccaagttatgcagtcctttacagtatccgtagacagaataacacaacacccagaaaggagaaaacatgtgcatgacctcagctatcaccrttgtctgcatcacccagactaaacaggaggtcctgagtttg

SEQ ID NO: 183355 - DNA, 521 bp, Homo sapiens
tacaagacgtgcagatatcaacataaggaaacaggaaacacaataaaataaggaaatataacacctccaaaggaacacaataattcttcagtaatagatcttaatgaaatagaaatttttgaaatcccaggtaaataattcaaaatattgatttttaaagaagctcagtgaaatagaattctgaaaacaataccaacaaataagaaaacaattcaggatattaatgataaatttaccaaaaagatagattttttttaagaaagaactacatagaaaatatgggacagaacaatttattaaatgaaataaaaaatatatttgacascttcaacaatagactagcagaagaaagaatctcagaatttgaagcagaagaaagaatctcgaaatttgaaaacaggccttttgaaataatccagtcagacaaaaatgtagaaaaaatggctaaaagagaattagcaaagcctttgtgacagttaggacaacataacgtgatcaaatatccaaattattggtatttg

SEQ ID NO: 183356 - DNA, 593 bp, Homo sapiens
gaaactgcatttaaagaagaaccaatatgtctggcagcacacttttcagctgaaaccttacaggcccaggaaagagtggcatgatgtattcaatgttttgaaggaaagaaccttttattctagaatagtatgttcagcaaaaatatcattcaaaaatcaaggataaataaatattttcccagacaaacataagctgacggagctgtcctacaagaaaygctgaacagattttgtaataaaaattatatgaaggtacaaaactcactagtaacagtaagtacatggacaaatacagaatatcctaacactgtaattattgtgtgtaaaccacccatatcttgagtagaaagactaaagcataaacctatcaaaaaataagtgcaattttataagacagacagtataagacatcaatagaaacaacaaaaaagttaaaaagcagagggtatgaagttaaagtgtagagttttatttatttattttattattatactttaagttctgggatacatgtgcagaacgtgcaggtttgttacataggtatacatgtgccatagtggtttgctgcacccatcaacccatcacctacatta

SEQ ID NO: 183357 - DNA, 531 bp, Homo sapiens
ggtgtggtggtacatgcctgcagtcctagctacttgggaggctgaggcaagaggatagcttgagcccaggagttcaaggctgcagtgagccatgaccacaccactgcactccagcctaggtgacaaaccaggaccctttctcaaaaaaaaaaaaaaaaaaaatcaggcttcaaatgagtaaatattttctcaaactatcctgaaaattaaatatatagaattttgtttccaagtgaaaatctaatatatagaattgtgtttccaagggaaaatctatttttttttatttcaaacagtyaccttataagcaaacaaaaagaaaaacaggcatttgtaaattaggaaatattggaacaatgcttgtcatggacacctgatataaattaccatagaagaaaactggaactcaggatcatttgtattcatcacaacactgacaaaaattattgataaatatgggataaagagccagatgttttatcttaaccacagggtggtgtttattattaataaactagccattaggagctc

SEQ ID NO: 183358 - DNA, 581 bp, Homo sapiens
tgcttggacaattaccaggccttagtccctagtcacttcatcattagtaatttaatagtgtatcttttcctcaatggttcacatttccacactggtataatgtagctcccttatgtgactgggcttatctcagggctctacctactgttccaatttttggcttctacccatgtaccagtaccatacttccaaactggttcagctttatcatctcatggggtctaatggaataaatccttgttcttcgaattgtatggaatatttgtggcaggttatattttacasacacacacacacacactcacactcatccatacacatgacgtccacaccacatgttgctgacactacttccaccagcagacaggtgcatattcccttcccttgaatctgtgcagggtcctttgactaacacccattgcagagtggtgcaaatgatgtgtttgtgacttctaaacctacgtcacaggaggatacagcttcagcccggctctttcgggacacacggcttcagagccgagctgacatgtaagtccggccaccctgatggtgtgggaagatgacctacagagagggaaaca

SEQ ID NO: 183359 - DNA, 423 bp, Homo sapiens
gctatgcagggagtaacgagagctctgataataagaacagccaaggtttatggagccccaggtccaggagtcagctcagcgtgttttttcatctttactttatgtcttaattatttgggtttgtaatcatcatcatcatgataatggagatgccaataacagcgataacagctatcatcgagtgagctcttattcctgtgtattttatgtctrttatttgtttccatagcaatggtttcgggtaaggggattttcaaaaggggacagtgaggctcaggaatgtaaaccagttgcccgagcttgcatgtctggtaaatagcaacacagaccatgctcaaaatacatctgtctgacttcaaagcccatgccagggctttaaagataactcaggattatgctctttgcaaacaaaggaaattggaa

SEQ ID NO: 183360 - DNA, 423 bp, Homo sapiens
gctatgcagggagtaacgagagctctgataataagaacagccaaggtttatggagccccaggtccaggagtcagctcagcgtgttttttcatctttactttatgtcttaattatttgggtttgtaatcatcatcatcatgataatggagatgccaataacagcgataacagctatcatcgagtgagctcttattcctgtgtattttatgtctgttatttgtttccatagcaatggtttcgggtmaggggattttcaaaaggggacagtgaggctcaggaatgtaaaccagttgcccgagcttgcatgtctggtaaatagcaacacagaccatgctcaaaatacatctgtctgacttcaaagcccatgccagggctttaaagataactcaggattatgctctttgcaaacaaaggaaattggaa

SEQ ID NO: 183361 - DNA, 611 bp, Homo sapiens
tcctccaaatatgatctcaaaactatagaaggcaaactctggaaagaaccttatatatcatctgcactagtaattttgaaaccatatcattaagaaaataatttacacaatttatacaagaagtaaaaatattgatgtggggaggagaagggtttccctgttaagtgccctgttcaccatgaacaccccccagcagtgttccagaactaggtcaacatagaacacaactttaaaacctctgtcttagtcctactcccygaggtgtagaagaaggaagtgagtactgtttatacattacagagagtgtgtttatcatagatgctcaatgtgttagaggcagagttggagaagataggttgtagagttgttaagcacaggatgacaccttcatatttttgtgacccaagaattttgtgacatggttaccccatgacacacacttgatgacatgcaagagtgggtgattggtgacatgcaagagtgggtgattggggtcctagagacacagacactctcataaagaaccaacgcagacagactgagtgcaaaagcttcggaaggatagagagtattgttttggagatgggagcttgtaaatattttacagcggg

SEQ ID NO: 183362 - DNA, 529 bp, Homo sapiens
aattgagagaaatattcatgatcatggataggaaacataaattcttcccaatttgtctctctttaaagcagtctctatcaaaattccaacagactttggcccaacttacaaagctaattattagcagataaagacagacgaaagttcagaaatagctaaacttttatgaagatcaatagcagggactatggtcgtcaaggcaactgggggaactgccctaagagagaccacatttataamactatagtaactaaggtggtgtgggtttgatgcagtgaataatacagaccaatgaaacagagaagaaagtcacagaacacagcagtgagtatattaaaattcaatttatgacagagctacaattgcaaactaaaaggaatgagacaatttttcattatgcatatgaaagaaaatgccattggatccctacctcaaatcatgcacaaaatctactccagtgcaattaacaatcttagtgtgaaatcaaggcatacgaaatgcaaaaggcaatattcccccttatccacag

SEQ ID NO: 183363 - DNA, 433 bp, Homo sapiens
gccattgagcaggtgaaatgtggcaagtgtgactgaagacttgaagtgtctttcatttaattttaacgaatttaaagttgaaatagccacatgtggctcttggctactgtgtagacagcacaagctttgacaaggcctcttcttcccacctgtaggcaacctctgcttcacccaagagagaagttcctgcaaagacctgctcgtgtaggcagggcaaacagggcaataaaagcaagagtggagggcttgggtctagaccctaggtattggtggctgctgactgccaagttgagtgtcaggagacagtggtccttctttcctaggtrggaactcaccagggggaccgtggagggccaagtgggtccggtggttggctctagggcatgcctctgcacagttgcctccttctgtcagtcacttagtcaatgaaggc

SEQ ID NO: 183364 - DNA, 590 bp, Homo sapiens
ttcagtctgctcttatgagtaaaagggacatctaataaaaaaagctttccttaaaaaaaagaagagaaagaaacaaagtaacaaacaaacaggtgttttaccaggcttgccttctagaggttttctttttttctttttttttttttttttgaggtggagtctcgctctgttgcccaggctggactgcagtggtacaatcttggctcactgcaagctccgcctcstgggttcacgccattctcctgcctcagcctgccgagtagctgggactacaggcacccgccaccacgcccggctaattttttgtatttttagtagagaccgggtttcaccgtgttagccaggatgggagtttttctttgtagaaaagcccttggatgttttgaagcttgcccttggtgctcttctcacctttcacctgccttgggattggtgaggaggtctcctgtcctctgagtagatcgatttcagcaagttatcttcagaccttttgcccactctgatcactgaaagctttgcaacctactcaaagcattatctgagtgttacctgccagagggagcattttgatgtcatctttgaggatgccc

SEQ ID NO: 183365 - DNA, 590 bp, Homo sapiens
ttcagtctgctcttatgagtaaaagggacatctaataaaaaaagctttccttaaaaaaaagaagagaaagaaacaaagtaacaaacaaacaggtgttttaccaggcttgccttctagaggttttctttttttctttttttttttttttttgaggtggagtctcgctctgttgcccaggctggactgcagtggtacaatcttggctcactgcaagctccgcctcctgggttcacgccattctcctgcctcagcctgccgagtagctgggactacaggcacccgccaccacgcccggctaattttttgtatttttagtagagaccgggtttcaccgtgttagccaggatgggagtttttctttgtagaaaagcccttggatgttttgargcttgcccttggtgctcttctcacctttcacctgccttgggattggtgaggaggtctcctgtcctctgagtagatcgatttcagcaagttatcttcagaccttttgcccactctgatcactgaaagctttgcaacctactcaaagcattatctgagtgttacctgccagagggagcattttgatgtcatctttgaggatgccc

SEQ ID NO: 183366 - DNA, 519 bp, Homo sapiens
gggtactgatgaaatgagttatgatacatctatacaatggaaaagtatgcagacctacaaaagaatgagaaagtatttatgycttgatttggaaagatctttatggataagatgttaattgaaaaaataaaagcaaaacagaatcaaagagagaacatatgtatgtatttgtttatatctaattatatgtgcatttctgaaatacccataaaaataacattatttgcctctgaggagaactaagtgactagggcagaggatatgaaggaagattcacatgcaatcatttaaactttagttaatgtattacgtattcaaaatattaaattaaaaatacatgtacacatgaacaactcaagtgtctacattgattttgggaacagaggtaatatgaatggagctaacttaaaagtatttaaatttagttttagtttggttttacttttttttccaacagatttgcctctctaatcatgttttgctcaccctaattttagaccaagtctgaattaaatgaac

SEQ ID NO: 183367 - DNA, 581 bp, Homo sapiens
atggaaacaaattaaatagctatcaatagggtactgatgaaatgagttatgatacatctatacaatggaaaagtatgcagacctacaaaagaatgagaaagtatttatgtcttgatttggaaagatctttatggataagatgttaattgaaaaaataaaagcaaaacagaatcaaagagagaacatatgtatgtatttgtttatatctaattatatgtgcatttctgaaatacccataaaaataacattatttgcctctgaggagaactaagtgactagggcagaggatatgaaggaagattcacatgcaatcatttaaactttagttaatgtattacgtattcaaaatattaaattaaaaatacaygtacacatgaacaactcaagtgtctacattgattttgggaacagaggtaatatgaatggagctaacttaaaagtatttaaatttagttttagtttggttttacttttttttccaacagatttgcctctctaatcatgttttgctcaccctaattttagaccaagtctgaattaaatgaacacacaccagctggacagtaggaggaagcagctaa

SEQ ID NO: 183368 - DNA, 424 bp, Homo sapiens
ggagtcctctacattcttcaggatgacctgcctgtggagaggagttacccatttcaagtctctacactcttagggatgactgcccacagatgggagctatccacttcaagtctcctctatactcttcaggacaacctgcctgtggataggagctacccacttcaggatgcctctaaactctctggatgatctgcctgtagatagcagctacccacttcaagacttttctaaactcttcaggacaacccacccatagattggagctacccaaatttggactccactacactctttgggatgacctgcctrtggataggagttagccactttgagtctctatactcttaggggtgacctgtctacagataggagctacacacttcaggtcccctctctgctgagacctgttctgtcactcagtaaa

SEQ ID NO: 183369 - DNA, 555 bp, Homo sapiens
gtcccaggcctcataggaacaccagtgcctagagtagttgtctttggtggtaggaaatgacagactttctatcagagaggcttttattaaatcacaaatataacgtaaaaaattaaaaccaaatgtcaaaccctacatgtgacaggatagctggctccaggagcttaatgattaaagaagagagcgtgtgggcccaagggttttctttgaaggagagaagtaactggcgtaaaggccctcaaactctcaactcagcagccaaaaggaggcacagacgccaaagacctcaagcattttcygaaggacgggaaaggagtggggaataatattgggctcctgggtcttacacacatggcatgactccttatgccaggggtgcactcatttctaagcctgtcttagaactggcaggtgtcagaatgagaactatgtaaagatttgaaagtatttaatgattttatctcttgcaatgcctgctatcttcatatatttaaaatatttccatcacaaaagcaaccagatggcattgccaagatggacatataggatgaagca

SEQ ID NO: 183370 - DNA, 555 bp, Homo sapiens
gtcccaggcctcataggaacaccagtgcctagagtagttgtctttggtggtaggaaatgacagactttctatcagagaggcttttattaaatcacaaatataacgtaaaaaattaaaaccaaatgtcaaaccctacatgtgacaggatagctggctccaggagcttaatgattaaagaagagagcgtgtgggcccaagggttttctttgaaggagagaagtaactggcgtaaaggccctcaaactctcaactcagcagccaaaaggaggcacagacgccaaagacctcaagcattttccgaaggacgggaaagsagtggggaataatattgggctcctgggtcttacacacatggcatgactccttatgccaggggtgcactcatttctaagcctgtcttagaactggcaggtgtcagaatgagaactatgtaaagatttgaaagtatttaatgattttatctcttgcaatgcctgctatcttcatatatttaaaatatttccatcacaaaagcaaccagatggcattgccaagatggacatataggatgaagca

SEQ ID NO: 183371 - DNA, 489 bp, Homo sapiens
acactgggctgcagaggagtccacattcaggacctggggattatgtgggacaactcttttctcatctgaaatcctgtggtggrcccctgttcacaatgcctttgcttcacgtcttgccacaaaggtgggctttccagaaaaatgagctcatgcatataaagaaatattcaggctccctttaacatactatctgacttaagtattcacaactttgataacatggccacaattcctgctgagtcttcatcttctgtgtaataaaaagcagcaactttcaacgaatgctatttatgatgtggatcaggaaagcaattggaaaacatatggaacgtcatgttttaattctttttccaccttgttaaaacaatttgtctctaggagagattccagggtcgacctcgaattctaaggggtgggatggagttgcttttgtcatctttgtggattctttcttcagcgcaggaggggctggcactgcccggacgcctg

SEQ ID NO: 183372 - DNA, 489 bp, Homo sapiens
acactgggctgcagaggagtccacattcaggacctggggattatgtgggacaactcttttctcatctgaaatcctgtggtgggcmcctgttcacaatgcctttgcttcacgtcttgccacaaaggtgggctttccagaaaaatgagctcatgcatataaagaaatattcaggctccctttaacatactatctgacttaagtattcacaactttgataacatggccacaattcctgctgagtcttcatcttctgtgtaataaaaagcagcaactttcaacgaatgctatttatgatgtggatcaggaaagcaattggaaaacatatggaacgtcatgttttaattctttttccaccttgttaaaacaatttgtctctaggagagattccagggtcgacctcgaattctaaggggtgggatggagttgcttttgtcatctttgtggattctttcttcagcgcaggaggggctggcactgcccggacgcctg

SEQ ID NO: 183373 - DNA, 489 bp, Homo sapiens
acactgggctgcagaggagtccacattcaggacctggggattatgtgggacaactcttttctcatctgaaatcctgtggtgggcccctgttcacaatgcctttgcttcacgtcttgccacaaaggtgggctttccagaaaaatgagctcatgcatataaagaaatattcaggctccctttaacatactatctgacttaagtattcacaactttgataacatggccacaattcctgctgagtcttcatcttctgtgtaataaaaagcagcaactttcaacgaatgctatttatgatgtggatcaggaaagcaattggaaaacatatggaacgtcatgttytaattctttttccaccttgttaaaacaatttgtctctaggagagattccagggtcgacctcgaattctaaggggtgggatggagttgcttttgtcatctttgtggattctttcttcagcgcaggaggggctggcactgcccggacgcctg

SEQ ID NO: 183374 - DNA, 489 bp, Homo sapiens
acactgggctgcagaggagtccacattcaggacctggggattatgtgggacaactcttttctcatctgaaatcctgtggtgggcccctgttcacaatgcctttgcttcacgtcttgccacaaaggtgggctttccagaaaaatgagctcatgcatataaagaaatattcaggctccctttaacatactatctgacttaagtattcacaactttgataacatggccacaattcctgctgagtcttcatcttctgtgtaataaaaagcagcaactttcaacgaatgctatttatgatgtggatcaggaaagcaattggaaaacatatggaacgtcatgttttaattctttttccaccttgttaaaacaatttgtctytaggagagattccagggtcgacctcgaattctaaggggtgggatggagttgcttttgtcatctttgtggattctttcttcagcgcaggaggggctggcactgcccggacgcctg

SEQ ID NO: 183375 - DNA, 514 bp, Homo sapiens
tggctgaatagtattccattgtgtatatataccacattttctctagccattcattcactgatagacatttaggttgatttaatatcttgactattgtgaatagtgctgcaataaatatggaaatgcagatacgtctttgacatactgatttccttttcttcaagtcccagcagtgggattgctggatcatatagaagtttcatatttagtttttttgaggaaactcaatactgtttttcataaggcttcactaatcaacrttctcatcaatgctgtacaagggtcccactttacatcctcaccagcatttgttattgtttgtcttttttataatagccattctaactggggtgaaattctatctccttatgattttgatttgcattttcctgatgattagtgatgttgagcatttttaaaatatacttttttggccatttgtgtgtcttctttttagagattcttgattagttgcccattttaaattggattatttggctctggtttctcttaa

SEQ ID NO: 183376 - DNA, 514 bp, Homo sapiens
tggctgaatagtattccattgtgtatatataccacattttctctagccattcattcactgatagacatttaggttgatttaatatcttgactattgtgaatagtgctgcaataaatatggaaatgcagatacgtctttgacatactgatttccttttcttcaagtcccagcagtgggattgctggatcatatagaagtttcatatttagtttttttgaggaaactcaatactgtttttcataaggcttcactaatcaacgttctcatcaatgctgtacaagggtcccactttacatcctcaccagcatttgttattgtttgtcttttttataatagccattctaactggggtgaaattmtatctccttatgattttgatttgcattttcctgatgattagtgatgttgagcatttttaaaatatacttttttggccatttgtgtgtcttctttttagagattcttgattagttgcccattttaaattggattatttggctctggtttctcttaa

SEQ ID NO: 183377 - DNA, 610 bp, Homo sapiens
tgcttgaatctctaggacactgttgaatggctgggaggggagcacacatttcagaggattcccagtcttagggagcttgttacatcattaagcacaatgctatctacaggattctttgttttaacatcttttttctaatttcaacttttattttatttatttatttatttttgagacagactctcattctcttgcccaggctagagtgcagtgcagatttgttacatgagactattgtgtgctgctgaggtttggagtatggatcttgtcacgcaggtagtgagcttagtatctgataggtagttttttaacccactctcctccctccactctctagtactacacagtgcccattgttccttccattcctaaatttctgaaagtttttcttatgatcagatatagaattttatcagatgcttgctttatagtcatttaaaaatgatcatgcagtttttcttttttttctgttaatatgatgaatcgcactgattaattttcaagtgttgaagtaaacatacatttcttcaataatcttggttagaatccattatccattttgtatattactmttctgtttactactattttgttcagggtttttgtttct

SEQ ID NO: 183378 - DNA, 585 bp, Homo sapiens
actatggtataagtttttttttatgaggatttgacacattttcatagaatttaacgcattttttttcctggcatatacttgcttgttatgaaatttccttggttttattaaggatggcatttctcttgttaacaaattattatccctttgtttttcttctttcaggttttgatggaggggagaagtattgycccaaagctcatacttttatttttgcttatatcatcttcaataaacttccttcaacacccatttttaaccctccacagaaataagtccagcgaagttcatgtactcaggctactctattctctttactgctttgtgagagagatctcaaaactgcaaaggtgatcataacacttacgtgtttaaaatattaatacattgcctgccacagaaaagatgcacagtaaatgggtattatggactgtctgaattaaaagatggtatcagaaagtggcctggttatccacccagcccacgggcttccttggaacatgcctggagctttgcagggagcaggcttctatatccatgccagatctgagttgctgtgttctgaatgttcctcacaaatgctaa

SEQ ID NO: 183379 - DNA, 585 bp, Homo sapiens
actatggtataagtttttttttatgaggatttgacacattttcatagaatttaacgcattttttttcctggcatatacttgcttgttatgaaatttccttggttttattaaggatggcatttctcttgttaacaaattattatccctttgtttttcttctttcaggttttgatggaggggagaagtattgtcccaaagctcatacttttatttttgcttatatcatcttcaataaacttccttcaacacccatttttaaccctccacagaaataagtccagcgaagttcatgtactcaggctactctattctctttactgctttgtgagagagatctcaaaacygcaaaggtgatcataacacttacgtgtttaaaatattaatacattgcctgccacagaaaagatgcacagtaaatgggtattatggactgtctgaattaaaagatggtatcagaaagtggcctggttatccacccagcccacgggcttccttggaacatgcctggagctttgcagggagcaggcttctatatccatgccagatctgagttgctgtgttctgaatgttcctcacaaatgctaa

SEQ ID NO: 183380 - DNA, 578 bp, Homo sapiens
gggaagctactgcaaatcaagaggcctgaaaatcaggtggctgatggtttcagcccacatctgagttcaaagacccaagaaccaggagcacctgtgtctgagggcaggctaagatcattgtctcagttcagagagaacaaattcccctttcctctgcctttttgttatatttgcgttctcaacagattggacatatatgccatctacattgttgagggttggtcttcctcacctcagtccatggatttaaatcctcatctcttctcaaaccctgacagatacacccagaaataatgttttaccaactatcttgagtattcgttagcccagtcaagttgacagaattaactatcacagagttcagctttttagaagcattgaagtatttataaaattctaattgttttgcacccaccgaatgcaagcattttcaatttttttsccagactatttggcacaatgtagacaacttctgagcactggggaatacgccttctcctatcatttgccctggggcatggaccttttgccctggcaagtttcataacattttaatcctttcccttcctcaactgtgt

SEQ ID NO: 183381 - DNA, 578 bp, Homo sapiens
gggaagctactgcaaatcaagaggcctgaaaatcaggtggctgatggtttcagcccacatctgagttcaaagacccaagaaccaggagcacctgtgtctgagggcaggctaagatcattgtctcagttcagagagaacaaattcccctttcctctgcctttttgttatatttgcgttctcaacagattggacatatatgccatctacattgttgagggttggtcttcctcacctcagtccatggatttaaatcctcatctcttctcaaaccctgacagatacacccagaaataatgttttaccaactatcttgagtattcgttagcccagtcaagttgacagaattaactatcacagagttcagctttttagaagcattgaagtatttataaaattctaattgttttgcacccaccgaatgcaagcattttcaatttttttgccagactatttggcacaatgtagacaacttctgagcactggggaatacgccttmtcctatcatttgccctggggcatggaccttttgccctggcaagtttcataacattttaatcctttcccttcctcaactgtgt

SEQ ID NO: 183382 - DNA, 497 bp, Homo sapiens
ctcctcccagatctcaaaaatatgctctgcttccatttagttcagctttgctttatctgagtcaacaacggcagaaaaagctgaaatagtgtcccttcagcagctgaaagttctgcctgtctatccattcccattatcaagtccctatttaattaaggaaacactttcaacgtggtgtatctacaaagcaaaatgcttttatagtgtaaactttgggttcctccatgattgattctttatgtgcttgattgatgcatgttggagtattctgaaacctgtaagtcactcatcaatcctctttttagtttcaagggccctagcctcagaaaactgcatcaatgtcttctgaacggccatcaagctcaaagccctgctcgtttcttcaggaaagcttattaacaaatacattcagcacagcttgcaggaagcarcaagtttcatgtagagtaccacggcgtcatcatgcaagtgtctgtctgagcatggccagtaagaga

SEQ ID NO: 183383 - DNA, 372 bp, Homo sapiens
ctatttttgtatagctccaagctccaaggaatggttttgcgttttcaggtggttcagaagaaaatcaaaacacaagtcatgttttgtggcatgtgaaagctacgtggagtccaaacgtcagagttcctgaagctcagctggcacacggtccggggtgctcttgcctccgtgtggctggtggcctccgggtaacagggcagagggcagtcccagtgacatagaccagaggaccagcagcctacaatgccgcctggctctttatggtcaatrtgtgctagccctggtctagaatgttctctcaatgcgtaggtgctttgctcagagctgcaggaacgttgaactggatagtacataaatatgttctttcttgta

SEQ ID NO: 183384 - DNA, 490 bp, Homo sapiens
gctcctcactgtaactttggtaaagttatctagcttttaaaaatcaatttgcatagtttttcactgcttgctagatgaacaattagaggcatgctatgcctctaccgatgctatttttatttaaaacagggatattttgttcatcatggatttggttgtgctaatttgactttttaaaatgttgcaccaaaattttatttaccttgattactgattttggtccctccttaaaatttccccatgactagtgcctcatacacctcaccccaatcccagccctcagcccgcaaataatatcragagacactaaattaaaattacctttaatttacatcagataaaagaaaaacagaactggataggtaagccatgttgttccaaacccaggctaaaacaccaacataatattttaaatgaacaaacaacttcctgagcaagtatttcttgtcagatgtgattgaaaaacatcagcagtattaaaactgtgata

SEQ ID NO: 183385 - DNA, 490 bp, Homo sapiens
gctcctcactgtaactttggtaaagttatctagcttttaaaaatcaatttgcatagtttttcactgcttgctagatgaacaattagaggcatgctatgcctctaccgatgctatttttatttaaaacagggatattttgttcatcatggatttggttgtgctaatttgactttttaaaatgttgcaccaaaattttatttaccttgattactgattttggtccctccttaaaatttccccatgactagtgcctcatacacctcaccccaatcccagccctcagcccgcaaataatatcaagagacactaaattaaaawtacctttaatttacatcagataaaagaaaaacagaactggataggtaagccatgttgttccaaacccaggctaaaacaccaacataatattttaaatgaacaaacaacttcctgagcaagtatttcttgtcagatgtgattgaaaaacatcagcagtattaaaactgtgata

SEQ ID NO: 183386 - DNA, 402 bp, Homo sapiens
ataattgttaatctttatatgattgatgaattagtgttaggtgctttaaaaataatacagttttttgtgmtaaatcataaacctctgaataaaatcctatagtcatgaactaaaaaccagagtgatatattccattctctacatgacatgtatccttagacatgggtgtgattttgtaggagtgcaagttttcatacctgttccctcatttcatcttaccagatcatcgtggcttcatgctaccttatgtagaagacccaaagacaaagaaccttattgtaagaaggaaaattttgtttccataggctcatgcatgttatacattggctataacatataatgttggggatacgtatgtggtttaataattattaatcacatactatgtgccaagcactagtc

SEQ ID NO: 183387 - DNA, 465 bp, Homo sapiens
aacactgaactgctccttaacaagacagcgcttcggggctctgttagcagtctcctaacagccaaggcttggggttcttactgtccttaaacactttctaatccagagtgagtrtcagtgacaaccagggcgacgtatatctgtgcgtagaggtgattaacacagaaatcttcaatataagaggtaaatttggctatattatctattgatttagccgctggtaaaatacattcctgtcctagatcatagtctactctatgcagtagattaaaggctgtctggtagatatttggtgaatggttttacctgcaaatactttgtttagtctgaatttaagattaaactgatagcatcttagaagataagtaacagttttgtgtgtgcatctgtttattttaaatttatatataaatgtctactttgtattcttgtcttccagtgtggctaagctttttgttattgttt

SEQ ID NO: 183388 - DNA, 546 bp, Homo sapiens
atatatcttctttgtggcccaatttttrtaaccaagcactatcagattatcattgaacaaatagtatgaatttacttctgctttgaaatccatgatgatcactcttgttttgataactcctaaacatttaacaagctatcaggcttatgtttatcaactattcttatggatttttagattattcagtgaattggctcaccaacacgcctatgttctctaccctgaatgcataccaattaacagtaagaggaaaaatagccaggcttaaaatcatggtgaatatgtcttgagaactgaagaagaacaaaaagaaatcacagaatggtggctaaaggtataagctggctgatgtcacatgtattaaaagtacctcacataagatcaacatcattagttattggaaaaatgcagtttaaaaccataatgtgatacttgtataagcctatttacattggcaaaaatgtaaaagactgaccagacaattgctgacaaggatgtggaacaactggagatctcatacattgatggtgaaaacataaataggaa

SEQ ID NO: 183389 - DNA, 499 bp, Homo sapiens
agcttaatggaaactctagagctgaaaaagttatatttgaagtgaaaaattcactgtatggggttaatagcaaagtagatagaagaaaagtccaaacaaattgaatacatgacattagatattatccaaaatagggacaaagaatacaaacctcaataaaattaacagagatcctatagatacacagcaataccacgtgggtctaacattcatgtaattgaagtctcagaaatggggagggggatgaaggaagagaaaaaaaatggctacatatttcctatatttcatgaaaagaataaaycaacacatccaagaagctcaacaaattctaacagaataaatacaaataaaactaagaaaaatcacactcaaaacattgaaacaaattaacaaaataatattaaaattaattgtagaaaaataacatattaagtacaaaggaagaaagattttttaaaaatccacagagaaaaaagcagaaggcaaaacaaaatggaat

SEQ ID NO: 183390 - DNA, 306 bp, Homo sapiens
ggcccttttaccattgtcttggctatcagcacttgcctttttatttacacaaatttctctagcaagtggttgctcagcagcccacttgaattctcccttttctaccacatgkctaggctgcaaattttacaaacttttactctgcttcccctttaaataaaagttccaactttaagtaatgtctttgctcatgcatatgagcctagaatggtagaatctgctatgctgcatcttgaatgctttgctgcttagaaatttcttccaccaggtatcctaaatcatcactctcaagttcaaagttctaca

SEQ ID NO: 183391 - DNA, 409 bp, Homo sapiens
tctgctactttttatcttctgacctagtcttgccatttccttcccacctacacacatcgcctacccctacacctggtaatcaccatgtattctctattgcctttttaaaagaaaaaaaaaaaagacagggtattgctctgttgcccaggctggagtgcagtggcacaatcatagcttactgtgacctcaaacgcctgagctcaagtgatccctycaccttggcctcctaaagtgattataggtgtgagccactgcaccatgcctattctctatttttgtatatttaaatttattttgaagaatccacatataaatgagatcatattgtatttttctttctgtgtctgttttattttacttagcataatgtcctgcagcctcatccacgttgtgacaaatagcaagatct

SEQ ID NO: 183392 - DNA, 615 bp, Homo sapiens
ttttcattagtaaagatatttgtgtcagaaagagagttagtctatgacaacttttatcagatgagagactttgatctgcataacaaggcaacctttattcactatacatttcttcccctcacctttctataatttggcttcaccagccccagaaaccccaagcccttatttctttctgtagctcagaatgctaaataagcttcaatctggggaataagggaattctgtcccttatttgagtttcatatttttgtgagactcccatgcatacatgggtacacatgttattagaataatgtctctccagttaagctgccttatgtcaatttaatttgtagctcagccaaagaatgtaggagggtagaggaaagctatttttttctcccctacaatccaaggcatccaactcagctatagggtggttagtaaggtggaagaagaccctatkcaatgggtggcactatctccatattttcaatgatgatagtcatagaatttaaatattgcctccattccacataggtagtaggtggaagtgaaaggattttaatccatttctttcttactctaaaatctatgccttttccttcagagcatgctgcctttcaagcccac

SEQ ID NO: 183393 - DNA, 594 bp, Homo sapiens
gccttttccatgatggaagaggtccaatataatcaacctgacaccaggtagctggctgatcatcctgaggaatggtgccatatcgagggctcggtgttggtctctgctgctggcaaattggacactcagcagtggccataaccaggcagctcagccttggtgagtggaactgcatgttgctgagcccatgtataacctccaaccctaccaccatggccactttgttcatgggcccactggccaatgacaggtggctgtgaaaagaggctgagtgatgtccacagaacaggtcatcctatccacttaattattmaaatcctcctttgctgaggtcactcattggagagcaatcccatgcgatacaaatatcttcacggtttttgaccactcagatatccatccacataccccttccccagatttctttgtcaccaattttccagtcatgcttcttccaagtccctgaccatctagccaaaccattggctacagcccatgaatcagcatataatcacacatctggtcatttctccttccatgcaaagtgtggaacgaggtacactgcttgaacttctgtgcactgggaagatttcc

SEQ ID NO: 183394 - DNA, 521 bp, Homo sapiens
tctacctatttcctatttaaatatttagattgcttctaagttttcacagattttaggaatgatgcaatgaacatccttagacacacatccttcagtatgtaggtaagtcttcttatacctagaattataattattaggtcactgagtatacatacttaaaattttaagagatattgccaaagataacctgcaaagtggctgtacaaatttacattttcactaacagtgtaaaacaatatcagtttcctcatatatgcaccacgattttatgctatacaagtttttaatttgtaccggtctttttagataaaataacatcccattttagttttattttgaatrtcctgtgttactcctcatgtgtaaggctgaacatcctcatgcatttattgcctgttgctattttctcttccttagattgcctgcctccccttttagttctaatttagtaaacaatggaaaggagagcatggtaatctcaagtaggctaaattaggcttaatgtaacttcagtgagggcc

SEQ ID NO: 183395 - DNA, 578 bp, Homo sapiens
gtattagtctgttttcacacttctaataaagacatacatgagactgggtaatttataaaggaaagaagtttaatgtactcatagctccacatggctggggaggcctcacaatcatggtggaaggtgaggaagagcaaaggcgtgtcttacctggtgacaggtgaaagaacgtgtgcgggggaactctcgattataaaaccatcagatgtcatgaggtttattcactatcacaagaacagcacaagaaaaacctgcccccatgttcagttacccccgactgsgtccctcacatgacatgtgggaattatggtagctacaattcaagatgagatttgggtggggacacagccaaactattatcacccaggttttgaggtgtccattaatccagccaattgaagcctaacactaattccaccccttatcaacttgggatccattgcatctcaaaccatacttaatttccaaataaagacaataacaaggtataataatagttctgccaccatgatgcaactaatatgatgcagctatcctgcatacaactgaaaattcattaatccctttcccagaattaa

SEQ ID NO: 183396 - DNA, 580 bp, Homo sapiens
caattagctaacacagagggcctttgatttctcccactccagctcttaaaaactctccagtcctctgtttcagtataattgagttcagactgtgctttggtatctctaccttattgcaatagccttgaatgaagtcattcttacctatttaactttacttcaatttttgcttttacaaacagtatatgtaggtttgtcaaagcaaaacctttgtcaaaagaaaacctgtggggtgaaaaaaataagcagggtttagggcactagtgckgagaaatatgtcttcacaatttttagaagactggccaacataatcttcaaggaaaaggaaacatttgagcaaaaacttgaaggtgaagaacaattcttgtggaagtagccttcagacagaggaaacagtgaattcaaagaccttaagatgtgaatgaagatatgcaagatggtcagtgtattcatagtgaagtgacaagggcagagaaatacaatataaaattatggagtttacaggtgccagtaatacaggaccttgcaggccattgtaaggatttctgcttttacctcaagatagaataaaaagatttca

SEQ ID NO: 183397 - DNA, 498 bp, Homo sapiens
atgccataatacagtagaataaacagtatggtacaagttaatacattattcaataattttaagaaaatgtcttctcaaaaattaagctttcttcttcatgacaagctttctgtctagtcttggaattcttattaaaattgaacttgataaaacttattttaaaattagatattattgatatatatttgtagtgggtttaatatggcaggatatttaaaaataatgttggacagaatatagttccctgatttacaggaagtataacatccctagcccctattcactaatgccagtagcatctcatctctattactgtaatagctaagaataccttcacaaatcttcaagatgcctctatcatgaccacttatgtagatgaataaaatagagscctattgtccttaaattagaggaacaaattcagccactcctataaataattaccagttatgtattgaaaatatccattcctttcataaatattaaagcatttaaaca

SEQ ID NO: 183398 - DNA, 348 bp, Homo sapiens
tgtttagagcttagactacaattttgcctaccacaagtagtaacacacttctgcccccctccaactgatgccccaccagtcacaccacttaggtctaaatttcccttcaaaggacaccttgtaactaaggtgaccctatttccagtttgcctagaggagtcctagctaacttctgatgtcacagcaaaattattaacaccccatttcatcttcaagaatgtcctagtttagtcaaaaccattatatgggcactctacttgaattaacttgagtttcctgcccatgatgtagtcacccaggattttagaaaraacaatgtatcatcaccctctctggtttttgccccct

SEQ ID NO: 183399 - DNA, 620 bp, Homo sapiens
cactgctgtctatactaaaagcttctcagttctaacagccttcaaattaccttccagaggcaagaggcagcatggtgaaagcaagagcaagagagaggagagagcagccacacatttttaaacaagcagatctcactatcacaaggacagtaccaacaggatgatactaaacmattcatgagaaaccgccccccataatccagtcaccgcccactaggccccacctccaacactggggattatagttcaacatgcgatttgggtggtgacacagatccaaactttatcacaggccaaggtcaaggcttggttgagaagaaggctcagaggagcctgaccaaaatttgttgtgcttggtattaccaaattaataccaatccattgatgtgtccaagatgcccagtttttcacatttacaaaccagctatgttttcaaatgtgttcacctttgtcaaccagatgtgcaaaattagggtgtctccttacaaactttctgctagtgaatatcaaaactcgtaaatggatgcatcatcttttctaataatatatcttaaattaagtaattatggataaagggcaaggcatttatcaatatgttgtttataatagtgaaaaatggg

SEQ ID NO: 183400 - DNA, 598 bp, Homo sapiens
cctgcttcctctggccttgcctgagggagacagcaggatgctaagaggaggctgcatccacatgagtgtcctactcattactgagggaggaggatagcactacattagcagaaggaacatcccagttagattaacccaagagagactcccatgagtagtgagttgtctagattgtgtccaraaattcatgtgtgccttgtcagtgctgcaaagaagatgaaatgatagcatctgggtttcagtgatatgtagatactttttagctgaaaaaaaggaccaagactacagtgttgtgtgccagtacagtgattcaaaagggcaactgagtctgttcacaccccgggtattatcaatttgatgattgaacaacatctgttactgccgtaaaaatcacctacatactcagacaaacttttggaaaggaatgaagaagtgaaggaaagctgaagggcaaggatgtaaaaaagaacatgactaagaattatctaaaataaagagccatttaaattagattatttatactcaagactctgataccagtaattggcaaatttaaaataaatatttttctcttatttgtcctagtaattaaaatgga

SEQ ID NO: 183401 - DNA, 518 bp, Homo sapiens
tgccataaatttgccatgccattacatttaaatgttttcattccttagtgcagattaaaagatrataaatcctactgtagctttagaaggaattagataaaccctgtggttatttccagatacctggactggggatatcctctctgattattgaaacccctagcagtgctgagctgaattttcatacttgccaagtcaaattgtttctttctcccattctgaagaatcttttttttcaacctcacaatatgcagcacctacaatagcctgataattctcagagaaaagatccatttgtaaggagcatcagaattccagatctaccgaatttattgcatttacataaatgtttgccttcctctcaaatactaaaatggcaacgcctttatcctaaaattatacataaaatcatattgaatctcattcacttggaatctcattacatcaaatttctcttatttcctgtcacaaaaatgaccttgccattaagtttctcatgaatgttttaacatactcaa

SEQ ID NO: 183402 - DNA, 527 bp, Homo sapiens
atctcattacatcaaatttctcttatttcctgtcacaaaaatgaccttgccattaagtttctcatgaatgttttaacatactcaagtatctgtcatttgcaaagtaaaaccgcttccaaaaatttaaattaaaaaaaaataacatttatactgtagtgactatcttctcccttcacagtaaaattctttaaaaaaaaatcctccagaaacaaaaaacagtaaaactgactatgtttcctctcattcacctcatttacccctcaacaatgataatcaactttctgttctcaccaccaatagctgaaattgctttcatccaaaccattgacagcttacgtgttcttaaataaaatagaaactttgacctstctacagcatttgacattatttacattgactctttggaaagcttctctccctcactttttctccctctcttatgacctttcaagttttggatttctctattccttttggctcctactttgcattttattttaagtttttcattgatcatctcgctccat

SEQ ID NO: 183403 - DNA, 554 bp, Homo sapiens
gtttttatgggacagattgcctacattctgttacccacgccttactcccacagctgtatctacctgttaaagaggctcaaaaatgtaattttgttccrgattagaagaaaagagaaatagcttacatttccatttcattctcccagctatacttaaaaaccactcatttccttcccaagtgagccaatgcagagaaccagtagtagtcactggcccagctcagtcaatgctcaggaatttcggattgtagacatatcctctttaacaggtcaaggcatggctccacgcagcccagcaattacgaactagaaagaagttatctgatccccatatacaaaacccaataatactattcgattatttaaatatttccactttggatgaatatttagcaacgtggagaaatgctcatgacctcataagcaacaatgagtaacaacaaatgatatatataaccctacctaaaatattaattcaattgtgtttgtattaaaggagagaaaaagaatgaaaaataagtaacatttgtatttggatagtaatttttgtggttt

SEQ ID NO: 183404 - DNA, 554 bp, Homo sapiens
gtttttatgggacagattgcctacattctgttacccacgccttactcccacagctgtatctacctgttaaagaggctcaaaaatgtaattttgttccggattagaagaaaagagaaatagcttacatttccatttcattctcccagctatacttaaaaaccactcatttccttcccaagtgagccaatgcagagaaccagtagtagtcactggcccagctcagtcaatgctcaggaatttcgkattgtagacatatcctctttaacaggtcaaggcatggctccacgcagcccagcaattacgaactagaaagaagttatctgatccccatatacaaaacccaataatactattcgattatttaaatatttccactttggatgaatatttagcaacgtggagaaatgctcatgacctcataagcaacaatgagtaacaacaaatgatatatataaccctacctaaaatattaattcaattgtgtttgtattaaaggagagaaaaagaatgaaaaataagtaacatttgtatttggatagtaatttttgtggttt

SEQ ID NO: 183405 - DNA, 585 bp, Homo sapiens
aatgaatgctacatatcaatctgggtttttagctgcagagtgaagtgtctactctacctgggtttatacatttattcaacaaatatttaaaggcctacaatgaaccaggtactttttcaggtgttggtggtacagcaacgaatagattggacatgaccccttcctttcagtcaagtgcaatcaggccttctgggtgaagaatggccrgtgcagaggccctgagatgacagcaggctttgtgtatttgaggagcagcagggtagcagtgtaacttgggaagatagcacagggaagcatagtaggaggtaaggtaaggccacataaagcccttcaagagactgtctttactatgaaagagaggggagccactggagagctttgagcaaaggagtaaaatgatctgattttacacagatcactttggctgtgtgcggaaaaggctctagagggtcaaaatggaagacaggagaccagtgaggtggctattgcaataatccataccagaagtgacagtgatttggtacagggtagtagtagtagaggtgatgaaaaatgatcaaattttagagacattttaaagatata

SEQ ID NO: 183406 - DNA, 641 bp, Homo sapiens
acaggtttcctgcacggagttttaattgggtttaaaccaagcaggcacaagttccaggtcacacaataactgatacatggtcactatggcagatctgcacagtctctgtggggtgtaagagtgagtggggccagtcaagcaggctgcatctagctgtcccatggggaagtggtcactagggagcagttgtataaggcagatatctggatggggcacattgaggaactcggcagggagttggactggaaatagtgtcaggaatgactgagccctgcttctggtatgagaaagtctaatgtatttaaaatggatgccaaggyaacacaaaattaatacataattgtataaacataaacataaattttgttgggtatagtgaattaagcattcagtttacccaacaaaaaattgactgaaagagggggccagacacagtggctcacacctgtaattccagggctttgggaggctgaggcaggaggctcacatgaggccaggagttggagaccagcctgggcaacagagagagatcctgtctctaaaataatactttttttaaaaaagttggcagaaagatatactaaataaaaatacataggcttgtatccttcaaatgcccttaaagaaagatatttatcatt

SEQ ID NO: 183407 - DNA, 641 bp, Homo sapiens
acaggtttcctgcacggagttttaattgggtttaaaccaagcaggcacaagttccaggtcacacaataactgatacatggtcactatggcagatctgcacagtctctgtggggtgtaagagtgagtggggccagtcaagcaggctgcatctagctgtcccatggggaagtggtcactagggagcagttgtataaggcagatatctggatggggcacattgaggaactcggcagggagttggactggaaatagtgtcaggaatgactgagccctgcttctggtatgagaaagtctaatgtatttaaaatggatgccaaggcaacacaaaattaatacataattgtataaacataaacataaattttgttgggtatagtgaattaagcattcagtttacccaacaaaaaattgactgaaagagggggccagacacagtggctcacacctgtaattccagggctttgggaggctgaggcaggaggctcacatgaggccaggagttggagaccagcctgggcaacagagagagatcctgtctctaaaataatacttttttwaaaaaagttggcagaaagatatactaaataaaaatacataggcttgtatccttcaaatgcccttaaagaaagatatttatcatt

SEQ ID NO: 183408 - DNA, 576 bp, Homo sapiens
tatataagggacttcagtatccgcagatttttatatccatggattttgctatctgcaggaggtcctgaaatcaatctccatggatatagagggacaactgtagtagttaagtgataaataagatttgagcttagccttatattactccaaagcttatgaaccaactccccagtcacaggagataagtaaaaggattgagaacaatctggttaattccattatttggtaatgggaagtgacaggaagaattcctgtactgtagggtagaggccacaaactttttctgtaaagggccagacagtaaatattttaggcctttaggccatatagtctttgtcgcaagtactcaactctgccataatagtgcaaaagtagtcatagatgatatgtaaacacataagcatggctatgtcccaataaaactttgtttatggatactgaaatttgaaatttatataatgttcatatgcacaaagtaatattcttcctttgattttttaaatgttraaaactaaaattattcccatcttgtgggccatatagggctagatttgccctggcaggctatcattaggt

SEQ ID NO: 183409 - DNA, 598 bp, Homo sapiens
ctcctcttcctgggtggccgtggtggtggtggtggtggtggtggtggtggtgacggcgacagcaggagcagtagtggtgggggctgtgtcggtggggaaaggagactgcagagatgcaaagggctccttcagcgggggttggggggccacgcctgcttcgtgttgttgctgttcctcttccttgcgaatggattcgtccagcatcttcatgatgttggccagcccatcaggtaggatcttgaattcggctggctcctcaaactggtcctccagcggagtggggggaaaatcaaagagtcgagggcctcgggcaggcagctccccaaccccrggcggcacaggctggggggctttactcagggggcctgggggtggccccggccccacctcgggggtctttgggaaggagaccctgggccgggggctctccgggcgcctgaagcttcctgaggtattttggtggcaggaggaaggaggggctggaggcagggcaagagtcaggggtacaagaggtgggtcctgggggttctgtgctgggctgggaggccggggaagggggtctatacttctggccagatagggtggtgggggaaaggac

SEQ ID NO: 183410 - DNA, 552 bp, Homo sapiens
tatgaaaatgcatggacacatagaggggaacaacacatactggggactatcagagggtggacagtgtaaggagaaagaggatcaagaaaaataaccaataggtactgggcttaatgcctgggtgatgaaataatctgtacaacaaacccccaagmcacaagtttacttatgtaacaaacctgcacatgtaccctaaacttaaaagaaaaagatccccatactacaaaattcttagaaggaaacataggggaaaatcttcatggtgttggatttggcaatgatttcttaaatatgatatcaaaagcacaagcaacaccaggaaaaatagacaaatgggactatatcagacctaaaacttccatgcataaaaggacacaatcaataaagtgattgtaactggtgatctgtgagccttgcctgtggctggagtggccaggacgtgagaagcagcattctggggcagcacagggcagcagtactctaggcctggttttctttcctttctcttccccaaatcagtccgtcctctcggtcccctcagcctttccccca

SEQ ID NO: 183411 - DNA, 621 bp, Homo sapiens
caagaatccagcgagggaaaccgccaattctggcggtagaagaagcctaggaaacatagagtcactgtcagcygtgggagctgctgaaggacctctggcagccttgggtgctgaggacacaggactggcgtgtgtggaggaggtgggtgagagcacgggcggagctgctgctgggccaccctccttggtggtgaagggcaggcaatggacgccatcaggagagccctgggagacacagcctcgggtccctggctaagccgccctcatcactgtgaagtaggcagtgtttacacaggcagcacagaaatgcacgacatcactccaggacagggtctcctcacagaaagaggcctggaaaatgtcctctattttaaaacaagttaccatgtttaacattcctgaatctatatatgctccttctgcacttatcatctctattattggatttttttttttttttgagacagagtctcactctgttgcccaggctggagtgcagtggtgtgatctcggctcactgccacctctgcctcctgggatcgagcgattctcctgcttcggtcacctgatattattggattttaaagcattattgtgagaaatacacaatatgtattattt

SEQ ID NO: 183412 - DNA, 505 bp, Homo sapiens
gcaatccttgtaaaaatagtatgttacatctttgaaaatagtggcaccagccggcgtaacatagggagrcccagtctcaaaaataaacaagcaaataaataaaataatacgccgagcttggttgtgcgcgcctgtaatcccagcttctcgggggggctgaggcaggagaatcgcttgaacccgggagaaggaggttgcagtgagccgagatcgcgccactgcactccagtctgggagccaaaaaaaaaaaaaaaaaagcaaaaacaaaacccgttcagcagtgtttacctgcacagtgtcgacggacagtgtcgacggaagccgcacccgtgagcgggacacccgggatgaccgaccccctccctgcaggcctggcctcctagctttagaactcccccagatgttttgttctcagctcaatcaggacccgcccccacctttttaataaagcgacactttgcttttgctttctgacttggcaaccctcttacagacttccgttctc

SEQ ID NO: 183413 - DNA, 431 bp, Homo sapiens
aggttgcctaatcaaaagttgatacagggtaactttgtaaggtgtcagcaattttattttaaaatattttttaatgtgctctcatctcctcctgggactctaaatgtgtgccatattttttcagaggtgactgaactcttgttcatttcagttttctgtatatataacaacactttagttcttcagatccgataatttctattgatataatttcacatacactgacttycctgttttgctgtctgcaactaatcattaaacccatataataaatgttatattttgtttgcttttttataattttaatttctctactaatagttatatccatatacttattataaatatctcttcttttaatcttctcatatttattatagttgctttttctttgtctactagttccaatatctgatcatcttattggtttc

SEQ ID NO: 183414 - DNA, 629 bp, Homo sapiens
aggtgagctaggtattctatatgtctctcttttctcattcaagagcattttcagtgcctccccctcaaaacaaatagatcttctttatcagcatataagtatcagtacataagtatcaggatctcttactgttaccacactctataagacctgtcatttcttcgagatttccagtctactccctgtcatttcttagagatttccagctcctggttaactcccagtctcttcaacatttattgattatttcagtgaacaaattattgatatttgcaatgttctgatctctctcaattcattgaattatcttctccaataatctttttataagactatccctcaccttagacatttaccagtatggtcatttcttagattttgtcattaccagtaactttaaaccctccatcatctcagattcaccctgttctttacactctgcaaccaccaacttgcatctttctagttaactttttttggtgccctaacttctataacccacctttaagacatacaacttatcccccaatatttttatatctctaagtacgttcacatttacattctcctygctttgacaccttttccctttacattcttaattaatgaccttcctatttttctgagaa

SEQ ID NO: 183415 - DNA, 509 bp, Homo sapiens
gtgtacagcctccttcccagctgcttcacaggctggcattgagtgtcagcagcttttccaggcacatggtgcaagctgtcagtggatctaccattccaggttctggaggatggtggccctcttctcacagctccactakgcagtgccccagtagggactctgtgtgggggttctgaccctgcatttcccttctgtactgacatagcagaggttctccatgaggcccccacccctagagcaaacttctgcctgggcacacaggcatttctacaaatcttctgaaatctgggcaggggttcccaaacgtcaattcttgacttctttgcactcttgggctcaataccacatggaagctgctaaggattgaggcttgcaccctctgaagccacagcctgagctctacattggccccattcagccatggctggagtaggtagaacacagggcaccaagtctttaggctgcacacatcacagagaacctgggcctggcccatgaaaccacttttt

SEQ ID NO: 183416 - DNA, 517 bp, Homo sapiens
cattcacacaccatacacagagagatacaaacaagtaatatttcagattagctcctagttgggataraaatacttttttaaaatattaatcattgaatgtccctaatccaaaaatatatctgtaaaatgtatgtaggcagaagaccctaaatctttatacaactttaatgatacacgcccacatggcaattgcaaaaaatgaataagatttggcatcctgaaattgtccaagtatcctctataggtaggtgtcagtagctactattatctatgatatccttgttttgcctcctaaggtgcagtgttagtctgttgtcacactgctagaaagaactatctgagactgggtaatttatgaagaaaagaggtttaattgactcacagttccacaggctgtacaggaaacatggttggggagacctcaggaaacttaacaatcatagaagggtgaaggggaagcaagtaccttcttcacatggtgaagtgagagagagagaatgagacagagagagagcaa

SEQ ID NO: 183417 - DNA, 517 bp, Homo sapiens
cattcacacaccatacacagagagatacaaacaagtaatatttcagattagctcctagttgggataaaaatacttttttaaaatattaatcattgaatgtccctaatccaaaaatatatctgtaaaatgtatgtaggcagaagaccctaaatctttatacaactttaatgatacasgcccacatggcaattgcaaaaaatgaataagatttggcatcctgaaattgtccaagtatcctctataggtaggtgtcagtagctactattatctatgatatccttgttttgcctcctaaggtgcagtgttagtctgttgtcacactgctagaaagaactatctgagactgggtaatttatgaagaaaagaggtttaattgactcacagttccacaggctgtacaggaaacatggttggggagacctcaggaaacttaacaatcatagaagggtgaaggggaagcaagtaccttcttcacatggtgaagtgagagagagagaatgagacagagagagagcaa

SEQ ID NO: 183418 - DNA, 517 bp, Homo sapiens
cattcacacaccatacacagagagatacaaacaagtaatatttcagattagctcctagttgggataaaaatacttttttaaaatattaatcattgaatgtccctaatccaaaaatatatctgtaaaatgtatgtaggcagaagaccctaaatctttatacaactttaatgatacacgcccacatggcaattgcaaaaaatgaataagatttggcatcctgaaattgtccaagtatcctctakaggtaggtgtcagtagctactattatctatgatatccttgttttgcctcctaaggtgcagtgttagtctgttgtcacactgctagaaagaactatctgagactgggtaatttatgaagaaaagaggtttaattgactcacagttccacaggctgtacaggaaacatggttggggagacctcaggaaacttaacaatcatagaagggtgaaggggaagcaagtaccttcttcacatggtgaagtgagagagagagaatgagacagagagagagcaa

SEQ ID NO: 183419 - DNA, 569 bp, Homo sapiens
gtgatagtcaaataaaaataataataataagttgttcttgtttaggcaggaaatccacaaattcactgacacatgcatctattattatttccaatctcataatgggcctgggcttccaaaggctgactaaatcctactataggccattctgcaaggtagaaataaatgtgcaaataactaactggtgctgacaacagtatgaacataataaaatagtgatacamaccttgatgatgataagatttcaaggctaattgtcatatgtacatttgcaaggtctaaattgactctgatttatgaactattgaatataacatctatgaaggcagtaaatgtttaaaactactattcagtacttagaagatatcattaagtgatctcatattagatgttcagtaaatatttactaaatttaaaatagtggatgttcttttttggatttattttctagccttatggactccttatcttatgttaacttattttatagtggcagatactaggatttttattatattttgactcagattaagataatctatacagtcatgtagacctaaattctgaaa

SEQ ID NO: 183420 - DNA, 569 bp, Homo sapiens
gtgatagtcaaataaaaataataataataagttgttcttgtttaggcaggaaatccacaaattcactgacacatgcatctattattatttccaatctcataatgggcctgggcttccaaaggctgactaaatcctactataggccattctgcaaggtagaaataaatgtgcaaataactaactggtgctgacaacagtatgaacataataaaatagtgatacacaccttgatgatgataagatttcaaggctaattgtcatakgtacatttgcaaggtctaaattgactctgatttatgaactattgaatataacatctatgaaggcagtaaatgtttaaaactactattcagtacttagaagatatcattaagtgatctcatattagatgttcagtaaatatttactaaatttaaaatagtggatgttcttttttggatttattttctagccttatggactccttatcttatgttaacttattttatagtggcagatactaggatttttattatattttgactcagattaagataatctatacagtcatgtagacctaaattctgaaa

SEQ ID NO: 183421 - DNA, 529 bp, Homo sapiens
gttttctgagtttaagacttagtggcaaaaaatggtggcatatgtgaaatctttaaacaaatataaaggtaaatcatgatttgtcatgtaggcttggataactcaatcttcaatcaagaaaaaatagacaaaacaaaaaagaaggaaggaaaaaggaaaaaagaaaggaagtaactamccctacatcaagtgagaaaaatttgtactttatatatgacttactcaattaaaaaagacaaaaaaaaaaacttatgcaatatctgcataataatccaaagtgagatgcaagagaatattgtctctgtaaaagaagagaaaaagacagggataacgtaggttataataacaatacatctgacaactaataagaaaaaataagatgaaaactagcaaactacataaatacatacttacatacataaatgcaacagaattaagtgcactccagaaaaaataaaagtaatatttgcctctgaagaaattaaattaagagttggaagccactgttaaaaaatattccttaaaccag

SEQ ID NO: 183422 - DNA, 589 bp, Homo sapiens
agcaattattcccatttattcccaggccttcaggcaatactggggagtaaccccagccaattgccctcaatttccaaggagaaastaggaaaaagccactgtaggactgaaaaagaaagagaggaaaaaaataaaaataaaaaaagacccagattcccttaagcaaagcgggcggggccagttaggcttctccacatgaaaaccccttagtttcattggccacggcccagaaacctgcagttgcttcagtgtttaggtgctgccctccaagggtcccaagttggaaaggaaatgagagagagagagagagagagagaccctgaatgaagcacaaaggaaagggagaaaaatgaatcccaaacttagggcctacctcttcctccaggatggctcgccaaaatatgttaatggtggcggaggtgggggtccaggttcttggcatcctgaacaaagaatgggacaaaacacacaaacaaagcaacgaatgaatgaagggttttattgaaaaagaaagtacattccacagtgtgggagcgggcctgagcataggggctcaagggccctgttacagagcttttgtgagtttaaa

SEQ ID NO: 183423 - DNA, 515 bp, Homo sapiens
actttattgatccataaattggatgttggtcagcctttaaataaactttccacttgtggcaatagtttgaaaatcaatcaattgaattcacttttccacagtttattttccaatagtgtatttccttcatttaaaaaaagttatggagtaaagtattggaacatagaaaaaaaatcggtatgaatttgtacttaaagacttgtctttttcaatactataaggatgctaacttattcgtgagtacagacatacctcattttattaagttttgctttattaccctttgcagataatgtggtttttatacattgaaggtttgtgacaatcctgcatcaagcaagtctattgaagccatttttccaacagcatgtgctcactttgttacaaattttagcaatatttttaaagtatgtgcattagtttttaagacatgatgctattgcacacctaatagactacactatagtataaacataatttktatatgaactagggaacaaaaaatatagtgtgac

SEQ ID NO: 183424 - DNA, 587 bp, Homo sapiens
aaaattcaatagaatctacaaaaaaagctcttctaataactgagtttagcaaggttacacaatacaaaatcaatatgcaaaaataaattatatttttgtatcctagaaataatcagaaattgagacaataaatcagaaattgagacaccatttataacagcataaaaatgaaataattaaggataagcctggcaaagtatgygaaagacctatacactgaaaactaaaaaacactcatagagagaaattttaaaagatctaaacaaatgaagagatatataccacattcaaaggttggaagactcgatgttgttaaaatggcaattctcttcaaataaatatataaattcaatgtgatcctaatcaaaatcccagtagactttttgtagaaattaaccaatttaatttttaaaattcacatgaaaatagagctcagaataatcaaaattttcttaaaaaagaagaaagaaatcagactaatgctactttagtttcaagaaagagatatatagatcaatgcaacaaaatagagagtccataaataaatctacacagatatgtattttcatgagagtccaaagggaaag

SEQ ID NO: 183425 - DNA, 612 bp, Homo sapiens
tgtaatttattgaatactgtgctaaaagtgataaacagaatggctgtatggctagtcaaagtacagtttctactgaatgcacatggctttcgcaccattgtaaagttgaaaaatcttgagttgaactaaggtacatcagggactgttggtccatttcattaactttttttgtttttttacttttaaagtaacgttattgaaggataatttacattcaacaaaatgcaccccactttaagatgagctttgacaaatgtatatacctttacrgtgatcactgtattaatcatggctttttgttaaattttatgatgatttgacatcttagaggacttgctagagaggggaagatactgccccttccagggctagctaattcctatatattgcaaatgactcccctgtgagcgtgtctttcatacgcaaaccaaccaatccaaagcccatatcctcaatcacatcctttatctaactaacacaccaagccaatatttctccagcctaaatcactggagtgagatggactaccttataggccagggaccactgaaattattcaagctagccaatgttaaacagcttttcatatcctaccttgtctttcctggggaa

SEQ ID NO: 183426 - DNA, 583 bp, Homo sapiens
gaattccaattttttaaaaggaggcttcctccagtttcttcatgttctacctttgttgctgtcagcccatgaagaaagggagatttaggtagacagaaagaaatgtcttgaggttgtaatgaacacaataaaaaaaaatcaatatttttaaaaagtagatcttaaaatgtacttgaaagtttgaaatcataatgacataaacaactatttatgacctaagaagaaatgcctactttggtactttgaagtattaaaaaaaatcacatagaattaaattacaaagctcaaaacttgtttaggcagctggtcttttttaaaatcaaggaactttaaacctacaattctaataggcttactggtgacaccccaatcctttgaaaaataaatgaaatatcataaatcatttgacagtttttaagcttagatttttatcatcagtcagactctttaaaaataaaaaagcaatatgaaaggataggatcttgctttgtgccctakgaagtttaagagagaaaataaatcatactattaaatgtcatttagaaccttaacttcaatacttaggatgaaattggcataatat

SEQ ID NO: 183427 - DNA, 455 bp, Homo sapiens
aattccctgcagtacaagatgccaggaggcaacatccttatttaggattaaaataatttgtaactcgttgggagggcaccctgtgccttcttagtacwttttaattaatataacttctgctccctgctgacaaagatgtttccgatggtgtttgggtccaacatattcaccgccttcattgatgtgagtcacttgaatccttgcaggaatccacaaacttcctggtttcatggaaaatagagaattgcgtgttagaagtgccaggtaggcatacagagctgagaatgttcttcttcatctatctggccccttttatataagctcttaatatggtgaccatgagaaccttccaatttgcagataaaatagaaaatcacacattttcaggttccagtgcaaagcagaaaaaggccctgaatgtttatagaaatgtgagatcattatgtttagcttcc

SEQ ID NO: 183428 - DNA, 455 bp, Homo sapiens
aattccctgcagtacaagatgccaggaggcaacatccttatttaggattaaaataatttgtaactcgttgggagggcaccctgtgccttcttagtacattttaattaatataacttctgctccctgctgacaaagatgtttccgatggtgtttgggtccaacatattcaccgccttcattgatgtgagtcacttgaatccttgcaggaatccacaaacttcctggtttcatggaaaatagagaattgcgtgttagaagtgccaggtaggcatacagagctgagaatgttcttcttcatctatctggccccttttatataagctcttaatatggtgaccatgagaaccttccaatttgcagataaaatagaaaatcacacattttcaggttccagtgcaaagcagaaaaagkccctgaatgtttatagaaatgtgagatcattatgtttagcttcc

SEQ ID NO: 183429 - DNA, 607 bp, Homo sapiens
tttttaagcctttttagaaaaagagaacctttttttttttcctggttctgccttacctcagccaacagaaaatactttgtttcaatataatttgatatatttctgttttcccactagcttctattcttgcaaatattcatcattgcccttgttttgtgatgagggaaagtgaaatggagggaggagaaaggcaaagatgtacaaagggtcagaattcaactgcagtgggtaaactcctgaaaaataaagaagacccgacttcycctttcctgtgaccagaagcaagcctccacaccacccatctcagcaagtgcattttgggaatagatacacttaatttaatattcagaaattacttcctttcttcttgttcttctacactttgcccaagacagactaaaactttatcctaaccccagacacattctgcaagatgccactgctagaataaactaagatttacaatacaatcactttaagtgccccacagctaacatcaatcctaatccttgagaaggctaaaaataaagattggagggcagctcacaaggtagccgtgatcaaattaggaggctgagaggacagagagggacgaagaaggaagctt

SEQ ID NO: 183430 - DNA, 593 bp, Homo sapiens
atcaagaatatggccgtctatgaaccagaaagttggtccttaccagacttggaatctgcctgctatgctttggttctgtgtccccagccacatctcatctcaacttgtaacccccacgtgtggagggagggacctggtgggaggcgactggatcatggggatggctcccccatgccatgctcatgatagtgggtgagttctcatgagatctgatggtttgaaagtgcagcacttgygctttgtgctgtgagtcaattaaacctcttttgtttataaatgacccagtctcaggtagtatctttatagcagtgtgaaaatggactaatacattgccagtaccttgatcttggacttcccagcccctagcactgtgagaaataaatttctgttgtttatatgctgtccagttgatggtattttgttatagaagcccaaagaaactaagacagtatatagccaagagaaataaaaacccacgtccacacgaacatttaaacatgagtgttcagagcagcattgttcatgtagccaaatggtggaagcaacccaaatatccattaatgggtgaatagataaacaaaatgtgctatatc

SEQ ID NO: 183431 - DNA, 447 bp, Homo sapiens
ctatgatccttgagatctgtaccaggtaagaagctaggtcaccggggttcatcttggccatccctctatctctagcaagaattcttgcaaataatatccatgatattcagtactttccaagtacactgtgtatctgatactgttctaagtatccaccatgaggtagacaacacagacagtccttgctttgcatgttaatgtgagaccacagcaatgaccacgtaagytgagactgtcaaagcatcttagtaatcaatggaggaaagtacacaatcattccatgacctttaaagttttctttttttctttttagagagatagggtcttgctctgtcagccaggctggagtgcagtggcacaatcatagctcactgtaacctcaaactccctggctcaagcgatcctcctgcctcagccactcaagtagctgggactacaggcgtgtgc

SEQ ID NO: 183432 - DNA, 415 bp, Homo sapiens
gctaggtcaccggggttcatcttggccatccctctatctctagcaagaattcttgcaaataatatccatgatattcagtactttccaagtacactgtgtatctgatactgttctaagtatccaccatgaggtagacaacacagacagtccttgctttgcatgttaatgtgagaccacagcaatgaccacgtaagctgagactgtcaaagcatcttaktaatcaatggaggaaagtacacaatcattccatgacctttaaagttttctttttttctttttagagagatagggtcttgctctgtcagccaggctggagtgcagtggcacaatcatagctcactgtaacctcaaactccctggctcaagcgatcctcctgcctcagccactcaagtagctgggactacaggcgtgtgc

SEQ ID NO: 183433 - DNA, 470 bp, Homo sapiens
ccaagaacactatgatccttgagatctgtaccaggtaagaagctaggtcaccggggttcatcttggccatccctctatctctagcaagaattcttgcaaataatatccatgatattcagtactttccaagtacactgtgtatctgatactgttctaagtatccaccatgaggtagacaacacagacagtccttgctttgcatgttaatgtgagaccacagcaatgaccacgtaagctgagactgtcaaagcatcttagtaatcaatggaggaaagtacacaatcattccaygacctttaaagttttctttttttctttttagagagatagggtcttgctctgtcagccaggctggagtgcagtggcacaatcatagctcactgtaacctcaaactccctggctcaagcgatcctcctgcctcagccactcaagtagctgggactacaggcgtgtgccatgacacctggct

SEQ ID NO: 183434 - DNA, 377 bp, Homo sapiens
catctttggacaggacataatttggaacacctcattctttagtacctttgctcaccttgcatacatgtgtgaaaaactggcataattgtacatatttataaagtattgattttagaatctgcagcttccaggtaaacatttattactgagtccacacggctgtcatcaccctctggtcctgtctccrctgcctctctcccctgctcccgctaaatgactgggggcttctgagaaagcagatgagcagacaggaagagctggagcaggcagactgggctggaaagtgtggctctggctcaaggtggtgccacaagctgtgattgatgcaagacccctcaaatcaataaatgaaatcaagtttctctctctcttttttt

SEQ ID NO: 183435 - DNA, 576 bp, Homo sapiens
aagcttggtctaagggcaagtttcctcatccctgttacctgactgcttcctcccaatacaccttgggcagggcagggcgggcatgtgcccagggggcacacgaggggcacatcaggggctgggatggcacacctgaagctgcacacccagtcaggggctgagcctaatctagaccaacagtcaggtccccccactccccacaatgccagcagaggtggcattattttccccttccctggctagtgtcataaggacaggactccaggaataaggaaatgaggggcaggggaggaaggagaggagacccagagagccacagttaggcyagcagccacccctgggtgtggtgagggcagagcaggggtagttggggagacacagcagggagtgtagccaggaccttcaacatctcaggggaaaggtcaaggacagaaagagagcaggaaagaaataatctcacagtttccaaggctgaagccccagtaattgtccaggccagccctcgagaatatttttgccagtttgcaacgagtgtagattttggactcggcgcctgtgaccaggcagccaatgagg

SEQ ID NO: 183436 - DNA, 576 bp, Homo sapiens
aagcttggtctaagggcaagtttcctcatccctgttacctgactgcttcctcccaatacaccttgggcagggcagggcgggcatgtgcccagggggcacacgaggggcacatcaggggctgggatggcacacctgaagctgcacacccagtcaggggctgagcctaatctagaccaacagtcaggtccccccactccccacaatgccagcagaggtggcattattttccccttccctggctagtgtcataaggacaggactccaggaataaggaaatgaggggcaggggaggaaggagaggagacccagagagccacagttaggccagcagccacccctgggtgyggtgagggcagagcaggggtagttggggagacacagcagggagtgtagccaggaccttcaacatctcaggggaaaggtcaaggacagaaagagagcaggaaagaaataatctcacagtttccaaggctgaagccccagtaattgtccaggccagccctcgagaatatttttgccagtttgcaacgagtgtagattttggactcggcgcctgtgaccaggcagccaatgagg

SEQ ID NO: 183437 - DNA, 412 bp, Homo sapiens
atggactggaccttccaaaacttgtagtcggtacagacctgccctgctctgtggtttcttctgaaaggttgaccctccttgggttactgtctgtgtcatgtccccaaggccactgtccctccctcccctcagcctggaggagagctccagtgtggggggccacttgctggcaagtgtgacacagytcattctgcagatggcaccaatgcactctcagctgcccccaccatctccaaagggcctcagaactcacagctgcatttgctcaagtctacgtgtcatggacatgttttcccacatctccaccgttcattttggattatcagctcgtcagccactacagtccttggaaataataaaatcctgtctacatctgcagttggttgtcccacagtcgtggtacgtgtgaaat

SEQ ID NO: 183438 - DNA, 466 bp, Homo sapiens
gctacagtacttattaatgtacatatgtccttctctaaacaaggaaagaaaaaattaaaaggaaaaaacaagacaataatgaagaagctgagaaaaagcaaacggacaaagatatccatcttctttgttttcacactttragttcaaaatagaagagcaacttgtgatagatttttgttaaattctttggagtataaacagcctatatattatttacctccttatagagccatgtaaagtcagatagcaggaattggggagccataagccaaccctactaagtagcaatgttaagtagaaatttttagagaagcaaaaacgtttatgtttaatattatcatttagcagagattacaaattatttgttcttgacctagatctggcaaagaaatggaagctttaaattctaagaaggtcatattgtcccagggttcatatccatcatgtgcatgaagggctctggggg

SEQ ID NO: 183439 - DNA, 550 bp, Homo sapiens
aataaatattttcccacttggaaagtgcaattggatgctctccccaaagtaaagtcaacccacaatccaaaaggcacaggagccaccttcatatggcaggaaagcgtgctcaccatctctgtgatctcagcagtgtcgtctctgtgctcccagctaggaaacatattggtgaatgttaggggctccagaccagcatrgataaggtaagacttggggactggcttcttgagatttttttcctgtagttacacagaatgcaatgtcagtagacccaagggagacactgtctttcgctgatttcccttgaaatcttttcttctttgccagaactcatgacttcatgcttaaaatgcaagttacgagtagttcataacaacacatggataatgtttatataagatgttagtttcatgcctgtgactacaatagtgatctataatcaacctgagtctatacttcttgaacctaacaaaacgctgtgtattcctggaagggagagagaggctctatctgcagcttctgggtggagcattttcttcctcctgaattc

SEQ ID NO: 183440 - DNA, 550 bp, Homo sapiens
gaattctatgacatgttatcatgttgcaaaataaatattttcccacttggaaagtgcaattggatgctctccccaaagtaaagtcaacccacaatccaaaaggcacaggagccaccttcatatggcaggaaagcgtgctcaccatctctgtgatctcagcagtgtcgtctctgtgctcccagctaggaaacatattggtgaatgttaggggctccagaccagcatggataaggtaagacttggggactggcttcttgagakttttttcctgtagttacacagaatgcaatgtcagtagacccaagggagacactgtctttcgctgatttcccttgaaatcttttcttctttgccagaactcatgacttcatgcttaaaatgcaagttacgagtagttcataacaacacatggataatgtttatataagatgttagtttcatgcctgtgactacaatagtgatctataatcaacctgagtctatacttcttgaacctaacaaaacgctgtgtattcctggaagggagagagaggctctatctgcagcttct

SEQ ID NO: 183441 - DNA, 550 bp, Homo sapiens
gaattctatgacatgttatcatgttgcaaaataaatattttcccacttggaaagtgcaattggatgctctccccaaagtaaagtcaacccacaatccaaaaggcacaggagccaccttcatatggcaggaaagcgtgctcaccatctctgtgatctcagcagtgtcgtctctgtgctcccagctaggaaacatattggtgaatgttaggggctccagaccagcatggataaggtaagacttggggactggcttcttgagatttttttcctgtagttacacagaatgcaatgtcagtagacccaagggagacactgtctttcgctgatttcccttgaaatcttttcttctttgccagaactcatgacttcatgcttaaaatgcaagttaygagtagttcataacaacacatggataatgtttatataagatgttagtttcatgcctgtgactacaatagtgatctataatcaacctgagtctatacttcttgaacctaacaaaacgctgtgtattcctggaagggagagagaggctctatctgcagcttct

SEQ ID NO: 183442 - DNA, 550 bp, Homo sapiens
aataaatattttcccacttggaaagtgcaattggatgctctccccaaagtaaagtcaacccacaatccaaaaggcacaggagccaccttcatatggcaggaaagcgtgctcaccatctctgtgatctcagcagtgtcgtctctgtgctcccagctaggaaacatattggtgaatgttaggggctccagaccagcatggataaggtaagacttggggactggcttcttgagatttttttcctgtagttacacagaatgcaatgtcagtagacccaagggagacactgtctttcgctgatttcccttgaaatcttttcttctttgccagaactcatgacttcatgcttaaaatgcaagttacragtagttcataacaacacatggataatgtttatataagatgttagtttcatgcctgtgactacaatagtgatctataatcaacctgagtctatacttcttgaacctaacaaaacgctgtgtattcctggaagggagagagaggctctatctgcagcttctgggtggagcattttcttcctcctgaattc

SEQ ID NO: 183443 - DNA, 550 bp, Homo sapiens
aaataaatattttcccacttggaaagtgcaattggatgctctccccaaagtaaagtcaacccacaatccaaaaggcacaggagccaccttcatatggcaggaaagcgtgctcaccatctctgtgatctcagcagtgtcgtctctgtgctcccagctaggaaacatattggtgaatgttaggggctccagaccagcatggataaggtaagacttggggactggcttcttgagatttttttcctgtagttacacagaatgcaatgtcagtagacccaagggagacactgtctttcgctgatttcccttgaaatcttttcttctttgccagaactcatgacttcatgcttaaaatgcaagttacgagtagttcataacaacacatggataatgtttatataagatgttagtttcatgcctgtgactacaatagtgayctataatcaacctgagtctatacttcttgaacctaacaaaacgctgtgtattcctggaagggagagagaggctctatctgcagcttctgggtggagcattttcttcctcctgaatt

SEQ ID NO: 183444 - DNA, 567 bp, Homo sapiens
gtgttggcaccatgacaaaattgcctaaggatgtatttctcataatatattcctgttgttaagtgacacatgactgtatgcacatctctgtattcctgtgcccattcaggacatagtccatatggtacttatgccctcagtaaacatttgaatgatataaatatcacccacagaaaacagaagaaacaggagagtgaaatttagtcttcactgtcaataaatatttaacaaatgtctactaagttagattttagggatagggtggtaaaaaaaatctttcttggaacttatagtctatttggggagaaagttaaaaacacataacamaacataaacaaaataatgacaattggtaataagtgtcctggaagaaacaaacaaggtgctaaagaagagctgaaatcctgagatttctaaaggaaatttcagcttagaaaagacaaaatcaagcctgaatgcatccaaagggagagctcggtaggaattagatcctttacaaggttccttgctgagtgctcccatctttgctttattcctctactcttaggctcacagttcttgtagagt

SEQ ID NO: 183445 - DNA, 631 bp, Homo sapiens
tattgcatagtttggcttgggctagggcagtccagtctaaaactgtgtttctcagaggaaaagacccagctcacttrtatcagaatcactgggaaagctattaaaaggcttattgggctctgtcccacacctactgaattagactctggaggtgcttccagaggggctgatattgtaaacaaggtctccagaggtttctgatggactgtaattttgagaaccacaggcttgaaagaaatttgctcctgaccacacaacatttatttagacgtctgaagtttcttaaacatacatcactctcacatattcgttaatttccccagggtaggcacatatttctcaggtcaactcactcttttggagcagagaagagacaatgctgccctgggttaggtatcacaacccttcatctgtggcacagcctcctccttttaaaccctccaccctttagaatttacaatcagagataaaagtgtttacctcttgttctgcagatctgcatggaacttggtccttttaggactatgaatctggttaatgaaaaagtaatttcaatttagaagcttcaaaagcctagatgaacttctggaaagttattattcaagatttctttattacacttgagagcatg

SEQ ID NO: 183446 - DNA, 631 bp, Homo sapiens
tattgcatagtttggcttgggctagggcagtccagtctaaaactgtgtttctcagaggaaaagacccagctcacttgtatcagaatcactgggaaagctattaaaaggcttattgggctctgtcccacacctactgaattagactctggaggtgcttccagaggggctgatattgtaaacaaggtctccagaggtttctgatggastgtaattttgagaaccacaggcttgaaagaaatttgctcctgaccacacaacatttatttagacgtctgaagtttcttaaacatacatcactctcacatattcgttaatttccccagggtaggcacatatttctcaggtcaactcactcttttggagcagagaagagacaatgctgccctgggttaggtatcacaacccttcatctgtggcacagcctcctccttttaaaccctccaccctttagaatttacaatcagagataaaagtgtttacctcttgttctgcagatctgcatggaacttggtccttttaggactatgaatctggttaatgaaaaagtaatttcaatttagaagcttcaaaagcctagatgaacttctggaaagttattattcaagatttctttattacacttgagagcatg

SEQ ID NO: 183447 - DNA, 631 bp, Homo sapiens
tattgcatagtttggcttgggctagggcagtccagtctaaaactgtgtttctcagaggaaaagacccagctcacttgtatcagaatcactgggaaagctattaaaaggcttattgggctctgtcccacacctactgaattagactctggaggtgcttccagaggggctgatattgtaaacaaggtctccagaggtttctgatggactgtaattttgagaaccacaggcttgaaagaaatttgctcctgaccacacaacatttatttagaygtctgaagtttcttaaacatacatcactctcacatattcgttaatttccccagggtaggcacatatttctcaggtcaactcactcttttggagcagagaagagacaatgctgccctgggttaggtatcacaacccttcatctgtggcacagcctcctccttttaaaccctccaccctttagaatttacaatcagagataaaagtgtttacctcttgttctgcagatctgcatggaacttggtccttttaggactatgaatctggttaatgaaaaagtaatttcaatttagaagcttcaaaagcctagatgaacttctggaaagttattattcaagatttctttattacacttgagagcatg

SEQ ID NO: 183448 - DNA, 631 bp, Homo sapiens
tattgcatagtttggcttgggctagggcagtccagtctaaaactgtgtttctcagaggaaaagacccagctcacttgtatcagaatcactgggaaagctattaaaaggcttattgggctctgtcccacacctactgaattagactctggaggtgcttccagaggggctgatattgtaaacaaggtctccagaggtttctgatggactgtaattttgagaaccacaggcttgaaagaaatttgctcctgaccacacaacatttatttagacgtctgaagtttcttaaacatacatcactctcacatattcgttaatttccccagggtaggcacatatttctcaggtcaactcactcttttggagcagagaagagacaatgctgccctgggttaggtatcacaacccttcatctgtggcacagcctcctccttttaaaccctccaccctttagaatttacaatcagagataaaagtgtttacctcttgttctgcagatctgcatggaacttggtccttttaggactatgaatctggttaatgaaaaagtaatttcaatttagaagcttcaaaagcctagatgaacttctggaaarttattattcaagatttctttattacacttgagagcatg

SEQ ID NO: 183449 - DNA, 419 bp, Homo sapiens
attttatctctgtataccatttaaattatttgtaacatcttactcattccttcattaatgaataaataaaatttttgacgtatgcttgtcttacatatatgtgtgtkataattttatttttttgtaatttattttttaacgaaaagatcacactctattcttatatggcaattcctaaggttactgaaaagagagggacattttaagatcccattatttcccaattcatttgagtcactttccttggttgaggagactgacccttgtttttttctatatcttatggatcaattgttaatttaaaagaagctggattgaaaacactgagttgtagaaatccttagtcctggacccaggtggatttctacaagttataaaactcagtaaagccatgtaacctcttggcctcacagttcctc

SEQ ID NO: 183450 - DNA, 600 bp, Homo sapiens
agacaggctcctgtgcagaaaggggtgagtacccagtggaaccccaccttcaggccagggatggcctgaggcctggaggccaggctgtcagttctgtggaatggagtgagaacttatggtgatatttccaggcctgcccatggctgcctatggatcaatcagcacacacttactcccctctgaagcccataaaaaccctagactcagccagactcaggcagacaatgggacaacctccctgcagagagaagctacccactggggggggtctcctctctgctgagaaatggacacttcactgagcygacctgcctgcagggaggagctacccactttgtgtctcttctgggctgttttgtcacttaataaaacaccccttcgccttcctcaccttccatttgtctgtgtacctcattcttcctggacacgggacaagaactcaggacctgccaaatggtagagttgaaagagctgtaacacaaacagggctgaaacatgccccttgcttgccatgctgcgagtgatgagaaggatagaagagaaaaatacagccctttggggagcccagacttaagagctccctaggccagggcagttaca

SEQ ID NO: 183451 - DNA, 575 bp, Homo sapiens
cacacttactcccctctgaagcccataaaaaccctagactcagccagactcaggcagacaatgggacaacctccctgcagagagaagctacccactggggggggtctcctctctgctgagaaatggacacttcactgagccgacctgcctgcagggaggagctacccactttgtgtctcttctgggctgttttgtcacttaataaaacaccccttcgccttcctcaccttccatttgtctgtgtacctcattcttcctggacacgggacaagaactcaggacctgccaaatggtagagttgaaagagctgtaacacaaacagggctgaaacatgccccttgyttgccatgctgcgagtgatgagaaggatagaagagaaaaatacagccctttggggagcccagacttaagagctccctaggccagggcagttacaccctctttggggctttgcagttcctgccatctccaagattctgggtgccactgcattccctggagccaatgtggaagctgctttttgtacacctggtccagccgcagcctcacagggaactggtgcccaggttggcacc

SEQ ID NO: 183452 - DNA, 558 bp, Homo sapiens
tcttattagcataatttcccccagtgtaatatatagtaaggaattataccataattggataagagggatgactgctgaaattgtgtattatgctaagtatggagtattaaaacaaaatgtaaaataaactttaagtgtaaaactagtcaagtttaaagatgaaatcttattctggggctgaggatttaattgacgtggttgactagattagagacaaagaggtaatccaccaagttgtggggagatgatagagcattgaagattcagcccatgtggttggaggattggttacccacacagtattgagcgaataattaaatatatggaggataatgggatccasgctcctcactgtgggagaagaagttacaaatatggaaagggagagggcaagaattaaccctgggttggaatttttggtatcagtggagactcatgagttgttttctttgatatagttaaatgtagataccgatatagttaaaatacccattatatttgtctgcttgggctaccataacaaaataacacgggctgggtggcctaaacaacataaat

SEQ ID NO: 183453 - DNA, 563 bp, Homo sapiens
agtagcggggaaatgattcaaattatctcccaccaggtccctcccaccacatgtgggaattatgggagtgcaattcaagatgagatttgggttgggacacagagccaaactatatcatgctccccctcacttcctcttccctgggcctgactgcagaacttccactcttcatctacaattcagtccaagcagcacttcctctctcaacctaggcagaactgtccctctcaccctgctattcctatcataacttcacatccttttctgactgtgcatcatattcttaggttacatcctatctcctctactgtctcgagctccttgaaaggaagatctggyggcaatattggtttttgtatcccagtgccagccatatagtaagttctcctaaaatgtgtgttgaatgaatagttgattaggtctgtaaagaaagaattggattataaacaatattctcctacgataatagctgatgattccctaccaataagttttattaatatgcattttgtagactgtctccatcccttccatttgtgatgctgccataggtttcagggaat

SEQ ID NO: 183454 - DNA, 437 bp, Homo sapiens
agatagaatcctagtgctgattgccaaggaatgctctttagagaataaagtgcctaatatgagacttgaagtattaaagactaaaataaaagtcagaaatggacattacttaatatcttggttttcgcatctttgtacttagagtttctccattgagaaagagattttcaaggatgatcaakttccaccaagtattcttcgtgataatctggaatttatttaatctggaatttagttaattgcagaaaaatccaaatttgtggcaacatttgtcagcatgaaaaaacagtcatttctttttcgtgaaatataaactaattcatgtatccatttaattaacaactactttctgaatactaattagaactgggcattgtgttgcctgctagggactcaagagggagccagactgtctcctgccctttcagagtttagta

SEQ ID NO: 183455 - DNA, 502 bp, Homo sapiens
gaaacctgtggctttccgaggggagggtaatatgagtggtcttcccaagtaaagacaggtggagacactatctgtagagaatctaaaacagtgacaaaaaataaaagaagtcattgttccttttattatcaccatgtgctggcaatttttaacaatggtagtgacaatgcactcttccctcccacctttaaatactactgaagatacctacaatgttattaatatctccctttggtatttggacaaccctgtttagcgtttcccaaagttggggctcacaatatcttgtatcaccatttaggagtagcaggaaggaggattttagagtaacttttcctaaaataaaccttaagactctctccactagtgttctctcccttacagagagaggcagagagctctctcccttagaaaagcaagattgagaagctagtcatgatgtgactctcactttttgctrgggctggggtggggatcaggccagcacataatttgcctcatt

SEQ ID NO: 183456 - DNA, 583 bp, Homo sapiens
attgtccatatcattatcagcattttggtcaaagccattcaacaattctctagggagttccaaactttcacacatttttctatcttcttctgagccctccaatctgttccaaactctgcctgctacccagttccaaaatggctcccacatttttgggtatcttttcagcagtgccccactctcctgtaccaatttactgtatgagtccgttttcatgctgctgataaagacatacccaagactgggcaatttacaaaaagaaagaggtttattggatttacagttccacgtggctgggragacctcacaatcatggcagaaggtgaaaggcacatctcacatggcagcagacaaaaaagagagcttgtgtagggaaattcccctttttaaaaccatcagatctcatgagacttattcactatcttgagaacaggacaggaaagaccttcccccacgattcaattacctgttacggggtccttcctacaacatgtaggaattcaagatgagatttgggtgaggacacagccaaaccatatcatgaaccatgatataaggtgttaataatagaggaaattggatg

SEQ ID NO: 183457 - DNA, 583 bp, Homo sapiens
attgtccatatcattatcagcattttggtcaaagccattcaacaattctctagggagttccaaactttcacacatttttctatcttcttctgagccctccaatctgttccaaactctgcctgctacccagttccaaaatggctcccacatttttgggtatcttttcagcagtgccccactctcctgtaccaatttactgtatgagtccgttttcatgctgctgataaagacatacccaagactgggcaatttacaaaaagaaagaggtttattggatttacagttccacgtggctgggaagacctcacaatcatggcagaaggtgaaaggcacatctcacatggcagcagacaaaaaagagagcttgtgtagggaaattcccctttttaaaaccatcagatctcatgagacttattcactatcttgagaacaggacaggaaagaccttcccccaygattcaattacctgttacggggtccttcctacaacatgtaggaattcaagatgagatttgggtgaggacacagccaaaccatatcatgaaccatgatataaggtgttaataatagaggaaattggatg

SEQ ID NO: 183458 - DNA, 635 bp, Homo sapiens
ccaaattactgtcagacactgctttggtttgaatgtctgatccctccacaagttatgttgaaatttaattgccaatataatggtattgacaggtaggacctttatttggtgttaggccatgagggctccaccttcatgggagggtttaacatcttaataaaaggaattttgccagagggctttctctcttggctcttctgcccttctgctatgtgaggaacagtgttttttcttccagaagatgcagggtttaaggtaccatcttaggagtagagaccaggccctcaacagatgtaaaacctgctggcactttgatartggacttcctcacctccacaactgtgaaccaataaatttctgtttattataaatcgccaagtctgtagtatgctgttccagcatcaccgactaagatggacattaaaccacagatccaggaagctcagagaacaacaagcaggataaatgccaaaagacctacacataaacataccatattcaaatggcagaaaatcaaagatagagaaaaaacttgaaagaagccagaggtggggaaaaatacctacttattgaggagcaaagataagaattacatcctatacaagcaagaaataaatcatgcaaacaagaaaaca

SEQ ID NO: 183459 - DNA, 635 bp, Homo sapiens
ccaaattactgtcagacactgctttggtttgaatgtctgatccctccacaagttatgttgaaatttaattgccaatataatggtattgacaggtaggacctttatttggtgttaggccatgagggctccaccttcatgggagggtttaacatcttaataaaaggaattttgccagagggctttctctcttggctcttctgcccttctgctatgtgaggaacagtgttttttcttccagaagatgcagggtttaaggtaccatcttaggagtagagaccaggccctcaacagatgtaaaacctgctggcactttgataatggacttcctcacctccacaactgtgaaccaataaatttctgtttattataaatygccaagtctgtagtatgctgttccagcatcaccgactaagatggacattaaaccacagatccaggaagctcagagaacaacaagcaggataaatgccaaaagacctacacataaacataccatattcaaatggcagaaaatcaaagatagagaaaaaacttgaaagaagccagaggtggggaaaaatacctacttattgaggagcaaagataagaattacatcctatacaagcaagaaataaatcatgcaaacaagaaaaca

SEQ ID NO: 183460 - DNA, 570 bp, Homo sapiens
ttctctgtttctggaaacatgttggccaaaaaattctgtagatatcaaagggaagaatactgctcaggtgctcagaatactgctgaggtgcaygtacacccaattctaaaattctgtggcagaaataagatgggctcagctgaaggtttttgctgtaggttgtttctttatcattatggaggtctttttatcttgaaatttttgcagttttcattttgaatccaagtggaggccattcctttattttttgttaagcttcatcttgctgtctgggtgggtctctggtaatgagcttcactattctggagaaattttccctgaagttccatgctcatttgtcagggttgctgcagagggaattctcagcctggtgggaggtaagagaacaaaaggtgatgagttagcattgtgccaggtacccgatacacattagtttgtttaaacaaccctgtatgttatgtaatatcatcttcattttccatgtgaaaaaactgcagctaggtgatgttgtaaaactttcacaaggccatgcagcttctaaatagtgcagtcgagatgcacagctgggcc

SEQ ID NO: 183461 - DNA, 570 bp, Homo sapiens
ttctctgtttctggaaacatgttggccaaaaaattctgtagatatcaaagggaagaatactgctcaggtgctcagaatactgctgaggtgcatrtacacccaattctaaaattctgtggcagaaataagatgggctcagctgaaggtttttgctgtaggttgtttctttatcattatggaggtctttttatcttgaaatttttgcagttttcattttgaatccaagtggaggccattcctttattttttgttaagcttcatcttgctgtctgggtgggtctctggtaatgagcttcactattctggagaaattttccctgaagttccatgctcatttgtcagggttgctgcagagggaattctcagcctggtgggaggtaagagaacaaaaggtgatgagttagcattgtgccaggtacccgatacacattagtttgtttaaacaaccctgtatgttatgtaatatcatcttcattttccatgtgaaaaaactgcagctaggtgatgttgtaaaactttcacaaggccatgcagcttctaaatagtgcagtcgagatgcacagctgggcc

SEQ ID NO: 183462 - DNA, 597 bp, Homo sapiens
taaggtggaaggtctgtgatcctagattatcactgtaatctggaagtctctgtttgctttgcattgagaaagtgtgtttgtattccctactaaaatactttttaaacttttcacttaaatgtcttttctcaaaacactgatgctcacacacctcattcctagagattctgatatagtagatttagatgaggttgtagaactctaagttggaaacagctcaccaggtaattttgattttcagccaagtttgggaagcacaaaacaatagtgtccttttgctggaccatgccatacagcatgctgtgtaaacaaaccctagctcttacttgctttcttactattttcctatagtgctgagcascagacaattccagttatttgaagggtctggttagctgaatttctgtgcattaacatggtactgtaatttccactggattttcttgcactgggagtgagagaatttagcatggagcgtggtctttgcagacttcagcctccactgtctccaacttcagtacatcaagcctgtagcctagtgagatgacatccctgcctcaatcttttcctcactcttcaaaaaatcttaccggcacc

SEQ ID NO: 183463 - DNA, 597 bp, Homo sapiens
taaggtggaaggtctgtgatcctagattatcactgtaatctggaagtctctgtttgctttgcattgagaaagtgtgtttgtattccctactaaaatactttttaaacttttcacttaaatgtcttttctcaaaacactgatgctcacacacctcattcctagagattctgatatagtagatttagatgaggttgtagaactctaagttggaaacagctcaccaggtaattttgattttcagccaagtttgggaagcacaaaacaatagtgtccttttgctggaccatgccatacagcatgctgtgtaaacaaaccctagctcttacttgctttcttactattttcctatagtgctgagcagcagacaattccagttatttgaagggtctggttagctgaatttctgtgcattaacatggtactgtaatttccactggattttcttgcactgggagtgagagaatttagcatggagcgtggtctttgcagacttcagcctccactgtctccaacttcagtacatcawgcctgtagcctagtgagatgacatccctgcctcaatcttttcctcactcttcaaaaaatcttaccggcacc

SEQ ID NO: 183464 - DNA, 603 bp, Homo sapiens
caacagcttactgacagcattcaaaggccaaagatggaacagtgtatggaacagaataaatgaaatagcattggaattataacaccaaatataaaataggtacctataggtttagagtctaaataaatgattgaataaataataaatgggaaagaaaagataaatctgtgtggaagaattcmaaataatttgtttagctattctgccctcaaggaggtggaacataacgctgcattctttagatgtgggctatgtttggtgaattgcttctaaatagtacagctattataaaaaacagtgattatacattggagaaagctggcaaaccctaccttagccaggtgatcaacattaacatcaccagtgataagtcatgttgataacatgcatccttagtatgatatgttgaggatgacacttgatctatgtgctttctcccaaaaacctataatcccaatctaattgtgagaaaaacacctgtcaaatcccaaatgagggacattctatataacacataatcattactcctctaaatggtgaaggtcatcatatacatggaaagcctgaggaggaacttaaagagatgtaatgactaaatgtagt

SEQ ID NO: 183465 - DNA, 552 bp, Homo sapiens
ggtgtcccaggaggctgacccctgtagactgtatcattggattcctctgatggctgtcttcctcttgggcaatgggaggtagagacagagaagcagagacagagggcaagggaggagaaagaaattggagtatttctcctctgctatctctctcctgttgagaagactctcttacaagattccagctctcactggactctggtaacattatttccttcgcttgcctgtgcagacctaagggcactaattcttagagcgatgtggctcttaaagtgttgtcctcagaccagcagcatcagcatcacctggaaacttcttagaaatgcaaattcaggagacccacctcatatccgttggatgagaaatttaaaacatgagatctgataatctgtgtttycataagcacttcaggtgataaatttgagaacaactgccctagaggaaattgctgggcctgaccccaaaactctctgattcagtaggctaggaggtggacccaaccatttgcattttgaacccttcctagatgaagacttggctcttcccaaaact

SEQ ID NO: 183466 - DNA, 557 bp, Homo sapiens
tgattggtgtcccaggaggctgacccctgtagactgtatcattggattcctctgatggctgtcttcctcttgggcaatgggaggtagagacagagaagcagagacagagggcaagggaggagaaagaaattggagtatttctcctctgctatctctctcctgttgagaagactctcttacaagattccagctctcactggactctggtaacattatttccttcgcttgcctgtgcagacctaagggcactaattcttagagcgatgtggctcttaaagtgttgtcctcagaccagcagcatcagcatcacctggaaacttcttagaaatgcaaattcaggagacccacctcatatccgttggatgagaaatttaaaacatgagatctgataatctgtgtttccataagcacttcaggtgataaatttgagaacaactgccctagaggaaattgctgggcctgaccccaaaactstctgattcagtaggctaggaggtggacccaaccatttgcattttgaacccttcctagatgaagacttggctcttcccaaaact

SEQ ID NO: 183467 - DNA, 552 bp, Homo sapiens
tttaaagagagataaatctctcatttctagcataattctgctgcaatcattccctagagaagatgtgctggaagacctctcagctccttttagcttatattctattatctggcaaactgcaagagctgtctgggcttcttgtgcattagaacaccagagctaccctgttgatcaaatgggacttttccaaaaaggcaacacgaaatatgaatgtttcttattgtgttgacwttattggaaaaaatacaggaatccataaaattgtccctcggtattttcttttgaagatacttctcaaggggcttgtaagatgtttgactaattctgtgttacatttgatattatcttactgtgaattatttattcactctaagtggtaagaagtattgttgtgcttttaaagtaccacaggatgagaatatggggtttgtgtgaaaacagagactgacttcttagaaaagaagctgtccaaaggagaaaaaaattgcttgatgactttttaaacttatctatagtcctacttcactccagaaagaacttaaggctgaattc

SEQ ID NO: 183468 - DNA, 359 bp, Homo sapiens
gaattcttaggtgccagaaacaaagtggggactgaaagttttggtggctaatggcattaatattttctacagtgccatgattaataaatttgaacttttattgattgttactagagtgaccttaaaatcattaactcaaaaccaaaaattatctaaagtcttctcaagaaataatttatgcaccatgtagacttttttttttttaaactgtttttggattatggactgcttgaataatctgatgagaaagaaattaagctctctcctcaaaaagttttcatatgcagaaattttgcatgtgttttaactgtggcattwtgactgccctaaactcccccatgatcatggatatgtctgaa

SEQ ID NO: 183469 - DNA, 589 bp, Homo sapiens
atcaattaactagtgaaaatagtctttctgatgtttctgctttttagaatataaaatgacaaatctactacatttgcttctgtaaaacaaactttgtctttaaatataacatgtggtcaggaaagtatacaaataaaatgtatggctcaatgaatttttacsaggtacattttgataatcactagaatgcatcttcctgacctctaataacaaggagcctaattgaccactgtgctctacaatttattattatacctgagctgaggccactctggccttgggctgctttccatcaatgactgtgttactgaggcaggcccattacggggagacacaggtcttccttgatggccaacttagactggaggactccccaacacccttgctgaatcttccccagacttcatggtgctctaggatactttcacccaacatatcttcccttcctcttttactcagggtcacacttgcatgtgaccactctctcagtctttccaactccttccctatgttctcacacaagcattttcctaataaaatccttgaagatttaattctgtgttggtgtctccttcttagagaactcaaa

SEQ ID NO: 183470 - DNA, 589 bp, Homo sapiens
atcaattaactagtgaaaatagtctttctgatgtttctgctttttagaatataaaatgacaaatctactacatttgcttctgtaaaacaaactttgtctttaaatataacatgtggtcaggaaagtatacaaataaaatgtatggctcaatgaatttttacgaggtacattttgataatcactagaatgcatcttcctgacctctaataacaaggagcctaattgaccactgtgctctacaatttattattatacctgrgctgaggccactctggccttgggctgctttccatcaatgactgtgttactgaggcaggcccattacggggagacacaggtcttccttgatggccaacttagactggaggactccccaacacccttgctgaatcttccccagacttcatggtgctctaggatactttcacccaacatatcttcccttcctcttttactcagggtcacacttgcatgtgaccactctctcagtctttccaactccttccctatgttctcacacaagcattttcctaataaaatccttgaagatttaattctgtgttggtgtctccttcttagagaactcaaa

SEQ ID NO: 183471 - DNA, 530 bp, Homo sapiens
tgtacaactattatatatccaattatttttttaaatattgaagaaatgaaagaccttccaagaccagattcttcaatgagaattcatctctttgtcactaattctatcactcaatttcttcataacactataatagcacccacacaatgtatataaattyaagtcctaacattgttccttgcatttattaggcattcaataagtatttatggagttcaaggatattccttcattgcaaataacataatgtgtaatgtactgagccattcttctattcaactaaatattaatttagtttcttttactacagtttataagtcagattggaaataatatgacaaaaataatactgccataaaagtttgaatcatatatttttatcaaaatactaaacttattgatgttatgaatagtaataataatatcacaataatagctaggattagggagttaacatttgccaggaacatatattatacaacatataaagtaccacatttatgacttaccattacaacataaattaaatt

SEQ ID NO: 183472 - DNA, 587 bp, Homo sapiens
gaattcccttgtggcactgtatttcagagtaaaatagcacaaatgcattttaaattcaattgtttaaaatttatacttcatgacagtgctgaaattattctgttgttgtcagcatttgtggctatccttttatgctgaaccagcacctatgaaggcattatacagtggcctttgtttaaaattttatatatgatgatgattttatattctagatatacactaaaggaacataatgaggccaacatatttctgccccctagaatataaagttgcagtatcaacttataagcaaamccacactataaggataaaaaaagatgcaaaaaaagttattgaaagaagttgtttataaaaaaaaactctttagacacataaaaccaaagagtagccaatggtagtacctgcttcaaaatcagtttatgttcatatgcccatcccttgctatatcattatttccttgcttgcatcatcatcaactgtcatatacttgtaacaacccctagaggttaggatatcatgtaaatttaattttctttgtatccttacagcataattatacttaaagaaatttaatagatatgttatag

SEQ ID NO: 183473 - DNA, 587 bp, Homo sapiens
gaattcccttgtggcactgtatttcagagtaaaatagcacaaatgcattttaaattcaattgtttaaaatttatacttcatgacagtgctgaaattattctgttgttgtcagcatttgtggctatccttttatgctgaaccagcacctatgaaggcattatacagtggcctttgtttaaaattttatatatgatgatgattttatattctagatatacactaaaggaacataatgaggccaacatatttctgccccctagaatataaagttgcagtatcaacttataagcaaacccacacwataaggataaaaaaagatgcaaaaaaagttattgaaagaagttgtttataaaaaaaaactctttagacacataaaaccaaagagtagccaatggtagtacctgcttcaaaatcagtttatgttcatatgcccatcccttgctatatcattatttccttgcttgcatcatcatcaactgtcatatacttgtaacaacccctagaggttaggatatcatgtaaatttaattttctttgtatccttacagcataattatacttaaagaaatttaatagatatgttatag

SEQ ID NO: 183474 - DNA, 485 bp, Homo sapiens
aaacaataatcgtgagggactgaactcactgctgtcctgytatagtagaaaggagaactgaacaaaactcaggggacacccgcctacagaaggcacatacaaaccagcactagacaaaggaaaatcgccaatcctagcagtctgaacttcagttcccactgacctcaccaccaagggctaaaatgctctgagtctttaaatgaagttgaaaggcagtctgggccataaggactacaactcttaggcaagtcctagtgctgaactgggcccagaaacagtgaactggagggcacaggacctgctgggacagcagagggggtgactaagggagtactggcattgcctctcctctaaccccagactgcacaaatcgtggttccaaaagagacccctaacttccacctgagaagaggtgtgggaaaagtggagaggactttgtcttggcaccagtcagaatgatgaggccctccttccaggtcttagct

SEQ ID NO: 183475 - DNA, 476 bp, Homo sapiens
ggctagtggtaatgaatttcctgtttttgcttgtctgaacatagctatcataatactgaagagggaaaggtgaaagctttttttttttttttttttaaagaactggaacaacacagagatgcccacttgcaccactcttgtttaacatagtactgaaagtcttcagactgagcaattaggcaaaagcaagaaattaaatggatctaaattggaaagaagggagtcaaattgtacctgtttgcaggttacataatmttatatgtagaaaagcataaagattctatcaagaaactgttagtactgacaaatgaattcagtaaagttacagaatgcctaatcaacacacaaaaatcagtagccttttcatacatgaacaatgattaggagaaaaggaaatcaagaaggtaataccatttacagtagctacaaataattaaaatacttaggaataaatttaaccaaggagatgaaagacc

SEQ ID NO: 183476 - DNA, 586 bp, Homo sapiens
aagcatattacattacaactagataggaggaataagttctaatgttctatactactttaagaggactatagttaacaataatacattatatagctcaaatcgctggaaagataatttgtgttaatgttcctaacacaaacagattataaatgctgattgccctatctgatcattatgcactgyatgtactgaaacatcattatgaacaccataaatatgtaccattatcgtgtcaatttaaaaataaaatccaatttaaataaataaatgaaaatattttaaaggaaaagaacaaaacagacactagaagaaacaaaaatctgaatagtttatctcttttaaagaaattggatgaaagttaaaaccttcaggccaaaaataaattccatgaccaactggctatctgaatactacttgataatggagaacagaaagaatttttaaacagaacccaaaaaagcactaaccatagggaaaagatggatatactggattatattaaaattaagaatgtctcattatagacatacaaattggcatgaaagtccaaccacagagtgacatttactaaacatatcaccaacaa

SEQ ID NO: 183477 - DNA, 601 bp, Homo sapiens
atattttcagatgtatgcttttggtactgtctcatagcctctcagtgaataaatgtttacagaataaagcaagcataagagttcctcaagtatcttatatattagacatcaaggctgcttaactcattatcacaaagaaaccattagtcttatctgcagttgcaaatacagcaacaaaacaacctagaaaaatcttaacaatatttagtgttggaggctgggtgcastggctcatgcctgtaatcccaggactttggtaggccaaggtggacggatcacttgaggtcaggagtttgagaccagcctggccaacatgaaaccccatctctcataaaaatacaaaaattagccgggtgcggtggcgagtgcctgtagtcccagctactcaggaggctgaggcatgagaatcgcttgaacccagagagtggaggttgcagtgagccaagattgtgccattgcactccagtctgggggacagagctagactttgtctcaaaacaaacaaaaaaaaagttagtgtcagtatttgaagaccatagtcactagttacttatccaattgtgtttataaaggtgataacctatgtgcaggcaggctgtac

SEQ ID NO: 183478 - DNA, 601 bp, Homo sapiens
atattttcagatgtatgcttttggtactgtctcatagcctctcagtgaataaatgtttacagaataaagcaagcataagagttcctcaagtatcttatatattagacatcaaggctgcttaactcattatcacaaagaaaccattagtcttatctgcagttgcaaatacagcaacaaaacaacctagaaaaatcttaacaatatttagtgttggaggctgggtgcagtggctcatgcctgtaatcccaggactttggtaggccaaggtggacggatcacttgaggtcaggagtttgagaccagcytggccaacatgaaaccccatctctcataaaaatacaaaaattagccgggtgcggtggcgagtgcctgtagtcccagctactcaggaggctgaggcatgagaatcgcttgaacccagagagtggaggttgcagtgagccaagattgtgccattgcactccagtctgggggacagagctagactttgtctcaaaacaaacaaaaaaaaagttagtgtcagtatttgaagaccatagtcactagttacttatccaattgtgtttataaaggtgataacctatgtgcaggcaggctgtac

SEQ ID NO: 183479 - DNA, 514 bp, Homo sapiens
agaggcatccttgatcttagaacagaagacaatgatttaattccgttggttttaagaccaaaatggccttccttaataggaattcccccaagatcttttgctgtgaacttgtatttaacttcagactatagagaaggaataaaaactgattgtgctcaccttgtctgaatttgaaaatctgtaatacttaggtggctaagcaaagacataatcacctaacttgaaacatttaggataactctgcaacaagtaatatatttattttaaataaaaataaaaggatcattttccatgcttaatagactttaggtataaatttttatatatttatagttttgaagaattctttattaaactttccctatgtttctgtaattattatgrttggaatttattatttgtgtcaaatacagtacatatatacctaatataaacatgtatttgtacatatataattcaaaaccataaaaatttgattttaataatatagataaacaagaaaaagaataaaaaa

SEQ ID NO: 183480 - DNA, 515 bp, Homo sapiens
agagactataatgagcaatgatagaccaataaatttgaaaactttgaagaaatgaataaatttcttatagcttatcttaccaagattggatcatgaagaaatagaaaacctgggcagaccaataatgagaaacaagattgaatcagtaaaacaaagactcctatcaaaaaaagttcaggacctgaytgcttcattgctaaattctagcaaatatttaaaaatgaactcataccaattattatcaaactattccaaaaaattgaagtagagggcattcttccaaactcattctatgaggccagcattaccctgataacaaaaccagacaaagataaaagtataaaataaaactacaggccaatatccctgatggatatagatgcaaaaacccataatacagtactagcaaactgaatccaacaacatattataaggtcattgaccatgatttagtgaaattcatcccagtaatgcaagtacagttcaaaccacaaaaattaataaatgtgttacat

SEQ ID NO: 183481 - DNA, 515 bp, Homo sapiens
agagactataatgagcaatgatagaccaataaatttgaaaactttgaagaaatgaataaatttcttatagcttatcttaccaagattggatcatgaagaaatagaaaacctgggcagaccaataatgagaaacaagattgaatcagtaaaacaaagactcctatcaaaaaaagttcaggacctgatwgcttcattgctaaattctagcaaatatttaaaaatgaactcataccaattattatcaaactattccaaaaaattgaagtagagggcattcttccaaactcattctatgaggccagcattaccctgataacaaaaccagacaaagataaaagtataaaataaaactacaggccaatatccctgatggatatagatgcaaaaacccataatacagtactagcaaactgaatccaacaacatattataaggtcattgaccatgatttagtgaaattcatcccagtaatgcaagtacagttcaaaccacaaaaattaataaatgtgttacat

SEQ ID NO: 183482 - DNA, 515 bp, Homo sapiens
agagactataatgagcaatgatagaccaataaatttgaaaactttgaagaaatgaataaatttcttatagcttatcttaccaagattggatcatgaagaaatagaaaacctgggcagaccaataatgagaaacaagattgaatcagtaaaacaaagactcctatcaaaaaaagttcaggacctgattgcttcattgctaaattctagcaaatatttaaaaatgaactcataccaattaytatcaaactattccaaaaaattgaagtagagggcattcttccaaactcattctatgaggccagcattaccctgataacaaaaccagacaaagataaaagtataaaataaaactacaggccaatatccctgatggatatagatgcaaaaacccataatacagtactagcaaactgaatccaacaacatattataaggtcattgaccatgatttagtgaaattcatcccagtaatgcaagtacagttcaaaccacaaaaattaataaatgtgttacat

SEQ ID NO: 183483 - DNA, 558 bp, Homo sapiens
tagaaacaacacctatcaagtattatgcttattacctgggtggtgaaattatctgtaccccaaacctctgtgacacacaatttacctatgtaacaaacctgtgcatgtacctctagtataacctaaaataaaagttaagaaaaatgataggaaaacaataatttattgtacattttaaaataaaacagtgtaattggaaagtttgtgacacaaagaaatgataaatccgtgaggtgatggatgtccttcttaccctgatgtcattattatacaatgtatgcctgtatcaaaatatctatgtaccccataaataagcacacttactatgtacccataaacattaaaaggtaaaaattggccaggtgcggtggctcaaactgtaatcccagcactttgggaggctgaggtgagtgaattgcttgagtccaggagttggagaccagcctggccaacackgcaaaaccctgtcttaagaaaaatacaaaaagctagccaggtgtgatggtgtgtagacccagctactagggaggctgaggtgggagaatcacctgagcacag

SEQ ID NO: 183484 - DNA, 564 bp, Homo sapiens
tgatttttaattaagttcagcagttggttgtaggttaccaagtcttatgttatttttttaagcatgaatttgtaagcaaagaaaatgtagctgtttcttatgtcttctctccaccagtatactttgatctttaaatattaagagtctagtccaatgcctaaaaatctgaaggtaataraaaatagatgtatgtgatgttatttctctgacatttgatatcaaaacatcacctactttcttattttttgatagtaacacagctgaactatatgaatatactgtcctttttgtgtcctgtgtctgacattatgagagactcttggttttcatatttgagtgagagagtgaataacttggaaaaatagcttaacagtagaaaataagagaggaaggattgtccttcaaaaactttaaattatatttcttattaaataaatgttatgttaaatgttgtataaggtcactgcgaaaataaaacatgttttattgggatgatgtgctactgttgtggatatttactattttaaaagtcatctgggtaaaatcttattatttatttttctt

SEQ ID NO: 183485 - DNA, 529 bp, Homo sapiens
gaattcctttgcataatttgtgatgaaagtagtttaaacttcagaatgatttactgcaggtctcagggaaccagcatgaagaactacagaacgtcagaaaacacatccattcctgtttcaccaacatttcctgttttctgctacctcatcctggcttaaaagtagctaccaatccaaactttgatggaaaattgaaaggtttgtgtcttttaatgaatatgtttgcatcacttagtctgattataaaaatgtcattttatctattgggcttatggctgatagtttagtttatccactgataggaggctgatgattagaaattgtcaggagaatagggcatcctgggctggtgctcctccttggtgaactgtgggattctatgggcgctggatgtatacactgcctgcaaaaataggcyggatcctgagttcacccagaaggcagtaaccctcaccttcttatctctgtgcactgagaagtgctccttaatatttttaggcttaattttccttatctacatgaaaaagga

SEQ ID NO: 183486 - DNA, 437 bp, Homo sapiens
tcaaggaatttgaatgaatagaaaggagaaagtaagtttgtaggaggataggataggtttgtgcgatagatctattttcagaaacattgaattttgattgtcataagcataaaaaggttggaaaatttgttttgtaatgacttaatggcaatagtaattcctgtcaattagttattagattttmaggaaacaccttgtgtcaagggttaaattcagcttattgtatttagtagaagcacaaaaacaagttgtataatctcagaaagttttagagcctagaaagttctacgtttagctgtagaactttcagattagaaaatttgacctttaatgttcttggccgcataccagtcacgcacttactgtatgttccaaagaaaggaatcctgctgttaacaggaagtctttagttggaatactaaaggcagactgaattc

SEQ ID NO: 183487 - DNA, 458 bp, Homo sapiens
gaattcaccttgagaagacttaaaacatatttttaggatttatgctgaataaggttcaaggaatttgaatgaatagaaaggagaaagtaagtttgtaggaggataggataggtttgtgcgatagatctattttcagaaacattgaattttgattgtcataagcataaaaaggttggaaaatttgttttgtaatgacttaatggcaatagtaattcctgtcaattagttattagattttaaggaaacaccttgtgtcaagggttaaattcagcttattgtatttagtagaagcacaaaaacaagttgtrtaatctcagaaagttttagagcctagaaagttctacgtttagctgtagaactttcagattagaaaatttgacctttaatgttcttggccgcataccagtcacgcacttactgtatgttccaaagaaaggaatcctgctgttaacaggaag

SEQ ID NO: 183488 - DNA, 544 bp, Homo sapiens
gaattcttaaccccccataagggtatctgtaaggtgaaaaatgcatagattcaattatattaaaaaataaaaatttctgttctaaggtggaaatcatgaacaatgataacaaatgaccgatatgcagaagatgcctccaatgtctaaaaccaacaagaaactaatgtctgaataaaagaattttgtaaattaacaagtaaaaataaaatgttattatttttcaatggaaaaatggacaaaggttatgaacaacatgcaattcctagatgcaacccaaatgactgaaatacttatgaggagatgcggaaactcattagtatttaggaaaatgcaaatgaaacacaattatgctagaaagcccagatatttggtcaaatattattttggatgttcctgtgakggtgtttttttgtttgtttgtttgtttgttttgggtaggattagcattaaaatcaatggattttgagtaaaatggattacccttcataatgtagctgggtgggcctcatccaatcagttgaaaaccttaggaaaatggttgatg

SEQ ID NO: 183489 - DNA, 404 bp, Homo sapiens
atcttccatcagctggttatggagaatccccatgkggccaaaggtgcgagcccaaagtataaacttcctttatccagccttatatttggaactgcctccagcccttgtccatcatccccaggcatgctctccaggcctctgagggtgtaagttagccaggtgttacagctcttttacatccctcctccggccttgatgatctttgaccccagctactagcctaggagcatgagggaagacagtcttgaggagggcaagtatcttacaaggtatctgcctcaggtatagcctctgcacattcttttggcaaggggaagctgctatcctccagcaagggattgcacaccacctttgcagcccagagggttcaggagcatctgcggccaaggttctcatttatgtcc

SEQ ID NO: 183490 - DNA, 600 bp, Homo sapiens
agtggtctgtcctcttgaggcattaaaatctcatggagaaacagacctatgacaaatccccaattaaaaaaaaataacttcggcttttaaattaaagtcaagggcaatatgattgacaggacacagtattaaacatattcccacttaccattaaaatagattctgggacaaactctccatattatatgatgaggcctctgacagaggtgagccccaagcacagacatgacagaaacatttctaaccccaacccagagggtcatagaaagacctcagaaaatgcagcacccgagaagagtctggaagaaggagttgaaggttaccaggtgggctgggggtaagggaggagagcggggaaggtgtgaaacagttacagctgagcactggaagcagaaagtgaaaatggaaaaatgagtaaaaggcagggcctaagagtctcttagatcacaataaaaactttaggctttattccgaatctcctaaaaatgtragaagagaagtaaaatggttaaattttgattaaaaagaataattctgatggtagtatgagaaatggataggaagcaggaagcctggtgatagggaagacatttaggaggc

SEQ ID NO: 183491 - DNA, 527 bp, Homo sapiens
atatacccaatgtatattataaatttataatatatctatatattataaacacataaatttataattgtatgcattattgcaaaattattataacttacaaaaaatatgtaagtataatcatgtttataattgtgattgttttctgtgtaatgggcactgttctaagactctatatgggttaagtcytctaaacttcacaatagtcactttgtggcaggcaccattattattcccatcttcagataaggaaactgacacagaatcacatggatagtaaacttgtagagccaagattcaaactcaggcaattcttactctaaagtcataatcattgctgtgtgcttccaagagatttttagaaaaaaaaaatcaaattggttatggggctttagggggagaaatgaaggatttcttctagatggttaactggtgggtagtagagggaaagactttcagaggatgatgagcttgttttggacaagctgactctggtacacccactgaacacccaaggagggatgatgtct

SEQ ID NO: 183492 - DNA, 587 bp, Homo sapiens
gtaaccaagagcccctgctgagactgactggaagtgagttcaaggaaatctttttaatgttaaaaataagtttaggccgcgtacagtggctcatgcctgtaatcctagcactttgggaggccgaggcaggcagatcacctgaggtcgggagttcaagaccagcctgatcaacatggaraaaccccgtctctactaaaaacacaaaattagccaggcgtggtggcgcatgcctgtaatcccagctacttggaaggctgaggcaggagaatcgcttcaacccaggaggcagaggttgtggtgagccgagatcatgccattgcacttcagcctgggcaacaagagcgaaactccgtctcaaaaaataaataaataaataaataagttcaaatcagaaagcatggaagggtggagtcaaaatccaacaagagcatttgtaacaacatcctcaaaataccccatcttccagattaaggacaccctggaaaggtgacagatatgctcatgtgttcttaggaatctgaactcctacagagaaaagttttcctcagtcaagagtttcttgcttcatttgttcactagcttctctc

SEQ ID NO: 183493 - DNA, 587 bp, Homo sapiens
gtaaccaagagcccctgctgagactgactggaagtgagttcaaggaaatctttttaatgttaaaaataagtttaggccgcgtacagtggctcatgcctgtaatcctagcactttgggaggccgaggcaggcagatcacctgaggtcgggagttcaagaccagcctgatcaacatggagaaaccccgtctctactaaaaacacaaaattagccaggcgtggtggcgcatgcctgtaatcccagctactyggaaggctgaggcaggagaatcgcttcaacccaggaggcagaggttgtggtgagccgagatcatgccattgcacttcagcctgggcaacaagagcgaaactccgtctcaaaaaataaataaataaataaataagttcaaatcagaaagcatggaagggtggagtcaaaatccaacaagagcatttgtaacaacatcctcaaaataccccatcttccagattaaggacaccctggaaaggtgacagatatgctcatgtgttcttaggaatctgaactcctacagagaaaagttttcctcagtcaagagtttcttgcttcatttgttcactagcttctctc

SEQ ID NO: 183494 - DNA, 531 bp, Homo sapiens
tcaaacaagttcagggtacaagacctatattcataaatcatttgtatttctatacactagcaatgcaacattaaaaactaaatttttaaaaaatctcatgtacaataacatcaaaaccagtaacatatttaagtttaacaaaagaaatgcaagatctgtacacaaaaactatgaaacgtcattgaaaaaaatgacaaaatgctgaaataaatggaaagctrgccaatatttatgaattggaagactttatattgttaattgatctaaagatttaagacaattttatcaaaatcccagttgctttattgttttgcaaacactgacaagttgatcctaatattcacatggaactgcaagggacccagaataaccaaaataatcttagaaaaaaatgaacaaaattggaatatctgtaattcctgatttcaaaacttactacaaggctatagtaatcaagacagtgtggtactagcattaggatagagatatagctaattaaacagaattgagaaccaaaaccaaactcactgt

SEQ ID NO: 183495 - DNA, 578 bp, Homo sapiens
cagtggttatggattgggggtgtgggggcatttaaggaggtgggtgtggcaataaaggggtagcaacatgaagagctttgtggtgatgaaatagtactgtacctygaataaggtggttacataaatctacacgtgtgataaattgacacagaattttacacacacatcataccaatatcaattttctggttacgatattgtactaaagttataaaagaagtaaccattgggggaaaccaggtcgaccaggggaaccctgttctagccttgtaacttcttgtgaatctataattatttcaaaataaaagcttaaaataataacaaaaatttacaaaacactgttctgtagaatctttgtaaagtcctttcaagctctataatcattttggtgaaaagaaaaccgatgttccataacatgaaaaatggataaactggacttcaacaaagttaaaatctttgtctccacaaaagatcctgctaagagatacagactgggagatgatatttgcaaaccacgtatccaacaaaggattaatatctaccatatgtaaaaaactatcaaaattcagtaaagaaac

SEQ ID NO: 183496 - DNA, 610 bp, Homo sapiens
ttggttaaatttattcctaagtattttattttttgatgcttttatatgtgggattcttaatttcttttttaggatagctcattattagcatataggaaaacaactgatttttttaatgttgattttgtaccctgcaactttatagaatttgtttattggttctaacagttctttggtggaatcttaaagrctttaagcatcttaatcacttaaagatttaaagagcttttaacatataagattatgttatttgcaaatagagacaatttaatttcttcctttccaatttggatgccttttatttctttttcttgcctaattcctctggctaggacttccaacactatgttgatagaagtgatttctatctagaagtctttctcctgattgtagaaaaaaagctttcaaagtttcactgttgaaccgtacggagttagctataggcttgtcctatatcttacattatgttcaggtacattccttcttatagctaatttattgagaatttttattatgaaaagttgaattttgtcaaatactttatctgcatctatattgatgatcataaggtctattttgtctgatgtaagtctgatgtatgttaatttga

SEQ ID NO: 183497 - DNA, 584 bp, Homo sapiens
gcctatatatttggtaaaaattaaaaagatttctagcatctggtattatyaagggtgtaaaaaaaatgagtattttcatatagtcttggtgagtgtaaattggcctggccttgttgaacagtaaaaattgcacaaaagcgttatgcttatgataaaggaaaatggaaacaacctagatgtcaattaatagagataaataggcagggcatggtggctcacacctgtaatcccagccaaggccgggaggatcacctgaggtcaagtgttcaaaaccaacctggccaatgtgatgaaactccatctctactaaaaatacaaaaattagctgggcatggtggtgggtgtctgtaatcccagctacttgggaggctgaggcacgagaatcgcttgaacctggaaggcggagatttcagtgagccgagatcatgccactgcactccaacctgggtgacagagcaagactctgtctcaaaaaaaaaaaaaaagacaaatagaggagtgatggcagcaagcaagatggcaggataggtgggcccgccattgggagcccccgacagtaacaatattttggctgctatccatgg

SEQ ID NO: 183498 - DNA, 584 bp, Homo sapiens
gcctatatatttggtaaaaattaaaaagatttctagcatctggtattatcaagggtgtaaaaaaaatgagtattttcatatagtcttggtgagtgtaaattggcctggccttgttgaacagtaaaaattgcacaaaagcgttatgcttatgataaaggaaaatggaaacaacctagatgtcaattaatagagataaataggcagggcatggtggctcacacctgtaatcccagccaaggccgggaggatcacctgaggtcaagtgttcaaaaccaacctggccaaygtgatgaaactccatctctactaaaaatacaaaaattagctgggcatggtggtgggtgtctgtaatcccagctacttgggaggctgaggcacgagaatcgcttgaacctggaaggcggagatttcagtgagccgagatcatgccactgcactccaacctgggtgacagagcaagactctgtctcaaaaaaaaaaaaaaagacaaatagaggagtgatggcagcaagcaagatggcaggataggtgggcccgccattgggagcccccgacagtaacaatattttggctgctatccatgg

SEQ ID NO: 183499 - DNA, 584 bp, Homo sapiens
gcctatatatttggtaaaaattaaaaagatttctagcatctggtattatcaagggtgtaaaaaaaatgagtattttcatatagtcttggtgagtgtaaattggcctggccttgttgaacagtaaaaattgcacaaaagcgttatgcttatgataaaggaaaatggaaacaacctagatgtcaattaatagagataaataggcagggcatggtggctcacacctgtaatcccagccaaggccgggaggatcacctgaggtcaagtgttcaaaaccaacctggccaatrtgatgaaactccatctctactaaaaatacaaaaattagctgggcatggtggtgggtgtctgtaatcccagctacttgggaggctgaggcacgagaatcgcttgaacctggaaggcggagatttcagtgagccgagatcatgccactgcactccaacctgggtgacagagcaagactctgtctcaaaaaaaaaaaaaaagacaaatagaggagtgatggcagcaagcaagatggcaggataggtgggcccgccattgggagcccccgacagtaacaatattttggctgctatccatgg

SEQ ID NO: 183500 - DNA, 570 bp, Homo sapiens
gactttgtcagcctccataattgcatgagccaattccttataataaatatctttacctgccccgctgcccttccccacacaattggttctcttttctctggagaacctttactaataaatgtcccaatttatttgtcaagttttatactgactaactatccccactataatgaatgttccataaaggtagagactrtcttgtctgctatttattcccagtgttcagacttgctcttaataactgtgcaaagaattacttggtgaataaaagcatctctctggggaagcagtgatgcttttagatgatctgagtgtggcaccaaaggggacaaatatgtcaccttgagcaaatggcatctacttgggtgaatggtgaagttaatatcatgttttgaacataaaaagtaaacttgaagaaaatttttaagagatctaaggtatagctctatactagaaggggaagttaatgtaaagccagagggaataatctattcatgagttttaaataccgtttatatatatttgacaatgatatatgttgataaaaaatttgagactcttaaagctttg

SEQ ID NO: 183501 - DNA, 244 bp, Homo sapiens
tagtactttgaataacacttcatgacaaaatctcaggacagcttatatgaaagtattgctataacttgatttttcagcatgttgtataaaattgaaatggtagttaatcaaatgttctggttaaattaaagtttattcgtgtygctgtaaatggttctgttgcccacagtcctaaagtgtttaatataaaagcagctacttgggaaaatgtaaatcactgttattttacattactaaggcatct

SEQ ID NO: 183502 - DNA, 511 bp, Homo sapiens
taaaaataaaataaaataaaatatacagggacatccctgtgcctttattccccacctactctccccrcaaaatctttttctgcttttttcagcacacattctagaagaagtatatttaagaattcagataacaagaatatctgacagcctgtgttgcttgtgataggataacaacagatgcagttcctccaccttttgttcccagcattgctgctggatggttggcctctgttgagaaaagccagagctgatttttgctcctcgcttagttgaatgctgccagatgtgtcacacatgagcatctctcgaatcagctgaatctgtcgttcctacagaccaaagcaaagtaaaacatcataactagccaggggagaaagcttcacctcaagtttatgggacaggcagaccagaagacattaaaatgcagcattatgcaaatggaccttcaggaaggctgctacaccaatagcatattaattcacatcaaacccagattgtgtctctgatttct

SEQ ID NO: 183503 - DNA, 520 bp, Homo sapiens
aatgtgtagcttacctggggttagaatctgggagttacagcttagtctgaaggttagccctggtgcttgctatttcagacttcagagagcattgtggggcctgtaagtgtattattaggtacttaagtactagtaaatggcctttgcttggagccagtgttattcacattccatrcaaggaaggatcttgttctgcaaagtgagcaactataaaatgagcagcgctgtagaaagagatgatcacttactttgcaggagttctctccattatcctaagaacttggtaagtcacacccaacctagagccgcagattgcactgaggactctatgtatgtggatgtagtatgcattctcattatgcattctcagcagatgacccagaaagagcagggaggcccaaactgctggagacggcacgtggggcagaatttcctaatggttgtctgggagaatggaagacctgggcttggtgatgtagggctgttttctgtgtggaaggagcaagatgagttgtgtgag

SEQ ID NO: 183504 - DNA, 437 bp, Homo sapiens
aataaaatgctaagttggggtggtttgtcatgcagcaatagataatggaggcaatggatttacacacctatgcacacacattccacctcatgcatatcccagctccttcgaacaccacaatttcacctgagaatgacgcaatttttatatctggatgaagctggggccactgtaagaatttacttaatggaaaaggtaaacacataaatcytaagcagtcactacagttagaagctggaatacatgatttctacagtctaagaccttccacccatttccaggagagcccggccagcttctgcagggcccaagattagtctcactgagttttagaaatgcagtgctttccccaacactttcaggacggttctcttttttcaaatccttggctgcctgaaagtttagacctaaatgtagtgctcaattgtaatgaattc

SEQ ID NO: 183505 - DNA, 502 bp, Homo sapiens
aagttaggtgtctcagtttcctaaagccatccagatcacctggaatgtaaagaacaaaggttccatgtactggaccgagttatcaggtggctataaattctacattcacagtaacttcatagtatattctattcacagtaaaacttgacatcaaaatcatagagaaaaacagttatttagcatagtgtagcwttttaagagtatgagtttaagaactagacgggctggatttgaatccttgttttttttctttaaaagtggtgagaatttaatcaagttattgcacctctctttacctcagtgtcctcatctataaagtagtgaaaataaatctcagagcactgattgaagacttaataaggtgatacacgtaaagtgtttcgaatagtctagtacctagtaaggcataaatgttagccatttttattatcatcatatattagttttctatggctactgtaccaagattgctataaattggaggcttaaaacaataagaata

SEQ ID NO: 183506 - DNA, 502 bp, Homo sapiens
aagttaggtgtctcagtttcctaaagccatccagatcacctggaatgtaaagaacaaaggttccatgtactggaccgagttatcaggtggctataaattctacattcacagtaacttcatagtatattctattcacagtaaaacttgacatcaaaatcatagagaaaaacagttatttagcatagtgtagcattttaagagtatgagtttaagaactagacgggctggatttgaatccttgttttttttctttaaaagtggtgagaatttaatcaagttattgcacctctctttacctcagtgtcctcatctataaagtagtgaaaataaatctcagagcactgattgargacttaataaggtgatacacgtaaagtgtttcgaatagtctagtacctagtaaggcataaatgttagccatttttattatcatcatatattagttttctatggctactgtaccaagattgctataaattggaggcttaaaacaataagaata

SEQ ID NO: 183507 - DNA, 504 bp, Homo sapiens
agaagttaggtgtctcagtttcctaaagccatccagatcacctggaatgtaaagaacaaaggttccatgtactggaccgagttatcaggtggctataaattctacattcacagtaacttcatagtatattctattcacagtaaaacttgacatcaaaatcatagagaaaaacagttatttagcatagtgtagcattttaagagtatgagtttaagaactagacgggctggatttgaatccttgttttttttctttaaaagtggtgagaatttaatcaagttattgcacctctctttacctcagtgtcctcatctataaagtagtgaaaataaatctcagagcactgattgaagacttaataaggtgatacacgtaaagtgtttygaatagtctagtacctagtaaggcataaatgttagccatttttattatcatcatatattagttttctatggctactgtaccaagattgctataaattggaggcttaaaacaataagaata

SEQ ID NO: 183508 - DNA, 354 bp, Homo sapiens
aggaatgggaggaaatcctgtcaaagatttttaggcaggaaactggtaacttttgccttacttttttcttcaattttgctttcacatgtgccgggaaaagtaaggattgtaaattacctcctacttaaacttattacagacttcttagtcttgcagggtggaagaaagtctgtgatacccatcatattgctggagaatcatttcttccttgccactgtgtaaaggtttgtggctggctcagataaggaaacattaacatatcccttttatgttggctacatgaacrgtatgaggtaatgatacaaaagatgtataaaagaaagcccacgtaaggatgagtaagtacacaagcag

SEQ ID NO: 183509 - DNA, 615 bp, Homo sapiens
tctcatagtcctaatgtcattaacttttaatcagaatgtgtatctggaattttgattagatttgaacagacaagtaggagaaaatagtcaaatcattaaactcagtgaacagcaaattgaagcattcaataaaastttagaattttaacactcaacaaatagaatactgagtgacaggaaaatttgaaccctgccttcaaatgagaattacctggatctgaagagttaaacaaggcattccaattgtggattaaaatgttggtgggatctgagtggatcctctcaggaagggccagggattcaggctcatcttgacctgtggatcagtgatgggtaaacatctgaagcaaagctccacctgcagaatttcttcagagtttagaaatggtaatataaatagcttgaatctgtccattctagtaatacttgtaagtcttttcacattagcctttttaaaagttccattcttagctttctctgaatatcactgtgaggtaatatcgctcactagggcttcaagaatcaggctccacactcatggtgatggtcctctctactcagctccagacacatgtcttttgttggttcattgatctattgattgacccattgata

SEQ ID NO: 183510 - DNA, 591 bp, Homo sapiens
cagcatcttagtagagtggatgggaatgtcattaacgaagacaagtcagactaggtgaatgcaagtttgggaaacaatgacttgttttatagatattttaattgccctttggaccttcaggcagagatgaacatggagaagttggtttattaagagatacatcaaggttaatgtctaaaataggtagacgctgacctacggatggtattttcaaccttggaagaggatgagctackcagagaatagattacacagtttatgttacacaaagacagaaccttgagaaaactatttgggaagagataaagaaaactgttaaagaaagatgagtgagaggagtggcatggctggggaaaacataaattcaaaacggaaggagttatgtcactgacaatagtgttaaacacagaagacatttgagctaaaacaagatattaaatgtgaaaccacctgtctgcaaagattatgactgcgacagaagtctaccatggctgactccatcttgcctcacaggctggctgttctcagtcattcccaggaaaaagccaagctcaccatgggaggaatttagtttatagtttaactttaaag

SEQ ID NO: 183511 - DNA, 527 bp, Homo sapiens
aaacagccagcctggtaggaaagtcagtactgactgcatgaccaaatgacatggaaaggacacaggtgtttggtaaactggatattagagcttaccttacctcttggatgatattttaygtgagatagtacactttttaaaatgatgaggtgccatagaaagctacaaaattttgcaaggaaattctaacttcagatttttagcaaaatttaaataaagtatgcatcccattcaaattgttcaatacaaacactttttacgataatttattggaaagtctgccacctccctggttcaagatattctcttgcctgagcctcccaggtagttgggattacaggcatgcagccatcacactcggctaatttttgtatttttagtagagacggggttgcaccatgttggccagtctggtctcgaaatcctgagctcaagtgatctgcccgccttagcctcccaaagtgctggaattacaggcgtgagccaccactccctgccacactttaaaatacctattatttttatat

SEQ ID NO: 183512 - DNA, 527 bp, Homo sapiens
aaacagccagcctggtaggaaagtcagtactgactgcatgaccaaatgacatggaaaggacacaggtgtttggtaaactggatattagagcttaccttacctcttggatgatattttacgtgagatagtacactttttaaaatgatgaggtgccatagaaagctacaaaattttgcaaggarattctaacttcagatttttagcaaaatttaaataaagtatgcatcccattcaaattgttcaatacaaacactttttacgataatttattggaaagtctgccacctccctggttcaagatattctcttgcctgagcctcccaggtagttgggattacaggcatgcagccatcacactcggctaatttttgtatttttagtagagacggggttgcaccatgttggccagtctggtctcgaaatcctgagctcaagtgatctgcccgccttagcctcccaaagtgctggaattacaggcgtgagccaccactccctgccacactttaaaatacctattatttttatat

SEQ ID NO: 183513 - DNA, 527 bp, Homo sapiens
aaacagccagcctggtaggaaagtcagtactgactgcatgaccaaatgacatggaaaggacacaggtgtttggtaaactggatattagagcttaccttacctcttggatgatattttacgtgagatagtacactttttaaaatgatgaggtgccatagaaagctacaaaattttgcaaggaaattctaacttcagatttttagcaaaatttaaataaagtatgcatcccattcaaattgttcaatacaaacactttttacgataatttattggaaagtctgccacctccctggttcaagatattctcttgcctgagcctcccaggtagttgggattacaggcatgcagccatcacactcggctaatttttgtatttttagtagagacggggttgcrccatgttggccagtctggtctcgaaatcctgagctcaagtgatctgcccgccttagcctcccaaagtgctggaattacaggcgtgagccaccactccctgccacactttaaaatacctattatttttatat

SEQ ID NO: 183514 - DNA, 527 bp, Homo sapiens
aaacagccagcctggtaggaaagtcagtactgactgcatgaccaaatgacatggaaaggacacaggtgtttggtaaactggatattagagcttaccttacctcttggatgatattttacgtgagatagtacactttttaaaatgatgaggtgccatagaaagctacaaaattttgcaaggaaattctaacttcagatttttagcaaaatttaaataaagtatgcatcccattcaaattgttcaatacaaacactttttacgataatttattggaaagtctgccacctccctggttcaagatattctcttgcctgagcctcccaggtagttgggattacaggcatgcagccatcacactcggctaatttttgtatttttagtagagacggggttgcaccatgttggccagtctggtctcgaaatcctgagctcaagtgatctgcccgccttagcctcccaaagtgctggaattacaggygtgagccaccactccctgccacactttaaaatacctattatttttatat

SEQ ID NO: 183515 - DNA, 512 bp, Homo sapiens
tccctaacttagtttccatgacattgaaataatagaacccatgactgtatcttcgcccgtctttttggtagttctttggtgtcccttcttcttttaatctaataattaacttattaattattaaratattcacgaacatttttagagcctattatctgccaagcactcagtcaggtgctggggctgtaacagttaagaggatacgcatggtccctgccctctcagactgagcaggttagtgtagaaaatataaattgcaatgaaaaatcagtacattatttttcatccttataatgactttatgtggagggtactatttttcacattttacagatgagaatattgagaaacaaggaggtcatatagctctaagcttttgtcctgagtacttttgttgcttcctatattctacctcataaacctcacattctcccaacagttgaactccatacacatgtccagagctctaaaacacaagagctaatacaggctctaatgcagaaccatttcca

SEQ ID NO: 183516 - DNA, 510 bp, Homo sapiens
cctgacatcattcaatctaaagcctcacttctttaaacgctccttcagatcttttaacaaaagcctaaatcctataatcaatcctattgaataccctcttacagaaatgcacaacagttttccatgttgtatgttctccctcactgcaacaggtaataaattcaacttgttcaactacaggtgtgttcctgatggtctttgcctgaagagcattgacatatatgtttatgtgtgtcgaagtaaaaccaccagaaaattaaccaaaaaggttttaaggaacaactttcttctatctttattttccatatttctattatacacatacttctttaccaaaaaaattaattttaaaatattaatttgtaaacctttattaggtagtctatatgtgatagccttcgtattgtcttccaawataagaacactaagtacatctgggtgtttagtataaagtatagctttaggagaatttatatttttattttgggactttgtgttgtctgaattttc

SEQ ID NO: 183517 - DNA, 510 bp, Homo sapiens
cctgacatcattcaatctaaagcctcacttctttaaacgctccttcagatcttttaacaaaagcctaaatcctataatcaatcctattgaataccctcttacagaaatgcacaacagttttccatgttgtatgttctccctcactgcaacaggtaataaattcaacttgttcaactacaggtgtgttcctgatggtctttgcctgaagagcattgacatatatgtttatgtgtgtcgaagtaaaaccaccagaaaattaaccaaaaaggttttaaggaacaactttcttctatctttattttccatatttctattatacacatacttctttaccaaaaaaattaattttaaaatattaatttgtaaacctttattaggtagtctatatgtgatagccttcgtattgtcttccaaaataagaacactaagtacatctgggtgtttagtataaagtatagctttrggagaatttatatttttattttgggactttgtgttgtctgaattttc

SEQ ID NO: 183518 - DNA, 484 bp, Homo sapiens
gcagcaacttagtacttcgccttgcatctaataagtgttctataaatgtttctaaaaaggtacaaatctgtcccaactggtagggcaggaccagtaggttggatgtcargaagtatcctcctctcacctcactctccacttgttataccctttcagagggtttacctttctattcttgcacattcagcctcttagctcccaaataaatttaaatagcgaaaaatcaaataatacacctcatttaccactctgggggagtagacaagcaagagatttgctacatttgcaaaatcttcactctccagaagatgctcaggaacaccatgtacaaaacatgcactagtctcagaagctaagggaagaattttttttctctcttaaatgttatcaggaagatgtgagaaactcagcagtagctcacctccccagtacaaaggggagagccaagctgagcctttcaagacaagcaagttagcatttggca

SEQ ID NO: 183519 - DNA, 484 bp, Homo sapiens
gcagcaacttagtacttcgccttgcatctaataagtgttctataaatgtttctaaaaaggtacaaatctgtcccaactggtagggcaggaccagtaggttggatgtcaggaagtatcctcctctcacctcactctccacttgttataccctttcagagggtttacctttctattcttgcacattcagcctcttagctcccaaataaatttaaatagcgaaaaatcaaataatacacctcatttaccactctgggggagtagacaagcaagagatttgctacatttgcaaaatcttcactctccagaagatgctcargaacaccatgtacaaaacatgcactagtctcagaagctaagggaagaattttttttctctcttaaatgttatcaggaagatgtgagaaactcagcagtagctcacctccccagtacaaaggggagagccaagctgagcctttcaagacaagcaagttagcatttggca

SEQ ID NO: 183520 - DNA, 605 bp, Homo sapiens
atcatttattataactaacttaccaatttttgttattactttttactagaattatgagatatttttcaataaaatagtattttctaaaatatatattctaacaatcaattaacaagttacataggtaaatataaatatataaatatgttacatatataaataatatagcaaattaagcatgtaaacaatataaacaatttataatkgagactacagtgagccacaatatttgcaaattaggcaattaaaatgtattgcataaagcctaacacaggttagtgaaatttcatgaagaatacaacacatattgccagctgtttctctacaaattctgcatttcactgcatacattggacatctgatgacttttgctaaattcatggtcatattcaagagtacaaaaaggtgagaactttgcacatattcattagtaacacctgggactcactgggtgccaagaaaacatattaatcagaaaaaatggacttgaatcggagtggctattaagaaatagagtagcttcttatcactgtgtttcatatcaagtattataaagctcttcaattgtcaaatgatggctcttgtaccagatggacgttttgcaa

SEQ ID NO: 183521 - DNA, 544 bp, Homo sapiens
cttaaatgtttaaggattggttgatatccattgtatacttagcataatgctttttaaatttcctgacataaaaacagaaaaatgtattttttttagattctcagcattcagcatacagtatgcctaagaaaaaaaaaagcatgcctaacaaaacattcttgttatttagaatttgcaaaaatattttacttgtaatacagatttacactttgacatgtgatttaaaaaacatataagaggtcttgtagtatagattttaatttcatctttcaaatgaaggtattaagacttaggtctgggatctcaaaacaaattattggagcatattccttgttttgaacttctttttacagtcaccagttaatgtgatgaatatgttagtttttcaactggaaaattttctttatatcaaatacctattaatttyttgaagaatttttctctttaatttcatcaatcaactgtaaaacaatagaaaggaaaacagaacttccaagatgcagttatgatgaaaatattttggaacctttggcaagcatatagg

SEQ ID NO: 183522 - DNA, 570 bp, Homo sapiens
agttatcttagctagatctattggataacttgctgccacttctacatctgcaactgctgcttcatgtggcactkttatgctatgcagacagcttctttttttaaagctcatgaactaacctctgcaagcttcaaacttctgtagtttcctcatgtttctcaaccttcatataattaaagagagttagggctttgctctagattaggctttggtttaaggaattttgtggctggtttgatcatctatccagacgactaaaactttctccatataagtaataaggttcattctctttcttatcattcatgtgttcactggagtatcacctttcatttccttcagaactttttttttcattcacaactctgttttcagcatgtcttcctcactaaactcaatcatttctagtttttgatttaaagtgagagatgtacaactctccattgcacttgaaaaattagaggtcatagtagggttattagtagacctaattttaatattgttatgtctcatggagtaggaaggtccaaggtgagggacagtggccagctggtttttggagcagtcaga

SEQ ID NO: 183523 - DNA, 596 bp, Homo sapiens
aaaaaaaaaaagaattaggttggcaaaccgttttgtaaagggcagataagtattttggattgtgtgggccagcccatctataacacagttgttcaactcagctgttggtgtgaaacattcatagacaatacacaaatgaacatacatagctacgttccagtaaaactttatttacaaaatgagtggtggcctaratttggctgcctaaagagttttcctagtgtgttgttctagggtgttggtgagaatatattaaactaaaaacatatatcttatttcaattgtacgtagagatacaagtttataaagtaaataaagcaatattccctcagtagagtagattttccttaaacactttctgatattcagcaaaacttatgctagcaaacatatataatgtgatctttggtactgcaaattttgaaaatactttgcagtacagcataactttgttttaaaaatattataatcgttcatgtattgatggtttcagtggtaagattagataaaacaataaaataaatagttgttacatttttcttgaaaattgaaacaaataattatcatttactgatgattcagagttgattttaaac

SEQ ID NO: 183524 - DNA, 625 bp, Homo sapiens
tgttttgttctaattattgtattatatttctgtttcctaacaacsaaattgttagatccttaagtaaaaggaccacatgttataattgttttggttattagttcattgactgaaactttaattgtgaacatttagtaaatcctacttttttctgtctaaccttttctaactcccccaggctaagctgatgaaatgattgcttactagcaaccaaattgtttagttcacaattgaatttctgtcttcttggttagatttttatctcctcaacggtagatatcttagagagcactttgttgattgtaaacggcaaaaacaaactagaaacattttcagaaaacaaagaatgtattacaaggatgctcgctgggcccaaaggtagcaataatgccggacttcagaaataactggaaataatactgctaatccctacaaaaatatctctaaatatcaatttatcttatctggaatcatctctgaatttcttgctctcattagatacctcttttgtcagttttctaatctactgggtagaaatttgtccctggacatctttggggatttaaccatttctgcctggcttcacaggggtcctttgggaaggcagccagaggcactgggaaaa

SEQ ID NO: 183525 - DNA, 625 bp, Homo sapiens
tgttttgttctaattattgtattatatttctgtttcctaacaacgaaattgttagatccttaagtaaaaggaccacatgttataattgttttggttattagttcattgactgaaactttaattgtgaacatttagtaaatcctacttttttctgtctaaccttttctaactcccccaggctaagctgatgaaatgattgcttactagcaaccaaattgtttagttcacaattgaatttctgtcttcttggttagatttttatctcctcaacggtagatatcttagagagcactttgttgattgtaaasggcaaaaacaaactagaaacattttcagaaaacaaagaatgtattacaaggatgctcgctgggcccaaaggtagcaataatgccggacttcagaaataactggaaataatactgctaatccctacaaaaatatctctaaatatcaatttatcttatctggaatcatctctgaatttcttgctctcattagatacctcttttgtcagttttctaatctactgggtagaaatttgtccctggacatctttggggatttaaccatttctgcctggcttcacaggggtcctttgggaaggcagccagaggcactgggaaaa

SEQ ID NO: 183526 - DNA, 625 bp, Homo sapiens
tgttttgttctaattattgtattatatttctgtttcctaacaacgaaattgttagatccttaagtaaaaggaccacatgttataattgttttggttattagttcattgactgaaactttaattgtgaacatttagtaaatcctacttttttctgtctaaccttttctaactcccccaggctaagctgatgaaatgattgcttactagcaaccaaattgtttagttcacaattgaatttctgtcttcttggttagatttttatctcctcaacggtagatatcttagagagcactttgttgattgtaaacggcaaaaacaaactagaaacattttcagaaaacaaagaatgtattacaaggatgctcgctgggcccaaaggtagcaataatgcyggacttcagaaataactggaaataatactgctaatccctacaaaaatatctctaaatatcaatttatcttatctggaatcatctctgaatttcttgctctcattagatacctcttttgtcagttttctaatctactgggtagaaatttgtccctggacatctttggggatttaaccatttctgcctggcttcacaggggtcctttgggaaggcagccagaggcactgggaaaa

SEQ ID NO: 183527 - DNA, 547 bp, Homo sapiens
tttacagaacattctacccaaaaacagcagaatatacattctattcaacagcacatggaacttcctccaagatacaccatatgataggccacaaaatgggcctcaataaattcaagaaaagtcaaattatgtcaagcactctctcagaccacagtggaataaaactgtacatcaactccaaaaggaaacttcaaaccatgcaaatacatgcaaattaaataatcttctcctgaatgatcaytggatcaaaaatgaaatcacgatggaaattaaaaaattattcgaactgaacaatagtgacaaaacctatcaaaatctctgggatatagcaaaggtggtatcaagaggaaagttcatatccctaaatgcctacatcaaaaagtctgaaagagcacaaacagacaaactaaggtcacacttcaagtaactagagaaacatgaacaagccaaacccaaacctagcagaagaaaataaccaacatcagagcagtattaaatgaaattaaaatgacaacaaaaaaattcaaaagataaatgaaacaaaaag

SEQ ID NO: 183528 - DNA, 548 bp, Homo sapiens
ctaaattgattgcatccagattatcttgctgccctgcaccattttacaggctctgtgattatctgcaattgtgagcagaaaataccatttttctgtgtgctccctcaggttttcacgtagttatgatgctgagggtggtgaccttgagttctcttagtctacagctattgccacaatctcaatgttttcttaacatatttattttgtgtatatacatttcatataatatattatgttatatataacatgttatatgctgtataacacataattgttctacataaacacataaagtagtatatgtttacatatatatgtattgctaacttaaaatgtttggcttaggaaaatgccatttcctcattggtggacctcctgcagagggggtcatggcaggcttggagttatctcaaatggtacatttttccaatgtaaggcctgaaaatgggaaagctttttttcttttaacatgttgtaagaatagagtttattaatctgatagtgctatatttgaatgcaagyaacaaaaaaggtgtttaagtgaattc

SEQ ID NO: 183529 - DNA, 544 bp, Homo sapiens
agaatgaatacccagtggaatggaaggaccattatccatttcatctggattactgcaacagcctcttttcttcccatttctacacgctctcccttccattccacagtccccaaagcagcaaaacaagtgtgagttcctttgtaaatcaacctacaaagcactcttgttttaatgcctttggtagcttctttttgcacatccaagccttggtcttgtatcgccaaaactttcaatggtattcagaatcagtgctttatcctgaatgttttcctttggccctcctgattctgatcttccatgcttctgacaytgactatgttaaattcagactttctcctttctgtcctgcatattacatgatttgacagatttagatgttagcattctgaacaacagcatttcaactgacagtttgcttttagcgtagttcaacaaaaaagaactgggcatttcaagtgacacacttggttctttttgatatacatactaggagctggtccctcttctgtgtgacgatttgcagaaaaccccttcaaaataggct

SEQ ID NO: 183530 - DNA, 544 bp, Homo sapiens
agaatgaatacccagtggaatggaaggaccattatccatttcatctggattactgcaacagcctcttttcttcccatttctacacgctctcccttccattccacagtccccaaagcagcaaaacaagtgtgagttcctttgtaaatcaacctacaaagcactcttgttttaatgcctttggtagcttctttttgcacatccaagccttggtcttgtatcgccaaaactttcaatggtattcagaatcagtgctttatcctgaatgttttcctttggccctcctgattctgatcttccatgcttctgacactgactatgttaaattcagactttctcctttctgtcctgcatattacatgatttgacagatttagatgttagcattctgaacaacagcatttcaactgacagtttkcttttagcgtagttcaacaaaaaagaactgggcatttcaagtgacacacttggttctttttgatatacatactaggagctggtccctcttctgtgtgacgatttgcagaaaaccccttcaaaataggct

SEQ ID NO: 183531 - DNA, 563 bp, Homo sapiens
actgaacttttaaaatgtacccattattaacatgtttgttctcaaaaattctgccacctgcctatttttcatgtattctatcttttcaatttcacttcttttcttgatgtcattattttcagggtcttttctttggttttaatatggactggttactttttagggttactcaactgctgtcatacagttactcactttgcctgtgagatagattccgtcctttctaaatctcaaattttatatcttcattttatgagtcacactgtcgaatagatttccaacaaaggacacatacaaaacaaaaatttgtatttgcatatctgcartttgctttactctaagttgctacttgattgattttggattatagaattctaggttaaatataacttcactcagaattttgaaataatttctctattgttataccgtaaactttaaatttgctgataagttatctattgctatttagactattgattttacgtacatgacctatttttatctctagaatattttagaatttttctttaatgcttgtattctaaattttcccatgattt

SEQ ID NO: 183532 - DNA, 563 bp, Homo sapiens
actgaacttttaaaatgtacccattattaacatgtttgttctcaaaaattctgccacctgcctatttttcatgtattctatcttttcaatttcacttcttttcttgatgtcattattttcagggtcttttctttggttttaatatggactggttactttttagggttactcaactgctgtcatacagttactcactttgcctgtgagatagattccgtcctttctaaatctcaaattttatatcttcattttatgagtcacactgtcgaatagatttccaacaaaggacacatacaaaacaaaaatttgtatttgcatatctgcagtttgctttactctaagttgctacttgattgattttggattatagaattctaggttaaatataacttyactcagaattttgaaataatttctctattgttataccgtaaactttaaatttgctgataagttatctattgctatttagactattgattttacgtacatgacctatttttatctctagaatattttagaatttttctttaatgcttgtattctaaattttcccatgattt

SEQ ID NO: 183533 - DNA, 276 bp, Homo sapiens
ctgcaagtcattgctaatattggagatatatggtagtacatgatgttaaagaaaaaattcttttttcttttctttgtgaaatcctggtagacgttaagagtaaacagttataataacatatttagggagtttctkagggataggtatattttcatagtcattgccacgtgaagagctattgcccatggtatagcaccaaagacctgaactcagaagaaatgggacagtgacctagcttagaggacaatgaagaatgacaaagtcagtcttaacttc

SEQ ID NO: 183534 - DNA, 556 bp, Homo sapiens
tgcaggaacagtcagcagagtaaagagccaacccacaaactgggagaaaatcttcaygatctatacatctgacaaagctattcctttatagaaatgcaaacagactaacacagttcattttcctacctaacctgcttttagtatatgaagttttagtatacatacttagtatataaagttttaacacctactcacagtacttgctattgacattatagttaaaattagacttcaccaaacttataacagcttatgacgttgtggtaaacaacccttaattctgaaatgacttaagtgttttctgatcaaggtttttgtcgtttaaaactgccagttaccctaggtaaatatgcacattaagaatggtataaaacatttttactatgaaatggagtatttaaacaattttcttattaatactttaaacaaatcttgatacaatacaaattgtattaatgtgacaatgttaatagattttctcttgtgccgtaactatccattctataaatatactttctctctgacatcttctgtatccacaaattgtatacttcct

SEQ ID NO: 183535 - DNA, 556 bp, Homo sapiens
tgcaggaacagtcagcagagtaaagagccaacccacaaactgggagaaaatcttcacgatctatacatctgacaaagctattcctttatagaaawgcaaacagactaacacagttcattttcctacctaacctgcttttagtatatgaagttttagtatacatacttagtatataaagttttaacacctactcacagtacttgctattgacattatagttaaaattagacttcaccaaacttataacagcttatgacgttgtggtaaacaacccttaattctgaaatgacttaagtgttttctgatcaaggtttttgtcgtttaaaactgccagttaccctaggtaaatatgcacattaagaatggtataaaacatttttactatgaaatggagtatttaaacaattttcttattaatactttaaacaaatcttgatacaatacaaattgtattaatgtgacaatgttaatagattttctcttgtgccgtaactatccattctataaatatactttctctctgacatcttctgtatccacaaattgtatacttcct

SEQ ID NO: 183536 - DNA, 452 bp, Homo sapiens
caatattttatacaagccagcccagaaygcccctgggtgtgctgaagtcagtttggaattctgttatactatttatgagttatgtgattgaggtcaagctgccaaatcttcttctttctttatattctcacctataaggtaaaacttaacatgtaggggtttttaaaaatagagatgctatatgcaaagcaatgtgcatgttagcaaataatagattcactgagtagtaggtactgttagtgttattacatcctcctacatttctgtcttagtcagctcaggttgacataacaaaataccgcagattggttgggttaattaacagattttttttttgtacatttggaggctagacgtttaagattgaggtgccactggaataggtctctactgagacctctcatccggcttgcagatagctaccttctcatggttgtctcacatggcctttt

SEQ ID NO: 183537 - DNA, 350 bp, Homo sapiens
aatcagcactcaatattttatacaagccagcccagaacgcccctgggtgtgctgaagtcagtttggaattctgttatactatttatgagttatgtgattgaggtcaagctgccaaatcttcttctttctttatattctcacctataaggtaaaacttaacatgtaggggtttttaaaaatagagatgctatatgcaaagcaatgtgcatgttagcaaataatagattcactgagtagtaggtactgttaktgttattacatcctcctacatttctgtcttagtcagctcaggttgacataacaaaataccgcagattggttgggttaattaacagattttttttttgtac

SEQ ID NO: 183538 - DNA, 607 bp, Homo sapiens
tcattttattggtcttttgtgttgctttcttcatttcaatatcatttatttctgctctgctctttattattacttttcttctactaattttgagtttggtttattctkgcctttctagttctttaagatgcatcactaaattatttatttgatgtttttcttcttttttgatgcaggtgcttatagctctatactttcctcttagtatggcttttactgcatctcataggttttggtatgtcatgtttctcttatcatttgtctcaagaaattttacagtttcctcataacttcttcattgacccagtggtcattctgaagcatctagtttaatttccatatgtttgtatacttaacaaaatttctcctgttattgattcctgcttttattctattgtggtcagagaagacacttaatattattaatttttttggaatgttttaagacttgttttgttgtctaacatatggtctttctttgagaatgagccatgtgctgaggagaagaatactgtgtattctgcagccattggatgaattatatctattaggttcatttggtctacagtgcagagtaagtccaatgtttctttgttgattttctgtc

SEQ ID NO: 183539 - DNA, 607 bp, Homo sapiens
tcattttattggtcttttgtgttgctttcttcatttcaatatcatttatttctgctctgctctttattattacttttcttctactaattttgagtttggtttattcttgcctttctagttctttaagatgcatcaytaaattatttatttgatgtttttcttcttttttgatgcaggtgcttatagctctatactttcctcttagtatggcttttactgcatctcataggttttggtatgtcatgtttctcttatcatttgtctcaagaaattttacagtttcctcataacttcttcattgacccagtggtcattctgaagcatctagtttaatttccatatgtttgtatacttaacaaaatttctcctgttattgattcctgcttttattctattgtggtcagagaagacacttaatattattaatttttttggaatgttttaagacttgttttgttgtctaacatatggtctttctttgagaatgagccatgtgctgaggagaagaatactgtgtattctgcagccattggatgaattatatctattaggttcatttggtctacagtgcagagtaagtccaatgtttctttgttgattttctgtc

SEQ ID NO: 183540 - DNA, 607 bp, Homo sapiens
tcattttattggtcttttgtgttgctttcttcatttcaatatcatttatttctgctctgctctttattattacttttcttctactaattttgagtttggtttattcttgcctttctagttctttaagatgcatcactaaattatttatttgatgtttttcttcttttttgatgcaggtgcttatagctctatactttcctcttagtatggcttttactgcatctcataggttttggtatgtcatgtttctctwatcatttgtctcaagaaattttacagtttcctcataacttcttcattgacccagtggtcattctgaagcatctagtttaatttccatatgtttgtatacttaacaaaatttctcctgttattgattcctgcttttattctattgtggtcagagaagacacttaatattattaatttttttggaatgttttaagacttgttttgttgtctaacatatggtctttctttgagaatgagccatgtgctgaggagaagaatactgtgtattctgcagccattggatgaattatatctattaggttcatttggtctacagtgcagagtaagtccaatgtttctttgttgattttctgtc

SEQ ID NO: 183541 - DNA, 607 bp, Homo sapiens
tcattttattggtcttttgtgttgctttcttcatttcaatatcatttatttctgctctgctctttattattacttttcttctactaattttgagtttggtttattcttgcctttctagttctttaagatgcatcactaaattatttatttgatgtttttcttcttttttgatgcaggtgcttatagctctatactttcctcttagtatggcttttactgcatctcataggttttggtatgtcatgtttctcttatcatttgtctcaagaaattttacagtttcctcataacttcttcattgacccagtggtcattctgaagcatctagtttaawttccatatgtttgtatacttaacaaaatttctcctgttattgattcctgcttttattctattgtggtcagagaagacacttaatattattaatttttttggaatgttttaagacttgttttgttgtctaacatatggtctttctttgagaatgagccatgtgctgaggagaagaatactgtgtattctgcagccattggatgaattatatctattaggttcatttggtctacagtgcagagtaagtccaatgtttctttgttgattttctgtc

SEQ ID NO: 183542 - DNA, 520 bp, Homo sapiens
tttttctgttataagtatagctactcctgctcttttttggtttcccatttgcatggaatatcttttaccatgtctttattttcagtccatatgtgtctttataggtgaagtgtttttcttgcrggcaacagatcattgggtcttgttttttttcccctattcatccactctatgtctttcaattgaagaatttagtccacctacatttaatgttattgttgataggtaaggactcatcccttactcctgccattttattatttgttttttgattgttttgtggttttcctttccttctttccttccttcctgtcttccttttagagaatgtaatttttttctggtgatatgttttaattttttgctttttggtttttctgtatccattgtatgtttttagatttgaagttaccataagtattgcagataatatcttatagcccattatttcaaactgataacaacttaatactgattgcataaacaaacaactaacaaggaaaaggaaaactagtagaaa

SEQ ID NO: 183543 - DNA, 520 bp, Homo sapiens
tttttctgttataagtatagctactcctgctcttttttggtttcccatttgcatggaatatcttttaccatgtctttattttcagtccatatgtgtctttataggtgaagtgtttttcttgcaggcaacagatcattgggtcttgttttttttcccctattcatccactctatgtctttcaattgaagaatttagtccacctacrtttaatgttattgttgataggtaaggactcatcccttactcctgccattttattatttgttttttgattgttttgtggttttcctttccttctttccttccttcctgtcttccttttagagaatgtaatttttttctggtgatatgttttaattttttgctttttggtttttctgtatccattgtatgtttttagatttgaagttaccataagtattgcagataatatcttatagcccattatttcaaactgataacaacttaatactgattgcataaacaaacaactaacaaggaaaaggaaaactagtagaaa

SEQ ID NO: 183544 - DNA, 476 bp, Homo sapiens
ctgcttggcccactgcagggcgggccccagctcatacagcttggtgttggcattcttaacagccagctccccatgctgctcagcatctgtgatgrcggcctccaggaaagccctctggcctttgaggccctctatctcagcctggagccagttgatgttcccattcatctcagagatctccatctttgtatgacacaggtcatccccatgcttcccagcaagcatctccagctcctcatatttgatctggtacatgctctcagccttggcctagctgcataggcgatctcttcatactgggccttgacatcagcgatgatgctgcccatgtccagggagcagctgttgtccatggacagaaccacagacgtgtccaagatctaggacagctcccggatctcctcttcatacagctgcctgaggaagttgatctcatcagtcagcccttccaggtgagactccagctctgccttgtt

SEQ ID NO: 183545 - DNA, 476 bp, Homo sapiens
ctgcttggcccactgcagggcgggccccagctcatacagcttggtgttggcattcttaacagccagctccccatgctgctcagcatctgtgatgacggcctccaggaaagccctctggcctttgaggccctctatctcagcctggagccagttgatgttcccattcatctcagagatctccatctttgtatgacacaggtcatccccatgcttcccagcaagcatctscagctcctcatatttgatctggtacatgctctcagccttggcctagctgcataggcgatctcttcatactgggccttgacatcagcgatgatgctgcccatgtccagggagcagctgttgtccatggacagaaccacagacgtgtccaagatctaggacagctcccggatctcctcttcatacagctgcctgaggaagttgatctcatcagtcagcccttccaggtgagactccagctctgccttgtt

SEQ ID NO: 183546 - DNA, 396 bp, Homo sapiens
acctgcaggttaagggggctcagcaggctctggttgactgtgacagctgtgatgcctcccttgctgctggccccatcacagcctctgcccaggccaycccagaagctgctgctgcccactcgggagaagcttgagaaactgatgtggacaccaggcccacttgtgtaggagttgctgctgaaggcccgggggccagaggtgaacaccttgtagaacttctgggtcaccctgatggacatggtggaggcaggagtggagacaggtggcctgaacccagtggagatacaaggaagaatggataagctgcttctcacggctgttttctagatcttgtagtaatgcttcattgttttttattcttttttcttttaactcctgtgaccatattttcaaata

SEQ ID NO: 183547 - DNA, 396 bp, Homo sapiens
acctgcaggttaagggggctcagcaggctctggttgactgtgacagctgtgatgcctcccttgctgctggccccatcacagcctctgcccaggccatcccagaagctgctgctgcccactcgggagaagcttgagaaactgatgtggacaccaggcccacttgtgtaggagttgctgctgaaggcccrggggccagaggtgaacaccttgtagaacttctgggtcaccctgatggacatggtggaggcaggagtggagacaggtggcctgaacccagtggagatacaaggaagaatggataagctgcttctcacggctgttttctagatcttgtagtaatgcttcattgttttttattcttttttcttttaactcctgtgaccatattttcaaata

SEQ ID NO: 183548 - DNA, 560 bp, Homo sapiens
agatcttgtagtaatgcttcattgttttttattcttttttcttttaactcctstgaccatattttcaaatagcctgtcttcaagctgattagttctttcttctgctctatcaatcctgctattaagagactctgacaaattcttaggtacatcaattgcatttattaactccagaattcctggttgattcttttttattatttcagtttctttgttaaatttatctgataggattctgaattccttctctgtgttatcttgaacatatttgagtttcttcaaaacggctattttgaattccctgtctaaaaggtcacatatccctgtctctctaggattggtccctggtgccttatttagtttcgtgaggtcatgttttcttgatgattttgttgcttgtagattttcatcaatgtctgggcattgacacgttaggtatttattgtagcctttgcagcctgggcttatttgaccccatacatcttgggaaggctttccagatatttgaaaggacttggtgttgaatctaagtttttgctcactgcagccatatctgcatg

SEQ ID NO: 183549 - DNA, 560 bp, Homo sapiens
agatcttgtagtaatgcttcattgttttttattcttttttcttttaactcctgtgaccatattttcaaatagcctgtcttcaagctgattagttctttcttctgctctatcaatcctgctattaagagactctgacaaattcttaggtacatcaattgcattwattaactccagaattcctggttgattcttttttattatttcagtttctttgttaaatttatctgataggattctgaattccttctctgtgttatcttgaacatatttgagtttcttcaaaacggctattttgaattccctgtctaaaaggtcacatatccctgtctctctaggattggtccctggtgccttatttagtttcgtgaggtcatgttttcttgatgattttgttgcttgtagattttcatcaatgtctgggcattgacacgttaggtatttattgtagcctttgcagcctgggcttatttgaccccatacatcttgggaaggctttccagatatttgaaaggacttggtgttgaatctaagtttttgctcactgcagccatatctgcatg

SEQ ID NO: 183550 - DNA, 593 bp, Homo sapiens
ttttattcttttttcttttaactcctgtgaccatattttcaaatagcctgtcttcaagctgattagttctttcttctgctctatcaatcctgctattaagagactctgacaaattcttaggtacatcaattgcatttattaactccagaattcctggttgattcttttttattatttcagtttctttgttaaatttatctgataggattctgaattccttctctgtgttatcttgaacatatttgagtttcttcaaaacrgctattttgaattccctgtctaaaaggtcacatatccctgtctctctaggattggtccctggtgccttatttagtttcgtgaggtcatgttttcttgatgattttgttgcttgtagattttcatcaatgtctgggcattgacacgttaggtatttattgtagcctttgcagcctgggcttatttgaccccatacatcttgggaaggctttccagatatttgaaaggacttggtgttgaatctaagtttttgctcactgcagccatatctgcatgagaagctacctcaagcccagtaatattatggttctttcagactcatagatgtaccacat

SEQ ID NO: 183551 - DNA, 379 bp, Homo sapiens
aagatctggaagaattctctggattaccaggcagactcttgttatcttccttactttctccctaacaaatggagcctctctctctctctttctctctctctttctttctctctctctctctctctctgcctgtgctgagctgcttggtgctgggtcagatgtgacataaacacctctgtgaccaccattactgggactgtgcagcgtcaaacctgaagccagacyattaatgtgtcttcccccaaacccattgtaactactacctggctactgcttatatcttttcaataccttagggctctgcaataagtagatgggaaggatatccaggcttttgtcctttcctttggagaagcaagttcccccagacccaaagaag

SEQ ID NO: 183552 - DNA, 379 bp, Homo sapiens
aagatctggaagaattctctggattaccaggcagactcttgttatcttccttactttctccctaacaaatggagcctctctctctctctttctctctctctttctttctctctctctctctctctctgcctgtgctgagctgcttggtgctgggtcagatgtgacataaacacctctgtgaccaccattactgggactgtgcagcgtcaaacctgaagccagaccattaatgtgtcttcccccaaacccrttgtaactactacctggctactgcttatatcttttcaataccttagggctctgcaataagtagatgggaaggatatccaggcttttgtcctttcctttggagaagcaagttcccccagacccaaagaag

SEQ ID NO: 183553 - DNA, 379 bp, Homo sapiens
aagatctggaagaattctctggattaccaggcagactcttgttatcttccttactttctccctaacaaatggagcctctctctctctctttctctctctctttctttctctctctctctctctctctgcctgtgctgagctgcttggtgctgggtcagatgtgacataaacacctctgtgaccaccattactgggactgtgcagcgtcaaacctgaagccagaccattaatgtgtcttcccccaaacccattgtaactactacctggctactgcttatatyttttcaataccttagggctctgcaataagtagatgggaaggatatccaggcttttgtcctttcctttggagaagcaagttcccccagacccaaagaag

SEQ ID NO: 183554 - DNA, 540 bp, Homo sapiens
attagtagctaattcattttgacaagatccaaagtaattcatgtatgcattaaagcctgtggagcactagcccagcacacttaatttttttaaatttttttaaattatactktaagttctgggttacatgtgcagaacgtacaggtttgtaacataagtatacacgtaccatggtggtttgctgcacctatcaacccgtgacctacattaggtatttctcctaatgttatccctcccctagccccccagcctccacaggccatggtgtgtgatgttcccctccctgtgtccatgtgttctcattgttcaactcccacttatgagtgagaacatgtggtgtttggttttctattcttgagttagtttgctgagaatgatggtttccagccatccatgtccctgcaaaggacatgaactcatccttttttatggctgcatagtattccatggtgtatatgtgccatgttttcttaatccagtctatcactgatggacatttgcgttggtttcaagtctttgctattatgaatagttagccca

SEQ ID NO: 183555 - DNA, 540 bp, Homo sapiens
attagtagctaattcattttgacaagatccaaagtaattcatgtatgcattaaagcctgtggagcactagcccagcacacttaatttttttaaatttttttaaattatactgtaagttctgggttacatgtgcagaacgtacaggtttgtaacataagtatacacgtaccatggtggtttgctgcacctatcaacccgtgacctacattaggtatttctcctaatgttatccctcccctagccccccagcctccacaggccatggtgtgtgatgttcccctccctgtgtccatgtgttctcattgttcaactcccacttatgagtgagaacatgtggtgtttggttttctattcttgagttagtttgctgagaatgatggtttccagccatccatgtccctgcaaaggacatgaactcatccttttttatggctgcatagtattccatggtgtatatgtgccatgttttcttaatccagtctatcaytgatggacatttgcgttggtttcaagtctttgctattatgaatagttagccca

SEQ ID NO: 183556 - DNA, 632 bp, Homo sapiens
tcctttgagtctctctcttctggttccctcttttacctttaaggactttggtgattacattgggcccaccaggatatttcaggataatctattttaagaccagctgattatcaaccttaattccacttacaacctgaattcccttttgctgtggaacctcatatattcacaggttctggtgcttaggagtggacatctttgggaccgagggttattctgccttcctaccatgtcaccagagttgtgctaatacacagagagcttcaggggatgagatctgccattcattgagcaccttctgtgtggcagacagtgttaggtactttataaatgatttcactgcatcycccaaaattcaatccctaatttacaagtgagacaatgctggctctgagaggcttagtgacttgcccaaagtcacatagctggtgacgacagaactcagtccatctgtcctccagtccatgctgccttgtgttaccctttgctctctcccagatagttccagagacttcagaatgtgcatgagcacatgtgagtgtatatgggagggaggacaaaaacatagtaaaaagtcatcttctgaacttgaagctaaagaagttcaacttaaaatagatgagcgtggcaac

SEQ ID NO: 183557 - DNA, 474 bp, Homo sapiens
gcttcaggggatgagatctgccattcattgagcaccttctgtgtggcagacagtgttaggtactttataaatgatttcactgcatctcccaaaattcaatccctaatttacaagtgagacaatgctggctctgagaggcttagtgacttgcccaaagtcacatagctggtgacgacagaactcagtccatctgtcctccagtccatgctgccttgtgttaccctttgctctctcccagatagttccagagacttcagaatgtgcatgagcacatgtgagtgtatatgggwgggaggacaaaaacatagtaaaaagtcatcttctgaacttgaagctaaagaagttcaacttaaaatagatgagcgtggcaaccagatgtggtgactcacccagggcagaactggtgactgttcagctgctaacgaccaggatgcaggctcaagaaaaccatgtggactaaaccgcagagagctg

SEQ ID NO: 183558 - DNA, 521 bp, Homo sapiens
acctgccaatttctccatttactaaggaggtaacctggagaaaatggtttgagtctttgtgctcagttcctactcggaattcaagttggagagaacaatgttgattacatttctagcagcagcaaatacaatgggaagtaaagctcttttggtatgtgtcagggtaatttttatcataaacaattgggttgtcacacattagtcatacgtaagtattagatccataataatgtgttcattctccaactttgacatttaacattaagtttagaatagagatttttcaaccatagctgcacattagaataatctggggatttttaaagcaatagttaagccacacacaatctcagagattctgacttaattgctttggggtgaaagtcaaggtgtcagcattgtattaaaatcttcacaggtgattctaatctgaagctggggtgtggaaccactaatagagagaacataatgcaggctttggggttggacagacttcrgttcaaatccctgctctaccacta

SEQ ID NO: 183559 - DNA, 503 bp, Homo sapiens
gcaaagcctccctaggccctccccaagtggaacgaatctctgttttccccatacgccttttcttctcattgctatttccactgctgtatggtcagccttgtgcacatgtgcacaggtctgcccttccccagatgagtgtttcttggagtcaggaattgggtcttgctcattacctgtcccctaaaaaggcttgccattactgttgtctgagactgacaagtaggaacacactaactttggtatctgtcttgcatttgaagaatgtgataggctattgcttggtttcaaaactgtgggatttggggcatggctccatggacatccagctgtgtggttgcatagctgcataatwgtgtgactgtttagctgcatgataatatggaagcatagcagtctggccacagtttgcatggtttcatggctgggtggctccacaactttgacagaaaaccttccctttgcatttctgtgttacatcatgatttctaccagcgttctgaagc

SEQ ID NO: 183560 - DNA, 559 bp, Homo sapiens
agatctaggaggagtccttgtggagtttgcagtctagagcagcgctgtccagagactcaatgttctttgcattgtccaatacagccttatgactatggatcactggaaatggagctagtgctgctgaagaactgaatttttcacatgatttaatgttaatttaaattagcatagcccagtagagctggcggctaccatattggacagcacaggcagaagaggtagatagcatacgaactcatacaattaattattattgttgcaagtgctacaaaagagaagtcagatatgatgaaaagttggtatggggaacatttctagcaaaaggaacagcatgtgcaaaggccttgaggcaggaagagtttggcattttccagctattggaggacagcaatgttattggagcatcatgcaagccatgwgtgaggggaggcagtgctgggagcaggaaaggctggatcacatgggagcatgtaggccacaatgaggagcttggacttcatcctaacagcaatgagaagccttggatgggttttgagcaggaaagtcccttgatcca

SEQ ID NO: 183561 - DNA, 325 bp, Homo sapiens
gctaagttaaatgtcttttctcaacattttcatagtgctcagtatactgctatcatagctcctatcacactgtcttacaaaaactgggttacttctctgtttcccctcctaattgtaagctctgggtcttttctctctctgtaccaaaggttgcaagcacggtgtctggaacaaagaaaatgttcagtagatgtttyctgaattaaaagtaaattattctccacaaaatacacccaatttcttggcattttttcctaatattaatttgttgtcaatgtagttcgcagagaatgcactatgctgctatttactaaattaaatatct

SEQ ID NO: 183562 - DNA, 569 bp, Homo sapiens
tattagcagttgaacatataagtaaatatgaacaaagaatcatttagggtattttttactgttyattttgttttattttacaatgtctattatttgactatcttagtatgtttgggctgctattacaaaataccataaactggtaacttataaaaaacaaaaatttatttctcacagttctaaagtctggagtccaagattaaggtgctggctgttttggtgtctggtgagggcctgcttttctgattcatagatggtgccttctcactgtgtccctacatgttggaaggggcaaacaagctccctcaggcttcttctataatggcactaataccatttatgagggccccactctcatgacctaatcacctcccaaaggctccacctcctaataccatcaccttgggggttaggattttgacatgaattttgggaggatacaaatattcagaccttagcagttacatagaaatagcgaccttgaattaaccttagtgagttgatattaagagaaatcatctgaaagaataggctttcacttgataaaacatagaaagagaagtgaggat

SEQ ID NO: 183563 - DNA, 569 bp, Homo sapiens
tattagcagttgaacatataagtaaatatgaacaaagaatcatttagggtattttttactgttcattttgttttattttacaatgtctattatttgactatcttagtatgtttgggctgctattacaaaataccataaactggtaacttataaaaaacaaaaatttatttctcacagttctaaagtctggagtccaagattaaggtgctggctgttttggtgtctggtgagggcctgcttttctgattcatagatggtgccttctcactgtgtccctacatgttggaaggggcaaacaagctccctcaggcttcttctataakggcactaataccatttatgagggccccactctcatgacctaatcacctcccaaaggctccacctcctaataccatcaccttgggggttaggattttgacatgaattttgggaggatacaaatattcagaccttagcagttacatagaaatagcgaccttgaattaaccttagtgagttgatattaagagaaatcatctgaaagaataggctttcacttgataaaacatagaaagagaagtgaggat

SEQ ID NO: 183564 - DNA, 583 bp, Homo sapiens
aaaaagttagtggcaaagaagaaatctggtttgaaggctcccagctttaggatcttgaggtagaatatagaaaaatgggtttagggccgagaggtaataacttagtaatcrgtatagaaagttaaggataggagccttaataaataaactcagacatttcagacttaacatgataaaggtttgcttttgctcaccagtcactctgatacagataatttgacactccaaccaaaaacaaaaaaaatgcagagttctcctgctgctattatattataaatatggcttttgaatttatcagagaagagaaagaatgggagtgggtaatcatggagatatatggtttaggtttggaagtgatatgcatcacttctaccctgatacctttggctggaaaccagtgacatagactaatggatctgtaggaatgatgaaacatacaatcttcttatataacctgaatagggaaattgaaagcgtttagccagcctctatcacaaatgcattccttctttggtaagtagcctgcttatcctacatttccattgtatatacccatgcttttattattactattttgctgtca

SEQ ID NO: 183565 - DNA, 583 bp, Homo sapiens
aaaaagttagtggcaaagaagaaatctggtttgaaggctcccagctttaggatcttgaggtagaatatagaaaaatgggtttagggccgagaggtaataacttagtaatcagtatagaaagttaaggataggagccttaataaataaactcaracatttcagacttaacatgataaaggtttgcttttgctcaccagtcactctgatacagataatttgacactccaaccaaaaacaaaaaaaatgcagagttctcctgctgctattatattataaatatggcttttgaatttatcagagaagagaaagaatgggagtgggtaatcatggagatatatggtttaggtttggaagtgatatgcatcacttctaccctgatacctttggctggaaaccagtgacatagactaatggatctgtaggaatgatgaaacatacaatcttcttatataacctgaatagggaaattgaaagcgtttagccagcctctatcacaaatgcattccttctttggtaagtagcctgcttatcctacatttccattgtatatacccatgcttttattattactattttgctgtca

SEQ ID NO: 183566 - DNA, 364 bp, Homo sapiens
gtttgtttatctagaaagtaaaatagtaatggcaacattactataacatacaagttggcattctaccttaaatcttacataagcacattcttcaatacagtaataagaaaaagtttaggtatttcacttttatcataacatgtcctcacaatgacttttccatttaaattgggacttaaaaactccctaaaatcctagtgayaatcaatgtgcatactataaatgtagttttatttaaaactgtcatgctgcaaatttttgaacaaaatttattttgaagcagatcaagaaaattgccaaataaagctatgtgctacattttctggttgataaagaaaggcagaaatgttggctgtgcatctat

SEQ ID NO: 183567 - DNA, 470 bp, Homo sapiens
ctatttgaaaaattagtttcagaaacttaggaagccaggcaaggccaagttattaacctgtctgctgggaaaggtgagaagcttatctcctgtatacagtgaggccygccgtccaattgtttgcctaattaattttcacatagctgttcacattcccttcagtacagaactgtgaagaaaaatctaaattcataatatacatttgcattgccaaaagtaatgctggcagaaacagtgtttacaaatttaagtgttatttatttttttaaatatttgcgtacatatcatccagtccagggggaaggcagtcttcaatattgtcttccttttaccctgagcctgcgtgcacttctgtagaaattcagggagagggatactgtgtggtgctgaaagagcagtaaggagatttggcaactcctgaattttgacgtttcttgctctgtgggtgacttaaattggcatatattaaa

SEQ ID NO: 183568 - DNA, 437 bp, Homo sapiens
ctcagcccacactataaatgggacaagatcagatgtgggtagaacttagaaggctatttcagkgtcccaggaaagagatgataataacatggactagaattcatgggagtagtgtttagggatggaaaaaaaattgtttgcatatgaaaattataaagtcaactttataagatttagtgatggattgaatgtaaaatgagagagagggctctaaaaccaccgtagctttccaactagtagactttgatgaatgggttattattattagaaataaagaacagtagtctggaattaagtttggatagaatgtgagaaagatagtaaaactgatggcttttgaatatccaaagtaagatgtaactagactttgaataaatgatttgcaacttgaagaattgtctgggttgaagatacgtatgagtacatcattgaatctg

SEQ ID NO: 183569 - DNA, 437 bp, Homo sapiens
ctcagcccacactataaatgggacaagatcagatgtgggtagaacttagaaggctatttcaggrtcccaggaaagagatgataataacatggactagaattcatgggagtagtgtttagggatggaaaaaaaattgtttgcatatgaaaattataaagtcaactttataagatttagtgatggattgaatgtaaaatgagagagagggctctaaaaccaccgtagctttccaactagtagactttgatgaatgggttattattattagaaataaagaacagtagtctggaattaagtttggatagaatgtgagaaagatagtaaaactgatggcttttgaatatccaaagtaagatgtaactagactttgaataaatgatttgcaacttgaagaattgtctgggttgaagatacgtatgagtacatcattgaatctg

SEQ ID NO: 183570 - DNA, 437 bp, Homo sapiens
ctcagcccacactataaatgggacaagatcagatgtgggtagaacttagaaggctatttcagggtcccaggaaagagatgataataacatggactagaattcatgggagtagtgtttagggatggaaaaaaaattgtttgcatatgaaaattataaagtcaactttataagatttagtgatggattgaatgtaaaatgagagagagggctctaaaaccaccgtagctttccaactagtagactttgatgaatgggttattattattagaaataaagaacartagtctggaattaagtttggatagaatgtgagaaagatagtaaaactgatggcttttgaatatccaaagtaagatgtaactagactttgaataaatgatttgcaacttgaagaattgtctgggttgaagatacgtatgagtacatcattgaatctg

SEQ ID NO: 183571 - DNA, 437 bp, Homo sapiens
ctcagcccacactataaatgggacaagatcagatgtgggtagaacttagaaggctatttcagggtcccaggaaagagatgataataacatggactagaattcatgggagtagtgtttagggatggaaaaaaaattgtttgcatatgaaaattataaagtcaactttataagatttagtgatggattgaatgtaaaatgagagagagggctctaaaaccaccgtagctttccaactagtagactttgatgaatgggttattattattagaaataaagaacagtagtctggaattaagtttggatagaatgtgagaaagatagtaaaactgatggcttttgaatatccaaagtaagatgtaactagactttgaataaatgatttgcaacttgaagaattgtctgggttgaagatacrtatgagtacatcattgaatctg

SEQ ID NO: 183572 - DNA, 532 bp, Homo sapiens
acgtgggcttggttctgacctcctaaaatgcctgccttgtattttctcacagcctaaaacttttcagacagatgcctcttgtttttttctttgatattgaacatattattgtaactcaataactgataatataaacattttgcaaattgatattcacttatgaaatttggaataagcaaataaaakgtttttaaatattaggaaaggcttcttattactagtattattagttactagagttctagatactagagttcccgttatatcttgaaaagaactgaagcatcaaagtaataagttttataatataaagtttcattctttctatgtattttcaattatcttttagagctcattaatattcacttttttttttcctacataaggataaattattcatgctggtttctttttcagtgtgtaagggtttggaaagtagagaccttttttttttaatggtatattggtttattaatgtatggaagcttaaattcagaagccatgtgactcttttggaagtcaataacataat

SEQ ID NO: 183573 - DNA, 532 bp, Homo sapiens
acgtgggcttggttctgacctcctaaaatgcctgccttgtattttctcacagcctaaaacttttcagacagatgcctcttgtttttttctttgatattgaacatattattgtaactcaataactgataatataaacattttgcaaattgatattcacttatgaaatttggaataagcaaataaaaggtttttaaatattaggaaaggcttcttattactagtattattagttactagagttctasatactagagttcccgttatatcttgaaaagaactgaagcatcaaagtaataagttttataatataaagtttcattctttctatgtattttcaattatcttttagagctcattaatattcacttttttttttcctacataaggataaattattcatgctggtttctttttcagtgtgtaagggtttggaaagtagagaccttttttttttaatggtatattggtttattaatgtatggaagcttaaattcagaagccatgtgactcttttggaagtcaataacataat

SEQ ID NO: 183574 - DNA, 599 bp, Homo sapiens
aagcttttttttcatttggtcaataaatgattaagagcattttaaggttaatgatctcatgatgtgatcaatcattgtaagttacaatctgccaccagggcttctcattttgctgaaagaaaatgatttcttgataatgatcacaagaagcacatctgtatgctggttgaaaagttaattaaaatgtgattccatctggtggtccagttgggaatgtcaccattcgatttaatctacattgagctgaaatgaacttkgcataatcaaaggatataatgcagtgggggacatggagatataagttactgttgcacatgttaatttattttttcttcttttttaaaagacttttttcttttataaaagccagaagcctgggaatacagaatttccttatgattttctcaatatgggaacatttacctttatgtgaatttcatctaactgcacatttattcctattttctctcttcactttcggtagggttgataaagctgatgtgagcacacattatttgaaagctgctgacttcaatcactcattttgttctgatatcatgtgtattaggtttctattactgttaaaaaatttgcaagta

SEQ ID NO: 183575 - DNA, 587 bp, Homo sapiens
ctactacaacctccgccttccaggttcaagcaattctcctgcctcagcctcccaagtagctgggattacagccatctgccaccacgcctggctaatttttgyattttcagtagagacggggtttcatcgtgttggccaggctggtctcgaactcctgacctcaagtgatccaccccccccgccccttggcctcccaaagtgctgggattataggcgtgagccaccgtgcccggcctctgttctttttaattgtcctttccttgtgtcttccaacagtcaagacttacattctatcagcatgttgatccctgcagtaaaagacatctcaacgggctctgatggaaaattaccagggaggagttttactcacttaacttcagtcacttgcccttttcacaacaagctcaacagtcaatgaggtgtgaggtggcactctttttggccaggcctgggtcatatggacactgctgtgggcgtatgcagacaaccctgccaaacgcacatagaatgattttcccaccgaagagatggttctgctattagaagaagaaaagtttatttgaaaaccaaaaacaacagttcactca

SEQ ID NO: 183576 - DNA, 669 bp, Homo sapiens
atatgcacaggttatatgcaaatacyatgccattttatataaggaagttgagcatctgtggattttagtatctgctgggtgtcctgaaaccaatcccccacagatacagggagacaattgtatgtgcattcttaagctagttaggcagaactgaaaataatctgcatttaacaaaaagcataaaaaacagatatgattctgacttctttgaatggcaattggacctgttttatttggcttgaatggcaccattcatggcattatatatatttttattgtaaaaatgtttatgaacttatcttaagggaaacagatatgtagaaactttgtcttcctcactgattaattatcagattataggcttttattcaaaacattatgtgaaatttcttaaaaccactcttaagaatatcttagaagttttggcctaaagaacatccccttgaggctgttgtccctgtgaggtgtgtgaaaaatgaggtgtcacccattgcttttgtcagtctcacacttcacaatctcttatctgtaataaaatgcgagagaagataatataactgtccctctgtgctatattgtttgagcatcattatcaagaatctctcaagagagtcttcactattagcaaggtaaccacagcatttgccttatagcccatggaagtgataa

SEQ ID NO: 183577 - DNA, 589 bp, Homo sapiens
tgtgcattcttaagctagttaggcagaactgaaaataatctgcatttaacaaaaagcataaaaaacagatatgattctgacttctttgaatggcaattggacctgttttatttggcttgaatggcaccattcatggcattatatatatttttattgtaaaaatgtttatgaacttatcttaagggaaacagatatgtagaaactttgtcttcctcactgattaattatcagattataggcttttattcaaaacattatgtgaaatttcttaaaaccactcttaagaatatcttagaagttttggcctaaagaacatccccttgaggctgttgtccctgtgaggtgtgtgaaaaatgaggtgtcacccattgcttttgtcagtctcayacttcacaatctcttatctgtaataaaatgcgagagaagataatataactgtccctctgtgctatattgtttgagcatcattatcaagaatctctcaagagagtcttcactattagcaaggtaaccacagcatttgccttatagcccatggaagtgataaaactgtcttcgtgtggcttataaaaatccctgaaagaaatta

SEQ ID NO: 183578 - DNA, 458 bp, Homo sapiens
tctgggtgaatacatttgtttttgtaaacaaagggccggtagtttcttcaggagccagtgcctcaactctcattctgcagtcctatagtatccacgcttgtcaatcagaagtggttttgaatggatatgatgccacattcttgcataaaaaaattttgtttttgattgacaaattattttgcaaggttaatatgaatatgtataatatgcagagcacaaaactactaaaatgttatgagtctcatacataattacctttaaatgaaactatagctgtgaaagtaatttcacagtcacgttcttttagattttagtaataytatatgtgtgtggcttttatatgggcatattatgatgaaaacccatatataatagaataaatgtaatagtagcctgtaaaagtacagtgatggctatatgtccacatacctatcgtaagtttctaaatcaggtgtggt

SEQ ID NO: 183579 - DNA, 635 bp, Homo sapiens
aattatttcaccatagaaaacaaaacaaagttaaatattaaaaatgaaagcatccaaaattctactttattacctcattaatactttgttgcaaatagaatgaagttatggttgcttgtcaggaatagtgataggttgttgagaaaaacattctgcctcaggttgatcacttcttcttcagggatttggttccttgccttgtgatttggaaagctcagttgccaacaaaccctgagataatcagtcattggcagacacacttatagaaaccaaattctcaagtaaaagttttgtagctaaagtcaattaatttctagtgagggttatacctgmctcaggcaaaatgtaattctaagtggattggacatgcaaattcccaaaaggaataatccagtacaattattttgaattagtcatgaggctttggtctcaaaatctccattccatatgttaaacataaaattgaaagttgacactgttatatgtatgaataatttaatcagaaaatagactatgaccactgctaaattattttgccaaaagtgccaagactaccaaacagaatgtatttatagtagttgacaaaattttaaaaataataagaggatgtgccatttctagcattaaatatgtag

SEQ ID NO: 183580 - DNA, 618 bp, Homo sapiens
gacatgcaaattcccaaaaggaataatccagtacaattattttgaattagtcatgaggctttggtctcaaaatctccattccatatgttaaacataaaattgaaagttgacactgttatatgtatgaataatttaatcagaaaatagactatgaccactgctaaattattttgccaaaagtgccaagactaccaaacagaatgtatttatagtagttgacaaaattttaaaaataataagaggatgtgccatttctagcattaaatatgtagacttttattaaacgtttatttttaccaaattacctgtgagtagttcacttagtttttgttgtttagtcatctttaaattgaagaattgtttaggtatattttatttagttaagaagacttagacttcctcaaatgtccttaagtatgggtacagaggttattctaaggatatatatgcctatgaaattagcaaamtatgtacaagtgacccagaaaaaatatcaattatagagaaagttcactatcttctctgtagtactctaccattgatttggttgttccaattttagttttcttttctgttactatgccacttttcaacttactgtctctcagctccaattaa

SEQ ID NO: 183581 - DNA, 618 bp, Homo sapiens
gacatgcaaattcccaaaaggaataatccagtacaattattttgaattagtcatgaggctttggtctcaaaatctccattccatatgttaaacataaaattgaaagttgacactgttatatgtatgaataatttaatcagaaaatagactatgaccactgctaaattattttgccaaaagtgccaagactaccaaacagaatgtatttatagtagttgacaaaattttaaaaataataagaggatgtgccatttctagcattaaatatgtagacttttattaaacgtttatttttaccaaattacctgtgagtagttcacttagtttttgttgtttagtcatctttaaattgaagaattgtttaggtatattttatttagttaagaagacttagacttcctcaaatgtccttaagtatgggtacagaggttattctaaggatatatatgcctatgaaattagcaaaatatgtacaagtgacccagaaaaaatatcaattatagagaaagtwcactatcttctctgtagtactctaccattgatttggttgttccaattttagttttcttttctgttactatgccacttttcaacttactgtctctcagctccaattaa

SEQ ID NO: 183582 - DNA, 501 bp, Homo sapiens
aagtttgtgttagctgtcctttgtaggacagatatcatggtaaatgttacacaayggaaatgagttttctgattttagtggagattactggattccagaaaaacagaagttaggtggaagcggtagcagtatttaatcatttttttcttctttttttaactaaaaagtgtattagggacagcgtggtaattagaaagttttgatccatatgaatttttgttggtagttagtcaattgatcacggtgtctctaagaatgagtatatagtctgattattaaatatttacttatctatatatagtcaggttattaaaaataaatacaggtgtagtggacaagaaacacaataaggtattattgctgcttacccagtttctaggactaagccaattcatagacccaaagaatgcagattgaaggagaattaggattcctttgaggaaagaccctgcaacattggcacaagtacatactctaagtacctctttcatacaagcatat

SEQ ID NO: 183583 - DNA, 501 bp, Homo sapiens
aagtttgtgttagctgtcctttgtaggacagatatcatggtaaatgttacacaatggaaatgagttttctgattttagtggagattactggattccagaaaaacagaagttaggtggaagcggtagcagtatttaatcatttttttcttctttttttaactaaaaagtgtattagggacagcgtggtaattagaaagttttgatccatatgaatttttgttggtagttagtcaattgatcacggtgtctctaagaatgagyatatagtctgattattaaatatttacttatctatatatagtcaggttattaaaaataaatacaggtgtagtggacaagaaacacaataaggtattattgctgcttacccagtttctaggactaagccaattcatagacccaaagaatgcagattgaaggagaattaggattcctttgaggaaagaccctgcaacattggcacaagtacatactctaagtacctctttcatacaagcatat

SEQ ID NO: 183584 - DNA, 380 bp, Homo sapiens
cataatattaataaaattaaaagaaattttaactgtatctttatatacatgatattattccatgattaatttaatttatgcataacaaaattttgaatgtttttatgctttttatgtatttttaaatgtccagtctctacaattaatatattacttttctaaatagaaaagaatttgaaaataatagcttaacattgttgacatatcatttactgatmgctttattcatcttttaattacctaacacttttttagaattacattttttatctctgaaaaggtaccttgtgaaataaactcacaaagattatacaaattatgtaatttggaaatgctttccattaattcctatgttaatttgcagagaatttattaaaatt

SEQ ID NO: 183585 - DNA, 603 bp, Homo sapiens
aaattgaggagaagcacatgctccctaatttattctataaagtcaatatcatcctgatagcagatctcgaaaatgatatgaccaaatcaagaaaactacagagcaatgtcatatatacactatcattatattttcagttgttccagaatacaatacatatcttaattatgcttattgtctattaaaagagaatatttttccaggtagaaaattttgaaaatatgaaataaaaactaatagcagcaaagcaaaatcaaacaaaagagaaytttttaagcacttaccataaatttttactatactgatttcttaaccattttccttcactgataaatttatataggtatacttttaaaaactcatttcaataacagctaatttataatctttccaaattacagcaagtgttgttccagattgggtctgaaattagggtatttgtatgggtttttcaaaaagaacagtataggtaaaagagaaagttgggaaagttatggtatgaggtaaacaaagttgtgagttttcttctccaaaaatactctgacagaacttacagtcagttcttattgattacaactacatttttaggctcaaatgaacaga

SEQ ID NO: 183586 - DNA, 500 bp, Homo sapiens
tcatgtatggcttggtgccctcctcatggtaatgagtgagttcttgctctatttgtttgcaagagaagtgattgtttaaaagagcctggctcctcctccacctgtttcccttgcttcctctcttgccatgtgacacatctgtgctccctttgtcatctgccatggtagaagctacaagaagcctcaccaaaagctgaccagatactagtgtcatgcttgtgtgacctgcagaatwgtgagccaaataaacatcttttccttataaattttccagtctcaggtattcctttagagcagtgcaaaatggactaacaaccttaataaagcattaaaaaagtgccaaaatgtattacaattgctctgttacttaaaagcttatgttatactctcaattatatgattaaacacattttaagaaaaacaatttagtatttaattgataggaactatcaatcatacattttgtggtaatattcaaatattaaacatttacagtctca

SEQ ID NO: 183587 - DNA, 573 bp, Homo sapiens
tgatgggtgcagcaaaccaacatggcacatgtatacctatgtgcacgttgtgcacatgtaccctagaacttaaagtaaaataaaaaaaaaaagaaactgttatatttaaacaagacctttcctccaaaatactattaaatttaaaaaatgagtaataattaatgttatcacagtaaaataaaaatgtatatatttatataacatttrctcattacacatgatttttctaatatgttcatttcttcaaactatggttacaaatacatcatcattaggaatacaaatgtattcatgtgtgtaagagtagtattatatttatagataaaatagacaagatatttttgaactcataaatacaatcatatataaattttaaaaaattggaatccaataattcattattcaaaaattgatctaattattacagtatttggtgagatagtgtacactaacaaaatttaactaaaattttgggtttaaaaattaattttatcttgtaaatttcaagtagtatgttaagacatcctgtctactttcaaaacatgtttgcttacataaatattaaagatatgc

SEQ ID NO: 183588 - DNA, 573 bp, Homo sapiens
tgatgggtgcagcaaaccaacatggcacatgtatacctatgtgcacgttgtgcacatgtaccctagaacttaaagtaaaataaaaaaaaaaagaaactgttatatttaaacaagacctttcctccaaaatactattaaatttaaaaaatgagtaataattaatgttatcacagtaaaataaaaatgtatatatttatataacatttgctcattacacatgatttttctaatatgttcatttcttcaaactatggttacaaatacatcatcattaggaatacaaatgtattcatgtgtgtaagagtagtattatatttatagataaaatagacaagatatttttgaactcataaatacaatcatatataarttttaaaaaattggaatccaataattcattattcaaaaattgatctaattattacagtatttggtgagatagtgtacactaacaaaatttaactaaaattttgggtttaaaaattaattttatcttgtaaatttcaagtagtatgttaagacatcctgtctactttcaaaacatgtttgcttacataaatattaaagatatgc

SEQ ID NO: 183589 - DNA, 656 bp, Homo sapiens
ttcatgtacgtgtgtgtgtatatatagtaktgtatacacacgcaatcaggttaggtagtcaaaccctttatatgctaacaacttccttaactaacaaaattgtcataacgtgatcaacattggtatctttcaaaattgatataacctgaggtaccgcttgagcgtccctaatccaaaagtccaaaatccaaaatgctccaaaatccataattttttgagcatctacatgactcccaagtgggtaactgcacacataggaaacactacatgtaagtacttaacaaaaagtttgtttcatgcacaaatttaaaatatgtataaaattaccttcaggctacatgaatgaggtatataggaaacctaaatgaatttcatggttagacttgggtcccatcccccaaatatctcattatgtaaagcaaatattcccaaatccaaaaaaatctgaaacccaaaacacttgtggtcccaagcatttcaacccatactttacaactgatctacttgtttgatgcattagccaacatttggtctttatccataacattctttaaaaacaaacaaaaaaaaacccaacaacaaaaaaaaaaaaacaccactgccagaataacaaaatgtcttcagaaactcttaagcagattcttcaggatctatca

SEQ ID NO: 183590 - DNA, 484 bp, Homo sapiens
  misc_feature (1)...(484): n = A,T,C or G
ttcctgaatcatgggcttgtttcaaagtaaagggacacatcttttcactttcaaagtaaayggacacatctttaaactgaagttttaaaatgcaggttggggtgggggtnggggtgtgaataacagccagtggaaggcagtttggataattagtttctgttaacaagacacttgatagaattttaggtgaacaaagtttaaggagaaaacatttaaggctgacatttaaaaaacatttaaaaagcgtatctgaagacaaatacctaaaattggtatgtacatgcatttctttggagaacagttaagttctgtgattatatattcataaatactaagtagtaaagacagaatgatctagtattcatacaatactttagtaagtgagaccttccaattattttgggtttttgatttctctaagaccaccagtccttcttaaaatgctatatctatttttatagaaagattcagaaggcgtatattt

SEQ ID NO: 183591 - DNA, 499 bp, Homo sapiens
gaattctgaaataaaggggctggcagggcagcactccctctgaagcttctcgaggaagatctctccttgcctcttccagcttcttgtagcccctggtcttcctttccttgtggcagcacaacttcaattcctgcttctgtcttccctctgtgtctctctgtcttcacatggcattcttttatttatctctcyttttttacaaggacaccagtcttgctggattagtgtccaccctactccaatatggactaattttaactaattacatatgttatgactctatttccaaataaggtcacgttctgaggttctgggggttatatctttttgaggaaaatgattcaatccattaacactatctgttcttccagagatattttatcttccaaataagcctggatcctactgtcttagaaatacaggaattgactttctctgggctgtgttttgatgccatgttttcaccttttaccaagcagagcaagaagaaatgacttaa

SEQ ID NO: 183592 - DNA, 613 bp, Homo sapiens
gaattctttctctcagcaaggaacagctctgagaaagagaatgcattcctagggggaggtctctaaaatggccactctgggagtgtctgtcttatacagttgtagataagggatgaaataagccccrgtctcctgcagtgccctcaggcttattaggattaggaaattcctgcctagtaaattttagtcagaccagttgtctgctctcaaaacttgtctcctgataagatgttatcaatgacaatgcgtgcccagtgggacatgaaacttcatcagcaattctaatttctccctggtcctgtgatctcactctgcccccatttgccttgtgatattttattgcccttgaagcatgtgatctctgtgacccatactctatttgtaccccgctccccttttgaaatccataataaaaacttgctggttttttggcttgggggcatcacggaacctgatgacctgtgatgtaacccccggacacccagctttaaaatttctctcttttgtgctctttccctttatttcttagaccggccgacacttagggaaaatagaaaagaacctacattgaaatattgggggctggttcccccgatacttatctggtctaacc

SEQ ID NO: 183593 - DNA, 613 bp, Homo sapiens
gaattctttctctcagcaaggaacagctctgagaaagagaatgcattcctagggggaggtctctaaaatggccactctgggagtgtctgtcttatacagttgtagataagggatgaaataagccccggtctcctgcagtgccctcaggcttattaggattaggaaattcctgcctagtaaattttagtcagaccagttgtctgctctcaaaacttgtctcctgataagatgttatcaatgacaatgcgtgcccagtgggacatgaaacttcatcagcaattctaatttctccctggtcctgtgatctcactctgcccccatttgccttgtgatattttattgcccttgaagcatgtgatctctgtgacccatactctatttgtaccccgctccccttttgaaatccataataaaaacttgctggttttttggcttgggggcatcacggaacctgatgacmtgtgatgtaacccccggacacccagctttaaaatttctctcttttgtgctctttccctttatttcttagaccggccgacacttagggaaaatagaaaagaacctacattgaaatattgggggctggttcccccgatacttatctggtctaacc

SEQ ID NO: 183594 - DNA, 537 bp, Homo sapiens
tttaactccttaatacatatggtcttcttagaatgttatacagrcctcaataacaacaccttcatagctattttattctgaccccttgatagctattttcttccttctttcctttccttttttcttttatagttactttcctccctctggggtcactatgagaaaaatattaatgaagcagaggaaacaaatatttatgggcttgaaatggaactgctgtaatgctgatgtcatataaaatgaggccaaaattatacaaaaagaggccaaggtaagcaagaattaagttttatattaactagacttttaaaagagtaaaatcttatgagaaccagaaggccatccgaatagtttctccttctaaaataggttagataatcataattaacaaggaagaaatactcaggaaatctaaaaaaataaaataaaatttaaaatagcttagacatcccctatgtcatctctcaactaggagaacaacctcaggctaagtttagtggatcagaaagaaacaaaggagcctggggctttgtgcca

SEQ ID NO: 183595 - DNA, 397 bp, Homo sapiens
gctgccaacacttgcattcctatgtgcaggaaagacttccttcagacacagctcaaaatagccactgcccccaaatttgctggttaaaataagtcggtaagtcacaaccacccatcttggctttgactctctcttcatttctgtcctgaggagtctctcccttgtcaacatggattatggcagatgcctgaaaagtttccagaggggctggccaacacaggaggcagggtccctgtagctagaagacccagctgaaaaatttgccttygacggaaacatgaacatgataggcaggtgagagtaggggcatcgtgtattggtctctgcctcctccatgaaggagcactgcatctccaccacacactgttctgctcagaaccaaagctggcaagcttag

SEQ ID NO: 183596 - DNA, 397 bp, Homo sapiens
gctgccaacacttgcattcctatgtgcaggaaagacttccttcagacacagctcaaaatagccactgcccccaaatttgctggttaaaataagtcggtaagtcacaaccacccatcttggctttgactctctcttcatttctgtcctgaggagtctctcccttgtcaacatggattatggcagatgcctgaaaagtttccagaggggctggccaacacaggaggcagggtccctgtagctagaagacccagctgaaaaatttgccttcgacggaaacatgaacatgataggcrggtgagagtaggggcatcgtgtattggtctctgcctcctccatgaaggagcactgcatctccaccacacactgttctgctcagaaccaaagctggcaagcttag

SEQ ID NO: 183597 - DNA, 397 bp, Homo sapiens
gctgccaacacttgcattcctatgtgcaggaaagacttccttcagacacagctcaaaatagccactgcccccaaatttgctggttaaaataagtcggtaagtcacaaccacccatcttggctttgactctctcttcatttctgtcctgaggagtctctcccttgtcaacatggattatggcagatgcctgaaaagtttccagaggggctggccaacacaggaggcagggtccctgtagctagaagacccagctgaaaaatttgccttcgacggaaacatgaacatgataggcaggtgagagtaggggcatcgtgtattggtctctgyctcctccatgaaggagcactgcatctccaccacacactgttctgctcagaaccaaagctggcaagcttag

SEQ ID NO: 183598 - DNA, 397 bp, Homo sapiens
gctgccaacacttgcattcctatgtgcaggaaagacttccttcagacacagctcaaaatagccactgcccccaaatttgctggttaaaataagtcggtaagtcacaaccacccatcttggctttgactctctcttcatttctgtcctgaggagtctctcccttgtcaacatggattatggcagatgcctgaaaagtttccagaggggctggccaacacaggaggcagggtccctgtagctagaagacccagctgaaaaatttgccttcgacggaaacatgaacatgataggcaggtgagagtaggggcatcgtgtattggtctctgcctcctccatgaaggagcactgcatctccaccacacacwgttctgctcagaaccaaagctggcaagcttag

SEQ ID NO: 183599 - DNA, 514 bp, Homo sapiens
ctgctctgcatagctgtctgttttctctgggttactttgcttcagtgccctgcacctgcagtggcagatgggtcctaggagcttcctgaggacaggtgcccagtctctagggcccagggtgatctacacacagtggatgcttgctyggtacaagaagtgccctaggctgactaatctagggacgcagaacaaaccactataactgaatcaatgcagtacttcctggaacagaagctaagctgaaaacaatggctgtaacctcacaagaagctccacccttccttctgctctaagtgaaaatctaggttgaggaggcaaaaacctgcctcttctccctcatttcaaacccacatcccatcaattctgtcgtgtgaacatggtgggcatagccccacccagagctggacctaggacctgcctggtgagcgatcttgccctccactttctggtgccaagtaggagaaagggctttccacttcatgtggctctgtaaacatggtgtgttacactgcag

SEQ ID NO: 183600 - DNA, 571 bp, Homo sapiens
tgagaaaccaggtgtcctcttaagctactctctctcccacaccaccacctattatcagccaccaagtcctgtcagttatgcttttgcctaaatatttctcaaaccagaccacctctctccaaccccatagaaattacattagtctttatcttttacctgtgttacaggatcccagtgtccttcaagaccaccttggatgtttcttcagtctgtcctcaggaagaagggaggagagccttctaaaatgcaaatttaatcacatgactccccagcttaaaactctcagctggctatttcttccccggccccacccccaagatctcctcacactgggtaacactggatatggaattccttttagttgcttaaacaaatcaatctagttctgtctcacgagctctctctagaatatcctctcacctgttcacttaattccttactcatcccccatcatagcaccagaaagccctccaggcaggaacagttactcctgctctctgctcccattgcccacaggcattcctccrccctctgtcattccttgtttttcattgttttccccactagactg

SEQ ID NO: 183601 - DNA, 615 bp, Homo sapiens
ggatgaatggataaggaaaatgtgacatatatacacaatggaatactattcagccataaaaaagaatgaaatcctgtcatttgcaacaaaatgaattaacctagaggacattatgttaagtgaaataagccaagcacaggacaaacactgcatgatmtcactcatatgtgagatctaataagttaatctcatagaagtagagagtagaatagtggtaaccagagactgggaagagtaggaaagagggaggatgaaaagagattggtcaatgtatacaaagttacggttagataggaggaataagttctggtgttctattgtatagtggggtgactatagtcaacaacaatctattgtatacttcaaaatagctagaagaaatgatttggagtactctcaccatgaagaaatgacaagtgtttgaggttatggatatgctatttaccctgatttgatcattacactatatatacacatatatactatatatatgtatatgtatatgatcattacactatatatacacacatatactatatatatgaaaatatcacactgtaccccataaatacaattatgtatttgtacttatgtatacataagtacaattattat

SEQ ID NO: 183602 - DNA, 615 bp, Homo sapiens
ggatgaatggataaggaaaatgtgacatatatacacaatggaatactattcagccataaaaaagaatgaaatcctgtcatttgcaacaaaatgaattaacctagaggacattatgttaagtgaaataagccaagcacaggacaaacactgcatgatatcactcatatgtgagatctaataagttaatctcatagaagtagagagtagaatagtggtaaccagagactgggaagagtaggaaagagggaggatgaaaagagattggtcaatgtatacaaagttacggttagataggaggaataagttctggtgttctattgtatagtggggtgactatagtcaacaacaatctattgtatacttcaaaatagctagaagaaatgatttggagtactctcaccatgaagaaatgacaagtgtttgaggttatggatatgctatttaccctgatttgatcattacactatatatacacatatatactatatatatgtatatgtatatgatcattacactrtatatacacacatatactatatatatgaaaatatcacactgtaccccataaatacaattatgtatttgtacttatgtatacataagtacaattattat

SEQ ID NO: 183603 - DNA, 504 bp, Homo sapiens
caattccgcaagaggatataacaactataactatcaaggcaccccacaccagagcacccaagtatataaaacaaacattaacaaatctaaagggggagatagactgcaatacagtaataatagggaactttaacactccactctcagcaatgaacagatcatctggacaaaaaaatcagcaaaaaaatcagagttaaactgtacactagaacaaattggtctaactgacatttacagaacatatcacccaactattccagaacacacatttttttcattagcttgtggaacatctccagaatagatcatatcttaggccaaaaaacaagtctcaaaaaattcaaaaaggtagaaatcatatcaagtatattttctgacttcaactgaataatgctagaaaatcaataacaagargagcctcagaagccacacaaacacatggaaattaaacaacatgctcctgaataatcaatgggtcatgaagaaattaagaaggaaataaaa

SEQ ID NO: 183604 - DNA, 632 bp, Homo sapiens
caaggctttaatcactgctgcagccatcacagcagcctgtgaagaaagccagtctaaacatgacattgatactgtggcaagtagaattatgggcaaaattcctaygggtctttgatgccctcatagaaccactgaccactgaatcagaccactgaatcagattgaacagtattatcttagttttgtaagaatatatgtggtgtatgtatgaatgtgtgtgtgcacactaacagagggaaaagaatagagtgagagtgagagagagtaggatatgaaaggatatacatcaaaatattaattgtgcttatcattaggtgatgggatgtggtaatcttattttctactttagagagggcttttaaaaagcatagtctctaatttcagtcaatctataacgtcataagtcaattttttatttgcaaaaaggttggagtgaaactttgtgttgcacaggtcaatccagtgctgaagttctgaattcctctagcttcagtcctgactttctactgtcacctaattttgcataacacaattatcaataatgaaaataataatccacatttgtattgctttatagtttacaaagcttttcatctgtattattatttcctttccccattgagaaaacaaag

SEQ ID NO: 183605 - DNA, 569 bp, Homo sapiens
gaattcttgagggtgtccctagggatggagcagagaggaaggggatcccaggcggcgagcaaggagctgccagccggatggtgcgatgggaggtggggaggacagctctggaagtgtggggggctgtgtgcagccctggggactggggagagtggcagcaggatgcatctctacttcgtggaggggtactgaggtactgtctgggtgtcattctgtccagatccaagtgtttgagtgagaggcagagaacgggcagtcgatattagtaggagrcttggagggcatcactggggagaaggcccagcttggatggggatgaggaagagggggaggtaggctggagggaacttggtgggacacatctcgtgcccagagggccagggcacgagaggctggaggaggcacagtgggcctgcagaactagctggaaggcccgtgtagctcagtggctctgcaggagctcccacagcagaaaaggcccccatggcctgactcgctacgggcctctcggctgtcagtgtgagggacaggtggccggggtcctccaacgccctgcatcttcctggctc

SEQ ID NO: 183606 - DNA, 575 bp, Homo sapiens
gaggaaggggatcccaggcggcgagcaaggagctgccagccggatggtgcgatgggaggtggggaggacagctctggaagtgtggggggctgtgtgcagccctggggactggggagagtggcagcaggatgcatctctacttcgtggaggggtactgaggtactgtctgggtgtcattctgtccagatccaagtgtttgagtgagaggcagagaacgggcagtcgatattagtaggaggcttggagggcatcactggggagaaggcccagcttggatggggatgaggaagagggggaggtaggctggagggaacttggtgggacacatctcgtgcccagagggccagggcacgagaggctggaggaggcacagtgggcctgcagaactagctggaaggcccgtgtagctcagtggctctgcaggagctcccacagcagaaaaggcccccatggcctgactcgctacgggcctctcggctgtcagtgtgagggacaggtggccggggtcctccaacgccctgcatcttcctggctcctcttcttccacgccctaaaygtcagaactctccagaatt

SEQ ID NO: 183607 - DNA, 524 bp, Homo sapiens
aaaagaaatagcttaattagaactctactttattttattgccaataaaggtatccaaccagcttgcatttttcactttctgctttggcttaatctataaaaataagaatataagtgatattttcaaaaatacttgtcagaatggtgataatttcagtggtaagtctaattttgtctctaatatggaagaaactattggcaattaggaaattatgttgggtagcatggaacgttacccaccagccaacktaacttgagtaacaaaaaagaataattaaaaaataaaagatttaagtacagattttaaagtccattcatagagttccaatgtccaaggcatatctgtgtggcaaagggtcagaagcaaggacggggcttgtatctcctcttctttcaatctgttgctatctctttgggctctagttctctcactgctaagaagtataagtccccaaacgagaaagctaaaagaggaaaataagcacttcaggatattgtcaccttgtcctcatgtcccgggagtca

SEQ ID NO: 183608 - DNA, 432 bp, Homo sapiens
aaccaagttctcatatcatccccagcctactaattttgagaattttctaagaatcaattctatctataaaatgggaatgcaattcgttattgactacagactgctcctataatagaatgaatgctaaccttatcaccttttttggttcccaaagcaaatcacttgcccttctccagagctacaaaaactagggcaccaggtttatatcagaaaacataaccatagttatcatctatacaagtttcatcgaagccatagtgacataaatgatctataattaaaacaatataaagataatgctttttcttatactccttaaactagtttcatttttacataayacactggagcagcaggacccagtatttctcaagcatacttggctagcctcctgtaaagtccttttccctcagatacttgaatataatcatt

SEQ ID NO: 183609 - DNA, 418 bp, Homo sapiens
ttatatttctcttttaacaggtttcacttttctagtcattctyctcatataaggatcagaaaacaacagtaaaatggagaaagagggttaggtgcctatagcccagtctgagacgaatgatactttagatcacagaaaaaatactttttaggagttaatcctaatgtttttaaaatttaatgatagaactcacacctctcttcagatcagaactaagacctggttaatgcagctataccttctcattctgtccatcatacatgcagttcattagttgggtctgagtcagtgctcagagtattaggtgctagtctaaaagcacaggtgacctgctctaaatcagacatttctaaagtacgggtcctagacagtagctgatggctcaagaaaaattctttctttggagaaaagggaattt

SEQ ID NO: 183610 - DNA, 581 bp, Homo sapiens
tttaatatgcatgtgaatcacctggagatcatattgagatgcagaattggattaccagatctgggaggtggagattctgcttttttaacaagctccmgggtgatatctttgctatgattccagaactacactttgaatagaaaagacatagaatattttattcagatgatttgtaaggtctgttgctctgatgtgttatatttcttctctctactactttggctaatgaatggataaaaggattctgctttgtttgcttctgaaggttttccactcctatgtgtatagctaggaatgtgcaaaccataaggctctaccattaaaatggcatgtaactgctatgtaatataggaatatatcagggtaaaatttaggagttgcactgatcagggaaagtctcaagttttcttggaataaaataacaactctccgcaaaaggcagagggtgtgatcgaaaaagactgagagacagattgtgcagactatggaaaatgtagcctgaattctactaaaggataagattttttaagtagatgataggctttggtctattagatctttaatcatcccatatcttcttg

SEQ ID NO: 183611 - DNA, 581 bp, Homo sapiens
tttaatatgcatgtgaatcacctggagatcatattgagatgcagaattggattaccagatctgggaggtggagattctgcttttttaacaagctcccgggtgatatctttgctatgattccagaactacactttgaatagaaaagacatagaatattttattcagatgatttgtaaggtctgttgctctgatgtgttatatttcttctctctactactttggctaatgaatggataaaaggattctgctttgtttgcttctgaaggttttccactcctatgtgtatagctaggaatgtgcaaaccataaggctctaccattaaaatggcatgtaactgctatgtaatataggaatatatcagggtaaaatttaggagttgcactgatcagggaaagtctcaagttttcttggaataaaataacaactctccgcaaaaggcagagggtgtgatcgaaaaagactgagagacagattgygcagactatggaaaatgtagcctgaattctactaaaggataagattttttaagtagatgataggctttggtctattagatctttaatcatcccatatcttcttg

SEQ ID NO: 183612 - DNA, 575 bp, Homo sapiens
ttggagggggacacaaacattcagtacataataatgtgaaataaaattaattgttttttaaaaaatcaatgttcttttacactgtaactttgcagaggcaactgttgttcccagtttcttgtaaggagagattggtgtgtgtttatattttgttaattcatacaaatttaccaagtccctttatgtacacagtaatgtgttagatttgaagagaacacaaaagaaatattagatgggcatttttaattgagaagcaaaccatttaattgcagaaagmagctctggtataatggaaagaaggcaagctttggagttacacagaagtcagtttgagtcccagttcagctgcttactagctgtgtgaccctgtattagtaatttaaactagacgacctaattttctcatcaatacaacgggcatgctaaaacttaacatttcagaattgttgtagagatgagtaaaatagatataaaaagttttgcacatagttgctactcaaaaagtaaatacagaaaaactgtcccttattattctaattgttctcaaggaagaattgaagagcaacacaagatag

SEQ ID NO: 183613 - DNA, 427 bp, Homo sapiens
ctccatctcaaaaaagataaaaggaaagaggtataaaagtagttgtatacatactttagacatatcagtcatactataaatgctgtcatcataaggaacakacattcataaccaaatttactgaaatactatctgacaacaagacagatttctggacatcaggactagtctgtaaaatccaagataaaaatcccattgctataataacgataaaagcagagtgctacaaacccacagatgagggaatgacaaatttcgtctggaatagatgagagaaggggacattttactaggccttgtggggtaagtaacatttaaacaaatgagcatggagaaaaatgcttgcttcttgggctgatggaaagactggggagggagtcatgaaagttcattccggcaatgaggacagtcatatggaactacagcc

SEQ ID NO: 183614 - DNA, 580 bp, Homo sapiens
tcatgggtgtatggattccccagtccccaaattgtgcacagtgatgtgatggccaggtggagccaatacatacgataaaatctttgctagaaaataaggaacctgagttagggaatccataacttgttttgtayactagtaataaactagtatacaataaaatagataaacaaatgagtatacaataaaataaacaaaacactagtatagtagtgaatttaaaataattattgtttagagtagcatcacatatatgaaatatttagggacaagtctaacaaatgttgtgcaatgtttgttcactgaaaactaaataatatgccaagagatattaaaaagacttaaaataatggagtgataggtgtgtcatgttaatatgggccatgttcatgggtcagatgactaaatattaaaatgcagtttctcttgaaatatatctgtagtttcaatgcaaacctagctgggcaattgacatattaagtctctgaggcaaggacatgctggttctggttcatttaagaaacctctcctaaaagcaagcagtgaatcaaattcttccctttttttttttttttttttt

SEQ ID NO: 183615 - DNA, 568 bp, Homo sapiens
ttatgaaaatattaggttattaagaacaatgtattccggaaagcaatcttgtgaactaatggaagatgtttgggtgtacttccactctcaataacaaaaacagtgttttagtaatgaatcattgtgtaacaatggttagttgttttgatgtgtcatttttttttcttatagtagtgtgtgaggaacatgagttcttttttaagaagttgttagaaatttctattttgcagaaattagtaaaataaatatctagggattattctttttatcattataatttattaattttcagaagacacatggtgcaaatcaaatgtaggctatgttaaacatacatttttctatcttcaaggaaagttgaatwcaaccaaagagtctgtaatttattagtgttcccaaacgtctacacttcttttttgttgttgttgaagtagcattggagatattatcaaaatgtttagaatttagtgtcaaaaattactggaaagagctccagtggaaagaaatcaccatagacctcaataagaaccctgtcaccatcataaaaagcaatcaagtatgtttaatt

SEQ ID NO: 183616 - DNA, 546 bp, Homo sapiens
ttttatagaataaattataacttacaaaattgtaaagttyggtacatgtaatcaattagaagtgcctaattacctcttcccacattcattagggctgacccattgtcttttcagactttcacgtgtgagggtagagagcctgtttcattcctctcactagtcatcttcagtgctttgaatattgaatgtcattccttaattgttgaagattgggaactgtgatagtcaatataagtgtcccctactaaaggaatatcttctatttttatatcaacccagacatttttctttttacaggaaggctgaaattgcaatgaatatgggtgaaactcgtattatttccagtgctattctttcagccatagatgaagactcacccagggagaagatttactatgtatttgaaaggcttccccaaaatgggcaacttcagcttaaggttagtgacttcttacttttatttttcaaaactaacgtagcaggtataaatcttctcaatatacacatttctatgatgggatttattctctgatagacatatatttg

SEQ ID NO: 183617 - DNA, 542 bp, Homo sapiens
tctctgttaaaacattatctgaatcccagcactttgggaggccaaggtgggcggatcacaaggtcaggagatcaagaccatcctggccaacgtggtgaaaccccatctctactaaaaatgcaaaaattagccgggtgtggcagcacacacatgtaatcccagctactcattactctgcaggcggaggcaggagaattacttgaacccgggagaggggggagaggttgcagtgagctgagattgtgctgctgcactccagcctgggtgacagagcaagactccgtcttaaaaaacaaaacaaaacaaaacaaaacaaaccattatctgagtattatcacctcctgccttctcaatgatttgccacagtgagcatctttctttctttccttccaattctcatctttgtcgctgagcaggggcmatccttatgtcttctccagggagactacttactccacaaacaatatgccaaattgttctgtattctatctgacatgaacttaaaagacgaaagttcagtgtcttcatcccactgcagtccc

SEQ ID NO: 183618 - DNA, 549 bp, Homo sapiens
cattatctgagtattatcacctcctgccttctcaatgatttgccacagtgagcatctttctttctttccttccaattctcatctttgtcgctgagcaggggccatccttatgtcttctccagggagactacttactccacaaacaatatgccaaattgttctgtattctatctgacatgaacttaaaagacgaaagttcagtgtcttcatcccactgcagtcccacctccccttgcagcaccagaacccttattgtttaggttcagatgggcaaagtcttggaccaaaaaggcagtgtgggagaaaacttcaygtgggagtcatcccatcctgctagcataacagattttaacaactgccaaatttgaatcccatgaactgcatgacaccgtaaattaacattcctggaattgtatatgttctcaaaattagatgctttaatggaaagcaaataagcatggaaacaataaagggaggattctaggggtaggtcacctgggttttactgctaactcaatagcttgctctgtgatttgataaaatgtcctt

SEQ ID NO: 183619 - DNA, 597 bp, Homo sapiens
ctctttccctcccttctttccttttttcctgccactcttcatctttgaaattctatcatttgtgtttagatcctttggcttctcacctgctttgcctgggacctatgtggttcacagaagtagccaatccattcrttattttaaaaagtttattggaaattcagccttgcacacaatatggctatacaggctactttaactgttaggatttttttgctttaagtaaaattttaccaagttgatgtgtaactctagttttatcttcaggaagtgatctatcactggaaaatggagtttcaaaggaaaagtacttctaaaacaataaaataataaatgaaaaatacattttaaaatttaaaaataataaagataaactttgtcattagaaaggctggaagttgctgcttctttcactttgaaagtgctaacatatactctttagggacaaggaaagacactataagatcaacttcttgtgagttaattaagcagagtcagttgtataagtggtgaatgggggagagttaaatggaagatggaggagagtttgtttaaaaagctcagcaaggaagagtagaagctcttgatacccaactg

SEQ ID NO: 183620 - DNA, 591 bp, Homo sapiens
aatatctttaaaaaaatttttttggccactgtgtttttaagttcagaaatagcttggcatttacatcacgtgtttttctttttggatattcaccctttcagtattagttcacaagagctccctaggtattaaagacagggaacaaaataatgcagtgtttaagagcttgtgctctgggctcagatggcttgcgtacgaattctcactcaatgttttattaattttgtaaccacaagcaggtaagttagcatttctataccttagcttcctcatttgtaatttgggcatatgatatgacaatacctcacaagattagtgtgaaggtgtaagggtctttagttctgtacctgacatagagtagaagcyctatatttgagatatgatcacttggtaatggacgtcaggtgaacaaaattcaattatggtccctagtttgtgaaactgcatcattggtccatgtgtgacccacttctaccttcctcagtcatacatttaaaaaaaatagtggtgaattatgcataacacaaaatgtaccatcttaaccatttttaagtgtaccagttcatagtgttaaatatattcatgttgttg

SEQ ID NO: 183621 - DNA, 284 bp, Homo sapiens
cttctaccttcctcagtcatacatttaaaaaaaatagtggtgaattatgcataacacaaaatgtaccatcttaaccatttttaagtgtaccagttcatagtgttaaatatattcatgttgttgtccatccaatctccagaattttttcatctcagaaaacttaaagtctatacccattaaataatgactcctcatttccccctccctggcaaccattgtcctrtgttctgtctctatgagttttgctactctaggtacttcatgtaagtggatatcttttcatg

SEQ ID NO: 183622 - DNA, 595 bp, Homo sapiens
atgtgattctacataatacatacatacatacatacatacatacatacatctgtgctattctaaccacactgcatttccttctctaccattagacagtatcrgtgcctgacgcatagtgtggtcttttgacatttgacattcttttgaaatgtcttttgaaagttccaaaatgtgtgcctttttctctgctggtgtgctggaaacactaattatcacacagtaggtgttgaataaatatttactgagtgaattactaatgaacacatttttaagccagtttgcattttagatatatgaataggtgagaggtctcttatttttgactctttctcacattgacggctgattgtttctttctaattctctcaacttcaattcggtttttccttttaagcccagttttctcatcctttgaacacttggttgctcaataatataatctctagattttccttgtcatttttaaacgggaaataatggcaaccacagagctctgcagatttgaccagagtgtctgctgaaaagggaggatgtccctgatcttttgtaccctaggttcatcaaaactccaagcattaattcctccctgtattag

SEQ ID NO: 183623 - DNA, 595 bp, Homo sapiens
atgtgattctacataatacatacatacatacatacatacatacatacatctgtgctattctaaccacactgcatttccttctctaccattagacagtatcggtgcctgacgcatagtgtggtcttttgacatttgacattcttttgaaatgtcttttgaaagttccaaaatgtgtgcctttttctctgctggtgtgctggaaacactaattatcacacagtaggtgttgaataaatatttactgagtgaattactaatgaacacatttttaagccartttgcattttagatatatgaataggtgagaggtctcttatttttgactctttctcacattgacggctgattgtttctttctaattctctcaacttcaattcggtttttccttttaagcccagttttctcatcctttgaacacttggttgctcaataatataatctctagattttccttgtcatttttaaacgggaaataatggcaaccacagagctctgcagatttgaccagagtgtctgctgaaaagggaggatgtccctgatcttttgtaccctaggttcatcaaaactccaagcattaattcctccctgtattag

SEQ ID NO: 183624 - DNA, 386 bp, Homo sapiens
tagtaagtggtatactcaggactataactgtaccgtcaaattccatgtggtttacaccatattgtaatgctggcctcatggaactttcagtctgggagagagactcatttgtaaactaacaatacaaaacattagaataagtatgctagttgagggatgtctaagtttgtttaatctgctataacgggataaatgactaatttagaaataatagaaatttatttccataaataaatttatacataaataagccataacattctaccccggcaccycccccgccccgccacaatttatgttcttctcccatacaaaatatactaattccatctcaacagcccccaaagtcttaactcatttcagcatcaatgcaaaaaaataaagtc

SEQ ID NO: 183625 - DNA, 575 bp, Homo sapiens
cttgcttctgtaacttgcttcctgcctcacgtagttcccgccttaagatgtttaaaagtaggaaaagccctttgttcagggctcagactttctgtacatttgtccggcaggaatctcagatcccattcagagacttcaaagaggtctcacccatcccattggcacttacaaaaggtcccacaaacccagggaggaaatggtaccattttctccagacacatctgtgaaatctgtctgtgaggtcttcactcatttacagtttgtcattttaattccgcttagcacagaacaacyaagagtagtacggtctgcagaaaaaaaaggaaatgaaaaaatgacataaatcttgcccctacactcaatgccctttttctggaccaaggatagactagaagcccagctgtcctggcatagtcctccatgctgatgtgtggcttacccaggcacagtgtgcatgacttttcccaggccatggctgggctgtttgggtctccatgtttcccacctccaggagagcaggagaaatggaattaggtctcaaggcctcacccagacaagactcatggaggctataa

SEQ ID NO: 183626 - DNA, 422 bp, Homo sapiens
agcatctgtgtgtgtgtgtgtgcagtttaatgtctgaaatgctaatttcagaagcatcttgtgaaatgccagcattaccaaatatctaggtayggagacagccttgaaggtcatctccttgttagatgtctctttgctggtgcctatgagaaaaaaaaaaaaaaatcaccctcctttctccagtcaaacccttacagcccaccaaggcaccctctcagtctcaacttgccatttggcagcccagggcttcccttagttgcttttataggagggtgggagggcacacacagtggaggatatagacaggaaggctgctttgactccttggggcttcaattggcaataattatttttacaaagtcaaagcatttgcatctatcttgggccatttaaacatctgccctgctaatctgacactgatt

SEQ ID NO: 183627 - DNA, 427 bp, Homo sapiens
tctgtgtgtgtgtgtgtgcagtttaatgtctgaaatgctaatttcagaagcatcttgtgaaatgccagcattaccaaatatctaggtatggagacagccttgaaggtcatctccttgttagatgtctctttgctggtgcctatgagaaaaaaaaaaaaaaatcaccctcctttctccagtcaaacccttacagcccaccaaggcaccctctcagtctcaacttgccatttggcagcccagggcttcccttagttgcttttataggagggkgggagggcacacacagtggaggatatagacaggaaggctgctttgactccttggggcttcaattggcaataattatttttacaaagtcaaagcatttgcatctatcttgggccatttaaacatctgccctgctaatctgacactgatttccattgca

SEQ ID NO: 183628 - DNA, 427 bp, Homo sapiens
tctgtgtgtgtgtgtgtgcagtttaatgtctgaaatgctaatttcagaagcatcttgtgaaatgccagcattaccaaatatctaggtatggagacagccttgaaggtcatctccttgttagatgtctctttgctggtgcctatgagaaaaaaaaaaaaaaatcaccctcctttctccagtcaaacccttacagcccaccaaggcaccctctcagtctcaacttgccatttggcagcccagggcttcccttagttgcttttataggagggtgggagggcacacacagtggaggatatagacaggaaggctgctttgactccttggggcttcaattggcaataattatttttacaaagwcaaagcatttgcatctatcttgggccatttaaacatctgccctgctaatctgacactgatttccattgca

SEQ ID NO: 183629 - DNA, 641 bp, Homo sapiens
agagatacaaaattgtctcaaggtcacactggaggatgtaaagcagctgggtttgaaatcttactgattctgaaggtaggactttgaactacccagcttttaaccatatrtatgtttatatgtgcacacacacatatacagaaacatatatgaggaatatagagattgtattatatatataatatgatttgtttttatacacacacacatacatatacatatataaggtggttatatggattatattgtagggaggcaaaaatcacctctaccctcttagggttttttggctgggcctagtaattaaattgacgtaagatagatcaacaggagaaatgcatacatatttatttaatataacttttacgtggcactggaaccttcatgacaaaatgaagatgcaattagagttgaacacttacattatatgcagaattgggcaaagatgtggcaggactagggtacttaactaggtagagagggacagggaagatgaggattggcttgacagggtttgtacagatttccctcagcctcaactttttgtccttgatgataagcatgacactttccttctggtattgggagacatcttttacacaggaatttcatctcctgcttttaagaaacggaagggcaga

SEQ ID NO: 183630 - DNA, 641 bp, Homo sapiens
agagatacaaaattgtctcaaggtcacactggaggatgtaaagcagctgggtttgaaatcttactgattctgaaggtaggactttgaactacccagcttttaaccatatatatgtttatatgtgcmcacacacatatacagaaacatatatgaggaatatagagattgtattatatatataatatgatttgtttttatacacacacacatacatatacatatataaggtggttatatggattatattgtagggaggcaaaaatcacctctaccctcttagggttttttggctgggcctagtaattaaattgacgtaagatagatcaacaggagaaatgcatacatatttatttaatataacttttacgtggcactggaaccttcatgacaaaatgaagatgcaattagagttgaacacttacattatatgcagaattgggcaaagatgtggcaggactagggtacttaactaggtagagagggacagggaagatgaggattggcttgacagggtttgtacagatttccctcagcctcaactttttgtccttgatgataagcatgacactttccttctggtattgggagacatcttttacacaggaatttcatctcctgcttttaagaaacggaagggcaga

SEQ ID NO: 183631 - DNA, 641 bp, Homo sapiens
agagatacaaaattgtctcaaggtcacactggaggatgtaaagcagctgggtttgaaatcttactgattctgaaggtaggactttgaactacccagcttttaaccatatatatgtttatatgtgcacacacacatatacagaaacatatatgaggaatatagagattgtattatatatataatatgatttgtttttatacacacacacatacatatacatatataaggtggttatatggattatattgtagggaggcaaaaatcacctctaccctcttagggttttttggctgggcctagtaattaaattgacrtaagatagatcaacaggagaaatgcatacatatttatttaatataacttttacgtggcactggaaccttcatgacaaaatgaagatgcaattagagttgaacacttacattatatgcagaattgggcaaagatgtggcaggactagggtacttaactaggtagagagggacagggaagatgaggattggcttgacagggtttgtacagatttccctcagcctcaactttttgtccttgatgataagcatgacactttccttctggtattgggagacatcttttacacaggaatttcatctcctgcttttaagaaacggaagggcaga

SEQ ID NO: 183632 - DNA, 641 bp, Homo sapiens
agagatacaaaattgtctcaaggtcacactggaggatgtaaagcagctgggtttgaaatcttactgattctgaaggtaggactttgaactacccagcttttaaccatatatatgtttatatgtgcacacacacatatacagaaacatatatgaggaatatagagattgtattatatatataatatgatttgtttttatacacacacacatacatatacatatataaggtggttatatggattatattgtagggaggcaaaaatcacctctaccctcttagggttttttggctgggcctagtaattaaattgacgtaagatagatcaacaggagaaatgcatacatatttatttaatataacttttacgtggcamtggaaccttcatgacaaaatgaagatgcaattagagttgaacacttacattatatgcagaattgggcaaagatgtggcaggactagggtacttaactaggtagagagggacagggaagatgaggattggcttgacagggtttgtacagatttccctcagcctcaactttttgtccttgatgataagcatgacactttccttctggtattgggagacatcttttacacaggaatttcatctcctgcttttaagaaacggaagggcaga

SEQ ID NO: 183633 - DNA, 391 bp, Homo sapiens
gccatgtccaaacaggagtggcaaacctgtttgcacattatttctgacattatttctccatgggctgaatcttctcatctcccattcatcccttattaatgtcgcccttcaccgtggctcacagcctggcctgtggctccagactgttgtataataatacaggtgttaactgctgaggttaacagtgggaagttgtcactagaggtttcccactcatcactgtcactgaaaaactggcaacttacagggagtmcaattttggaacaggacaaatacagcaatcacaggttaaaaggttaccatttgtaacataccccaaccatctcatttccctgtcaacctaggcaatattatttttcacctcttgtgcacaaaatgatgcccagtcaat

SEQ ID NO: 183634 - DNA, 391 bp, Homo sapiens
gccatgtccaaacaggagtggcaaacctgtttgcacattatttctgacattatttctccatgggctgaatcttctcatctcccattcatcccttattaatgtcgcccttcaccgtggctcacagcctggcctgtggctccagactgttgtataataatacaggtgttaactgctgaggttaacagtgggaagttgtcactagaggtttcccactcatcactgtcactgaaaaactggcaacttacagggagtacaattttggaacaggacaaatacagcaatcacaggttaaaaggttaccatttgtaacataccccaaccatctcatttccctgtcaacctrggcaatattatttttcacctcttgtgcacaaaatgatgcccagtcaat

SEQ ID NO: 183635 - DNA, 526 bp, Homo sapiens
catgaacatggaatatctttccagtttttggtgtcttcttcaatttctttcatcagtattttaaaagttttttattatagagagctttcacttctttaaattaattcccaggtatttaattttatatgtgcctattgtaaatgggattactttaatttttttttcagattrttcactgctggcatatagaaaagctactgatttttatatgttgattttgttgatcctgaaactttactgaatttatcagttctcatagttttttggtggagtctttaggtttttccaaatataagatcatatcatctgcaaacaagagtaatttgacttcttcatttctaacttggatgctccgtatttttctcttgtctgattgctctagctaggacttccagtactgtgttgaataacactagtcaaagtgtctatccttgtcgtgttccagatcttagaggaaagactttcagtttttctccattcagtatgacactagctatgagtctcatgtggcttttattatgttaag

SEQ ID NO: 183636 - DNA, 526 bp, Homo sapiens
catgaacatggaatatctttccagtttttggtgtcttcttcaatttctttcatcagtattttaaaagttttttattatagagagctttcacttctttaaattaattcccaggtatttaattttatatgtgcctattgtaaatgggattactttaatttttttttcagattgttcactgctggcatatagaaaagctactgatttttatatgttgattttgttgatcctgaaactttactgaatttatcagttctcatagttttttggtggagtctttaggtttttccaaatataagatcatatcatctgcaaacaagagtaatttgacttcttcatttctaacttggatgctccgtatttttctcttgtctgattgctctagctaggacttccagtactgtgttgaataacactagtcaaagtgtctatccttgtygtgttccagatcttagaggaaagactttcagtttttctccattcagtatgacactagctatgagtctcatgtggcttttattatgttaag

SEQ ID NO: 183637 - DNA, 548 bp, Homo sapiens
cctacaaaaaaaaaatagtaaagggagttcttaaagctgaaataaaatgacactagatggtaactagaattcacgtgaaaaaaataaaaagcactggtaaaggcaactacataagtaaaaataaaagacaatataaatgtaattttggtttgtaattcttctatattacttaaaagattactgcataaagcaataatcataaaattgtgttgaggggcttatgatgtatagagatgtaatttgtatgatgataatgccacaaaggagagctatataggagtaaagttttggtacactattgaaamttgagttaatattacttcaaattagattgttacaagatgctaattgtaatcaaatatacatatgaaatacatgataatataactaggatggtacactagaaaatatctaaaacaaaataatacactaatggaggaatagaggaacaaaaacatgagacatgtagaaaacaacaaaatggcaggtataaatcttagttacattaaatgtaaatggattaaatactccaataaagaagtaaaaat

SEQ ID NO: 183638 - DNA, 576 bp, Homo sapiens
gaatttgaaataaattcaaatacataaaagaatttacaatataaaaggggagtacctcaatccagctgagaaaatacatatcatgcaaaaaataatatcgagacaactgggtccaaaaatcagttggatccatrgaggatatgttataccaagagtaaatgtctaataaattgaatatttaaatgtgaaaaaataaaccacgaaatttaagaagaaagcaatggggaagtcatagacaagcttggtataggaataatctgctgccttcccataaatcttcaagagaccacagggagcagattattcctctttatactctcagccttaccactttcccactcttgcctccaccacgccagtgggccagagacttcagtggcagatattgaagtctctgaagtcttttgcgtcagtcatgacctccccagttcctgagccaatcttgactagagagtccattaaaaatgctagtccttgactcagtcttcagtcctaaccggctatatctggagtaaacactgattcccccatgcgcaccaaaatatagcctttcttttaactttgttgtgtttgata

SEQ ID NO: 183639 - DNA, 576 bp, Homo sapiens
gaatttgaaataaattcaaatacataaaagaatttacaatataaaaggggagtacctcaatccagctgagaaaatacatatcatgcaaaaaataatatcgagacaactgggtccaaaaatcagttggatccatagaggatatgttataccaagagtaaatgtctaataaattgaatatttaaatgtgaaaaaataaaccacgaaatttaagaagaaagcaatggggaagtcatagacaagcttggtataggaataatctgctgccttcccataaatcttcaagagaccacagggagcagattattcctctttatactctcagccttaccactttcccactcttgcctccaccacgccagtgggccagagacttcagtggcagatattgaagtctctgaagtcttttgcgtcagtcatgacctccccagttcctgagccaatcttgactagagagtccattaaaaatgctagtccttgactcagtcttcagtcctaaccggctatatctggagtaaacactgmttcccccatgcgcaccaaaatatagcctttcttttaactttgttgtgtttgata

SEQ ID NO: 183640 - DNA, 576 bp, Homo sapiens
gaatttgaaataaattcaaatacataaaagaatttacaatataaaaggggagtacctcaatccagctgagaaaatacatatcatgcaaaaaataatatcgagacaactgggtccaaaaatcagttggatccatagaggatatgttataccaagagtaaatgtctaataaattgaatatttaaatgtgaaaaaataaaccacgaaatttaagaagaaagcaatggggaagtcatagacaagcttggtataggaataatctgctgccttcccataaatcttcaagagaccacagggagcagattattcctctttatactctcagccttaccactttcccactcttgcctccaccacgccagtgggccagagacttcagtggcagatattgaagtctctgaagtcttttgcgtcagtcatgacctccccagttcctgagccaatcttgactagagagtccattaaaaatgctagtccttgactcagtcttcagtcctaaccggctatatctggagtaaacactgattcccccatgcscaccaaaatatagcctttcttttaactttgttgtgtttgata

SEQ ID NO: 183641 - DNA, 565 bp, Homo sapiens
gatttagtgattcagcagagcatatcagaagaggcaaaacctctgtaccaatataattgaaaaatactttacatttaaaataagtaatttgcagatgtaataatcaatagtaagaattttctggtaatcaatagtaagaattttctggtaaacaatagtaaaaattttctgaaaatagtgttacattttacatgtgaaaaacttcccagttcaggtgctgaaatacaagagcaacaagaaacccacaaaagtagaacctggacaatgaaaaaagaagagaattatggatatggcaagaattaagtccatccttttagccaaagatgactatgtgatttgggtggtttcttaatatggaggattaagtttttattgtaaaaatcctattatatttgtttttatagtctgtttataktcaccatctcaccatctagctgaaaatatttttatttgactcagtaatatttttattatttctgactcagtaaatatttgttgattggctaattaaatacatgatgcagttataaataaaagaataataaggaatgcatagttgagagta

SEQ ID NO: 183642 - DNA, 510 bp, Homo sapiens
ttggttcatgaggtttaatgaaagaagccatctgtatgacataaaagtgcaaggtgaagcagcaagtgctcatgtagagccttcagaaagctatccagaagatctagctaagatcattaatgaaggtggctgcactaaacaacagatttttaatgtagataaaacagcwttatattgaaagaagaggctatcagggacttaagtagttaggagaagtcaatgtctggcttcaaagctttaaagaggctctctcattaagagctaatgcagatggtgatgtcaaattgaagccagtgcttatttaccatttcaaaaatttttagggcccttaagggttattctaaatctgctatgcctgcgttctctgtaaatggaaaaagaaagactggataacagcacatcggtttatagcatggtttactgaatgttttaagcccgctgttgagacctactgctcagaaaaaggttcttataaaatatattactgctcattgacaaggcatctggtta

SEQ ID NO: 183643 - DNA, 510 bp, Homo sapiens
ttggttcatgaggtttaatgaaagaagccatctgtatgacataaaagtgcaaggtgaagcagcaagtgctcatgtagagccttcagaaagctatccagaagatctagctaagatcattaatgaaggtggctgcactaaacaacagatttttaatgtagataaaacagcattatattgaaagaagaggctatcagggacttaagtagttaggagaagtcaatgtctggcttcaaagctttaaagaggctctctcattaagagctaatgcagatggtgatgtcaaattgaagccagtgcttatttaccatttcaaaaatttttagggcccttaagggttattctaaatctgctatgcctgcrttctctgtaaatggaaaaagaaagactggataacagcacatcggtttatagcatggtttactgaatgttttaagcccgctgttgagacctactgctcagaaaaaggttcttataaaatatattactgctcattgacaaggcatctggtta

SEQ ID NO: 183644 - DNA, 673 bp, Homo sapiens
tgtgaacagaaaggtatcttatctcagtatctgagtgaactaagcctagtagaataattttataggatatttaacacattagtgattatggaaagcattttgtcactttaattactatccctatcacctagtgatgtttaagacattttagatgctcaataaatacttgaatgaatgaaaggaaggtctcatagaaaatgtaaaattgtgcttgttctatttgaaaatattgttttcccttcttataacttattgctccattwtgtgtctcatttagttcaggagctaggagctaccttatgtccaaaatagtttcgtcacattaagctaattccctttgaacatgcagttcaatttctttaattagctttaaaaataagggtcattaaatcagagtgccaccatcaattactgtgcaagggtttgcctgttcaataatgcatcagagctgtgctttaatcagtatttcactgaaagatttatgaaaaaggaggcctctctaggttccaaacttgcaatggagtcctatcatgtataaaaaatttttcttgtgattgctatcatgtttggtgctgtatttcattgaatgctctcagcatcctatctttgcatttcatagttgggatcatttccagagagtgttttacagcatttttggtaaattcacaagaaa

SEQ ID NO: 183645 - DNA, 442 bp, Homo sapiens
gaattcaaaggaaatatacatatatgactacttaagaataaaatagaaccaaatcagattttacttcagataattagcatctaaaaaatcatgttttttcactctatgtattttatcagtttttctgtgtttactatggtaaaagctaaagcagttgttataatttttgcacaacagtaaaagcattttaatgtgttgtaattacagcatccttttagtagttgttttaaaaatcttaaaaaataatattgtaatccctggttctacagtaaggggcatattcttcccaagatactaatacataaagtagaatagtaataataggtactcacaaatgggcactcagggaagaatataaccttttaaaattacttacaaacagaaaagycatgttctggtactgccaaaatgcatttcatcacaactaaaactaattttccat

SEQ ID NO: 183646 - DNA, 573 bp, Homo sapiens
taaataagactcagtgtgtttaatggctgtatgtttcattatttgacagggccatagataattcattggcaactagttaactgtcacatatgcaatttgatatggggatttgatatgtataagaggctttgaggattgagggacatgtaaaatkattccactaaactctcttgctgacagtatagttgtggaggcaagatatatatgcatagaaaaatgttatggactgaatatttgtatccccgtaaaatttatgtcaaacttcgaattcccaatgtgatggtacttggggatgagaatgttgggaactaattaaggttggatgaggtcatgaggatggggccctcatgatgggattagtgcccttatgggaagagacaccagagagcttgctctgcccacctcccccaggactcaacctgcataaaaaaatgtcatgtgagcatacagcaagatggtggctgcatataagctaaaagaagaggcctaagaatgaaaccttccttgccaacaccttgctcttggacttcccagacttcagaactgtgagaaataagtttctgctgtttaagt

SEQ ID NO: 183647 - DNA, 556 bp, Homo sapiens
gactgatgacacaaatagctataaactaacctaacaatcccacatactggacaccataaatcataccctatrgttaaaaaatgtacaacagtcactaataaatgctatttttgtgaacccatgaagaattcctgacaaacaactttgtattagcccactccttgtctcccttgtttgcccttaaaaacctactgtaacaaaggctacatggagcacatatccaaggttgcttgggtgtgagtcttctgggaagctcgtcccattttagttgaagtttgaagttgtatttgtgcttcggtttccttctttaggccaataaagggaaaagataagcacctgcttccagtcttctgattatacaacaagatagcctggacagcaggatccccttttctggattggtttcatcaatgttttgtccttgaagtcaggaagtaccttgccagtaagggactgccttttcaagttcttttgatattggaccatacccctgctcatccagagccctgtgagtttaatactgaaggtgtcaaagtggtccacttgcctccaaaca

SEQ ID NO: 183648 - DNA, 556 bp, Homo sapiens
gactgatgacacaaatagctataaactaacctaacaatcccacatactggacaccataaatcataccctatagttaaaaaatgtacaacagtcactaataaatgctatttttgtgaacccatgaagaattcctgacaaacaactttgtattagcccactccttgtctcccttgtttgcccttaaaaacctactgtaacaaaggctacatggagcacatatccaaggttgcttgggtgtgagtcttctgggaagctygtcccattttagttgaagtttgaagttgtatttgtgcttcggtttccttctttaggccaataaagggaaaagataagcacctgcttccagtcttctgattatacaacaagatagcctggacagcaggatccccttttctggattggtttcatcaatgttttgtccttgaagtcaggaagtaccttgccagtaagggactgccttttcaagttcttttgatattggaccatacccctgctcatccagagccctgtgagtttaatactgaaggtgtcaaagtggtccacttgcctccaaaca

SEQ ID NO: 183649 - DNA, 571 bp, Homo sapiens
ttgtctgaaaattttatatggtactttaacaagtcaagcatgcatgttgtaatcgctagcacacaaaaagaagagtaaaataatggataacaagctaaaagagagaaaaaatggaataataaaattgatctgtttaaaaaataataaagggagaaagttatatgaaacattgtaataaatggaaattaaatcttaaaatgtcatatttaccccaaatacrctattaacaacaggaaatgtgaatctctttcttacattaagcttgagtaaattaaagattaatgagtataactactaaaaataaaatagtgaaagaatgtaaaaccaacaatggaaatactagattaattcagaagaatgccaaaaacagagtaaaaagtaaagtagaacatgtggaacaaatagaaaaaaaaaatgtagactatttaaagccaaatgtcctcaaaataacattaagtatgaaaaacataatcaaattaaaagattttctgaatgtgaatatataaacccaagttataaggtttacaagagaactacccaaaatatatagatgttgaaagtttgaaggtaa

SEQ ID NO: 183650 - DNA, 566 bp, Homo sapiens
gaatatgaagaagagatagatactttaaaaaggaaagcagaacttctaaaattgaaacaaaaatcatggaaggaatcataaaatacacttgaaagccttaacagtasgctagaccaagcagaagaaaaattttagagtagaaagatagggcttttgaattaacccagtcagacaaaaataaagattttttttaaatgatcaaagcttttgagaaatatggcattgtgcaaagcatccaagcctatgagttataggtattccagagggagaagaagaaaaggtaaaaagtatgaaaaacctatttgagggtctaatgcaggaaaacttctctggtcctgctaaatatctagacatccagatacaagaagctcagagaatccttagaagatacacttcaagaataacttaaccaaggcatagagtcatcagactatccaaagtcaacataaaggaaaaaatcctaaaaagtgacaagagagaatcatctaatcaccagtgaaagaaattccctcaaactaacagcagacttctcagcagaaagtttcaaagccagaagagtttggagt

SEQ ID NO: 183651 - DNA, 566 bp, Homo sapiens
gaatatgaagaagagatagatactttaaaaaggaaagcagaacttctaaaattgaaacaaaaatcatggaaggaatcataaaatacacttgaaagccttaacagtacgctagaccaagcagaagaaaaattttagagtagaaagatagggcttttgaattaacccagtcagacaaaaataaagattttttttaaatgawcaaagcttttgagaaatatggcattgtgcaaagcatccaagcctatgagttataggtattccagagggagaagaagaaaaggtaaaaagtatgaaaaacctatttgagggtctaatgcaggaaaacttctctggtcctgctaaatatctagacatccagatacaagaagctcagagaatccttagaagatacacttcaagaataacttaaccaaggcatagagtcatcagactatccaaagtcaacataaaggaaaaaatcctaaaaagtgacaagagagaatcatctaatcaccagtgaaagaaattccctcaaactaacagcagacttctcagcagaaagtttcaaagccagaagagtttggagt

SEQ ID NO: 183652 - DNA, 593 bp, Homo sapiens
gttccctaagcctggttgttttcactttttagcctagagaatagattttacacctctagattattagccctccagggcagggctggagctctttgtttgatctaatcccatctatggttgatctgcttgtgcattcatgatgttgtggataaataaaccatgctcatttttaatatgatttattaacaatgtgcagggcaggcttcttccccatatgtcttagccaagactcccttctgaaatgcactagaakttcataaattgagccattcccaaataaagaggtaggtgctataaccattggagaggcagttggtctagtgattaggaacacaaaatccaaagcctaattgcctgagttcatatccaatgctgtcactttaccaccttgtgcctcagtttcctcagctgcaacatgaggataattgcattatttcttcacagactgattgtaacaattaaaagagtgaatacatacaaagtgtttaaaagggtgcatgacacatatgtacactactaagagtattaactgtatttgaccagaaaccaggagtatttctgaaatcttgataaggcagggagtgtcagaaagc

SEQ ID NO: 183653 - DNA, 384 bp, Homo sapiens
cctcccactgggtctctcccacaacatgtgggaattcaaggtgagatttgggtggggacatagccaaaccatatcaggtaccatcttggaatcagagagtgagtagctctcaayggacaccaaatctgttgacaccttcatcttggacttcccagtctccagaactgtgagaaatatatttctatggtttataaattaccaagtctaagatattttgttagagcagcctgaataaactaagatgcctccacttgatcctcaactagcttatttgttatcttggtagcactgatgcaactcatacttctttttcttttttgaattttttttctctcttagcttctgtaactctcctcttctgatctctcttccttaatagctaca

SEQ ID NO: 183654 - DNA, 601 bp, Homo sapiens
aagcttaagaatataagactaacctcattttgcttctttattgctccagaaagtttgtttctctttgatgccctcaaacrtttgtgtgtgtgtgtgtgtgtgtgtgtgtgtgtgtgtgtggtggtggtggtggtggtagagatagtggaacaggggtgggggtattttatccagccttcctggtagctttctattgccagatttatctataccaatctatgccaccattcctggcagtagataactcctagcttggtttctaagagtgattttcctcatttgccttcaaaaatactcattgtctgcttcataaaattagatggatctggatatgcacatagttactaatgggacaatgctgatatttcataacttctcattacaaggccagaacaagctctcactcagtacttctacacttttaaatcaacaggtgtccttggtaataaacgagaattgatgaaaaatcaccgtgagaatttatattcatctttaatggcttaattaagcagcattttaaattgccattcaatgccactagttcttgatttcatatgctacacttggccaggaagaggatagatcactgaaaatcacagat

SEQ ID NO: 183655 - DNA, 567 bp, Homo sapiens
tcgccaaatgtcacgcccagggttgggttccagcacatgctgaggtctgagggagtgggtggatgagcacaaagaacacttggagggccacaggcaggtgaaggatgattttattcagcagcagctctcatcaacagctttctcacactgtctgccctgtctcggcttcttgagccagcgggtcccacatacagctgtgcggccagctctcccctgacttcagggttagcagcttaactctttctctctctgggcacaagtgagccgagctgtatcctggctcccctctgtccatctgcaaagatagacagctttggctctctctctttctctgggcaccagcactcctgcacagtgtcaacaggacaattataccttttacagacaatagtggcatagagccargtgatgagccttcattattttatggctatggcagtgagcttctctatgttatgtctacgtggctatgataacaagtggagttatatgcttgcgctctaaactcactgagtcactctggttgtttaccttggcctattccttgaccaaagcacagccatgttc

SEQ ID NO: 183656 - DNA, 503 bp, Homo sapiens
tcaggcaatatatccatgtaacaaaactgtgtaggtacccccgtatctaaaataaaagttgaaatgtacaacaaaattattggtttcaagtttttgtgaattcccactaatacatattttttttaaataatagattttattatttagagcagttttaggttcacagcaaagtagacaaaatgaaagaaagtttattcatctcccctcttccccccagcatcccccaccatcaatatccctatctgtatggtacatttgttacagacctctagggaatttaaatttagtttacaaatctgcataatggccagctattatttatracttcctagggacatttctttcttctctgctcaacacaaaaacaaattttcttcaagtgctctcatgttgggagaagcagcaattcgcctctgatttgaacttaaactgaaagtagaactttatgagggggagggtctcgcattaaactgcccttttggcaggctctgagcttggttttc

SEQ ID NO: 183657 - DNA, 503 bp, Homo sapiens
tcaggcaatatatccatgtaacaaaactgtgtaggtacccccgtatctaaaataaaagttgaaatgtacaacaaaattattggtttcaagtttttgtgaattcccactaatacatattttttttaaataatagattttattatttagagcagttttaggttcacagcaaagtagacaaaatgaaagaaagtttattcatctcccctcttccccccagcatcccccaccatcaatatccctatctgtatggtacatttgttacagacctctagggaatttaaatttagtttacaaatctgcataatggccagctattatttatgacttcctagggacatttctttcttctctgctcaacacaaaaacaaattttcttcaagtgctctcatgttgggagaagcagcaattcgcctctgatttgaacttaaactgaaagtagaactttatgagggggagggtctcgcattaaactkcccttttggcaggctctgagcttggttttc

SEQ ID NO: 183658 - DNA, 498 bp, Homo sapiens
ctgttgtgtatgcaattaaacaaccagatcatttacatttaaaatgtcaatcctaaaaaattaaaaagaaggaaggttgccatggagattatcctgtgtacatatgataggtgagtgtcttaacctgaaatgtgatgtggtctcagaaaaaatacaagtttacactgctgtaataaggcaaataaatccgcttacctaagtaagaaggacagtayttgtgctgaagaaactcctttatgtctccttatttattaaaaaattatgagaatataatattaacagtaaggtcagaagcttaattgaaaatctgaaagttcccatcctgttatctgaatttcttcagctggtatgtaagcatcaagttggggaggaaaagaacacatgtcccttttctgggcagatgtagtgtcgattcactgatgaatactcaaacattgtagtgataatttataacccaaagtataagggtctaaaaaaatcactgtaataaacagaaag

SEQ ID NO: 183659 - DNA, 607 bp, Homo sapiens
aagtacatgataattgtgattactgaggcatccatcttccctagcagactagctaaaggatggcgctcttatttgtgtcatatcctgggtgcttaacacagtatctgccacataattaggtgcttagtaaagttttgttaaatgatcgaatggggcgtttttagcgcagtgtgcaagtgccctattaggggtaggcgcccagtaactcgagaagcatggagtaggaaaccacaaacagcacctgctccccctcctctccccctacctgctgtggggaaggcctcccttgtaaatttgaaaggttgattcacgggaagccgtggaggaggtgcatgctaggccaacgaatagaatgtgcaaaggcccagaaggaagacagagcccagcctgcaagggaatgttaatttggagtgactaacaccatgaaagggcatcagctggagatactgctataaagggactgccttgtaatttcataagcatgggggtaaaattaagattaaacacagggaaagaacattctcacaggtgaggatggtgttgaaccctagaataatcgtttcccagataccttgaacaaaaatcsagcagttagagaagcctgacc

SEQ ID NO: 183660 - DNA, 503 bp, Homo sapiens
taactagcacattttcccttttgtctttttaaacaartatatcttctgttttatacgttgactcctttacttaccagacttcttgcatagctgcatagtatttcattgaatagaagctgacaaattcagtttctcagaagtaaacatttaatagggacttaggaacagaaatgatgtcttgggtggctgcaagatggtggatccctgcacttaccctccagaaagtatgctttctatagaggcttttttggttaaacatgcagctggtcacacattatactttcttgtgaaacttatgagcactagctggtggggaggcttggtagacatctttgtgtggaattatttatgctacccaacactttgggatgcgggagtcagatattggtggtcatagtggttttgcatcaagatggcatcactcttgccatgcaaccggcatgttttcttaatctctaaggtctatcacaaagtggaaaagcaaggtgtaaagtgaggggaga

SEQ ID NO: 183661 - DNA, 457 bp, Homo sapiens
tccagaatcttgacccctaagttcttttctatctcggtagttctccaatgcttccaaacagatattttaaaaatatttttgaacagctttcctaactgttcttgatgggaggcttggtctggtttgcaatgtctttgggtgatttctatttattctgcctagctcagtgaacttgaaaaaggaagccattaacagtacccagggtatttctcaaaacttctcaaatgtaaaattctgccagtaataactttgagaacccatyggaacaaaacaagacattgtgacacataattcagcactgctcctggcagcgatgctgagatggaccattctaaagccttttctttcccttggctttctttatctctcccaaactatcaagcaaaaaaaaaaacaaaacatctacaggtacaaacctcttttacgctttcccagtagcctgttaggcctctatttc

SEQ ID NO: 183662 - DNA, 447 bp, Homo sapiens
gaattctaagctcctgaaactgttctagttctcaatcagggtaggcaatacacaggtgttcactttattctcctttaacttggataaggatgtgtttatacactctttcrtatgcctgctatactttatggttttaaaatttcttaataaagcagcatcctaaaaatgcagttttccctctggtccagtgtggctgactggcatagagagtgtatttgcatctgaggtcgctgggaggaatgacctgacaccagtgaagctggcagagctgcagggcacactggagcctctggccatctggagttcagaagacaagacgtccacacttcagttagaagcagacctttatctccagaggactttgatgttgaagatatgacagaagctcctacaaactgagaagggacaaaggagaaaacagtccctgcaagtttccatgaggaaaaa

SEQ ID NO: 183663 - DNA, 510 bp, Homo sapiens
tgtacaccagattttaaaatctgtttagaggaggaaggaagcaagccagggtggaaacttccattcttcagcccaggccattagaggcgcagccccgactgagtgacacatcagaactaaggatgggctctttcttctttycctcctgtccccctgcgcctccctttccccaactggaggagaggtttggcgagtctctctgcctgaggtggcaagttcagccggacctcagctgcttgctgggctgtgcgtgtgcagccgcggcgtgagtcacatcctctatcacatctccatctgtgtgctttgtggcgcaggaggatcccaacggcactccaagaaggcaggattgtgcagagatgacggcacccagtccgagctgtgccttctgtcgcaggctccttgaatggtgagggcttcttgtggctacattcccagggtggattggagtcagtcctggcatagtaactccagtgagagtgggcggcaactaactgaggccactggctgagt

SEQ ID NO: 183664 - DNA, 548 bp, Homo sapiens
gaggcaggaggattgtctgagctcaggagttcgagaccagcctgagcaatatggtgaaattctgtctctattaaaaacacacaaaaattagctgggcatggtggtgcacacctgtaattccagctgcttgggggcctgaggtgggaggatcgtttgagcccaagaggttgaggctgcagtgagttgagactgcaccactgcactccagcctgggtgacagaacaagamcctgtctcttaaaaaaaagaaaaaagaaaaaaacaaaaaacagaaacacataaaaacctgttggtaaactaagaatagaagggaacatccttaatctgataaaagaaaactacctaaaactaacataatacttaatgatgaaatattgaactcatttcccataaagctgggaatgagacaaggacgctcattatcaccagtttgatttcatgttatactggaggtatcagccagaaccaggaggtattaactactaaaaaaaaaaaattttaaacgtatgacaagcttgtctaacccaccttattttgttgttgttgttg

SEQ ID NO: 183665 - DNA, 548 bp, Homo sapiens
gaggcaggaggattgtctgagctcaggagttcgagaccagcctgagcaatatggtgaaattctgtctctattaaaaacacacaaaaattagctgggcatggtggtgcacacctgtaattccagctgcttgggggcctgaggtgggaggatcgtttgagcccaagaggttgaggctgcagtgagttgagactgcaccactgcactccagcctgggtgacagaacaagaacctgtctcttaaaaaaaagaaaaaagaaaaaaacaaaaaacagaaacacataaaaacctgttggtaaactaagaatagaarggaacatccttaatctgataaaagaaaactacctaaaactaacataatacttaatgatgaaatattgaactcatttcccataaagctgggaatgagacaaggacgctcattatcaccagtttgatttcatgttatactggaggtatcagccagaaccaggaggtattaactactaaaaaaaaaaaattttaaacgtatgacaagcttgtctaacccaccttattttgttgttgttgttg

SEQ ID NO: 183666 - DNA, 555 bp, Homo sapiens
tatgttcacactgttacacaaccattaccacagtctgtctctggaattttttccaacttcccaaactgcaactctatactcatgaaacaataactgtctaatccccttcccagaactcttggtgagcaccatttaactttctgtttctataaatttgactactctagaaacctcttgtaagtggagtcatatggtgtttgtcctcttgtgactggcttatttcacttagcctaatataggttcatccctgttgaagcatgtgtcagaacttccttcatttttaaagctgaataatattccactgtatgtatatacaaactcctgggctcaagtgatccttcccctcaacctcccaacatgcagggattataggcgtgagcccatgcacccggccccrttttctttatatctattcgtccatcaatggacacttggtttgcttccacctttcggctactgtgaataatgctgctataaatatgggtatataaatggggtttgaagtctctttagttcttttggttatatatccagaagtacagttgctggattaca

SEQ ID NO: 183667 - DNA, 558 bp, Homo sapiens
atacaaactcctgggctcaagtgatccttcccctcaacctcccaacatgcagggattataggcgtgagcccatgcacccggccccgttttctttatatctattcgtccatcaatggacacttggtttgcttccacctttcggctactgtgaataatgctgctataaatatgggtatataaatggggtttgaagtctctttagttcttttggttatatatccagaagtacagttgctggattacatggtaattccgtttttaattttttgaagaactgtcatactgtttcctattgtagctgccccattttatattcccaccagcagtgccacaaggcttccaatttcttctyatcatcaccaatagttgttataattttttttttataaaagccatcctaaagtatgtgaagtgatatcttggtgtgagagctcattttgattcacattttcctaataactagtgatgttgatcatgttctcatgtgtttattggccatttgtatatcttctttggataaatgcttattcaagccctttgcccatttttaaattaagt

SEQ ID NO: 183668 - DNA, 558 bp, Homo sapiens
atacaaactcctgggctcaagtgatccttcccctcaacctcccaacatgcagggattataggcgtgagcccatgcacccggccccgttttctttatatctattcgtccatcaatggacacttggtttgcttccacctttcggctactgtgaataatgctgctataaatatgggtatataaatggggtttgaagtctctttagttcttttggttatatatccagaagtacagttgctggattacatggtaattccgtttttaattttttgaagaactgtcatactgtttcctattgtagctgccccattttatattcccaccagcagtgccacaaggcttccaatttcttctcrtcatcaccaatagttgttataattttttttttataaaagccatcctaaagtatgtgaagtgatatcttggtgtgagagctcattttgattcacattttcctaataactagtgatgttgatcatgttctcatgtgtttattggccatttgtatatcttctttggataaatgcttattcaagccctttgcccatttttaaattaagt

SEQ ID NO: 183669 - DNA, 479 bp, Homo sapiens
ccaaatattcaacaggaaggatgagattaaataarttatacacatccataccttgaataccatggagtcattgcaaggaatgaggtggttctgtagctactgacacagaaagatgttattatgttattgagaagaaaaaacacaggtatataatcctgttttcttgaaacaaaccaacaaacaaacaatcaaacactgttgggggtgggcatgtgtatgcacccatacaggcctgtgactgtgcacacagggaaactgtctaggaagatacaaatcagaacgttaactgtgttactcctggggagtgaaagggttggggttatgagaaggagatttttagtttaatgtacttccattttaattgaaaaacgttttccaacctatgtacattttgtagtgaatgaatctttttaaagaagaaaagaatgtagtatgtggaagcatggtgggctgctcctgaagtgcatttgttaataaac

SEQ ID NO: 183670 - DNA, 479 bp, Homo sapiens
ccaaatattcaacaggaaggatgagattaaataaattatacacatccataccttgaataccatggagtcattgcaaggaatgaggtggttctgtagctactgacacagaaagatgttrttatgttattgagaagaaaaaacacaggtatataatcctgttttcttgaaacaaaccaacaaacaaacaatcaaacactgttgggggtgggcatgtgtatgcacccatacaggcctgtgactgtgcacacagggaaactgtctaggaagatacaaatcagaacgttaactgtgttactcctggggagtgaaagggttggggttatgagaaggagatttttagtttaatgtacttccattttaattgaaaaacgttttccaacctatgtacattttgtagtgaatgaatctttttaaagaagaaaagaatgtagtatgtggaagcatggtgggctgctcctgaagtgcatttgttaataaac

SEQ ID NO: 183671 - DNA, 479 bp, Homo sapiens
ccaaatattcaacaggaaggatgagattaaataaattatacacatccataccttgaataccatggagtcattgcaaggaatgaggtggttctgtagctactgacacagaaagatgttattatgttattgagaagaaaaaacacaggtatataatcctgttttcttgaaacaaaccaacaaacaaacaatcaaacactgttgkgggtgggcatgtgtatgcacccatacaggcctgtgactgtgcacacagggaaactgtctaggaagatacaaatcagaacgttaactgtgttactcctggggagtgaaagggttggggttatgagaaggagatttttagtttaatgtacttccattttaattgaaaaacgttttccaacctatgtacattttgtagtgaatgaatctttttaaagaagaaaagaatgtagtatgtggaagcatggtgggctgctcctgaagtgcatttgttaataaac

SEQ ID NO: 183672 - DNA, 479 bp, Homo sapiens
ccaaatattcaacaggaaggatgagattaaataaattatacacatccataccttgaataccatggagtcattgcaaggaatgaggtggttctgtagctactgacacagaaagatgttattatgttattgagaagaaaaaacacaggtatataatcctgttttcttgaaacaaaccaacaaacaaacaatcaaacactgttgggggtgggcatgtgtatgcacccatacaggcctgtgmctgtgcacacagggaaactgtctaggaagatacaaatcagaacgttaactgtgttactcctggggagtgaaagggttggggttatgagaaggagatttttagtttaatgtacttccattttaattgaaaaacgttttccaacctatgtacattttgtagtgaatgaatctttttaaagaagaaaagaatgtagtatgtggaagcatggtgggctgctcctgaagtgcatttgttaataaac

SEQ ID NO: 183673 - DNA, 262 bp, Homo sapiens
gcccaggatgagcctgtgagccttggaacacagccgctctccagttccttctcagcaaaaaacctggttgctttgaaggcagccagtgattccccataggtggggatgctgcaaatttcagagagctttgcaaagacaaraaaggctactccttcctgcctccactatcctcctctacagaagggatgtgcagagacagcagaggggagggcatttatcagtatccaggtgcacattatctagaagattagaaaaacccagt

SEQ ID NO: 183674 - DNA, 601 bp, Homo sapiens
tttccgtcattctagcccacattttagtcactgacatgttgccccctcatgatgcaaaatagctactaaagctttacacaacacacaaacctgcccccccaactgcyccccgatccaatcacctcctagcaggccccacctccaacacagaggattacaattgaaggcaagatttgggtagggacacagacccaaaccatcctgatccaatcacctcctaccaggccacacctccaacacaggggattacaattgaaggcaagatttaggtagggacacagaaccaaaccatatcagcaggcttgaagcaaaaatcaaaaggaaagccaagctctggaaaatatttttcactttgataaggatggcaaagaaatatttttgtcaatattctcaaaacaacagtgttccaaattggaaaagaaggagataactcttactatcagagtgaaaaatattttccagaagtctccaaaggctctctctcaggccataattggattcatcacacagtgccctaaatcaacccttggcaaaagaacatgggattgccatgattggcttagaccaatcatggttctttccctggggctgcaggaagtgt

SEQ ID NO: 183675 - DNA, 478 bp, Homo sapiens
agtggctttgtcaaaaatcaggtggatgtaaatatttggatttattttttattctgttttgctccattggtctatgtttcttttttatgttagtatcatgcagtttaagttactatagctttgtgatatattttaagtcagataatgtgatgcctccagcttcattttttctttttgctyagctatttagggtcttttgtggttctaagaattttaggattttttttctatttctgtgaagaatattatctatattttgatagagattgcattgaatctgtagattgctttgggtagtatggatattttaacagtattaattcttctaatgcatgaacatgggatagttttccatatttttgtgtcctcttcaatttctttcatcaacattttatagcttttcttgtatagatctttcacctttttggttaaaatttttcctaggcatttttggtagctactgtaaatgagattattt

SEQ ID NO: 183676 - DNA, 558 bp, Homo sapiens
tgaattcttggtcagagagctcacatattgctacaagtcagacactgattccttgctttgttcatttgggaaggtcatgatttcctgtttcctgttatttcctgtrgatgtatgtttgtctttgcattaaattattcattatttattacagtcttctccatctagcttgttttgattttttgttgggtatatttgcacagagattttccatagcttacctgttcaatttcttatttttttcttgatcttgcctcctttttgacactagataatgcctcaagcctaggtttgcctcagctgcagcaactaatcagagaactgacaatcctgaatgggggagtcccaaaggtgatatcctggtagtgtggaaaggctggctaggggtttatgcccagaggacctgtgaaatgtacctcctacgctgtggtgctgctgaacagcccctctgatgttgtatctcctttggccaagttacagagcagtttccagggctgggtatgaaagtcccacctactctttttttctctggctgtcttcagagatatttcttccttcagg

SEQ ID NO: 183677 - DNA, 532 bp, Homo sapiens
actctactctgtggcagtgggtactctgcacatattctatcagaaccaactgaaaaaggaaaaatggctgttggctccaaaagtaggatctagcttcctgtaatgggtctaaggttgtcagcactctggacaaaagtacygccaagtgcacagatctggtttccttccagaaaaccaagtagactctatacttaaaatgggtgttctgaggtctaagcaagaactgttgatgggttttatgttatcagacatgattcttgggatttattttcagagagatttaatttcatcttgaagtgtacatgaaaaagaaccctacaaagaaacatctcttgaccaccatggggttccaatatatgccacattcaagtctctcctttgcctaagaccagaacatttgatggaactatagaattattttaaaaaaaacaaaacacttcttcccagccccatctgtcatcattcgagtatttgcatttcacaagcaaaatgaaccgccctatgagaacactgctgctgacatcacagagcc

SEQ ID NO: 183678 - DNA, 532 bp, Homo sapiens
actctactctgtggcagtgggtactctgcacatattctatcagaaccaactgaaaaaggaaaaatggctgttggctccaaaagtaggatctagcttcctgtaatgggtctaaggttgtcagcactctggacaaaagtaccgccaagtgcacagatctggtttccttccagaaaaccaagtagactctatacttaaaatgggtgttctgaggtctaagcaagaactgttgatgggttttatgttatcagacatgattcttgggatttattttcagagagatttaatttcatcttgaagtgtacatgaaaaagaaccctacaaagaaacatctcttgaccaccayggggttccaatatatgccacattcaagtctctcctttgcctaagaccagaacatttgatggaactatagaattattttaaaaaaaacaaaacacttcttcccagccccatctgtcatcattcgagtatttgcatttcacaagcaaaatgaaccgccctatgagaacactgctgctgacatcacagagcc

SEQ ID NO: 183679 - DNA, 391 bp, Homo sapiens
tggaggtgggtttctgtggagtggatttgcatttgcttgtgccagcttaggaccattttgagttctgggctygaggttttttgaacgatccaaatagtatgaacatgtgcttgagctctgatgtttagtggagataataccccccacctccatgcaaatacagagtttgatacaattgattttgtttcatgttaaatatgtggttctctggggtcctcactctatgtagaggtcttctgttagaatacctaacttgtaactgtttctcaattcctaaaagctgagaaaattgatgctcatgttcacaaaactggcttggtctccattaccattctaggctcactccttcacttagatattgagcttacttttctttacatttttagcaact

SEQ ID NO: 183680 - DNA, 595 bp, Homo sapiens
ttgggatttgtgttttttacagtaatttatttgtatagttaagctactgctagccaagctggtacagaaatggcttccaggaatacatctaccactagaattccaattcgctggtggaaaaaagatgcagcagggccagacatgttatgtctggtaccagaagtatataggtcatgagaacaaacacgatttgaaataaatggaaccagaagctagtctttggacaattcattcaaacatcaaattgtacgtggagaattttgtttaatctaaatggaacttttttccagggcaggaaaatacttaatacataattatgaaatataaacatgcacacccactaaacattcttatgtagaatgtgcgtttgtatgtggatatgtgtaatgggaattacatgagagagaattcattagaattcttgatatctgtgtttgtagagacaaatctgcagctgttatacaaaatgaaataaatctgtgtgtgtttacgtattttawgcatcccaagtttcaatagtaacaaacaaattttaacttacaaagctaaaagaaagactaaattatatttttattatctttggtagaagatgtta

SEQ ID NO: 183681 - DNA, 411 bp, Homo sapiens
aaacaagtttacacacacacacacaaacacacttcccaaagaccaacattaatcactcaaatactacaatttacaccagttgtttttaaatgaaacatgtattaggagcattactggagcttgttaaaatttaaattcttgggccctcatccaaggaattttggttttggaargctgggcagggccttataatgtgaattataataaacactccaagcgattctgatgcaatcctaaggactaccctttgaaaaaagtttctgtacttctttgagccattttcctactgccagccactacaactggcaaggccagctctccacaatggagtcaggacttcatataattatgcagtgtttttgttcttttttttacctctagtctaagacccctcttgcccttacctttacc

SEQ ID NO: 183682 - DNA, 592 bp, Homo sapiens
cactataacaaacaagtccccaaaagtataacagctctaacacagtacaagtttgctttctgatgtgtaacagtgctgaaagggagaacaagttgatgaagtggccctcatccatgcaattattaatctccaggctgatggagaaagtgtcatctttaaattgtgactgccaagatgagggttgtctccattcctgccaatcataaggggaaaaaagcatggaggaaagggtaagggggacttttctgggatagaaatagaagtggagaacatcctatatctattcacaacccattggctrgaactcagtcacatgggcatatctaattgcaaggaagtctgggaaatgtaatctacctatgtacaaagaaagaagaggaacatggattttagataacagctatcagtcttccataatccctcctcctcacaccactttttgcaactcagccttacctggattttgtgcatggctcaacaatcatccaaagcaccaggtccatagtttactgctatcattgcctgtaagacatgtggccatatgctccactcttacgactgctagccaggatgatgtgacagcttggctgat

SEQ ID NO: 183683 - DNA, 592 bp, Homo sapiens
cactataacaaacaagtccccaaaagtataacagctctaacacagtacaagtttgctttctgatgtgtaacagtgctgaaagggagaacaagttgatgaagtggccctcatccatgcaattattaatctccaggctgatggagaaagtgtcatctttaaattgtgactgccaagatgagggttgtctccattcctgccaatcataaggggaaaaaagcatggaggaaagggtaagggggacttttctgggatagaaatagaagtggagaacatcctatatctattcacaacccattggctagaactcagtcacatgggcatatctaattgcaaggaagtctgggaaatgtaatctacctatgtacaaagaaagaagaggaacatggattttagataacagctatcagtcttccataatccctcctcctcacaccactttttgcaactcagccttacctggattttgtgcatggctcaacaatcatccaaagcaccaggtccatagtttactgctatcattgcctgtaagacatgtggccatatgctcyactcttacgactgctagccaggatgatgtgacagcttggctgat

SEQ ID NO: 183684 - DNA, 549 bp, Homo sapiens
accaggtagcttaagtcttttattcacctagagcctttgacccagtaaacctcctgggatgwcagatctctgtctccctttccctttacctctctgtttccttttcttccatctttcctaccatctttcctcttgtatgtgcacatgctcacacatatttttagccccagcatctcttgatgtaacaagttaaaagttcatttctttgtctttaacagagggggagaaatcctgtatcatgtgaatagtactcttgaatttgtaataaaatgtaatgggaagtggatttttgtgggaacatgtttatcaaacagctcttattttttaagggaaatactttagtagaagaaaaatgacatttgcttttctcttaatgtaaagcgtaattttcaatagttaataggagcagtatttttaaagttttggtgggagagatgcttttttggaggttacttacgtttgtagctattggtgaataggaatttgaaatggtatgtatgaatatattttatagtatattgataattagaacataagatgcaaaaagct

SEQ ID NO: 183685 - DNA, 545 bp, Homo sapiens
gagacaacaaaggattaagtgtgttggctgggccaaatggattcccagtaatcagatcagaaatattcaggtcgtttgctctctgccaagatctctactagttaacacagatatattgtagatgattacatggttattaaaaaaaattacattataggactccaggcatttgtgatcccatttatggttaaaaaaaaaaaaacctatatatctatggttatatgtgcatatgcaatttcaaaaaagattcaagtaacygttaacagtggcttcctctgggcataaagaatggatatgcatgtgtgtggcgggggggtgagggggttatatatattttgttaacagatcgagagtgagattacaatacttaactagtgaaacaaaatattcagcaactttgataattaattcagaccatcactctgctactcctaatgacaaggtttagaaatatagctacaactggcaaagaagatttggggagatttagagtgatctagataggcggtttaaatactgcaaattttccaaactgttatttgaca

SEQ ID NO: 183686 - DNA, 545 bp, Homo sapiens
gagacaacaaaggattaagtgtgttggctgggccaaatggattcccagtaatcagatcagaaatattcaggtcgtttgctctctgccaagatctctactagttaacacagatatattgtagatgattacatggttattaaaaaaaattacattataggactccaggcatttgtgatcccatttatggttaaaaaaaaaaaaacctatatatctatggttatatgtgcatatgcaatttcaaaaaagattcaagtaaccgttaacagtggcttcctctgggcataaagaatggatatgcatgtgtgtggsgggggggtgagggggttatatatattttgttaacagatcgagagtgagattacaatacttaactagtgaaacaaaatattcagcaactttgataattaattcagaccatcactctgctactcctaatgacaaggtttagaaatatagctacaactggcaaagaagatttggggagatttagagtgatctagataggcggtttaaatactgcaaattttccaaactgttatttgaca

SEQ ID NO: 183687 - DNA, 545 bp, Homo sapiens
gagacaacaaaggattaagtgtgttggctgggccaaatggattcccagtaatcagatcagaaatattcaggtcgtttgctctctgccaagatctctactagttaacacagatatattgtagatgattacatggttattaaaaaaaattacattataggactccaggcatttgtgatcccatttatggttaaaaaaaaaaaaacctatatatctatggttatatgtgcatatgcaatttcaaaaaagattcaagtaaccgttaacagtggcttcctctgggcataaagaatggatatgcatgtgtgtggcggggkggtgagggggttatatatattttgttaacagatcgagagtgagattacaatacttaactagtgaaacaaaatattcagcaactttgataattaattcagaccatcactctgctactcctaatgacaaggtttagaaatatagctacaactggcaaagaagatttggggagatttagagtgatctagataggcggtttaaatactgcaaattttccaaactgttatttgaca

SEQ ID NO: 183688 - DNA, 454 bp, Homo sapiens
ctcataaatgttttataagcaacttaacagtaactcataagaaaattgctttagcaaaaatagaggaaactgattgaagaaaacaagacttgctgtctgcaaagaaatacctaaaacaacttttttgagcatccatagaagtaaggatgctgagtttcagagcccagagcatcattaaaactgagaaagttgttggccagaggaaagaattacctgctaasgtgtgtatctgtttgacctgatggctgcaattgaacttaatatagtacctgagtgagcatttatttcattattgtagctattggcaaatgtactttttttaaaagcaagcatttactgtcttattttaatgtggctctttacaatatagtctcccagactgaagaaaagtaatctgtggcttgatatgttggactgtgacctaactttgggcaaaaaacaaatcttattacct

SEQ ID NO: 183689 - DNA, 525 bp, Homo sapiens
cttccaagtcacaggtaggtgagagataaatggttgcattgttttgagtttctgattagcctctccaaaggaggcaatcagttatgcatttagctggatgagcagagcaattactttgaatagaatgggaggcagatttgccctaagcagttcccagcttgactcttcccttcagctttgtaattttgggaccccaacatttattttcctttcacatttcccctgttttctttttaaaatcttttggagaaaacattatagaagaaaatgagcctctggtctcaggtttcatctgatctctcatggctagaatagtttactcctagatgggtaggtcccaaatcattaggaaagctcatttttagcaggttgagaagtcttatgtcctatgaagacaaaaaacggggagaaagggagaaaaacaacaacaaayaaaaggaataatcctggaaaattgatataggccacattaccctgatcccatacatcaatagacagatatgaaagtggcttatgtatgtaaat

SEQ ID NO: 183690 - DNA, 486 bp, Homo sapiens
tcccctgccttgatatagttctgcccaaccacagagaacagcaccactctaaaggcaacctcgggaagttcacctttcttttacagtcacttaatgtgaaacccctaaccttcctactgggaaggccttctttgtatctagctcaattatgtccagttactaagtaatcctatttccccttttggtatactcaatggcgctcgagaccagcagccataasagctaaatgcaatagacattcttgtaatgaatagagcaggtctttcctcatttttcttgaaaatataataattgttcaaatttcttatttttattagttcatcaagcatttaccaagcattgccatgttcattgggaatacaaatatatataaggtacaatctctgccctcacagagtttacagtgtagtacagagattataagcttagaatccatggactggactgaaggagtctataaacccccaaaattatatgcaaagcttt

SEQ ID NO: 183691 - DNA, 597 bp, Homo sapiens
tatggatgatgagaagtcccacaagaggccgtatgcaagctgaagtttctggaaggcatggctcagtccaagtccaaaggcctcagaaccaaggaaggcaattgtgtaactctcagttcaaggccaaaggcctgagtgtcctgaaggatactggtgcaagtaccagaatccaaaagccaaagaacctggagttctgatgtccaagggcaggaggacaarggtatcctaccccaagagtgagagagaattcccccttcttctgcccgtttgttccatctgcccttagccaattggatggtgcctgcccacatcgaaagcagatcttcctcactcactctatcaactcacatgtcaatctcctctggaaacacccacacagacacactcagaaacaatgctttactagctattgaggcttccctcaatccagtcaagttgacacctaaaattaaccattacagagggggagggatatacagggtgaataatacagggatctgccctctgtgactagttgaggaaacagtcatagaaacaattaggtcaaggtagaatgagataagtgttgtcacactagttgttttgcatttttcattc

SEQ ID NO: 183692 - DNA, 504 bp, Homo sapiens
ggacctatttgagggtggagggtgggaggagggagaggactgaaaaactacctgttgggtactatgactattacctgtgtgaaaaaaaataatctgtacaccaaacctccatgacatgcaatttacccatgtaacaggcctgaacatgtacccctgaacccaaaagttaaaaaagagtatgaatcctcgttaggggktatgaagatgctaaaacatcccttaatcattacttaattaaccaggattgccatgtactgaattgtgttcccaccactcctcccttctgcctcaagaatcatgttttgaagccctaatcccaaatgtgatgatatttagatacggggcttttgggagatattgggataagatgattgggttcagatgaaggtgggatcctgattataggattaatgctcttataggaagaggaccagacaccagagttctccatttgccaagtgaagacagagggagaaggtgaccacctaacaggaaccgaattag

SEQ ID NO: 183693 - DNA, 531 bp, Homo sapiens
acaggcatgagccactgtgcccagctgttaaccatgtttttaatagccagtgaacattaggtactcccctcaacctaagtaagagtctcaatgttaaatacataggtaattttgccaataactcggacgatttagctaatattaaattactctcgtttgtcaaaaaaaggcatgcaaaccaagatcattttgttttggctgggtttttagttttataactttctatgccaaaccctgatgcctcaaaatatctagcagagataaatataaattccagacaaaaatgtatgctggcaattctgaaggcatttctattttyattttacaaataattttaaaaccagcttgtttagtaaagctaaacttgtcacatgaacttgaaaattgcttagaattatttacttaatttatgagcactcctttacttgtaagccaatttggtagacacaacatataacaacaagtgtacataacaaataaacttatctagacatgtatacactcacaggcacatgaagatccaatggcttt

SEQ ID NO: 183694 - DNA, 564 bp, Homo sapiens
tagaggatgtactatatatatatatatatatatataaaaatatggaaaattatttatatatgtaaataaattgacaaaagtacaaatttcgtcgttatttaacttctccttattccacttgtctcatctataaaataggattaataatgttaaccatctcacaattgtctctagaattacacctggtatgtaacaactgctcaacaaaatgcagctatgatcagtatcaaattattttccatgacaggagttttcatagggttaggtggaaaaagtacaaggttagagaaaaggattaccaaggatgcagaaacagatactaagggcaccaaaactaaactttgcctcatttatggaatgtagtgaacactaaatatattgcccatgataaggagtttagacttgcttaytgaagtagcccacacattaaaataataataagaagaaatgggttgaagattatattgttggcagaagttttatgttggactaatcttagtttgcactttcacattgagcatgagtggaaattgggaagctcatcttatcttccagcaccatcat

SEQ ID NO: 183695 - DNA, 617 bp, Homo sapiens
tttgggggttttaataatgttttgtgtcatgtgtaatatttcaagccatgaaatatggaatgtaattcatgctaaagtatatcagctttaggaaaaatcaaactatatgttttcttcttcaaactggagagcattgtttattaataaaactcattttattgatgtacctgtatacaaaaataccccctcctgataaggttagtctctgcaaatatgaccagcagtttaataagtgacagcctaacatatgagcatccctagtgaagttagatgacatgaggtggtattttgatgtggttcttgatatatatcattgtgtggctaggaaaaagaacctgacataaaatcatttctctgaatctatttctctgtctgtaaataagtctttgcattgtccttgcagtcgcagtattgttwtgaggacaaaataatgttgcaagaagtcagggacaccaaacagagggaccagctgaagccatggcagaagaacgtggatagtgaagatttcatggacatttattagttccccaaattaatacttttataatttctatgcctgtctttactgcagtctctgaacataaattgtgaagatttcatggacacttatcacttcc

SEQ ID NO: 183696 - DNA, 589 bp, Homo sapiens
tttctctgttaatctccctttccttctctttgttgacatctcaggcaaattccacagttttccactcatttctagttattaaaaagtccaagccagtacaatttaagatgtccatctcatctccttccgtcttcccatctcaggtttgactagtggcctcaataacctatagagggaacaacctttttctctcttcctaccctcctagttctagcttacttggaattggggattaagaagtagaaataggagagagggcaggggtcatcataggtagtggcccctgtacatggaataaccttgaaggtggtaagtttatggacagcctgagccacaagagatattcacaatttaattggatatcaattaattaactcatttgactggctcttacagatgtaagagttttgtggcctaagagataggaggaatgaggcaggagtrtatataaataatttaacccagttataggatgccaaataaatgcaaaatccagtcatgtgaagaaatggctaggtcaggcatttggacttccatgagtggactgggacctgaatggtgtgggcttggtgggctacatgtccttgct

SEQ ID NO: 183697 - DNA, 570 bp, Homo sapiens
ttgtgaatttttgactttagtgtgaggtgrcaaaaagaaagtatatagtaaaggtcaagagtagaaatttagaaatggctgctttacttgtctatgccagagtttcttcatctgaaaatgaggttgataataatgcttttatgtcataggaaggttgtaagttttaactttgatattatataatatatataataatctctagacatatagtaggcaatccatttatggttggtattattatcagctattctttcttaattctagggcaaagaattacctccttacttctaccagctgacccaggcagagtccaatgtatttccctgcagaatagattgaggtttcttaatcctctcattagtgaggttgcaggaaagtattctaaatgtatttttaaaattctaattttgtcaaaagactccagtaagatagtgaaaagtcaggctacagggtgagagaaaatatttacaatacttgcacttgacaaagatctcatatcacaatatataaaaaactcttacacattaataattaaaaaccccagtcaactcaacagaaaagtgggcaaaa

SEQ ID NO: 183698 - DNA, 546 bp, Homo sapiens
taaatgtgtaccatgtgctgacactattctagaccccaaatataagaaaataagagacaaaccaccctatcctagagtatttttctgctgattgaagaaggtagaaggggaaatatcccctatgatcattgcatcattgaggcttgaaagggtgcatctgacaatgaagcttttctgaagtaagtgacatctgagctatatttggaaggagaagttgaacttagctgggaatcaggtattccagacaaagaacaacagagaatttaaagtaaacacattggcttttatgggagaggagtgtggaaagatatgtctgggcagttagtggccagctgcaaatctggagagatcttcactcccatgcttggtggctgacgctgctgtcggttgaggtctctccaaataccctaggcctcttcrtaccatgctggtttcagaatagttggatttcttatatggaagattaggcctccaaaataagtgaaccagtgaataagacaaaagctgcatcactttttatgacttagcttcagaaatcaggcattg

SEQ ID NO: 183699 - DNA, 567 bp, Homo sapiens
atctcttttgattccatgtctcacatccaggtcatgcctatgtaagaaatgggttcccatagtcttgggcagctctgtccctgtggctttgcagggtgcagcttccttcctggctgctttcatgggctagcactgagtatctgtggcttttccaggtgcatggtgcaaactgttggtggatctaccattctggagtcaggaggacagtgaccctcttctcacagctccactaggcagtgccccaggagggactctgtgtggaggctccaactccacatttcccttmtgcactgctctagcagagattctccatgaggcgcctgcctctgcatcaaacttctgcctgggcatccaggcatttccatacactggtgttcccaaacctcaattcttgacttctgtgcacccgcaggctcaataccatgtggaagctgccaaggtttggggcttgacccctctgaagtcacggcttgagctccatgttgtcccctttcatccatggatggagtggctgggaagcagggcaccaagtccctaggctgcacacagcatggggaccctgggcca

SEQ ID NO: 183700 - DNA, 567 bp, Homo sapiens
atctcttttgattccatgtctcacatccaggtcatgcctatgtaagaaatgggttcccatagtcttgggcagctctgtccctgtggctttgcagggtgcagcttccttcctggctgctttcatgggctagcactgagtatctgtggcttttccaggtgcatggtgcaaactgttggtggatctaccattctggagtcaggaggacagtgaccctcttctcacagctccactaggcagtgccccaggagggactctgtgtggaggctccaactccacatttcccttctgcactgctctagcagagattctccatgaggcgcctgcctctgcatcaaacttctgcctgggcatccaggcatttccatacactggtgttcccaaacctcaattcttgacttctgtgcacccgcaggctcaataccatgtggaagctgccaaggtttggggcttgacccctctgaagtcacrgcttgagctccatgttgtcccctttcatccatggatggagtggctgggaagcagggcaccaagtccctaggctgcacacagcatggggaccctgggcca

SEQ ID NO: 183701 - DNA, 526 bp, Homo sapiens
gaattcaggatctgttgtagaaattctgttaccatatctctaaagctgagagtcaaatgtggaatgtaatctcatccaagtttactgaatctgatagagctagaactataaagccacagtctattatttatatcccctaccatacattttcccagatattttctatgttaatcagcattttgccaatattttaagtactcagatctgactaatgtatcataattttaatctaaaattagtaacaaaaacaaatggaagttaaagattaatcacacactgatattttgcttagctaaatctctgtaccagtagcggagcagacmgggcagcattccccttcaggtataactgtttgggggcacctctggggatggcacatggtttcatcacaaagaactcttccatctgagcagaggcaggtagtgcagggctcaggcgaccacacagctttgttgtacatggttatgccctttaccaaacagtgtcccttctttcctagaagaaaacaaaagcacaaatttaaatt

SEQ ID NO: 183702 - DNA, 440 bp, Homo sapiens
aattcaagggcaagccagaggtaggagaaaacagcttttttacattttttaaaattttattttaaggactttagaagaaaacagctttactgaagaggcggtgttacatgcagagcagggttacctctaggcagagagtaacagctcagggcagttttgcagtcatatttatacccatttttaactgcatgtagattaaggggcgatttatgcagaaatttctagggaaggggtagtcacttttggatcattgggtcattgccatggaaaggagcagtaacacccgggtgttgccatggcaacggtaaattgacatggcacactggtggacatrtctgattgaaagctgtttttgccctggccttgttttagctagacctcaatctggtcccatgtctgagtcccgcctctgagtcctgccttctaccttaaaactatgc

SEQ ID NO: 183703 - DNA, 493 bp, Homo sapiens
cctttattttttccttgtattttagatttacaatttcttcataacctattttattgccctaggcaattgtcagctagatagccctaaatgtgcatattaaaggaacccttaggtaaaaaaaatcagatagtgaaatttgcttctcaaagcacagagagaaagagtctggtgatgttagarggagattgaagatggatgccaaatcaaacacaaaattgtagaaatatattataggattgtataaggagaccagttgtatttagatagggactacctgtcttttaactggatctctgagctctgggcagagcccacactgaatcctagttctccaaaaagggagaattactatgaggctacaccaagtgatgcttttacagtgtccttttttttttttttaacaaagacatttctaagtgttcaagctactttcttccttaaaaatccaagaataaactaataacagttttagtcaaaaaatcaagtaacacaa

SEQ ID NO: 183704 - DNA, 562 bp, Homo sapiens
caaataactatattgccataasttaagaatactcatagatagtttccaaattttggagagaatcaggtagagagaaacaagtatcctccaaattttgttgatgggagttaacagttaaaagttaaacagttaaaagctgttaatcgcttaaaaaaagtttctttgactttgaaaggtaaaacaaagggatagcaatattttaagcaaaacgttaaacagattagtttcctattagtttggtttatgcagttaattcctgtcctgctttttatcagaaacctgcattcagagctttatagctgattagaaaaccaccctttgaagaggactaaaacaagacaacaattgtttatggatgacaaaaagttttagggtagccatagttaaagacacagttgacaaagatatccgttacctctgtggcacacaataattttaacaaaacaattataattattagtgataacgtacactaagatatattagaatgataggaatctgccataactttggaacacatcccaatagcatatttatacaactatagcccaaagaaagccaa

SEQ ID NO: 183705 - DNA, 412 bp, Homo sapiens
gagcgagtgcctggagcaggggcttcacaaccccgaccggtgccctgtcccgctgtagttgagctggtattcaagatgcaagaaaaaaaacrctcctcactattccatctcctcaagtggaaggagggggtcttttatggagccgctagctgggcagtctggggctagggcaggggtgacaccagcactcacttggctgccccagctggtatctcaggaggtcatgtgcacccctccacatacccgccacaatccactgcctctgggcccaattctatgctagaactcacctacgagttagagatcttatggcctagactgcctttaaggttgtctgagaaacctggaaccgtttcttagcccttggtggcaaggtttgcagaaactcaagttctgattcctgggatgggta

SEQ ID NO: 183706 - DNA, 609 bp, Homo sapiens
agcaggggcttcacaaccccgaccggtgccctgtcccgctgtagttgagctggtattcaagatgcaagaaaaaaaacactcctcactattccatctcctcaagtggaaggagggggtcttttatggagccgctagctgggcagtctggggctagggcaggggtgacaccagcactcacttggctgccccagctggtatctcaggaggtcatgtgcacccctccacatacccgccacaatccactgcctctgggcccaattctatgctagaactcacctacgagttagagatcttatggcctagactgcctttaaggttgtctgagaaacctggaaccgtttcttagcccttggtggcaaggtttgcagaaactcaagttctgattcctgggatgggtaatttccctctggctagaggtggtttcaatgctcccttcccagatgggagtcagctaagtttggtctggttttcctttctcctgtaagagacagcaccgagktcagcgacccacaactgctctgctcttgctcgtccagcttccagagatgctctttacaccatactgccactgcctaggatagggaaggggcggggtcagcgatttaagac

SEQ ID NO: 183707 - DNA, 314 bp, Homo sapiens
gggtctatgttcagcggtgcacgtactgtcttgataaacatcttaaacaaaagaaaacagggttccagagcagagaactggtctgaccacaaatttaccagggtggagttttttccccaccctagtaagcccgagggtactgcaggagaccaggacgaatctcagtccttagctcaactgcataagacagacattcccagagcggccgattatagaccttcccccaggaatgcattcctttcccagggtattmatattaatattccttgctaggaaaagaatttagcgatctctcccctacttgcacgtccatt

SEQ ID NO: 183708 - DNA, 589 bp, Homo sapiens
gcattttcttgtccagatctagaaaagattaactgagggcctgacacctttaaaggtctaaaacaaaatttaccatctattctctctaagggctactacctgtgagatttcatttacctaacaagaccacctttgctacccaagtctcctcttttctccgtctcatcacctctcttgccattattacctgatttaccaccataaccatttttgaccatgctttgagctcccattctttttgtaagctcaagaggatatataagcttctgcacctcattgggtgttcgggttttcattctgaaggctcccgtgtcatataaaactatgattaaataaatgtatatgctttctctcttattaatctatcttttgtgagttgatttttcagtgaagctttccctttgttccttcactggttcctgctctagggtgccaactacccttattcttctatccmctttcctgtccatcctactcttactctcacattcttctaggaatgggaatgtctttccttttgggccatgttagggtcatctgccaggtttcctgggggtaggactgaatctgtctctaccagctcctggac

SEQ ID NO: 183709 - DNA, 417 bp, Homo sapiens
tactttcccatcggagctaccattcttacagagattgttatggtatctgattagaytctgcatacttcttttacagttgtctccatgatcataaccatgtatggccatttctactctggcatgtggtcattatgtaactacctcttcatctgattctaaagagggagtcctggttgctgggttggatggaactgtccttatcactgcatccattgttgcttgttttttcatcatagccatgggacattggacatacccactatttttatctggcaacttttattctccattagatacccatggaaactctggtgctgccaaacttgcaggggtctgcaagcaaaaagaccctttttgcctaagtctcccatatacatgatagcctatgtgctttgtcacaacaggcaggtacctctc

SEQ ID NO: 183710 - DNA, 593 bp, Homo sapiens
ttgctgtaggcccggggcagttgtggccctggggagagacctctgtgcttgaggaaaggggagggaagaataggaaggattttgtcttgtggttttagtgcccagttcagctgcagtagaatacagcagtaggtagattccaaaggttctccactctaaatcctggctctcaggaagcatctccagacctgcccagggctggaggcaacttgccactctgaaggtaaggacaaacctggttagatttgccacttgctgatttgagagccctaaggtcttgactgaatacagacggtagccaggcagtggtcactgtgggtcttgggaaagaccaagtgctgttatggcctcaggtctgacagagcacagtcccagtggtggtggccacaggagtgcttgtgtcatccctcccccagctgcaggcagctcaaggcagagatagaaaatcttttcktttgtgggaaagtaagggaagagaacttgagtccctgcctagcaatccagggaattctcctgaatattacccaagaccaccaaggtggtacctctatgagtctgcaagagccacagcattactgggtttggggtgtccc

SEQ ID NO: 183711 - DNA, 503 bp, Homo sapiens
gaattctcctgaatattacccaagaccaccaaggtggtacctctatgagtctgcaagagccacagcattactgggtttggggtgtcccccaaagcaaatatagctgcaataaccaaatatttagatcataatacccaagttccttsaaatatctgaaaaggtttcccaagaaggatgggtagaaataagcccagactgagaagagtacaataaatacctaactcttcaatgcccagacactcatgaatgtccataagcatcaggatcatccagaataacatgacctgactaaatgaactaaataaggcactagtgacaaaccttggagagacagagatatgtgacctttcaggcagataattcaaaataactgttttaaggaagcttaacaaaatccaatataatgcagataaggaatttagaatcctatcagataaatttaacaaagggattgaaataattataaagaatcaagcagaaattctggagttgaaaaatgcaat

SEQ ID NO: 183712 - DNA, 500 bp, Homo sapiens
aagaccaccaaggtggtacctctatgagtctgcaagagccacagcattactgggtttggggtgtcccccaaagcaaatatagctgcaataaccaaatatttagatcataatacccaagttccttcaaatatctgaaaaggtttcccaagaaggatgggtagaaataagcccwgactgagaagagtacaataaatacctaactcttcaatgcccagacactcatgaatgtccataagcatcaggatcatccagaataacatgacctgactaaatgaactaaataaggcactagtgacaaaccttggagagacagagatatgtgacctttcaggcagataattcaaaataactgttttaaggaagcttaacaaaatccaatataatgcagataaggaatttagaatcctatcagataaatttaacaaagggattgaaataattataaagaatcaagcagaaattctggagttgaaaaatgcaattcatatactgaagaattc

SEQ ID NO: 183713 - DNA, 503 bp, Homo sapiens
gaattctcctgaatattacccaagaccaccaaggtggtacctctatgagtctgcaagagccacagcattactgggtttggggtgtcccccaaagcaaatatagctgcaataaccaaatatttagatcataatacccaagttccttcaaatatctgaaaaggtttcccaagaaggatgggtagaaataagcccagactgagaagagtayaataaatacctaactcttcaatgcccagacactcatgaatgtccataagcatcaggatcatccagaataacatgacctgactaaatgaactaaataaggcactagtgacaaaccttggagagacagagatatgtgacctttcaggcagataattcaaaataactgttttaaggaagcttaacaaaatccaatataatgcagataaggaatttagaatcctatcagataaatttaacaaagggattgaaataattataaagaatcaagcagaaattctggagttgaaaaatgcaat

SEQ ID NO: 183714 - DNA, 500 bp, Homo sapiens
aagaccaccaaggtggtacctctatgagtctgcaagagccacagcattactgggtttggggtgtcccccaaagcaaatatagctgcaataaccaaatatttagatcataatacccaagttccttcaaatatctgaaaaggtttcccaagaaggatgggtagaaataagcccagactgagaagagtacaataaatacctaactcttcaatgcccagacactcatgaatgtccataagcatcaggatcatccagaataacatgacctgactaaatgaactaaataaggcactagtgacmaaccttggagagacagagatatgtgacctttcaggcagataattcaaaataactgttttaaggaagcttaacaaaatccaatataatgcagataaggaatttagaatcctatcagataaatttaacaaagggattgaaataattataaagaatcaagcagaaattctggagttgaaaaatgcaattcatatactgaagaattc

SEQ ID NO: 183715 - DNA, 431 bp, Homo sapiens
atggcgcagaatagagaacccagaaataaagccaaatacttactaccaactgatctttgacaaagcatacaaaaycataaagtagggaaaggacatcctattgaagaaatggtgctaagataactggcaagccacatgtagaagaataaaattggatcctcatctctcaccttatacaaaaatcaactcaagacggatcaaagacttaaatagaagacctgaaaacataaaaactctataagataaaatcagaaaaactctaaaagataaaatcagacatcggcttaagcaaagaattcatgactaagaagctaaaatcaaatgcaacaaaaacaataataaatagaagggatataattaagctaaaaagcttctgcacaacaaaagaaataatcagcagagtaaacagacaacccacaaagtgggagaaa

SEQ ID NO: 183716 - DNA, 431 bp, Homo sapiens
atggcgcagaatagagaacccagaaataaagccaaatacttactaccaactgatctttgacaaagcatacaaaaccataaagtagggaaaggacatcctattgaagaaatggtgctaagataactggcaagccacatgtagaagaataaaattggatcctcatctctcaccttatacaaaaatcaactcaagacggatcaaagacttaaatagaagacctgaaaacataaaaactctataagataaaatcagaaaaactctaaaagataaaatcagacatcggcttaagcaaagaattcatgactaagaagctaaaatcaaatgcaacaaaaacaataataaatagaagggatataattaagcyaaaaagcttctgcacaacaaaagaaataatcagcagagtaaacagacaacccacaaagtgggagaaa

SEQ ID NO: 183717 - DNA, 580 bp, Homo sapiens
atgaggaactgtgggagttaaaattcaagatgagatttgggtagggacacagacaaatcatatcacacyttaaactcatattttcacctcactttctttacataattttatggtaatttattatgttttatacttgaaaatcttttattaatcaccctctcacacatactttgctccaataaaaattttataccaattgaaattttaaaaaacttaattttctgtgactctaacctccatatgttaaaagctctcctctagatgaagttattattattattataaattcaagattgataaaaacagccaaaatatatcacaaattttaatgttattattaagtgtatagaatagaattgcattgaaaatacatctcttaatgagatgaatgaaattgaaattatcttcaattagtcatatatttatggatgaatattacttattgctagaataagacaggtttgacaccaacttttttctaattttttaatttttatggatgaaaacagagagatatcatgttcacataagttaacatatagtaatgaaagaattttaagacaggaggtggagccaagat

SEQ ID NO: 183718 - DNA, 580 bp, Homo sapiens
atgaggaactgtgggagttaaaattcaagatgagatttgggtagggacacagacaaatcatatcacactttaaactcatattttcacctcactttctttacataattttatggtaatttattatgttttatrcttgaaaatcttttattaatcaccctctcacacatactttgctccaataaaaattttataccaattgaaattttaaaaaacttaattttctgtgactctaacctccatatgttaaaagctctcctctagatgaagttattattattattataaattcaagattgataaaaacagccaaaatatatcacaaattttaatgttattattaagtgtatagaatagaattgcattgaaaatacatctcttaatgagatgaatgaaattgaaattatcttcaattagtcatatatttatggatgaatattacttattgctagaataagacaggtttgacaccaacttttttctaattttttaatttttatggatgaaaacagagagatatcatgttcacataagttaacatatagtaatgaaagaattttaagacaggaggtggagccaagat

SEQ ID NO: 183719 - DNA, 580 bp, Homo sapiens
atgaggaactgtgggagttaaaattcaagatgagatttgggtagggacacagacaaatcatatcacactttaaactcatattttcacctcactttctttacataattttatggtaatttattatgttttatacttgaaaatcttttattaatcaccctctcacacatactttgctccaataaaaawtttataccaattgaaattttaaaaaacttaattttctgtgactctaacctccatatgttaaaagctctcctctagatgaagttattattattattataaattcaagattgataaaaacagccaaaatatatcacaaattttaatgttattattaagtgtatagaatagaattgcattgaaaatacatctcttaatgagatgaatgaaattgaaattatcttcaattagtcatatatttatggatgaatattacttattgctagaataagacaggtttgacaccaacttttttctaattttttaatttttatggatgaaaacagagagatatcatgttcacataagttaacatatagtaatgaaagaattttaagacaggaggtggagccaagat

SEQ ID NO: 183720 - DNA, 580 bp, Homo sapiens
atgaggaactgtgggagttaaaattcaagatgagatttgggtagggacacagacaaatcatatcacactttaaactcatattttcacctcactttctttacataattttatggtaatttattatgttttatacttgaaaatcttttattaatcaccctctcacacatactttgctccaataaaaattttataccaattgaaattttaaaaaacttaattttctgtgactctaacctccatatgttaaaagctctcctctagatgaagttattattattattataaattcaagattgataaaaacagccaaaatatatcacaaattttaatgttattattaagtgtataraatagaattgcattgaaaatacatctcttaatgagatgaatgaaattgaaattatcttcaattagtcatatatttatggatgaatattacttattgctagaataagacaggtttgacaccaacttttttctaattttttaatttttatggatgaaaacagagagatatcatgttcacataagttaacatatagtaatgaaagaattttaagacaggaggtggagccaagat

SEQ ID NO: 183721 - DNA, 325 bp, Homo sapiens
ggtctctgggtgtcttattgcttacactgctccgtaaagcccccaaactagactgctacctatatgtatgctttaatcatgtgaattcaactggaaaaatgtgctgttttgaaagtcactcaaagagttaatactggaaataaatgaatggctatgtggaaattttaaaagtttattatcatggaaaatttcaaacatatacaaaagtagcaagaagartacagaagcctcatgtatcctttattcatctacaactgctttatttacattattcttcactttcccttttcctccactggattatttggaaagaaatcccagatag

SEQ ID NO: 183722 - DNA, 493 bp, Homo sapiens
cctactctgtgtggggcttccttggtgcagccaggtaaagaacgtcaccggattcgtgtttatgtctttcttcctctgacactccttctttggtgctttaaatttcaaacaattcgagattcagagrgaggacttagagggtcaagtcatgtgtcctttctggatccctgggtaactctttttcctattgtttctctcagtaaccagacataatctcccccattatccggagataagtactgcccttaactaaaacctaaggctgtttacttattttgttcctttcataatttcccaccttcatgaaaaggaagctttgagttaggagcaagtgatggggcacaggcatcctagacctagagcgagaagggccaccaatgagcctttagttccttactgcctttactgaatgagaaaaaagaaacctaaagagaggttatgtggctcacatccttaaattagagaattaggagtgaattaaggtttgacgtca

SEQ ID NO: 183723 - DNA, 461 bp, Homo sapiens
atcaaagaaaaactaaataaatggcaacaatccatgttaatgaataggaagactcaacattattaatatgtcagttcttcccaacttgatttacagattcaacacaatcccaattaaaatcccagaaaattattttgtgaatattgaaaaagtgatcctaaagtttataaggagatgcaaaagcccagacagtcaactcaktaagaaaggagaacaaagttggagaacggatacccaacttcaagacttactataatgctacagtaatcaagacagtgtggttttagcaagagacaaataaataaatagatggaacaatagcaagcccagaaatagacctacatcaatacaatacacaaatctttgacaaaggagtaagaacgatacaatggagaaaaaaattgtcttttctacatatgatgctggcatttttgcctggccatccacatgcagaaaaatca

SEQ ID NO: 183724 - DNA, 552 bp, Homo sapiens
acagcaaaataaatctgaagtaagcagaagcaaatctataatacaaattagggcagaaagaaatgaaattgaaaacaggaaattagtagagtaaatcaatgaaaccaaaagctagtgttctttgaaaagttcaataaaattgttaatcctctaaccaagctaaccagaaaacagagaaaacatacaaatcactaagatcagaaatgaaaaagagtaattaacattgacttcatagayattaagaaattaggcgtaagcattttaaacaatttcatgcttacaaatttgataacctagatgaaacggactgattccacagaaggcgcaatataaaaattgcacacagggagaaataaataatctgaataggtttaataaatttaattgacaattagttacttttcaaaagagaaagcatcagtcccagatgtttccactggtgaatctaccaaactcccaaggaagaatttaagtcaatttttttcaaacttttacagaaaatataaacacagggaatacttcctaactcattctaggaggccagcaatactc

SEQ ID NO: 183725 - DNA, 573 bp, Homo sapiens
gtgaggtaatatatatgttaattagctatttagccattcaacaaaatatgcatatttaaaacatcatgttgtacatgctaaatatatgcttatttgtaaattaaacattaattggcctggcataatggttcacgcctgtaatcttagcactttgggaggctgaggcaggtgaattgcttgagctcatgagttcaagaccagactaggcaacacraggaaaccccttctctacaaaaaaaatatgaaaaacaatcaaaaacaaatagttgggcatggtagtgtgggcctatagttctgcatgggaggctgaggtgggataatcacctgagccagggaggtagaggctgcagtgagctgtggccatgccactgcattccagcctgggtgacagagtgagaccctgtctcaaaaaaaataattaattaatttaaaaatcaatgtaatttaaaaatcaatgtaatttatcacaataggctaaggaagaaatatcatacaatcatatctataatgctgaaaaggcatttgacaaaatccaacacacatttctcataaaaactctgaacaaattaggca

SEQ ID NO: 183726 - DNA, 573 bp, Homo sapiens
gtgaggtaatatatatgttaattagctatttagccattcaacaaaatatgcatatttaaaacatcatgttgtacatgctaaatatatgcttatttgtaaattaaacattaattggcctggcataatggttcacgcctgtaatcttagcactttgggaggctgaggcaggtgaattgcttgagctcatgagttcaagaccagactaggcaacacaaggaaaccccttctctacaaaaaaaatatgaaaaacaatcaaaaacaaatagttgggcatggtagtgtgggcctatagttctgcatgggaggctgaggtgggakaatcacctgagccagggaggtagaggctgcagtgagctgtggccatgccactgcattccagcctgggtgacagagtgagaccctgtctcaaaaaaaataattaattaatttaaaaatcaatgtaatttaaaaatcaatgtaatttatcacaataggctaaggaagaaatatcatacaatcatatctataatgctgaaaaggcatttgacaaaatccaacacacatttctcataaaaactctgaacaaattaggca

SEQ ID NO: 183727 - DNA, 535 bp, Homo sapiens
tactttgacctccaatatttaattcaacaagcagaaatataaccttttcacttgacaaaacccacttattttgcttgagaaattataaaacaaaaccagcaggtgcctgagattcagtacttgaaattatcatttaaagcaaagtgtcttgtatggtttcaacattgttcactccattttctggcagctgacactcatttactctcaacaagtgaataagcagtcggtgagtgtccctgatgtcaaggagctgtcataatttccatggagttagctctgtttggcattacagaaattcactgtgatcctgctgacaactcttttgtatagtcataaagtatacagcagaacagtttgtcccagggctaaggtcaggctttttattttgctattatgagaaatcaataaatacacaatactatttrtcttatttattctaaggaaggaggagaccaaggcatattttcctccttctaattcaaaatatttctaacattattattagattagtactgatgggtcagtcagtactaca

SEQ ID NO: 183728 - DNA, 587 bp, Homo sapiens
ttctttaaaaagctagcatttcaagacataatttttttaaaaatgaaaattctaaattgttacttactttaaaagtatttaaaagagattctgccaatggtttaatataagaacaaaaaggagtatttttcaggaaatcaagccagagatatgagtatccattcttgttggcagaccttatttgcttattttaaaggcagtgagcaaaagatgtagaactccaagagacagacgttgattagaagtttttctttaagatgtcatttttattttctgaaaaagcatttatttttaaaacttggcacggattattaagacgggtacagcttaaatttcccattaaaaaaatcatatgtcattcccaaacctgttcatatacacagagaaaaatacttaggtatgtactcattactttggcctttccttaatctgaaaaatttttttataaaactgagtatttttgtgatgttgctccatcagctcatttaaaaactrctatatgatcttgttcaatgttgtttaatcttaggaccactttgtttcacttatagctctaacatctgtcttttttttttttttgccacaaa

SEQ ID NO: 183729 - DNA, 592 bp, Homo sapiens
ttaaaatgtttcaaataacagtctgagaatttgattaaaactatgttccctctcgcagaaaaatgcacaggctcacaaatttttgcattcagttccaacacatttgaatcacatctttgtagtctattcatgaaccaaaggtagtggaatttggagattttgttcaagctcatgttatagacaaagaaactttggtcctccagagctagatgactttccaaggttaacctgttaggtatagttcaagataagacaaaaatacaggtttccatcccagctactcgggaggctgaggcaggagaatggcgtgaacccgggaggcagaacttgcagcgagcggagatcgcgccactgcactccagcctgggcgacagagcgagactccgtctcaaaacaaacaaacaaacaaacaaamaaaaaaaccaggtttcctagaatacacactttttctattacatccaatcacgtaattataaccaactagaaaggattcacaataactaaacacattttacagcaactttaggttttttttctatggaataaactgtatctaatctcatcaatgcatgtttcattataagagataatt

SEQ ID NO: 183730 - DNA, 592 bp, Homo sapiens
ttaaaatgtttcaaataacagtctgagaatttgattaaaactatgttccctctcgcagaaaaatgcacaggctcacaaatttttgcattcagttccaacacatttgaatcacatctttgtagtctattcatgaaccaaaggtagtggaatttggagattttgttcaagctcatgttatagacaaagaaactttggtcctccagagctagatgactttccaaggttaacctgttaggtatagttcaagataagacaaaaatacaggtttccatcccagctactcgggaggctgaggcaggagaatggcgtgaacccgggaggcagaacttgcagcgagcggagatcgcgccactgcactccagcctgggcgacagagcgagactccgtctcaaaacaaacaaacaaacaaacaaacaaaaaaaccaggtttcctrgaatacacactttttctattacatccaatcacgtaattataaccaactagaaaggattcacaataactaaacacattttacagcaactttaggttttttttctatggaataaactgtatctaatctcatcaatgcatgtttcattataagagataatt

SEQ ID NO: 183731 - DNA, 370 bp, Homo sapiens
accaatgcagacctcaagaccaayagaagtgactctttaagttccataagaaacatttacaatctattctctctgaatcctgctaccttgaggttttgtctgcatgatcaaaccttggtctctataaccccttatcacaaacaagatattcctttctatgcattccaggtctttagataataaccaattgccaatcagaaaacctttgtatccacctataacctggaagaaccccacttccagtttggaagcctcccacttcccccacttccagttccacgtataacatggaagtccctcacttcaccttttcagactgaaccactatatacctaatacatattgattgatgtctcatgtctccctaaat

SEQ ID NO: 183732 - DNA, 370 bp, Homo sapiens
accaatgcagacctcaagaccaacagaagtgactctttaagttccataagaaacatttacaatctattctctctgaatcctgctaccttgaggttttgtctgcatgatcaaaccttggtctctataaccccttatcacaaacaagatattcctttctatgcattccaggtctttagataataaccaattgccaatcagaaaacctttgtatccacctayaacctggaagaaccccacttccagtttggaagcctcccacttcccccacttccagttccacgtataacatggaagtccctcacttcaccttttcagactgaaccactatatacctaatacatattgattgatgtctcatgtctccctaaat

SEQ ID NO: 183733 - DNA, 558 bp, Homo sapiens
tgaatgcctgcaaaaaataagtaattttgactacctacaaaattgtatttttgcacrtaccttatagtgtctcttgttttaactaagatgaatttatgataaaaacatgaaaaaaaatcaagtggttaactctaatttgtttattaagctatgttagtaaaagcaactaatactggcctatgactttccaatttaaaaagaattttgtgtcatttcattgaactctccattagcatagtggtatgcttgataacattatcttctgggcaaaattagttgtactactataagtacccatatcactttcttgcggcattgacatctctagtatagcacttgatagtatatggtaggtatcttttcatatcttttctagactctcaagtctcattaagcaaaagatgtttattatctgcgccagtcacacacttcccaaattcaatatatacacacgggcttcctattggtagtaagactttattaactttgattgagttattgtttcaccaaatcgaaaactgaggttccaagatgttaataaatgtacccaagaatgca

SEQ ID NO: 183734 - DNA, 483 bp, Homo sapiens
aaatacagatgcaaaatcttcaagaaaatactagcaagctaaatccagcacagatcasaaagataatacaacataatcaagtggcatttatgccaggaatgtgaggatggtttaatatacacaaatcaataaacatcatacattaaatcaatataattaaagacaaaaatacaatcattttgatagattcagaaaaaacatttaatacaatgtaatatgccattatattaaaatctcaataaaataggtgtagaaggaaattacctcaaaataataaaaggcacatattacaaacacacagttaacatcacaccaaagaagcaaaagctaaaatcttttcctctcagaactggaaaaaagacaaagatgctaacactcaccacttgcactcaatatagaactagaagtcccagccagagcaattgggaaatgaaaattaaagggcatccacattcaaatgaatgaagtgaaattgttcctgtc

SEQ ID NO: 183735 - DNA, 483 bp, Homo sapiens
aaatacagatgcaaaatcttcaagaaaatactagcaagctaaatccagcacagatcagaaagataatacaacataatcaagtggcatttatgccaggaatgtgaggatggtttaatatacacaaatcaataaacatcatacattaaatcaatataattaaagacaaaaatacaatcattttgatagattcagaaaaaacatttaatacaatgtaatatgccattatattaaaatctcaataaaataggtgtagaaggaaattacctcaaaataataaaaggcacatattacaaacacacarttaacatcacaccaaagaagcaaaagctaaaatcttttcctctcagaactggaaaaaagacaaagatgctaacactcaccacttgcactcaatatagaactagaagtcccagccagagcaattgggaaatgaaaattaaagggcatccacattcaaatgaatgaagtgaaattgttcctgtc

SEQ ID NO: 183736 - DNA, 509 bp, Homo sapiens
acatcactaatcatcagaaaaatgcaaatcaaaatcacaatgagacatcaccttccacccactaggatggctactatcaaaaaaaaaaaaaaagaaacaaacagaaagaataaattttggtaagaatgtagagaaaatggaacttttgtgcactgttggtgggactgtaaaatgatatagcctcgatagaaaacagtatggaggttcctcagaaaatttgaagtagaactacagtatgatccaggaactccacttctggatctatacccgaaataattgagaataggatctcaaagaaatatttgtataccacattcactgcagcactatatacacaakagccaagttgtagaagccttaaatatccatgaataaatgaatgaataaagaaaatatagtatatatgcaatggaatattatttagccttaaaaaagttaggaatcctgccatatgctatagtgtggatgaagtttgaggacatggtaagtgaagccaaccacaaaaagac

SEQ ID NO: 183737 - DNA, 447 bp, Homo sapiens
tttttaccaggcagacagcatttgagaagatcatgtttatccagtcgaggttgaatttcaaatatatcaattcaggtatatgtttggcttgcccttactccaagggcatagcccttcatctcaagtgcacagtcccttggcatctcaaacagtattgggtatttaccacaattttccaacttggtaggccttgaactccaaactgtctttctgcagcactttgagactgttgaaagctccacttagcattttaacctcataggtaccactttctacttgttttattagcatttcaccatgtatatgagcagcttagaattttgcaagtgaattgaaggaaaattgcacagaattttggtctcacttttctatgatttttaaaattcgcaatggccttgacatccctgaaaaccaatccctattttgcyaagcttagattcaccagat

SEQ ID NO: 183738 - DNA, 441 bp, Homo sapiens
tgttcacgttagttgcagggactattctaatgggattataacaagctaaaaaagcttatgcacagcaatgaaaaccactaacaaaatgaagagacaacctccagaatgggagaaaatatttgtagactatccatcctacaagggattaataaacagaatatataaggaactcaaacaactcaatagcaaacaaaaaaaattaaaaaatgggaaaaagacctgaatagacatttatcaaaaagaagacatataaatggacaataggtatatgaaaacattatcaacatcattaatcatcaaaaaatgcaaatcaaaaccacaatgaggtatcatctcactgcaattagaatggctattatcaaaaagacaaaaaataaaatatgttggtgaggatgtagaaaaaaaggwacactcatatattgttggtgagaatggaaagta

SEQ ID NO: 183739 - DNA, 461 bp, Homo sapiens
ttgtgattcctaccacctagtgactgatattagaacagggtaaagacacarctatggctcacgactccacataaattctgacaggccttgtgttgtgttgggatgctgaataccatttcatggctgagtggcagtagatttcctttctggcaatttgggaactggatatcatgactaagaaggagtatgtccttcttaaagtaatacagagaatattataaaatattcttgaatgcctcagtgaactacttaggaagagaaaaacgtactagatgtgaaagctaaataagagtggtaagctgggaaccaaagaagactttactattcagtgactttgcaattctcaatgtacttcagatttatgtatatggctgctttggaagtgggggaccaaaaccaaagcctagggcccacacagctgggtaatcaaataggagaatccatatgtctaagatcccaaa

SEQ ID NO: 183740 - DNA, 461 bp, Homo sapiens
ttgtgattcctaccacctagtgactgatattagaacagggtaaagacacaactatggctcrcgactccacataaattctgacaggccttgtgttgtgttgggatgctgaataccatttcatggctgagtggcagtagatttcctttctggcaatttgggaactggatatcatgactaagaaggagtatgtccttcttaaagtaatacagagaatattataaaatattcttgaatgcctcagtgaactacttaggaagagaaaaacgtactagatgtgaaagctaaataagagtggtaagctgggaaccaaagaagactttactattcagtgactttgcaattctcaatgtacttcagatttatgtatatggctgctttggaagtgggggaccaaaaccaaagcctagggcccacacagctgggtaatcaaataggagaatccatatgtctaagatcccaaa

SEQ ID NO: 183741 - DNA, 318 bp, Homo sapiens
cagggtaaagacacaactatggctcacgactccacataaattctgacaggycttgtgttgtgttgggatgctgaataccatttcatggctgagtggcagtagatttcctttctggcaatttgggaactggatatcatgactaagaaggagtatgtccttcttaaagtaatacagagaatattataaaatattcttgaatgcctcagtgaactacttaggaagagaaaaacgtactagatgtgaaagctaaataagagtggtaagctgggaaccaaagaagactttactattcagtgactttgcaattctcaatgtact

SEQ ID NO: 183742 - DNA, 570 bp, Homo sapiens
tattgtcttaactttcttctccattaatgatccccaaatataaagttaaaatagactaccaagacttatatttaaaattataaataaaaatgkaagtaacttcatttaggtagaggtactaacaataaattcctttctttgacataactatattacattatgatctagctaggggaaaaaatacgtgtctatatttttcagatgtttcctaaaatatagagataacctagacttctaatttcataaggagggatcagataccaagaaggcaatcattattcaaaaatcattgacatactttacaattatttctcaactgaacggctttgcgccaaggagaacatagctgacacgtgaaaattctggaggtacttgtggattacagaaacttccaatatatatttgtcaagttcttgcagaaagtttagtgtcagaattttctattcttttcatgtttattgtatcattcagggaaaaaaaggaaccaaatatattaatgtgctatactggttattgttataaaaatggcattagacaaaaacattaaatattcatgaaaatcctttttcc

SEQ ID NO: 183743 - DNA, 513 bp, Homo sapiens
acctagattttcttgtattttttcatccagaaatttatagattcaggttttatatatagctatataatatattatgggtgaaattttctatataaaatgaaggatggatcaatgttcatatttctgcatactggtaaccaatttgttccagtaaaatttgttgaaaagattatctttcctctgctcagttgcctttgcacctttctaaaaggtcagctgcccacatgtgtggctcataattttcttgtttcaatcaataacagcaaagttaaataattactagatttggttaagataattttacacgccaacttggctaatccatggtacccacaaatttggtcaaatatgtcattacatttctctgaaggtatcttttagaagagattaacattaggatccatagactttgactgaagcagattattctccataatgattgggtgggtctcctccagtctatgagggcmttaagataaaaaagactgaggtttccagaggaagggagaattc

SEQ ID NO: 183744 - DNA, 324 bp, Homo sapiens
ataatctctctaagcttatatgcattacagtgaaagcatatgtgagagataaaagttccggaaaaaaaactttaaataacrgcattgcaaaagcatttgtgggttaggaaaacataattaaatattctaattaaaaagttatatggttgttttaaaaatgatgtttgtttgctactaacttaaaagagcaaattcaagaactgtatcaaagaactaatatagaaaataaaaggaagcaaaaagaaaccgaaattctctacctaaccacagaaaaaaattcaaaataaaaataaacttattttagacaaaaaaaagaagattcat

SEQ ID NO: 183745 - DNA, 634 bp, Homo sapiens
agcttcttttgagaaatgtctgttcatgttctttgtgactttttaatgtgttatttgatgttttcttctcatttgattagattatcttccttatagagtctggatattagtcctttgtcagatgagtagtttgcaaatattttccaccattctgtaagctgtctgtctactctattgattgtttcttttgctgggcggaatctctttaatttaattaaattccgtttgtcgatttttattttcattgcatttgcttttgaggtctcagtcataaactgtttgcctaggccaatgtccacaagagattttttctagtttttcttttagaatttttacattttcaggtgttacgtttaagtctttaatttatcttgagataattttttacatgttgaaaaatagggttccagtttcatccttctgcatatgactagccaggttttccagcaccwtttgttgaataaggtgttctttctccattgtttatttttgtcaactttgtcaaatatcagttggctgtaactatgtggctctatttctgagttgtctattttgttccattgatctatgtgtctatttgtgcaccagttccatgctgttttggttactatagccttgtagtatagtttgaaat

SEQ ID NO: 183746 - DNA, 593 bp, Homo sapiens
tggaatatccagtattccacaggcattccatataacccccgaggacagctatagtagaacgtgtccatttcactcttcaaaaatatgcacaaaaaacaagggggagtatgagtaaggaccctgcaacactaccagcacaagccttattacccttaattttttaaatttagatgataaatctcaatcagctgtagaaaagcacttgcaggtttgcagttttatggaaagatgtaaacagtaacgcagggtgtggtccaaatgaattgttaacgtrgggaagaggatattcttgtgttcacaccccctcaggtcctctttggattccagcatgatgcatcaaaccatactatggcatggctaggacccaacctggtaccagaaatgaaggaactgccctacaggactcgcagccccggatgatgcagcttcctcgaacgacacgagtcctggacattacctgggggatgctgaagaagacaactcaggaggctgaacgaattctgctccagacacagacaccattcactccggataatgtgttccttgctatgctctctgttgtacattgcaacttgcatagggtattgatcctt

SEQ ID NO: 183747 - DNA, 618 bp, Homo sapiens
cgcctttctttcaccctgtcacctggccagacacccccttccctgccattaataacgtaactgcttggctaggagggatagatttacccccagtggggttcctcattaatggcacacaatggactaaggtgccaggtaacactacatatcactctactatcctctcactgtgtgtaagttataaaagttttagctcttactgtgtacctgcccaaacacaattaaggctacattatggcaaaggaaatgccttaacagtcttagctgcaggtagcctcaaaccgggcaatgcaataaatgccactttcccaaacattccttcctgtgctaaagaacaaagctggggaagtaatggattccactttagctgggaggtctgtcatggggggcaagcctgtagcctccagttaggtaattayaacatcttaggcagccttactgatgtcctcatccatcatggcatcaatcacagtttcgcagccacatctcattcccctatgatttggaccaatgaggggatgagatatcccagactccaaggaaaatccatgccaccccaagacactttatggtgcctgggacatcttagcacctcccttgacacctggcatggggcat

SEQ ID NO: 183748 - DNA, 362 bp, Homo sapiens
catgctcagtattttctattaacaacttacttttaaaactggctatcaagaagtattcattccctactggtagagatattcatatttaggctgggcaatgctcaacctcggtttcaaaaagcaattacctggagaacgtttctagcacagggagaataaggaagagaagtaacatttgacaaggtatgtacatatgtgtgtacaggaggagaataaaccatctccttcaagtgcctttttttaaaacccaagtgctttttaacatcattttcaaactgccagaaatttacttgagacttgaaagcaccagacaggtgtcatgatgctacttttagygatggcaacttggattaaaaagagcc

SEQ ID NO: 183749 - DNA, 401 bp, Homo sapiens
gctactctgtacttcccctaacaaaggtaagcataagccttaacaggaccaagtttatccccaaattaactgcctgtcagaacaaatgtcaacattttttaaggaaagaaaacaaaatcctgaccctcagcaacatatgtacaatgtctataatccaaytcccaagattagtagacatgtgaaaattcaatcacagcacaccacagaaaatcttgcctgagagggtcctgcacaaattattagtctcctctggccacattcagattttccctatgttaaaatcagagaataaagagacaaacaaaagcagctttccacagtaaaagaaataaaagttaaacaaacaaaaagattccactgaaaagtaagaccaaaaaaaaagagagaagtagatcacaaca

SEQ ID NO: 183750 - DNA, 497 bp, Homo sapiens
tgagaaggtgacatttaagcaaagacttaatggaggcaaaaggagtaagctacacakccaactgggggaggagtgttccaggcagaggcagccaccagtgcaaaggccctgaggcctgcaggcccagtgagcctgctgtgtttgaggagcagcaggggtgtcagtgtggctgcagcagagagagcaagagggagagtggctgaagtgggtgttaaatgggtagtggagcagatcatggagtatcttataggccattgtaaggactccgagtgaagtagggatacaaaggggtatcttgtttttgcttttccttccacttgcaggtggtaggggtctttgtcgttccagtgcctggagagagagggacatgttggattcattcaaagaactttttttcccatcaatccatccccaggcccgctccctgactgagagggaggatatgggttagacagagaaagggagtaacctcgggatgggtcgcaggcaaggccctg

SEQ ID NO: 183751 - DNA, 497 bp, Homo sapiens
tgagaaggtgacatttaagcaaagacttaatggaggcaaaaggagtaagctacacagccaactgggggaggagtgttccaggcagaggcagccaccagtgcaaaggccctgaggcctgcaggcccagtgagcctgctgtgtttgaggagcagcaggggtgtcagtgtggctgcagcagagagagcaagagggagagtggctgaagtgggtgttaaatgggtagtggagcagatcatggagtatcttataggccattgtaaggactccgagtgaagtagggatacaaaggggtatcttgtttttgcttttccttccacttgcaggtggtaggggtctttgtcgttccagtgcctggagagagagggacatgttggattcattcaaagaactttttttcccatcaatccatccccaggcccgctccctgactgagarggaggatatgggttagacagagaaagggagtaacctcgggatgggtcgcaggcaaggccctg

SEQ ID NO: 183752 - DNA, 551 bp, Homo sapiens
aagtggggttgttgctctaacaaatacctgaaaatgtggaagcagctttagaactgggtaacaggtataggctggaagagtttggaggagcaggctaaaaaatgcccagactgccataaatggagcattaagggtaattctggtgaaagctcagaagacaagagctgtarggagcaactgaatcttttaagggatgatttgaatggtcgtgatcacaatgctagcagaaaatttggacagtaaagaattttggatgaggtctcagatggaaacaagaaacaagatattgaaaactggagtaaaggtcatccttgttatatagttgtaaagaacttggtggaattgtgtctgtgtcccaggactttgtggaaggcagaactttagagcaactaactgggatatctagcagaagaaatatacaaacaacaaaacattcaaggtgctatatggtttctttttgccatttatagcaaagtgaaggaagacagagatgatttaaagatgaaacttatcatcgaaagggaagcagaatggaaagatttggaaaactc

SEQ ID NO: 183753 - DNA, 551 bp, Homo sapiens
aagtggggttgttgctctaacaaatacctgaaaatgtggaagcagctttagaactgggtaacaggtataggctggaagagtttggaggagcaggctaaaaaatgcccagactgccataaatggagcattaagggtaattctggtgaaagctcagaagacaagagctgtaaggagcaactgaatcttttaagggatgatttgaatggtcgtgatcacaatgctagcagaaaatttggacagtaaagaattttggatgaggtctcagatggaaacaagaaacaagatattgaaaactggagtaaaggtcatccttgttatatagttgtaaagaacttggtggaattgtgtctgtgtcccaggactttgtggaaggcagaactttagagcaactaactgggatatctagcagaagaaatatmcaaacaacaaaacattcaaggtgctatatggtttctttttgccatttatagcaaagtgaaggaagacagagatgatttaaagatgaaacttatcatcgaaagggaagcagaatggaaagatttggaaaactc

SEQ ID NO: 183754 - DNA, 438 bp, Homo sapiens
tggcattttgtcaccacctgctcagggcctctggaaggatctgaggaaatttctgctcagcttcctggcttggcttccttgcctttccctgaccttctcttttgtttgtctattctcaggccttccttaccatcctttccagtgagttggtgtgagacaaggaaccaaatgtttccctggagtcagtgcagttccatctgctgcgttccctgcatagcgggccgtgggaacactgtgttccaccctccagaccctggtgcctggagtgttttccctgagccaccctgcctgtctgcattcccctttctgtgggggcttgggccagcccaagtcaggacccatttgcttttctgtttctgaaagcagatggcttcctagtggtaggggcagggttgggtggamttgcttcccaggcacaaggatttttatcagcaggct

SEQ ID NO: 183755 - DNA, 558 bp, Homo sapiens
ctgcttatcatttcttaggacaggttgagcatctctaatttgaaaattaaaaatccaaaatggtgtagaatccaatactttgagttctgccatgacctcacaagcagaaaatttcacacctgacaccgtcgctttttgatagttcagtgtacacaaactttgttccatatacagttatttcaaatagtgtataacattaccttcagactatttatatacagtgtatatgaaacataaatgaattttgtgttcagacttgggtcctatccctaagatatgtcattatgtatgtgcaagtatttcaaaattctaaaaagtccaaaatctgagacacttctgatgccaaggttttcgcacaggggatacacagcctccaccagttaaatggtttctgcttctgtacttctgtggtattaccttttttttttttttttgagacagagtctcgctctgttgcccaggctggagtgcggtggcgcgatctcggctcactgcmagctccgcctcccgggttcacgccactctcctgcctcagcctcccttactttttatctagta

SEQ ID NO: 183756 - DNA, 558 bp, Homo sapiens
ctgcttatcatttcttaggacaggttgagcatctctaatttgaaaattaaaaatccaaaatggtgtagaatccaatactttgagttctgccatgacctcacaagcagaaaatttcacacctgacaccgtcgctttttgatagttcagtgtacacaaactttgttccatatacagttatttcaaatagtgtataacattaccttcagactatttatatacagtgtatatgaaacataaatgaattttgtgttcagacttgggtcctatccctaagatatgtcattatgtatgtgcaagtatttcaaaattctaaaaagtccaaaatctgagacacttctgatgccaaggttttcgcacaggggatacacagcctccaccagttaaatggtttctgcttctgtacttctgtggtattaccttttttttttttttttgagacagagtctcgctctgttgcccaggctggagtgcggtggcgcgatctcggctcactgcaagctccgcctcccrggttcacgccactctcctgcctcagcctcccttactttttatctagta

SEQ ID NO: 183757 - DNA, 486 bp, Homo sapiens
atttcaatccttttatatttattggttggttttatggattaacatatggtctactgtggagattgttccatgtatgcttgtgaagaatatacattctgccattactgagtggagagttctatatgtttgttagttctagttggtttgtagtgttggttccagccttttcttgttgatcttttgcctagttgctctatccaccaattctttttccactgtacgtctcaycttcaaacaaattatatattttgcttattgcttaggcttatttattgtctggttcccccattataatgtaatcttgatggcagtagggttgttttcattcacagatataatctaaatgcctacaatggtgcttagcacatgacaggttctcaatatttattccatgaacaaataaagctcttaatgcactgcttatcacaaagtaagagctcaagaaattacagctgttgctgttattactgataccataaatctgtg

SEQ ID NO: 183758 - DNA, 618 bp, Homo sapiens
tctcaatatttattccatgaacaaataaagctcttaatgcactgcttatcacaaartaagagctcaagaaattacagctgttgctgttattactgataccataaatctgtgcaagtgttttttgatgactacactaagcaatccttctaaataaccaatagcaaatgcttctaaattgactagcggtggtttgaaatgaaactagaaatgcttccttgtttgcctctttgggaaaaagtgagcaacaagagaaaagaaaataaatttaacaagtacaaagaaaatatatcacatgtacatactacactaatattacaggtatctaaaatctatttgcaatcactgcctcatgtgttttatacaacccaagaaactaggctggtggacctgaatgatacataggcaatcatggaaaaccaacgtaggagaaaggagaaaaattactactcaggattataaagatcctagtgatttacctgtaggaaaataacttaataatagggtattggctcataggaagaatgatataaagaagtagttcacagaagcaaaatgatttgacgtatgcagtgtgttaggaaagaagaaaagaaatacatatttttggacccaatcata

SEQ ID NO: 183759 - DNA, 393 bp, Homo sapiens
tttttctcattgtctataccccactgattgatataagggattgatttattgtgaaggtttattatgaatggtttacagtgaatggtgatttgtttatttatcatggtaatttattgtgaatggtgatttttttcttttttaagtttttctagaaactctacttttattgtcagagaatgcccatggtaaagttgacaatcttaggttactgtagttatatcatgggaaagagccttgatctagttctgctgctaaatagctttgtggccatatccataagtcaacmtctgcatctcagcttctttttttttctttcctaatgttattggaatgagaaagttggacaaagatttgtatcttttctagtgctaacattttttgattttgtaataa

SEQ ID NO: 183760 - DNA, 584 bp, Homo sapiens
gaagtccatgcttagagatttttttgtctgttttagtcactgctatgtcatgtgtgccttgtatataatagacattcagtaaattttgaaaaccatgctacttatttaccctccttgatttgtatggggtgggctccatggaagaatactgttcctttgcatttccatcaagaatcgtggttatatccttaatcattggaaattatgaatgacaaccagcaaaagaagcttgtaagatcacgtgaagcttgatttctcactttatgtaattttattgattgtaagaaaaaagataagtgcactatctgtgactttctaaacatttagttacaaaacatttcaaaagtacagagaagatccaagaccccatatacctaccttcaacatgagttgaactactggtcaatattgactcttttaaaacccattcacatctacctcctcatcactagattatttgaaataaattattcctttcataaatattttagcatgaayttctataattcaagcaattatattgctttgaatataatttcagtacattaccaaccttaaaaataacaattatttttcactatcac

SEQ ID NO: 183761 - DNA, 529 bp, Homo sapiens
tatgaacaaaacacaaactaaaaaaaaaatagctataacacctgatcctagggcagaagctgttgamtttttgccctgatttggtttctctgcaaggtgtggccatgtccaggaagatcctggatctgacaatttcagaggagtataagatatattacagaagaattaaatgtctggttatgtttaaaattcccatatctgacttaatgtacctgtagaacaagctattagagtctggggaatagtctgtcttcccactcttgtctgaggctactgcaaacctctgacattctttctaggttaatttgtttcctggatttgttacttggtctttggttaagaaggtagaagcatttttacactaactcaaacacctatgtaatttactgcatattggtaacttgtatatcttagaagagttattatcttggcccagaaagaccatttttctttcttttttctttagagccaggtttccaaaaaagtttctaatagtacaatgttatttagggaaatctggcatgtttcc

SEQ ID NO: 183762 - DNA, 518 bp, Homo sapiens
catgctcagttcacaataggattcacgctcctatgagaatctaatgctgctgatgaactgacaggtggtggagctcaggcagtaatgcaaacagcagtgagccattgtaaatacagacaaagattcactcacttgcctaccactcatcttctgctgtgaggcctggattctaacaggccatggaccgctactggtccataacctggaagatgggaacccctgggatacagaactcagaaataaagccatacacgtacaattatctaatatttaacaaattttttaagaagcaagcaatgtggaaagggctccctattcaataaatggtgctgggataactggctatccacatccagaataaaaccggacctttacttttcaccatatacaaaaactaactcaagatggattagatctaaatgtagcayctaaaactataaaaatccaggagaaaacctagggaccaccatgctggatatcagccttgtcaaaaaatttatgactaagtccccaaaagc

SEQ ID NO: 183763 - DNA, 606 bp, Homo sapiens
cttggtgttgattttctcctatgcttaagcatcatctgaaagtcaagaaaatgatcgcatctctagtttttgttgtttgttaatttcctcaggaaaaacttgacctccttctttcttattacgttggcatctgtcttaagcctttgccttcaattcttatagcttctttcaaattgtattaaatttgaagactaagaaccttcaaaatgactcacatttgaatcctggacctactcctaagctgacctgttctagtttttaaaaatggatgtgaaattttgcttagaatcctagaagttaaaaatgtgacatcctacagaatgccacttcatacaggcaagtctggtgcccttaaagttagttttaccctgagaggaaaacttagaaatgaatacaagttcaagtttgctcaatttcttgttttgcttaaaatttgcctacataacacataaattcatcaaactcctttcctagtgacaatacttcattagattactttagtgagtattcrggagattttcatcttatgagtcataaaattcttttattccccaaagaatttctggtgtctgattggaatttcacgtctttgtagttttagctgga

SEQ ID NO: 183764 - DNA, 592 bp, Homo sapiens
agaaacatatggagaaatttaggtaagcattgttggtggaaatgcaatgccctatcagcaataatacagatgagggagagtcaatttggtcttaagaagtcctgaggtacttgtctaattcagaggaaaaagagacattgamaaacttcacactgaaaattatgtcataaatgtaacagggtaaaatatgctaattgaaaacaatagtattttctagtctgttaaccaatcatttctgaatcctttgagatatttttaaaaaatatggatttccatccccctagatggttctcattaagtgtattttgagtaagcctctgcttctgttattttttactccacaacccacacccactaattttgctgagcagtcatagttgtgacaaactcggtcagtggggcacacatctgggttcttcctccttgggtctccaagatgcagggacaagctgtaagccagaacactctgtagaaaccagtgcgccataaggagaagctccctgggcaagtgtcctgagttcgtaacagggaaagtctttttattctccctggcacttaatgttttttcaggtgataggtttgaggaggtaat

SEQ ID NO: 183765 - DNA, 600 bp, Homo sapiens
gagtgtcacattgtcatgtaggctggagtgcagtggcatgatctcggctaactgcaagctccgccttccgggttcacgccattctcctgcctcagcctcctgagtagctgggactacaggtgcccaccaccacgcctggctaatttttcgtatttttagtagagacggggtttcaccatgttagccaggatggtctccatctcctgacctcgtgatccaccmgtcttggcctcccaaagtgctgggatcacaggcgtgagccattgcactgggcctccaatgctttcgatggaaaataaaataaaataaaggcctaacagtgtggtaatgtttacttctctgccacaacactcagtatgcccctttggatctggcaacaatttaacataaggaaagactttagaccttcacaccctttcagtgagaaaaaaaaaaatgaccttagctcaaactttccacaaagctgaacagtctcattaaaacatcactccaaccttatcttaggtgggtctgtgcaaaggcctcaaggccatgtgtcttgcaggtctccatgccctgcactgcccagctctggtctctacactgcagaggagatctcta

SEQ ID NO: 183766 - DNA, 600 bp, Homo sapiens
gagtgtcacattgtcatgtaggctggagtgcagtggcatgatctcggctaactgcaagctccgccttccgggttcacgccattctcctgcctcagcctcctgagtagctgggactacaggtgcccaccaccacgcctggctaatttttcgtatttttagtagagacggggtttcaccatgttagccaggatggtctccatctcctgacctcgtgatccaccagycttggcctcccaaagtgctgggatcacaggcgtgagccattgcactgggcctccaatgctttcgatggaaaataaaataaaataaaggcctaacagtgtggtaatgtttacttctctgccacaacactcagtatgcccctttggatctggcaacaatttaacataaggaaagactttagaccttcacaccctttcagtgagaaaaaaaaaaatgaccttagctcaaactttccacaaagctgaacagtctcattaaaacatcactccaaccttatcttaggtgggtctgtgcaaaggcctcaaggccatgtgtcttgcaggtctccatgccctgcactgcccagctctggtctctacactgcagaggagatctcta

SEQ ID NO: 183767 - DNA, 604 bp, Homo sapiens
ggaaagtcatcacaacataaaagacagtaaggtcctggataaggatatgtaggagggatgaatataaacggagaggagaaccaggcaggtatttaaatgttaagcaaaagaataagagtcagtagaggaaaagaaaagagcatttccagaaataggaagaggacaagggaatcaggacagagtctgaaaaaggagaaaattgcttaaggatggaggacagacagcagtcacataatctasagaaaggacaagttaagtaagacctgagagacactgcagatttcaacaatgagtattagattggaaagcatagtgaagaagacagtgaacagagactactcttttacaacctgcagggaaggaaggctacaggaagaacacaatgaggtttattttaagatatttggaatcaaggtccctatcactcatcccatctttctctgttttctgaagtgttcaaatgttacaatattactttcctaatggaatttttgcaataaaattagtgatataaaaatatttagacatgttaaaaaaaacttaagcattactcaaatgctccaaaggatactgaacagaagccatatttgaagaaagactacaa

SEQ ID NO: 183768 - DNA, 581 bp, Homo sapiens
ccttatctaaattttctcctgacatttttctctaactgaaacctctccaacttctgaataggctttagatctttattctattatatatattttaagtgctaaacctgaatttccctgttttcataaatcttctatgatcattcactgatctacaacacctttttatgataygtcaaaacttagtccacctactaaaatttaaattctgaaaaccattcttgaaaatacagttttcaactatctttagaaacagaacagattgctcagaaaagctattaagaacaaatattttaggacaaaataattacttagaattgtttatatgacaaatggtgttttgcctttgtggcaggcagatacatggcaaaattgaagcaatttagcaaatactgtacattccctaatatattaaatttgtttaatagattacatcgaaaaggcatgaaggaaccttcatcgaaccaaagcatactctattaccaccccttctttttaaaatcctttagggaaatctttgccaacccccaatgctctattttgtcacatatgtatcactttctaatatatcataactgtttatt

SEQ ID NO: 183769 - DNA, 448 bp, Homo sapiens
  misc_feature (1)...(448): n = A,T,C or G
caggtgatttctgcatttccaactgaggtacctggctcatctcactgggactggttagacagtgggtgcarcccatggagggggagccgaagcagggtggggtgtcacttgacccaggaagcagaaggggtcagggaactccctcccctagccaagggaagccatgagggactgcgccatgaggaacgctgcactctggcacagatactgcgtgtntttcatggtcttcacaacccacagaccaggagattccctcacgtgcctacaccaccagagccctgagattcaagcacaacactgggtggccatttgttcagacaccaagctgctgcaggagttttttttcataccccagtggcacccagaacaagaatgagacagaactgttctgtcccctggaaagtgggctgaagccaggaagccaagtggtctagctcagtggatctca

SEQ ID NO: 183770 - DNA, 434 bp, Homo sapiens
atccgtattttattttcactaatcacaatttccttgaattatgatatatgttacagataacccacagaagtacctataagtttgtcaccaatagaaaccacaaatgttttcatatcataatacagtcatcacagatatctcaaaataacatttacactaattactacttccaaattatgataattagtagatccaccattaaagcttgttatgtaatgtgttaataaagaagcacatwtttactatataacgcatttgttttttttcagtattttgatagcagtatttaaagatcatttttccattgtaatcccatatatttgttctcatgcatttagaaacattttcctgtaggctttgccagacttccaaagggtctggaacaacaataaaaattcaagaaaccctgatttgggtgttatagcatcatttca

SEQ ID NO: 183771 - DNA, 417 bp, Homo sapiens
  misc_feature (1)...(417): n = A,T,C or G
nnnnnnttttgggacagaggcccgttaaatttatctgttacttttatccccagcactaaaaaaattaaaatgaattaatttttaattgcttacatttgcttacttatatttattgtgaaaactaatatatttggtgttacttctgccatcttgtttcctctttattatgcctccttgtggtctttttctttcctttagttggattaaagttttgcccttttaagaaaacttctagktatatgttaaatatactatttctgtttattctgtctaccatctaattctaacaaacatatttgaccttgtattttttctgtaaatattgggaattaattaatatctataacttccttcatttcagcatgagaactttagtacacttttgtctctgacccctgcatgtttcccattatgcct

SEQ ID NO: 183772 - DNA, 542 bp, Homo sapiens
tattcttctttgttctgggcaatatcctggcatctcaggtatactgatcttaccagttatttattttctgtgtgtatattttttttttgctccactgtattgttgcaaaatcttaaataggatcttrgggactctctggggttattttgtttggagatagctgtctatgtttattttgggggtgctaaagggagaaagctgatatctcctactctgccattgtggttacatccctattattcatttattcttttaaacaccaattcaacacttgctctaatggactgggcattgagtatatatggtacagcatagactcaggcccttccttaattaagtgagtttttaaaataagtttacaaacaggagtacgacattattggcactagcaaatctaatcatgtaacccctctgcccagagtttttccaagggcttctaattgactatgggatgaaatatccctccctttgcatgcaatcaaaggctttcatgacctagacctttctctgtctatgttcaatttctctacttcccaccccca

SEQ ID NO: 183773 - DNA, 654 bp, Homo sapiens
cctatagtactttgacctctttaccatttactttacatgtaaatattctcagctgggaggacctatccctaacattttttcctcaagtgcattactttgcaatgctccctctctatcattctaatataaagtacataatgacacctacataacagttgcactgggtttgtatttgctgaatagcaattgttcacaatactgaatttgaaattttatatttgggtctttacagatgacattcatttgtaagccgcattctacataaatgactgtaaaagaccctatccctatttatctgcttagcttcaatgctcccttcattaatattagctcgagataacctaattttcttgaacttaccccaaacaatttgcagagctttttattttttgcaaatttgcatgattagtargacttgctagacctcaaatggaaatggcaaatgctgtgctccagggaagctgggaaaagccaaatttcaatccctttatcaccaaagaaaatgaaccttattccagggaagggctgagctgatattgtcagtggtgaggtgagagagaaatgaactatggaattagaatttaaaattcacaacatgaatccaaatattagagaataacttatacgtcgacccttctgatgtttaacagagag

SEQ ID NO: 183774 - DNA, 425 bp, Homo sapiens
gatactagtgtttttcttattaaaaaacttatgaaattacctttcaatcatctatttaagaaattccagtacattctccaaatttataaaattatatataatatttcttatttacaagggctataggaattgattataaaggatcagtgaatcttaaaactagtttagtggtaaagttattcagctttcatcaatggtaacagaaatattataccttatctttagctcatgaacatggaagactcatgagacacagttctaatttatatrtacacatttttaaaaagtcatgttgcttatgatgtgcaagtagaatattaactaatataatttatttgtgcttttcttatgtttttttttcttttctgttacccatagctattttttaaaaataaaatatgatttaggggtcacaggagttgttc

SEQ ID NO: 183775 - DNA, 633 bp, Homo sapiens
  misc_feature (1)...(633): n = A,T,C or G
tgcaatctgcttctggtgaagatgctgtgaacattgttcaaatgaccataaaggatttagagtattacataaagttagttgataaagcagtggtttgaaagggttgactctaattctgaaagaagttctactgtgggtaaaatgctatcaaatagcattgaatgctacagagaaaactttcatgacagggagagtcaatccatttggcaaacttcattgtcttgttttaaaaaattgccccagccacctgaaccttcagcaatccccaccctcattggtcagcagccattaacactgaggcaaanctctccntcagcnnaaagattncancgagcgaaaagnctcagatgatcattagcattttttagcaatacagtattttaaaattaaggtgtggacattggtttgtgtagacataatgccattgcacacttaataggctaaagtatagtgtaaatgattttatatgcactaggaaaccaaaaaattcatgtgacttgytttattgccacatttgctttattgcaatgatctgaaatcaaacctgttttgtcttcaaggtatgcctgtagtttagagccctagatttattcattctacataactacaactttgtaatctttcacccacctt

SEQ ID NO: 183776 - DNA, 562 bp, Homo sapiens
gaattgcccagtcttaaacaaacagaatataactattcaagcaactacaacaggtagagagccacctgacttatgttcaagatgtaaaaaaggaaaacattgggctagtcaatgtcgttctaaatttgataaaaatgggcaaccattgtcgggaaacgagcaaaggggccagcctcaggccccacaacaaactggggcattcccaattcagccatttgttcctcagggttttcagggacaacaacccccactgtcccaagtgtttcagggaataagccagttaccacaatacaacaattgtcccccrccacaagcggcagtgcagcagtagatttatgtactatacaagcagtctctctgcttccaggggagcccccacaaaaaatccccacaggggtatatggccccctgcctgaggggactgtaggactaatcttgggaagatcaagtctaaatctaaaaggagttcaaattcatactagtgtggttgattcagactataaaggcgaaattcaattggttattagctcttcaattccttggagtgccagtccaggagaca

SEQ ID NO: 183777 - DNA, 540 bp, Homo sapiens
ggaaaacagaaaaactggtgtgggtaaatcagtggccgctaccaaaacaaaaactggaggctttacatttattagcaaatgaacagttagaaaagggtcatattgagccttcgttctcaccttggaattttcctgtgtttgtaattcagaagaaatcaggcaaatggcgtatgttaactgacttaagggctgtaaacgccrtaattcaacccatggggcctctccaacctgggttgccctctccggccatgatcccaaaagattggcctttaattataattgatctaaaggattgcttttttaccatccctctggcagagcaggattgtgaaaaatttgcctttactataccagccataaataataaagaaccagccaccaggtttcagtggaaagtgttacctcagggaatgcttaatagtccaactatttgtcagacttttgtaggtcgagctcttcaaccagttagagaaaagttttcagactgttatattattcattatattgatgatattttatgtgctgcagaaacgaaagata

SEQ ID NO: 183778 - DNA, 412 bp, Homo sapiens
taaattccagtctaacagttcctttacaaagttgcgtaaagcccccttatatgctagttgtaggaaatatagttattaaaccagactctcaaactataacctgtgaaaattgtagattgcttacttgcattgattcaacttttaattggcaacaccgtattctgctggtgagagcaagagagggcgtgtggatccctgtgtccatggaccgaccgtgggaggcctcgccatccrtccatattttgactgaagtattaaaaggtgttttaaatagatccaaaagattcatttttactttaattgcagtgattatgggattaattgcagtcacagctatggctgctgtagcaggagttgcattgcactcttttgttcagtcagtaaactttgttaatgattggcaaaaaaattc

SEQ ID NO: 183779 - DNA, 412 bp, Homo sapiens
taaattccagtctaacagttcctttacaaagttgcgtaaagcccccttatatgctagttgtaggaaatatagttattaaaccagactctcaaactataacctgtgaaaattgtagattgcttacttgcattgattcaacttttaattggcaacaccgtattctgctggtgagagcaagagagggcgtgtggatccctgtgtccatggaccgaccgtgggaggcctcgccatccatccatattttgactgaagtattaaaaggtgttttaaatagatccaaaagattcatttttactttaattgcagtgattatgggattaattgcagtcacagctayggctgctgtagcaggagttgcattgcactcttttgttcagtcagtaaactttgttaatgattggcaaaaaaattc

SEQ ID NO: 183780 - DNA, 546 bp, Homo sapiens
catgcccaatttggcttttctgtttccaaacaccatactggtttcctaaatgatactcctttggtagggtaccaatataataattgtggacagtccatttagtgacagttgttaaaagaaaaacttcagcctaattaaatttaaaggtgtttaattgagcaatgaacgattcatgaatcaggcagcccccagaatcacagcagattcaaagagactctaggggcacctcacrgtcagaacaaagttatagacagaaaaaagtaaagtgatgtacaggaatcggaagtgaggtacaggaatggctggattggttacaggtcagcatttgccttatttgaacagtttgaacactcagcagtatatatgactggttgaagtatggctgatgtgattggccaagactcaggtattgttacaggcgcaaactcctaagttaggttttcaatcttgtctacctattaagttaggttgcagttcgtcctcaaggcctcaaatatagaagtacagaatccttctcaggctacatttagttctcttttacacagt

SEQ ID NO: 183781 - DNA, 572 bp, Homo sapiens
tcctaattcacaggaacatctataagataatgaaactatcaatgtctgatttctagtattagtggatatatgctgattaagagagatggaaactcatgaatctcaggatacacacgtgtatccattcccttcgcataaaatgcctactttctgggtcatggtatcttcattccagaggcatgtgtctcccattccagctataaaacaagcttctcagggctgtctcatcccaacgataccctcagcagagtccactcaaatcaggggaagtcctaccatgaggcaggggcagaaagaagaaacagttccctgtgggttgttttcctcacttgggtacttggccaacactttccaaacaaagacttgcttttctcagagcaacagggtatgtctcctaaactctttagaaaatgakgacaaggaccttcacaatgtcagaaatggagcacctggaattaaaatgaactctctgaatcagggggctcgggggaagaaggatgacaaagcccaacctcaggaatttccaaccacataaagtaacaataatggtcatttattcatttgttcagcaa

SEQ ID NO: 183782 - DNA, 579 bp, Homo sapiens
gagtgataagctgggacaatttgacatagcatggctgaaaacagaggctagaaaaactgtcatgtttagttatgatcgaggaggttcctagraaacctgactacttatcacttatagtaagttgtgaagatcaaatgagattcataaatggaaaaacagttctggaaaagcatttatgtttctgctgatttatattgcctttcctgtgagcagctgggaccacaggtgcacaccaccatgccctgctaatttaatttttttttttgtagggacagggtctcactatgtttcccaggctagtcttggcctcaagcaatcctcctgccttagccttccaaagttctgggattacaggtctgagccactgcacctggtcccgtatttttgttaccatccttatcctgagaggatcaggatacaccagaactttgcccaaagtatctctgccccggagtgactctaagaaaatatctgttcattctcatcatagtcaatatttgcatctactattatcagggttggggggcacagtgagtgtgcatctgggttagtgtgtgaatagtgcagatttccaatcag

SEQ ID NO: 183783 - DNA, 571 bp, Homo sapiens
ggtaataacttctgcttctggtttttccttggggctaatagaattaakaactgagatatctgaattagagtgctgtgagtagtaacccggttattttccaaagaagctatatgctaattttgtttatctccatgacccaagaggaggtcatgaatgacctcaagcagttacatcatggttttcactttgttaaatagttcaccttttatgagtagattataaaaccacagggcagagctttgacatcttcattcagttttatagctctgtgtagtcagtgcttaataaataataggggcaatactgctaaattgataaaaatagatcttactgcacatagagcatttgggaaccatgaggattaagccacagtttattctgtgtattgtaattcaatcatactttagaaggtttagctgtgggaaattgctagaactacaagatcaagtcaccccttttgcttttaccagttttgaggaatgtataaaataagaataaaaacaagggaaaattaagctcacatgtttgctaaacaaacaaacaaacaagcaaacaaaaaaacccaagggtg

SEQ ID NO: 183784 - DNA, 571 bp, Homo sapiens
ggtaataacttctgcttctggtttttccttggggctaatagaattaataactgagatatctgaattagagtgctgtgartagtaacccggttattttccaaagaagctatatgctaattttgtttatctccatgacccaagaggaggtcatgaatgacctcaagcagttacatcatggttttcactttgttaaatagttcaccttttatgagtagattataaaaccacagggcagagctttgacatcttcattcagttttatagctctgtgtagtcagtgcttaataaataataggggcaatactgctaaattgataaaaatagatcttactgcacatagagcatttgggaaccatgaggattaagccacagtttattctgtgtattgtaattcaatcatactttagaaggtttagctgtgggaaattgctagaactacaagatcaagtcaccccttttgcttttaccagttttgaggaatgtataaaataagaataaaaacaagggaaaattaagctcacatgtttgctaaacaaacaaacaaacaagcaaacaaaaaaacccaagggtg

SEQ ID NO: 183785 - DNA, 571 bp, Homo sapiens
ggtaataacttctgcttctggtttttccttggggctaatagaattaataactgagatatctgaattagagtgctgtgagtagtaacccggttattttccaaagaagctatatgctaattttgtttatctccatgacccaagaggaggtcatgaatgacctcaagcagttacatcatggttttcactttgttaaatagttcaccttttatgagtagattataaaaccacagggcagagctttgacatcttcattcagttttatagctctgtgtagtcagtgcttaataaataataggggcaatactgctaaattgataaaaatagatcttactgcacatagagcatttgggaaccatgaggattaagccacagtytattctgtgtattgtaattcaatcatactttagaaggtttagctgtgggaaattgctagaactacaagatcaagtcaccccttttgcttttaccagttttgaggaatgtataaaataagaataaaaacaagggaaaattaagctcacatgtttgctaaacaaacaaacaaacaagcaaacaaaaaaacccaagggtg

SEQ ID NO: 183786 - DNA, 582 bp, Homo sapiens
gactctgaatttacttaatggattcttaactgcaaaaatgccrttactactacaaacattatttatcttttactatagtaattattatttttcttttaatcttctttctagatgtaatgccaaaattctgactctatgcgggagatcattttgttttcatgagaagaaagcaaaacattttcctcttctttctgtaggagaagccatatttatataagtcatgattttaaaagacttatggtttccaaacccaagcaggcactatctctctattttctacctgaacaatcttctgacatgccaagaaattgactgcactgggctgcagctcttgtcttcaggccagcagaaaaacattaacactttcctgcttgtcatacaaggatcacactaactcatagaactggcttctagtgctgatggcaacttgagccacaacattcaaggagttcaaggaagaatttataggtaagatgaaaagagctgtttcctcttttcaatatgctggccaaagggcaaaggcagtgccctctactcatctcaggctcagttgaacaagtcacaaagaagagtttcagacac

SEQ ID NO: 183787 - DNA, 582 bp, Homo sapiens
gactctgaatttacttaatggattcttaactgcaaaaatgccattactactacaaacattatttatcttttactatagtaattattatttttcttttaatcttctttctagatgtaatgccaaaattctgactctatgcgggagatcattttgttttcatgagaagaaagcaaaacattttcctcttctttctgtaggagaagccatatttatataagtcatgattttaaaagacttatggtttccaaacccaagcaggcactatctctctattttytacctgaacaatcttctgacatgccaagaaattgactgcactgggctgcagctcttgtcttcaggccagcagaaaaacattaacactttcctgcttgtcatacaaggatcacactaactcatagaactggcttctagtgctgatggcaacttgagccacaacattcaaggagttcaaggaagaatttataggtaagatgaaaagagctgtttcctcttttcaatatgctggccaaagggcaaaggcagtgccctctactcatctcaggctcagttgaacaagtcacaaagaagagtttcagacac

SEQ ID NO: 183788 - DNA, 582 bp, Homo sapiens
gactctgaatttacttaatggattcttaactgcaaaaatgccattactactacaaacattatttatcttttactatagtaattattatttttcttttaatcttctttctagatgtaatgccaaaattctgactctatgcgggagatcattttgttttcatgagaagaaagcaaaacattttcctcttctttctgtaggagaagccatatttatataagtcatgattttaaaagacttatggtttccaaacccaagcaggcactatctctctattttctacctgaacaatcttctgacatgccaagaaattgactgcactgggctgcagctcttgtcttcaggccagcagaaaaacattaacactttcctgcttgtcatacaaggatcacactaactcatagaactgrcttctagtgctgatggcaacttgagccacaacattcaaggagttcaaggaagaatttataggtaagatgaaaagagctgtttcctcttttcaatatgctggccaaagggcaaaggcagtgccctctactcatctcaggctcagttgaacaagtcacaaagaagagtttcagacac

SEQ ID NO: 183789 - DNA, 406 bp, Homo sapiens
actaacaaattagctacaagattggaaactacggtttaggggccaggcagcaagggtctgaacctccccagattgctcctggggataacatcactattgtaaaacctaagatcagtgcttgwgatattttgcagaccctgtgctcagtggatcagctgacaccacccaaactgataatctggctcaaccaattctgtgatcccacccaggaacagaagacagcaagaaaaactcacttcaaccccactataattccatttgccacctaaccaatcagcactccccacttccggagcccctacctgccaaattatccttaaaaactctgatcctcaatgcttggggagactgactgcagtaatgataaaactctgatctcccatacacagctggctttgcatgaatt

SEQ ID NO: 183790 - DNA, 473 bp, Homo sapiens
atgtctttaagttctccaatttaaagaaattggaactggaaattgcaggacatatattttgggtatggctatttcaaaaaaataaaactatrctaaatagccttaaccctgcatcaaaagatggcaggtgaatattcatgtgtatggtgatcaaataaaattaagatacatgcatgtcattttctggtatcctccacattgacaggctttttgatcatcttcctagctagcagtactaatcacagtttacagtaatattttttggttatatgcaacagggatcaactctgtccacttaagtccaaaaaatgaattgattagaagaaaatggattactcatcaaatcaaaagaaaacctgacaaccaggctttagaaatgacagaaaccaggaaattttcagtgatctggagagaaacacctacagaatggtatagtcagggagacactgagatgattattcagtcctaaccat

SEQ ID NO: 183791 - DNA, 473 bp, Homo sapiens
atgtctttaagttctccaatttaaagaaattggaactggaaattgcaggacatatattttgggtatggctatttcaaaaaaataaaactatgctaaatagccttaaccctgcatcaaaagatggcaggtgaatattcatgtgtatggtgatcaaataaaattaagatacatgcatgtcattttctggtatcctccacattgacaggctttttgatcatcttcctagctagcagtactaatcacagtttacaktaatattttttggttatatgcaacagggatcaactctgtccacttaagtccaaaaaatgaattgattagaagaaaatggattactcatcaaatcaaaagaaaacctgacaaccaggctttagaaatgacagaaaccaggaaattttcagtgatctggagagaaacacctacagaatggtatagtcagggagacactgagatgattattcagtcctaaccat

SEQ ID NO: 183792 - DNA, 416 bp, Homo sapiens
gagaatggaaccaacttggaaaacatacttgaggatatcatccagaacttcccaaacctagcaagacaggcaaacattcaaattcaggaactgcagagaaccccagggtgatactccatgagatcaacccaagactcttgatatggtttggctgtgtccccacccaaaatctcatcgtgaattataatcccgataatccccacatgtcaagggtgggaccaggtggaggtaaytggatcagggggctgtttcccccatgctattcttgtgatagtgagtgagtctcatgagatctgatagttttagaggcatccagccttttccctgcctgcactgactctgccctgtgaagaaggtgcctatttctcctttgcctttcaccatgattataagtttcctgggggcttcccagcaat

SEQ ID NO: 183793 - DNA, 410 bp, Homo sapiens
cagctttttctgtcctccacttactgctttttgccacagtttttgaagtttcctcccatgcatgtgtatttcattgatcacctgaggatttgggttggctttacatgcagattgtgyggctttacctttatagcttccttacctttcagccaccctggaaactctgaactccagcctctcagttctcaggctgcaggactgtgaatatttgcttaacttacacccccatggtatggatgtgggaatgcctgcaggaggaaatctgcacaaaccaatatccagtgatgtcccctttatcatgctcctccgatttctgcctgcttttcgctgctctttaatgttttctactagattacttctttcccaattttgtccagagtttataattgttatctatgggagagtttgtg

SEQ ID NO: 183794 - DNA, 410 bp, Homo sapiens
cagctttttctgtcctccacttactgctttttgccacagtttttgaagtttcctcccatgcatgtgtatttcattgatcacctgaggatttgggttggctttacatgcagattgtgcggctttacctttatagcttccttacctttcagccaccctggaaactctgaactccagcctctcagttctcaggctgcaggactgtgaatatttgcttaacttacacccccatggtatggatgtgggaatgcctgcaggaggaaatctgcacaaaccaatatccagtgatgtcccctttatcatgctcctccgatttctgcctgcttttcrctgctctttaatgttttctactagattacttctttcccaattttgtccagagtttataattgttatctatgggagagtttgtg

SEQ ID NO: 183795 - DNA, 468 bp, Homo sapiens
ttttctctttggctttcttatgcattcattattaatttgtcatcrgtttaaaatttgggattggaggtcaagatgatcaattagaagcagctgcagtctgtggcactcacagagaggaatgaaaaaacaagtgaatccaggatcttcaactgaaatatccaggttctcacattagaactgactaggcaaacaactcaaagaaaagcaggatggggtgatggcccacccaggtgtggcacacagccaaagaaacccccacccccagccaagggaagcagtgagtaattgtgcagcctggcccaggaaaccacacttctccacagagctttgcaacccactgatcaggggatcccctcatgagcccacaccactagggccttgggtctgctacacagggctctgtgaagtcttggcagagcaaccactcaggcacacacagagacccaggagttttatattctccatccc

SEQ ID NO: 183796 - DNA, 606 bp, Homo sapiens
aacaacagtggaatgaatttaaagagttgtatcagttttctctttggctttcttatgcattcattattaatttgtcatcggtttaaaatttgggattggaggtcaagatgatcaattagaagcagctgcagtctgtggcactcacagagaggaatgaaaaaacaagtgaatccaggatcttcaactgaaatatccaggttctcacattagaactgactaggcaaacaactcaaagaaaagcaggrtggggtgatggcccacccaggtgtggcacacagccaaagaaacccccacccccagccaagggaagcagtgagtaattgtgcagcctggcccaggaaaccacacttctccacagagctttgcaacccactgatcaggggatcccctcatgagcccacaccactagggccttgggtctgctacacagggctctgtgaagtcttggcagagcaaccactcaggcacacacagagacccaggagttttatattctccatccccaggatctccagcaaggtggaatatctgtctatacgtatcactaggaaggggactgaatccagggagccaagcagcactcttctgtgggccccacttccacat

SEQ ID NO: 183797 - DNA, 476 bp, Homo sapiens
gataataatagtatctatgcataggtttgttgtgtgaattgagctaagtaaggcatatacaatgtttagcacatattttcagcctgactggataggggactgctttccttttccaaataaattgagatgctggatataatataacattaacaacagaagaaaacaaaaataaaaaagctggaaagagaactcttcaggaatcaaaaacaaggaaagcatagctgcactggggggctgaaactgagtggctgctgaggagctgtggcctactgcctcagctggagttttaaagtccaygagtagcaagaatggaaacctaagttctctacacaaagaaaacttgagatgggatgtctgcataaagcctgaagcttcaaaggactgtctgaattcgggtcccagaataaacactgccactgcccgagggatgcagggagtaagccagacaaccactttggaataagtcacctccgaga

SEQ ID NO: 183798 - DNA, 494 bp, Homo sapiens
tggaataagtcacctccgagaagttagacgcccaggcctgctctgtgcatgggcatcaagtccaaatgcacacagttcacatgccgtagaaatcctgaactgagaaacaaacctaaaaatgcatccttgaagtctttagggcactgagcaaagacaaactcaaaacctctcaatacagatgtatttacagcttagggcatgtgttagacaattactactagagataagctcagagtaaaagaaagattacaaaacaaagaagaaacaaccctttgcctgtctgagaaataatagcaaacacarcaaatgattaaactcacataacaggaaccacaggagcagtttgaaagggaacagggaaagcaggtttgaaaaagagctgaataaaaatttcagaaaggaaataaaaataaatcaataagttaaatataaatgagaaagctgagaacaaaattagtgaatctgaagatagatgagattgtatgacaaaatga

SEQ ID NO: 183799 - DNA, 427 bp, Homo sapiens
gaattcagcaccttcaactgaaatatccagactctcacattgggactgactaggcaaacaacccgacctgtggggaatgaagaaaagcaggctggggcgacagccacctgggaacagcatgaagccaaaggaagcagtgagtgatcccacccaggaaaccatgcttctcccacagatttttgcaacctgcagatcaggacatcccttcattagcccaagccaccagggtctcgggtctgactcacagargtgtgtggagtccctgcagagcagccactcaggcaaacacagagacccagttttgctggccctgggattcccagcgaggtggaatgtcaatccctacatacccctaggaggcgggctctatccagggagccaagcagtgtcattctgcgggccccacttcaacggcaccttacaagtt

SEQ ID NO: 183800 - DNA, 399 bp, Homo sapiens
aggtggtttggatttcagaaagagccctgagccaaatagtagaaaagcttgtgttytttgattcaacccattttcttttttttttttaatcatcctcaaaagttttttacttttttttctttccaacttttatttttaggttcatggggtacatatacgagtttgttacatgggtaaattgcatgttgtgggggtttagtgtacagataattttgtcacctaggtaatcagcataatacctgataggcagtttttcaatcctcaccctcccccaactctcaaatagacccggtgtcttgtttccctctttgtgttcatgtgtactcaatgtttatgtcccaaataaatatatggaaacatggtatttgattttctgctcctgcatgaattcacttagga

SEQ ID NO: 183801 - DNA, 583 bp, Homo sapiens
tattctgttaaactggccaattgcttcatggcagccattttgaaaaatgacaactgcagagaaagtcctagaatgagttttacatagttttgaagcacaagcaagcttcacgattctccaaatagcttttgacacagaggatagtagttgagggaagagagtgtgcaaaacgggttaaggcaggggtcctcagtgcaggggcccccacctttgggctgtgggctggtaccagtccatggcctgttaggaactgggctgcacaggaggtggtgagcagtgccagtaagaattaccgcctgagctctgcctcctgtcagatcagcagatcacaggagtgtgaactctactgtaaaatgcatatgtgagggatctaggctgtgcactccttaagagamtctaactcatgcctgatgatcttcggtggaacagtttcatcccaaaaccatccctgcctgccacccctgtggaaaaattgtcttccatcaaaccaatccctggtgccaaaaaggttgggaccactaggttaggtgactgagtggctagttaagtacattttctcatttttcctctgtggatttaaaaa

SEQ ID NO: 183802 - DNA, 632 bp, Homo sapiens
tacacagaaaaaattaatatttttgttgttgttctagattctattattcaggcaggctttctatattttccccttaggtatctatactttagtatagatgctgtcactgtgagagactacagaaagcagggaaaatagaagttctatagcttcatctaccaaggaagatctagtttaaaacctagtaggggacatgtcccaacaacttgaaaattagtttgacatgtggtgactttatagcatagtggtcaggagttaaacctacattccagctctgccattttctaggtrgtggctttgggcaagtttcttagccactataagcctcagttttcacatccgaatattggaactatattaaaacccaactcaaaggattgttttgaggatgaaataggagaatgtatgtaaaatgtttagcacagtggctagcaatagctcagtgaatattaataaatattcttaaaattgaataatagaatacaactcttcccatgtcttcgggtagcttcagatccaggaaaatctcttacgttttgcaagattttgtggggtggttctttttggggagaagtttcatagattggctcagattgtcaaaagaatctatggccccccaaaatgttagaacc

SEQ ID NO: 183803 - DNA, 617 bp, Homo sapiens
tccagcgtaatctgatgtcttttatggttttcctttttagaccttagtgctacaaaccaaccaatcacggggtctcacccctaagagtgaccagcccaactcttctgcatgagatattgaacaagagtgcttggagtgagtctggggtctggacgccagcagcatcactggccaggctaggacccacgccgctgtcccccaccatctacttctaagtaagtgactaagcaacacacagcttgcttttacatcccatgtgtgcaaatctcagcctgatgcttgagtgtcatctcaaaaaatatcaaatcttttatttctctcctatcacaaaacttcccttgcttgtaaagtaagaaaaagtaaaaccttgttgagggaaaagaaaaatccaaatgccacccaggcctacaaatactacttcatttaggcttgcagggccactrctttccaaatggcatccaggactgtctaagccagtgatgagttcattctgggctctttgaaatccacatcatctgccagccatttggcttgtctatcagcttttaagatgtccagtcataactaagtcattcccctccaatcacccaaagtaaactataggtaacaagataaat

SEQ ID NO: 183804 - DNA, 589 bp, Homo sapiens
ttatgctactcttaattagacttccaggcttcttttggggtaggagttctgctcttagggattttgattgacctgatcattgtgggttgaaatcttttggttaaagtcagaagtgagaacagaacagcttttaagccatttttcccttaaacagagacatatcacccgtttgttcattgcccatcaggccattaagtagcttccagctsactgaggaacagctgttatcttattttgtgctgatttacagctcctaatttgactgtaggagaatctgtgagtttggagggagcaagatagcagaagttgggtgagcagttcaaaatttgctgaaattcatcctcctcattcattcaactacaaaaaccccaatatgtctggtagccaaggtaggccagccattttgaattcctacggctgacttctacagcattgccagttcctagcttgaagagggggaagttagccagccttactaaagctaaaacaggaaatcaaatgcctatttttgatacaaaggtctcagagcttgagtgcgactgagattcccgccatcactccctcgtaatgacactaaaagagaagatat

SEQ ID NO: 183805 - DNA, 425 bp, Homo sapiens
aaaaatgtaatgtatgtcagtttttaaacaactgattacatattgaaagattctattagttacattaggtaaaatattactgaaagccagtttcacctgttcctttgggtatgggttcattaggtaaatattcctgtagtacctctccccccagcatctgcatcaatcaataactaaaagggtaatattacattcaccatgattcagcccaacattcagtagtagcattatcctgctttttttcytattatgtatacagttacatgtaacagtcactttgtatgacttatgtttttggatccccaagtaacttcgagttatttttgcttgtacatatgtccactatgctttgtaaaggaatatatatatatatatatatagagagagagagagagagagagagagagagagagagagagagggat

SEQ ID NO: 183806 - DNA, 405 bp, Homo sapiens
aaaaatgtaatgtatgtcagtttttaaacaactgattacatattgaaagattctattagttacattaggtaaaatattactgaaagccagtttcacctgttcctttgggtatgggttcattaggtaaatattcctgtagtacctctccccccagcatctgcatcaatcaataactaaaagggtaatattacattcaccatgattcagcccaacattcagtagtagcattatcctgctttttttcctattatgtatacagttacatgtaacagtcactttgtatgacttatgtttttggatcccmaagtaacttcgagttatttttgcttgtacatatgtccactatgctttgtaaaggaatatatatatatatatatatagagagagagagagagagagagagag

SEQ ID NO: 183807 - DNA, 402 bp, Homo sapiens
gagcccaggagttcaataccagcctgggaaacatagcaaggcctcatctctacaaacaaaaaaattaaccgagcatagtggtttacgcctgtggtaccagctacttgagaggttgaggtggatgatccttgagcccaggaggtcgatgccatggtgarccatgaccgtgatcacaccactgtactccagtctgggtgacagaacaggatctcgtctcaaacaaaacaaaacagaataaaacaaacaaacaaacaaaaaaactaaaaaaaaagtacaggagggcccccttggtcagtgaccacaactgagaaagaaatatcctttcccagccacagcccagaacagttctgcaagtgaagttcatgatccagggcagtccagagcagctggcccaaggcaaac

SEQ ID NO: 183808 - DNA, 402 bp, Homo sapiens
gagcccaggagttcaataccagcctgggaaacatagcaaggcctcatctctacaaacaaaaaaattaaccgagcatagtggtttacgcctgtggtaccagctacttgagaggttgaggtggatgatccttgagcccaggaggtcgatgccatggtgaaccatgaccgtgatcacaccactgtactycagtctgggtgacagaacaggatctcgtctcaaacaaaacaaaacagaataaaacaaacaaacaaacaaaaaaactaaaaaaaaagtacaggagggcccccttggtcagtgaccacaactgagaaagaaatatcctttcccagccacagcccagaacagttctgcaagtgaagttcatgatccagggcagtccagagcagctggcccaaggcaaac

SEQ ID NO: 183809 - DNA, 581 bp, Homo sapiens
gaatacagatcatatccccaaccagaggctgtcgaacttactttggccttgactctgacccacagttagaaatacattttacaacatgtctcccacactctcataactgaaacaaaaaatgtcactcaagtaatacttgcttttaccacgagacaccctttgacactttctgcaatcttttgtagttgacttaaatcttagtggaggcccataaaattaatctcattaccagccttaggccttggaatcagaatcccctgggaataaagtcaggagaccgacatttttaacaaggacccagatgattctcctgcaactaaactatgccttgggccctcggctacctcagcctgccttctgaggaaattcttgaaatmatccaggaattttcaatgtctggaggcagccaggtctgtaatggctggtctaggcctgtggtggttcatcttacgtgttggcttggccatgatgcccagctgtttggtcaaacgctaatctaggtgttgctgttgaaggcattttgtagatgtgatttgcatttatgattagttgagttgaagtaaagtagattattctccatg

SEQ ID NO: 183810 - DNA, 476 bp, Homo sapiens
tttctaaaacagtaaaggtttaaaaaataaaatgaaatgccttgctttcataatcccatccactatagataaatcactgataaattgggacatgttcttatccttttctatgtatagtcacatgtctgtacatgtatgtgtgtatttatccatatctacacacacatatatatgggacttatgaccaaaaaatcattttataaaattatacataattttttacactttgctttgatccctatatgaatatttttgcttctsaatatatagagagttacttcttcctttttaacattacatagtatattgactttgataatgtattatgaatacatcatttatatcataatctctccaaggaatgaatatttaggtcattctagttttcaccatcacaaaaaattctatattggataatccttttatataaaaatatagatcttttcacacttctctgaatatatctgtagaataaa

SEQ ID NO: 183811 - DNA, 582 bp, Homo sapiens
gtggttgagaatttggaatgaaaccccaagtaaggaaagcttgtttcagtccccaaagtgggagttctctaatgagtgaaattcattatcttaaactttgggctatgatgtgtaattgctaacctctgctgctttsgttcaaggttcctttcagtgaaatatattgtttgccatcaaagctgatgtggattaggagctgagcatgtgccctccctcttaggttatattaatatgccaaaatcaataatatgccatagctttcaaaagtagtaataaaacaccctaaaatattcccagaatatgtctataaattatttgttcaatgtacttatgttaaaaaggttgtcagttacaatgctctggaagactctaaaattacaagccatcgtatttgtatttgataaagctcttgctgttttgggtcagaggaggttatgctgtgggaaaaaaatcattattttccctaataaataaattacttggctatatttcatgtatcactcaggccagccagtattgaaggtttaaataataaataacaaatagctccattcatttattaatcataatgcatcacttgta

SEQ ID NO: 183812 - DNA, 536 bp, Homo sapiens
aaaaaactacaaagctgagacgtaatcaagtttgtcccaagaatcccccaaatagaaattcttctagtaattatacaggtgattttgcttgatcaacaatttaatcttgcttgtcaattgctgctttaagagcctccaagctccttaatacagctcakaagaaagacccacaagtcccaattagcaccaccatacttaatcctctaccagactgattattttagttcttcaagcacagaccttggcccacacagttccttctgcatgggccactctttctccctccccacagctcattcgccccttgctgtggctgatgtgttctctaccttcaggccttggttcacactgggggatcaaggaaaccttctccctctccctctaccgtccatgaattagatggccccttttaggtgatagcacccttttcttactgcttatagtgaaagtacttttccgtgtaagcattattcccttcagcgttgaggacagaaactgggtcttcattattacagcaaaaagcagaggaggccaag

SEQ ID NO: 183813 - DNA, 536 bp, Homo sapiens
aaaaaactacaaagctgagacgtaatcaagtttgtcccaagaatcccccaaatagaaattcttctagtaattatacaggtgattttgcttgatcaacaatttaatcttgcttgtcaattgctgctttaagagcctccaagctccttaatacagctcagaagaaagacccacaagtcccaattagcaccaccatacttaatcctctaccagactgattattttagttcttcaagcacagaccttggcccacacagttccttctgcatgggccactctttctccctccccacagctcattcgccccttgctgtggctgatgtgttctctaccttcaggccttggttcacactgggggatcaaggaaaccttctccctctccctctaccgtccatgaattagatggccccttttaggtgatagcamccttttcttactgcttatagtgaaagtacttttccgtgtaagcattattcccttcagcgttgaggacagaaactgggtcttcattattacagcaaaaagcagaggaggccaag

SEQ ID NO: 183814 - DNA, 536 bp, Homo sapiens
cctaaaacctgttctggattagagatgaacaaaggttctttctcctgattcttctggcaaagtttgtccaagacacaatttgggggatctttatcctgagtctggtttctaaagtcaagtcttggggaaatggccaatttcacaacctccccacctcatacctcaatctaggtggtgagaagaagagcaaagccctagggaagcttggagccaaagagatctgctattttcttgccatcttccgggtctctgctacaatttcttgtcccatggagcacagacaaggcactgatgtaccactaagaaacaaaacaaaacaaaacaaaacaaaaatttgaccacatcattcccygcttaaaacctctcaatgttccccatagttttcaggaaacagtcatattccttaacatccaagacatcaatacaatatctcttgcctgagttaatgccactgcctcctaattcatctccaagcctttattcttgcctgtgccatccactctgtggctagagtgaaatctctgaactgtaaatca

SEQ ID NO: 183815 - DNA, 475 bp, Homo sapiens
aattcgccaacaaccatggtgaatgcagtgtactgagttcttgtaaccacccggtgggatcttcttgcctgctccccagatagagccgatttctcargaggggaattataatagggaaagagctttacacacaaagactcaaatcagcctccatgaatatttggaggctagaatttttccaagatagtttggcagggagaggaggtggctagggaatgggtgctgctgattggttggagatgcagtcataggggtgtggaaaatggtccttatgctctgtatccacttctgggtggggtcgcaggactggcttatgggttcatgtcggggctgtccagtagtcagaaagggaaaagactgaaagacatctcaaaaggccaatctgcagttctacaacagtgatgttatctgtgggagtaattgggaaagttgcaagtcttgtgacttctggaataatggctagtaatcctttatg

SEQ ID NO: 183816 - DNA, 470 bp, Homo sapiens
tgcagatctgactttaggcctggataaatgcagaggctcaagtgacgttatgagggcacattttatcaccctccctctaggctctgctttctctatattagattgcttcttttcatctggtgacccctggagtttctagacttccataataccacctgaacaaccccaatgtaaaatgcacttatccctttcctgattatgccagccaaagtgccagcactaatacttaacagctttgattggcccagattggatcacatgcccattcctgaatcaatcactgtgaccagcaggatggaatatttccattggctgggacaggcccacttgaccactgctggagccatgttacatggaagccatgttacacccatgttacatggaagaattgaargagggtggttcttctaagaaatattagaatgctgtcatcacaaaacactagaatagacagaaccacagatgcccac

SEQ ID NO: 183817 - DNA, 542 bp, Homo sapiens
gaatcaatgtattgttcatttgtatgtcctatgcaagactgtcataattaaggtgaaagcaaatgaggtttattcaaagtgaaagastgtgttgaaataaattaaagtgtcagaataggatgaataaaacaggccaaagggaaaatgtgacttcaagagattttacacattgtctctgttgatcattttggaagtcttccaaacattacatcaaataaagtcaaactcaagagagatatgtaacttacatacttaatactttggcataaagcagtggtgttaaatatctctggttgtgctatttggaaaggagagacgaggaagaaaaggagatcaaggtcatgcttatttgctgcttccctcttatctcccactggaaagcatcaaactctattttcagtctattaacacagtatccctttcatctctcatctggattacaacagcctcctaactggtcctctaaagttctactcttggccacttttaatcaatctaccttagagtagaaaaagtgatcttctcacgatgtaaatcaaata

SEQ ID NO: 183818 - DNA, 519 bp, Homo sapiens
ttcctcatctcttacattaacaattttattttgaatgcaccatactagagaatcatctgtttcagtttttatccatcttaaatttggggtcattttttcaccaaatttcaaaattatctccataaatctttgatattttccattaagttctgtaaatactgtgctggtatgtatgccatgaaatacatcattaarcttggctgaatattgaatatataatattctttttttacctcctatgatcttgtctgaaaatattattctttaaagaatattattccatacaaattttgtcaattataccgaaataaacctgaaaaaaattattcccatgtactagtttgatatttacttttatttcttgaatactatcaattgtttgctatttatttcaccctttttcagttctagtaattatatctgtaattttttgtgtttaaagggaatttcataaaattctaattgacaatttaagtgttttctgtcacaaaacattcaatggctaataggagtttgtaa

SEQ ID NO: 183819 - DNA, 475 bp, Homo sapiens
tttgataatgagggaagaactttccataacctattactccagtcttcacataacttttctgtggtggcagtcagagtatatacattttaataaattatcttttccatttaacttatgtttatcataagcattttttaatgttgccttcctaccttcctagttatcacttttacaatgtatacaatagacaaagtactgtactgggttcctttaattaactattcttgtattattgcctatttacattgctatcagttctttgcttttatatatagtatcaccacaaacaccaaaaaactttctaagactcagtaacactaagaatcctayttttatctgatgacaatgaattaaaaaatcaatattctaatgcgtgccctcttttatatttagcagaatttaaaacaaactagacaatatagacttttaaaaactgtttagaattaaatatctaaattatattttactgttacag

SEQ ID NO: 183820 - DNA, 609 bp, Homo sapiens
gggcttttataccttggagctgtaaagcctgctctagctgatttgatgagctgacacatcaaagcgcaaggttcacccaggcacacacacatacaccamtttcacctattgggcttggcaaggaagctttcggacttagagtaatgctctttttactaatgatatatgatgtgaatttctggaaatactggacttttttaaaaagtaacattgtattaatactaaagtcagttgactatgctacagggaaaagtaataatttcccaataagtagtatatgttgaaaagtaaaagaaatctgcttatgagaggcaacttagttcagtgagaaggggcaagaactttggatctgcagagttctgaatgatatatgaccataggcaaaaaatctgctaaactcctctgtgagtcagtatctagacctttaaagtggagatgataatcctatgtgatctgtctgaattacttgtgctatcaatcgacagaactcattgaagaatatctggaagtaggaaaaggctgaataaaaaaagcctgtgcagatgctgtaggtccatgctgataaaatgtgaaagagataaaattgttgtgtgcagaaaacatttacac

SEQ ID NO: 183821 - DNA, 604 bp, Homo sapiens
tattaataagaactatcagaaactggcaaaaaccaaagggtaatagaattgagaattatgattgctcctggggtatgaagattgactggaaaggaacatgaagcatccttctaggggaaaaataagttctatatctttaccattggaatggctacaggtcatagacatttctccaaattcacttaatttttgtgcattttaccacacrtaaattttacccctaaaatgcattgtaatcaaacaagaaagcaaagaaaaataagtaaataatgtaaaaattaaagaagtaacaaaggtatatattctcattgtaaaggtagaataaaagtaatatcatagggttattttcctttcccaaccctaaatttaattttcctcttctgtgataaacacagttaccaatttgtttttcctatgtgctgtttaagctcagccaaatagctctaaagaggtataactgggtcaaattggaagtgaagatctgggcagaagaaaagttcctctgggtaagtttgcgtatatgaaagaattctttccattaaccgatgtaattttgtttaaatcctaaggagtgtgttctaggaaggccttttactacctacaa

SEQ ID NO: 183822 - DNA, 604 bp, Homo sapiens
tattaataagaactatcagaaactggcaaaaaccaaagggtaatagaattgagaattatgattgctcctggggtatgaagattgactggaaaggaacatgaagcatccttctaggggaaaaataagttctatatctttaccattggaatggctacaggtcatagacatttctccaaattcacttaatttttgtgcattttaccacacataaattttacccctaaaatgcattgtaatcaaacaagaaagcaaagaaaaataagtaaataatgtaaaaattaaagaagtaacaaaggtatatattctcattgtaaaggtagaataaaagtaatatcatagggttattttcctttcccaaccctaaatttaattttcctcttctgtgataaacacagttaccaatttgtttttcctatgtgctstttaagctcagccaaatagctctaaagaggtataactgggtcaaattggaagtgaagatctgggcagaagaaaagttcctctgggtaagtttgcgtatatgaaagaattctttccattaaccgatgtaattttgtttaaatcctaaggagtgtgttctaggaaggccttttactacctacaa

SEQ ID NO: 183823 - DNA, 597 bp, Homo sapiens
ctgtggtcctctgtcaggtaggcaacttctctaagacatgtgttctaatatgtaaactcgtgctatgagcaatcactgaatggatatttacaaagaggtagcttagaacacagtaaggatttaatagggattagctatgagtataatattttctgagaaataagtaatgaaaaggtaaaataagaattctaattctgaaaatatacatgaaacatttgagcttctctttaaaaagtttatgtcaattgacggtgttataattacyatggttttgaaattacatagagcttttgaataatgagttaatctattattctttaaatgctcaataattaatattattcatatttaaataggtatctagacatatttatccataaaaatttaaattgtgtggaatatgtatcataggcaagccagtgtatctagaagtcttcttcctactgaatggagttagttgattaatagtgtaaatgatttggatttttaaaaagtatccctttcttctcttgatcatccttgtgatgatcagaaaattgacaactttcaacaagcagcaactgaatgtgaattcctataccccaaactgggaagtat

SEQ ID NO: 183824 - DNA, 521 bp, Homo sapiens
tggatttttaaaaagtatccctttcttctcttgatcatccttgtgatgatcagaaaattgacaactttcaacaagcagcaactgaatgtgaattcctataccccaaactgggaagtattttgacgtaatcatgtgaatagggtaattatacatcttctaaaaaatctgaaacttaaaaagttggagtgaaaacccagctttcaactagcattcttatatattttaaaaatagtatgatcaccagggtgaacwagtgagtatagatgacatgaaagagagtaagatttatgtttcctgcctcccatcagtctttgtggaaatccaaggcaaagtttagcatagaataataatcatcccccataaagtgagtcatatactgtaaaaaatgtcaaactctctgacaattcccttaatgagaaaattctagggatttccatccttcgtaattacatgactcaaaatgcataagctgagtcattaggctgatgtgtttgatattgtctatagccaaatagttttta

SEQ ID NO: 183825 - DNA, 472 bp, Homo sapiens
taggaagggggaggggaaagggaaagaggaggaagaagagaggaggaagaggccaagaagggggaggagtcaagagaacagaagctattatcttcctttctttccaagttcccctcaccacaagsttatgatagggtgtgtgtggctttagttagaatataagactgcatcttaaaactagatgaattaagctttggtcacttaaaggaatctacttcagaaagggattttcagtggagcatctttggagataagtaattaaagaaatgccagaattattttatatttatatcctactgaattaagattccttcctaaaacctgatacacacatgcacagaaaatatatatttcacatcacattcctgattaaaatcctgccaagcccctctattttctgcaaaatagatgacaacttcttaggctggcatgccaaatgcttaatcattggcccccaccaattctgccaagc

SEQ ID NO: 183826 - DNA, 472 bp, Homo sapiens
taggaagggggaggggaaagggaaagaggaggaagaagagaggaggaagaggccaagaagggggaggagtcaagagaacagaagctattatcttcctttctttccaagttcccctcaccacaagcttatgatagggtgtgtgtggctttagttagaatataagactgcatcttaaaactagatgaattaagctttggtcacttaaaggaatctacttcagaaagggattttcagtggagcatctttggagataagtaattaaagaaatgycagaattattttatatttatatcctactgaattaagattccttcctaaaacctgatacacacatgcacagaaaatatatatttcacatcacattcctgattaaaatcctgccaagcccctctattttctgcaaaatagatgacaacttcttaggctggcatgccaaatgcttaatcattggcccccaccaattctgccaagc

SEQ ID NO: 183827 - DNA, 600 bp, Homo sapiens
caatttcctttgctttgtgcttcttacattctttatagtaaatttgtgtgcatatgtgtctgcatacatgtgtgtatgtatgtatgtttcaatatttgataatttgccaagaaagaaaggagcattttggcatttttggctggccagatgtcacagaacatctgagatctgatctcctttattccaaggaagaaaaaaaatgctaatttaggagggtgccaatgctgtaaatattcaattcagtagaagtrtcaagtctatagattgtgcaacctctttctaaatagtcatgtaaatctcatgtatggaaggattatgatgcagcataaaattaagcctctggtagtcatacgtccctataaggaatttggagggacagtgggcagtgtaatgaaggcaggttacatttgctatagctctgtatggtcactttgccttagttgggtctctatatccattgttaagttgggaatttaagcttgaaaaaagaaagagagaaaaaaagacagagggaatgctctaacaggtgaagattttggaatcaaatatacatatttatataattttcctgcaggcttttgtccactttaaacatctgga

SEQ ID NO: 183828 - DNA, 600 bp, Homo sapiens
caatttcctttgctttgtgcttcttacattctttatagtaaatttgtgtgcatatgtgtctgcatacatgtgtgtatgtatgtatgtttcaatatttgataatttgccaagaaagaaaggagcattttggcatttttggctggccagatgtcacagaacatctgagatctgatctcctttattccaaggaagaaaaaaaatgctaatttaggagggtgccaatgctgtaaatattcaattcagtagaagtatcaagtctatagattgtgcaacctctttctaaatagtcatgtaaatctcatgtatggaaggattatgatgcagcataaaattaagcctctggtagtcatacgtccctataaggaatttggagggacagtgggcagtgtaatgaaggcaggttacatttgctatagctctgtatggtcactttgccttagttgggtctctatatccattgttaarttgggaatttaagcttgaaaaaagaaagagagaaaaaaagacagagggaatgctctaacaggtgaagattttggaatcaaatatacatatttatataattttcctgcaggcttttgtccactttaaacatctgga

SEQ ID NO: 183829 - DNA, 631 bp, Homo sapiens
tattctggccattaaaaatacaagttttataaaaagaatacaaaaccatatgctcataacacataaaaaatgattgagaaaacagtagaagactacttaaaaagtgagatattatctatagaaaagtaataatgttagataaataagattagtaaggatttttttcttttatttttcacactttcttttgaaatactttatacatttttacaaataaatacccaccaatgtacacatgcacacacatacacacagcrcagattggcaagagaaaaattgataccaaatagagattttaaagtcttaatgaacccttaaaactatgaaatatgtatgaaattctacccttataagtgggtatcctttaatcatgcattgtatttttattccaaaaaataagttttcagattattagagatggaaaatatacatctttgcctgctttacatcgttccccttttcccattttgaaaaagctcaaaaaaaagcttctgtaagaaacctgaaaataaactagatctttgataaaataaacaaacaaatattactctaactttgcgtgtgtatagatatgactcccaattgtactgaatacttgccagaacgagagagatactgagaggggaggctg

SEQ ID NO: 183830 - DNA, 598 bp, Homo sapiens
atgtattgtgttatctctcccaggagtatctactaatmtccctgggtaaaagaataattgatcttaatgatgtaggctttgtcccatcttttattccacttcatttgaatttggagaaatttgcccacatctcccttctactgtacccctctccacaaccactataaggacggaatttcaagcaattgcatctaaggaagaggggaagaaatataaattgaatttgcccttcttatcacctccttaagccacaccatgggtaccatgacttattttatctcttaataggaccagcactggttataggaaagcaaaaaaatcatccataataacagtaacaactgtccacataaattagtttccacttccctgatgcaagttgctggatgtgtgaatagtgggacagcttgcaatggaagggaggaaagtttattttatatcacactcaaaatctgtctgatatttgtgatggattcattgttatatacattgtaaaaactaatcttctggatagaatgctttgacttactaatacgttactttgctgaatagagaagggaagtaaatatttataaataatttgattctcattgtcagc

SEQ ID NO: 183831 - DNA, 598 bp, Homo sapiens
atgtattgtgttatctctcccaggagtatctactaatatccctgggtaaaagaataattgatcttaatgatgtaggctttgtcccatcttttattccacttcatttgaatttggagraatttgcccacatctcccttctactgtacccctctccacaaccactataaggacggaatttcaagcaattgcatctaaggaagaggggaagaaatataaattgaatttgcccttcttatcacctccttaagccacaccatgggtaccatgacttattttatctcttaataggaccagcactggttataggaaagcaaaaaaatcatccataataacagtaacaactgtccacataaattagtttccacttccctgatgcaagttgctggatgtgtgaatagtgggacagcttgcaatggaagggaggaaagtttattttatatcacactcaaaatctgtctgatatttgtgatggattcattgttatatacattgtaaaaactaatcttctggatagaatgctttgacttactaatacgttactttgctgaatagagaagggaagtaaatatttataaataatttgattctcattgtcagc

SEQ ID NO: 183832 - DNA, 598 bp, Homo sapiens
atgtattgtgttatctctcccaggagtatctactaatatccctgggtaaaagaataattgatcttaatgatgtaggctttgtcccatcttttattccacttcatttgaatttggagaaatttgcccacatctcccttctactgtacccctctccacaaccactataaggacggaatttcaagcaattgcatctaaggaagaggggragaaatataaattgaatttgcccttcttatcacctccttaagccacaccatgggtaccatgacttattttatctcttaataggaccagcactggttataggaaagcaaaaaaatcatccataataacagtaacaactgtccacataaattagtttccacttccctgatgcaagttgctggatgtgtgaatagtgggacagcttgcaatggaagggaggaaagtttattttatatcacactcaaaatctgtctgatatttgtgatggattcattgttatatacattgtaaaaactaatcttctggatagaatgctttgacttactaatacgttactttgctgaatagagaagggaagtaaatatttataaataatttgattctcattgtcagc

SEQ ID NO: 183833 - DNA, 594 bp, Homo sapiens
taaaaacatcatttacattagcaccaaaaaagtggttaggcataaatcttttaaaaaattatgtacaagatatacatgagaaactatataaactataaaactataaaactttgatgaagaaattaaaaaaagtctatataattatagacacattgcatgttcatggataataagaagactcaatattgtttaagatgtcagatcttcccaacttgatctataaacacaatcccaataaaaatgctataaagtcattttgtagatatcaacaaactgattctaaagcttttgtgaaaggcaaaagacccagagaggctaacacaatattgaaagagaagaacaaggtcataggactgactacaagacttactgtaaagctacagtaatcaagacagtgtggtagggtaaaagaatagacaaatgggtcatgaacaaaatagacggcctaggaatagacccaaacaaatatagtcaactgatctttgacaaagtagcaaagacaattcaatggacaaaggmctgtcttttcaacaggtggtgctagaacaattgaacatcctattgccaaaaaaaaaaaaatgaatctaaacacaa

SEQ ID NO: 183834 - DNA, 497 bp, Homo sapiens
tgaattccttgccaaagaggctatgactttgtaggacttccctgtgggcagcagttaagcccaagagcactgggtgagttggtgctgcaaaggctagagggccagacgagaggagggtaacacctctttaatatcattcctcccaaaatacatttggaattgtttgcagacatcccaactctttttccctggaaactgggcagatcatttctctgtgtccattgttcttctgaagcctaatttttccaacctcgtttcccaaatgtcaaaccccattcagggaggagaactcaaggtaaaagctaaatgggaactgaaaggagagtatgcatgtgtgtttctcataaaacatgcatctttagctgaatatggtgacatcttattagtasaactcacacttgataacttgaagacatctcctcctgacccagattatgtccctggcttacacggtaagataaataaagaaacatagcatagtgtgtagctacactgaa

SEQ ID NO: 183835 - DNA, 548 bp, Homo sapiens
gctgtaacctaattgtaaaagtgcttcccacagggatataggttagcaatttcaaaactaccataatagaacaaataagtaaatatattacagataatgagagccaagttttcagtgtgggagaaagatgttataaatcttaagccctgggagaagagggccttaaaccctgtggtgttgggatagaatctgaggtagcggtataaactcatggcttttaacataggtaccaattaacaggaaatacagatgtgtgtatctgtagatttgtataaatacacatatttattagtcctctctgctcaggcctagaagcaatgacccagattctatgarcacacctaaaacccagatcttgatagttaagtatcattttccaaaaaagagagaggaagcagggctcctcagagaagttgttgattccagagatggggcacggaaaataaaaaatgagcctcaaacatccgaacatcctcactatacaaaaaagcaaggaagtgctcaaaaacaaagaaccaatctaaaggacttcctgataaccaaagtgg

SEQ ID NO: 183836 - DNA, 360 bp, Homo sapiens
actttgaaagccagaagagattggggcccaatattcaacattctaaaagaaaacaaattccaatccagaatttcaagtctggccaaactaaacttcataagcaaaggagaaataaaatcctttcagacaagyaaatgctgagggaatttgttactaaccaacctgctttaaaatatctcctgaaggaagcattaaatatggaaaggaaagactgttaccagccactataaaaacacattgaagtacacagaccagtgacactacaaagccaacacataggaaaatctgcaaaataaccagccaacatcatgaagacaagatcaaatccaaacatgtcaatactaactttaaatgtaaatg

SEQ ID NO: 183837 - DNA, 536 bp, Homo sapiens
aaaggtaagaatagcccagactatctgggggctggagggaagtattctagaggatattaagactcttcataaagttgtagtaattacaacaatgtggtgtccaagcaaaatgacaaatgaatcaatggaacagaatgaagcgtttagaaacaaatccayaaatacatgaccactcgaaatatggcaaaaattgacagtgcagatagtagggaaggaatagagtctttccaataaatggtgctggataatttatatgttcatgtgggaaaaatgaaaataaactgtacatcacaccataacaaattaatatcagaaagattgtgagtctatatgtaataagtaaaataataaagcttttagaagaatatattcatgaactcgatgggatcaatttatggactcagaaacaaaaataattataaagagtgatactttcaagtatgtgttcatatcgtaaacattatccacctgtacaattatcacttgagaacttctcttaatatatgttctgcttcaataaaaatgatgaaaattct

SEQ ID NO: 183838 - DNA, 535 bp, Homo sapiens
tgtgaggctagtgaaggaattttggcgtctactgaagtaatatgtatgatgatttaaaatcagcatgcatttaataaattcttaytgaataaattttttgttatctttagattgtggctgtaggaagtttatgtttatagcttgaaccaacactcctgaccttggtttcacacagaaaattttaaatttggcattcagtttctcaaatagaatttctaaatgtgtaaaatggacctttgacctaagtgtctattatcataattagcacaaaaaacaaaggactttagctctgtggctcacttagcaaatagtgcaaatcccatagtccagaagaccttgaataatgtttgctaaagtgtgtagcacattttacaaagcaataaaatttgtagaaaatccctagcctcctagaatggaataaaattttcttccctctatggtccacgtctatttgcaatggagagatgtgtattgatctatcatgcagtgaatctctctctccggccactattgatttcaatttaccaattgacaa

SEQ ID NO: 183839 - DNA, 598 bp, Homo sapiens
  misc_feature (1)...(598): n = A,T,C or G
atgctacttcagttcatttttcctagctttctccctattgatggcagacccacgttcaacactgcatgtcatctgctacctctgactaatacatcactacttctgctatagagtacagntaaaaggcttctactgtaaccgtgcaggcagtctccagcaggtctgaaacataagcccactgaacaaagatagtaattcacgtttaatacttgttttcaaaaaacaatgaccaccagtttccacaatggaaaagaccaacatctaccatctaagtttttcctggcagatcattcaaccaagcrcttcactgaaagtaagacttctcaggtatcaaaagaacaatttatctacctttacctacaggaactactgatgcctatttcctatggtgtcttgataaactgtctaaaactgcttcaccaattgtttgctaagtattgtatttaaaacaagcatttaaataaaatggcttctttgatttattaaataaaaaaacaacaagaatcatttaccttctatctccaccaatggttcttgggtaaactcctgaaagaatttgtagaagaacttactacaagcagccaaaacagccttgtga

SEQ ID NO: 183840 - DNA, 479 bp, Homo sapiens
gaattctttgaggcccagaatgaggtagatccctccagagcctatctgagtttgcagcttccaagtgcgtagggcattagagtctaagagtcctttaaattatgagcttgaggaagtgagcgttcacaatgcaaagccttggagggccagtctgcaggtgaaactttcagtggtggctcctcccagtccctccacttccattcagcaccagaatccttgcaggccctttggcctgtgaggggtaatatgttcttggtggtgtatttaattctagttgacccatggatgaagatgtggcctcttgggggctccagctttgtggcaggggagggtttcctataagatcccttactttggctgggccctggacttcgtcatctcttccctgcactccacagagccatcaacatggaagctcaaggttaccaggttcaagaaattctctcagggtcaaagsgggctgcagtgccgtaatgatc

SEQ ID NO: 183841 - DNA, 576 bp, Homo sapiens
ggaatatcaatccaagatcctaccctaccttcacagataaaactccaattaaacagatattatttctgasttataagtgacacctgctgagtctctcttctctctcctttgagcagatcaggtataatattctccattttacataagactagagaagatgaagaactatctcagtttgcacaaatggtaaatagcaggggagaagcctttcatcaagtaggaaaatatagaaatttctccttgaaaaaaatacttcacaaatggggaaacttggaaattctgttgtcatgttagtaattatcggggaggatttttgcacacaggttcaccagtgatttatcagttaagtcctgagtgtaactgaactttgctctgccccaggcctctgtcaataatagagtccagtaaggctctgaagataattaacagcttttccaaagtaattctttccctctcttaactaatttaggagttgtgaaattgaaggaaaggaaaattgttttggaaggatttcagataaatttatacaatttacatgaaacttcatattacaggtgttccatttcacagttaatg

SEQ ID NO: 183842 - DNA, 549 bp, Homo sapiens
gccaagtctttctgcaaatgatgggcagtggtggacacttgaggaaagagaaagccagagtttccccagagctaaactgcaacttggaatgcagggacctctggttgctcaataactcataggcttttcacattcagctgggtcatcacaagacacagagcaaaactgcccagatcttgtacaggcagtaaaggattgaccccttcagaccaagccagttaaagtgagtcttttgtacttaagtgactaccaggattggtcttaggcacttaggaaaatgtagagtctgttatatagctaataaatgtaggatctgttaaatatctgacacagctgayataacttgtgcttatacacatctgttagaatgaattggaacatcttgctgttcaggttgtaagctacacaaatcacccgttgcctagattcagtttccatgcgccttaaaacttgaatatttaggtatttgtttataaaaatacaacttattataactcagagtgtaaggatacatgagccaactgtgcaatggttgttaacaatctagga

SEQ ID NO: 183843 - DNA, 523 bp, Homo sapiens
tgaggccacccttgtcaacctggcgaaaccctgtctgtattaaaaatacaaaagttagccggttgtggtggcgcatgcctgtgatcccagctactcagaaggctgaggcagaagaatcacttgaacccgggaggtggaggatgccttgagccgagatcgcgccactgcattccagcctgggcgacagagtgagactccatctcaaaaaaaaaaaaaagaaagaaaaaagaaaaggaaatatttgtatccaaaaatgtatgtccygactctttgataatctttattctaatgaaatgccctttggtgccctgtcaaaatcatgaagtgaatgattcaggggaggcaattttcacattcttttaggtatagttagcccagtctaaaagcaacaaatcaaaattataaaaaaaatttttagaatgcagcttttcatatcctaattaccttgaattagtagtacttgtcactttataaacttgaatgaatgtgtaaatgaagatttttcaatggtttttagaggcag

SEQ ID NO: 183844 - DNA, 371 bp, Homo sapiens
tggtttccaaaaagttggcagccagatagaagtggaatgggatgtgagaaggacaaagccaaagagaggagtcctggatgcctgacatgaataagatcagagtgattgtccaccactcatttttatttgttcttgatcacatagagagaagccagccctcttccaagctccctcctctgtgagaccmgggaaagagatggtggtcagggcttttctgggctttctactactgagttttgggtttgttctctacctactttggcaactacaggagccagcttctatgcatcaagcccactttccattcaatcaattcctcggaattaccagctaggattttagagttggctataaagttttaaattttaaaa

SEQ ID NO: 183845 - DNA, 371 bp, Homo sapiens
tggtttccaaaaagttggcagccagatagaagtggaatgggatgtgagaaggacaaagccaaagagaggagtcctggatgcctgacatgaataagatcagagtgattgtccaccactcatttttatttgttcttgatcacatagagagaagccagccctcttccaagctccctcctctgtgagaccagggaaagagatggtggtcagggcttttctgggctttctactactgagttttgggtttgttctctacctactttggcaactacaggagccagcttctatgcatcaagcccactttccattcaatcaattcctcggaattaccagctwggattttagagttggctataaagttttaaattttaaaa

SEQ ID NO: 183846 - DNA, 592 bp, Homo sapiens
cattgatagaaactgctaaagataattctggaaagggataataatactcyttcctgtatcagcaaagagtaaataaagcttcacatgtcgatgctgttctccaataaaaaattgttattcatacacaatttcagggaggcaaaaactgaacttcattttgaatgcaagccttttgcatgtaaaattgataaggagagatatttagccgattcaatcattctcagtatctatttcgtggttgcagagaattcttcctctagaattgacttcctatatactcgtacctactcgtcacctagagactagttctccaaaatcagatttatggttgatgtgaagtagatttgaacccctagatgtctttctctcaatttttcttcaactccaaatttaaaataaaggaatgtacgggcaacaattttcacctaaatgaaaggaccacacactctgcctgctggtgagaatgtcctccattccaagtggattcacaaattgtttcttttaagaagtgactgacttctagagtaccctttgcttccaggatagtatttttttctaatttttaaaaacatacctctggacaccaaaaaag

SEQ ID NO: 183847 - DNA, 567 bp, Homo sapiens
tgtattgaataaagtcatgagtccaaagcaggaagtgtagaacagagccttgaatcacacccacaacgggaaaaagacaaagagaattcaagaaaactactaaatagagagtagctaaaggatgaagttatagctactaaatagtggctaaaggacaaagacatggatgggtagatagattataagctgtagagaggtagacacggaacttgtcatgaagaagaggtagtatagtttatggagaaagtgattaactgtcaaatgacataaagacagtgtattaggatactagtttagcttctgtaactgagaaatcaaaatgacagtgttagatggttcagggctaatatggtgagtccacaatcatcagtgtcccaggccccttcagccttattgctctgcttccttggcactgggcttccatctcatagtctaaggtaattccttcacttcttgcatacatttttattcaagactgcgggwaggaagaaaaggaaaatgggcagggcttgccttaagagttgtatgtatcatatcagtttagatcccatggccacacctagctac

SEQ ID NO: 183848 - DNA, 449 bp, Homo sapiens
cagaataaactttgcttggtgaacaatattttggctggaaaatctagagaagaaatgtctccattcatcgggagtgtttttctctgtgttrctgcttatttaataagagataagcatgttatttaaaatgttgccccttgttttttcccataagaaacatcaaaaaaagactcagtgtctctggaacaattaccatcaccctaaaatgtaaccacttctgagataaatgatgaaaattgctggcttaatattcacaaaacaggttaccatacccagctgaaactatgaaaatcagttaggtagaaaaaatgtaattaccaaagtcagatattagcaagcacagttctaatttgagtatgactcctctattcaaattaaactttataattaccaacggtttaattctttcttctaatctcatcatatatgatgaaacttcaaaaatttca

SEQ ID NO: 183849 - DNA, 338 bp, Homo sapiens
tttctttttcagctagttgtttattagtgtctagaaacactactgatttttgtgtgttgattttgcatcgtaaaactttactgaatttgttgactagttctaagagttttggggtmgaatcttcaggtttttctatatataagatcatgtcatctgccaagaggaacaatttgacttcctctttttcaattattttttcctcttgcctggctgtgtctaggacttccagtactgtgttgaataagagtgctgaaagtgggcatcctagtcatgttccagttcttagaggaaaggttttgagcttttcctcattctgtgtgatgttagctgtgagtttg

SEQ ID NO: 183850 - DNA, 286 bp, Homo sapiens
tttctttttcagctagttgtttattagtgtctagaaacactactgatttttgtgtgttgattttgcatcgtaaaactttactgaatttgttgactagttctaagagttttggggtcgaatcttcaggtttttctatatataagatcatgtcatstgccaagaggaacaatttgacttcctctttttcaattattttttcctcttgcctggctgtgtctaggacttccagtactgtgttgaataagagtgctgaaagtgggcatcctagtcatgttccagttcttag

SEQ ID NO: 183851 - DNA, 550 bp, Homo sapiens
cagtaagtatacagaaaaatattttcaaaaaatgccaacctttctatgctttgaatttatccttatcattgagcacttaacatactgcaattttgcttatatattttgttaaactattttctccattagaatgcaagcttcatgagggaagggatcttttatcctcagtgctttatctgatcttcctagaacactgtgttcgtccatttttgttgctataaagaaatacttgtgactgggtaaccttcaaaaaactagatgtrtttggctcatgtatttggtttggtttctggtgaggccccagcaagcttatactcacggcagtaggcaaaaggggggagccagcatgtcacatggcaagagggggagcaagaggtggggtgggagcaggggcagttgccaggctctttaaacaaccagctttcaagtgaactcattactatgcggaaggcacaaagccattcatgagataatttgcccccatgatccaaacatcttccattaagccagacttctaacattggtggtcacatttcaacatgagacttgg

SEQ ID NO: 183852 - DNA, 550 bp, Homo sapiens
cagtaagtatacagaaaaatattttcaaaaaatgccaacctttctatgctttgaatttatccttatcattgagcacttaacatactgcaattttgcttatatattttgttaaactattttctccattagaatgcaagcttcatgagggaagggatcttttatcctcagtgctttatctgatcttcctagaacactgtgttcgtccatttttgttgctataaagaaatacttgtgactgggtaaccttcaaaaaactagatgtgtttggctcatgtatttggtttggtttctggtgaggccccagcaagcttatactcacggcagtaggcaaaaggggggagccagcatgtcacatggcaagagrgggagcaagaggtggggtgggagcaggggcagttgccaggctctttaaacaaccagctttcaagtgaactcattactatgcggaaggcacaaagccattcatgagataatttgcccccatgatccaaacatcttccattaagccagacttctaacattggtggtcacatttcaacatgagacttgg

SEQ ID NO: 183853 - DNA, 493 bp, Homo sapiens
tgttgtttttatttttcaggaagataatttggaaaaatgaacacattcatcaacctgacctaatttgttcattatctaatacaagtgaaacataaaatatttacgtaatattaactggatattctttctattaaactacgtacaagtaaaaatgatgaagtatttttatagcacactatgggaacaatttacctaaaactgggtttcaaaattaagttctgtaatgttctggcaaatcacttcttcatagccatggttctatattcacgtttatgtgtggaatcgctggcaaattttaaaacttttacaacttatatcattacctgcatatgtagtttgggaagcactttccccaatctctcctacgtatgtaagtttgtacttctaacctcatcatatcaaacgccaaaagcattccattacacktataaaatacttgtccatttgaatatttttagttatggagacaagaagatctcaaatttgttggtaa

SEQ ID NO: 183854 - DNA, 531 bp, Homo sapiens
gaactgtggatatcagtttattgctatctattagctagactgtgctcagtctcttgccacatggtcctcgctattgctctgtccacatgatagcttgcttcatcaacacaaagatgacatctcacgtacacaaacaaaaatagagagagagagagaatcacagtcatttaaaatctaatcttgaaagtggcatcttatcacttttgccacattatatttattcaaagcaagttactaaacacagccctcaatcaagtagaggggattacacaggtcataaatacaggaggcagggatgattgaaagtcattttagaagaatgttcaaagtaactaaaagtggaactaccatttgatctggcattcccactgctgggtatatacccagaggaaaataartcatataaaaaagacacttgcacacgcatgtttataacagcacaattcgcaattgtgaaaatatagcaccagcctaaaggcccatcaaccaataagtcaataaagaaaatgtgatatatataccatggaattc

SEQ ID NO: 183855 - DNA, 437 bp, Homo sapiens
tacttttgcaccaaccttatatattctattatatatgtattctattatacatgtatgtatataattgaacactattcaactataaagaagaaaaaattgctgcaacatggatgagactggatgccattatcgtaagggaaacaactcaaacggacacctcatgctctcacaagtgaaagctaaataatgcatgcacatggacaaaatgaggagtaataaatgctggagactaagaaggctgggagagtgcggaggggaaragggataagaattacttaaaggtggcaggtcacggaggctcacgcctataatcccagcactttgggaggccgaggcgggtggatcacgaggtcaggagatggagaccatcctggctaacacgatgaaaccccgtctctactaaaaataaaaaataaaaataaaaataaaaaatagcc

SEQ ID NO: 183856 - DNA, 582 bp, Homo sapiens
gttacataatatgtgtttatatttttgtggtacatgacatactttgttacagacatgcaatgcataataaccacatcaagttaaatgacatatttgtctctgcatgtatttatcctttgtgttacaaacaattcaattatactcctttagttattttaaaatgtgcaattaartttattattaactatggtcaccccgttgtgctagcaaatgctaagtcttattcattccttctattttattgtgccattaaccatgcttactggtccccacctcctccaacacacacacctccattattcttcccagccttggtaaatatccctatactctctatctccatgaattcaattattttaatgtttagcttccacaaataatatctaaagggcatatagtatgtaagtgtgagaacatgtgaagtttttcttctgatgcttggcttatttcacttaacataatgacctctagttctatctatattgttgcacatgacaggatctcatttttttatgagcgaatagtagaattccattgtgtatatgtatcacagtttctttatccatttgtctgttgatgaac

SEQ ID NO: 183857 - DNA, 542 bp, Homo sapiens
tcattaatagaaaatgggttatagtcctctaaaagaaaaaaaaggcagaaaaaaatgaatataagaatttatttttactaggaaaaactcaccaggatatgttgataaactgaaagatcagcttctaaatattatatatagtgttctcctttattccaaaaggtatacagataaaaatataatttcatttgcttaaaatatttgagaaaaataaagaaaataataaataacatacacatgacagtgatttggcagagacaggaagagggaaagtcaaggacataacttctctgcttatgctgctttttatattacaatgtaaattgtgcttatgttygagaaagcgtattttgcattttagaaaaatactccaaataaacagatggtccaacaatgagagagatatttatgggaatctagtatgattcaggtaatgctttaaaggcttaggacatggtgatgaataatggggagaaaaaaattgggtcctttggaaccagggcattattataactcatttatggtctccccatgctaccaga

SEQ ID NO: 183858 - DNA, 615 bp, Homo sapiens
tgttggcaggtaattacatcatggtggtaaattctctcttgctgtccttgtgataataagttcccattagatctggttgtttaaaaatgggtagaacttgtgccttcaccctcttcctcctgctccagccatgtaagacgtgcctccttcctctttgcctttcaccgtgattgtaaatttcctgaggcctcccaagccatgctttctggacagcctgcagaaccatgagccaattaaacctcttttctttataaattacccacaaagacacaaacttcatggctcaaccaaaaaatcactcaagataatctatagacttaaatttccaaatataaaattgtagaagttatagaagaaaacctacatggatttgggttggtgataaatttttagatacaatagcaaaagcaagtccatcaaagaaaaaraattgatgatgtggactttattaaaatttgaaatgtctactctgaaacatcctgctacgagaatgaaaaaccaagccacagactgagagaaaatatttataaaacaaacctgaaagggatttatatgcaaaatatacaaagaaattctaatgctcagcaagaagacaacacaattaaaaggtagaca

SEQ ID NO: 183859 - DNA, 498 bp, Homo sapiens
cgtaaaaattaaggaaaaaagaataaacaaacgtaagaaaattctgtcaaaattattgattttcttcttaaatcatgtatttactaagtactatattttgaatatctctgaacaagttgtgacaagtaaacaaaatgaaggacttattataatttacaaatccggggaaaagcaaaattgtttaaatagtgaagaggacatgtatctcagaacatatttaaatctatctacaaaaaaggataatgaatttraatgttatgtgtcagaattcatttttaaattgtaagctgtatttcaagtatcatacatataatttgtggttattacttattttgtaagcttaccatttatttttagaatgctaaacatgtagtgttttgttacatacaaaagaatgttactcaataggactttgtgaaattcaatgtgagtttctatgctagctaaactctacctattatttttttctatcatggactgctgtccttaaaagttgtg

SEQ ID NO: 183860 - DNA, 559 bp, Homo sapiens
catagcatagtggtgacacagtaacaccaaaacactatgatgagagcttaaataaaggcacagcacaaacactattgaactatagaaaaaagagtcctgaacttttgaaggatggagagaggaaaataaatgccttatagcataagtgttcctcaagcctacaaatcttttaacactaacaatatatttgattatgattttttattttgttaccatttaaaaaggcgtttactggatataaaaagatagcaagatatttgattcagtttatcatattttcctttataaaaagtaacatttaatgcagaaacttttgaattaaaatgcattgcagactcataatgtcattttaacatgtattactatactttgaatccaytcatggctgaatctgaaatatatatttgaacagctgttagttgaaataaaagtactcatttcttactagaccaattttatgtaatgctgaaaactcttttagcatttttgtttaactagggtaatggcaaaatgcctaaaaacatataagttgtgtggctgtaccttgtatatatgtttt

SEQ ID NO: 183861 - DNA, 594 bp, Homo sapiens
ggttgtctgtttactctgttgataatttcctttgctgtgcagaaactctttagtctaattacattccatttgtcagtttttactttttttgcaattggtttttgtgtcttcatcataaaatctttgcacattcctatgtccggaatagtattgccttggttgtctttctgaatttttatagttttcagttttacatttaagtctttaaaccattgtgagttaacttttgtataagatgtaaagaagttcagtttcagtttcctgtatatggctagccagttatgccagcatcattcattgaatagaacatcctttcgccwttgcttatttttctttactttgtagaaaatcagatagttgtaggtgtgtggctttatctctggcctctctgttctgttccattggtctatatgtctgtttttgtatcatttgcaggctgttttggttactgtagcactgtagtatgatttcaagttgggttgtgtcatgcctcctgatttgttcttcttgcttaggattgccttggctattcaggttctcttttggttccatatgagtatgaaaatattgttctctagttctatgaaaatgtca

SEQ ID NO: 183862 - DNA, 578 bp, Homo sapiens
ttgcttggtaaatattcttccatccctttattttgagtctatgtgtgtctttgcatgttagatgggtctcctgaatacaggagaccaatgggtcttgattctttatccaatttgccagtctgtgtcttytaattggaacatttagcccatttacattcaaggttaatattgttatgtgtgaatttggtcctaacatcatgatgctagctgtttttaactcattttgcacattagttgattcagtttcgtcataatgtcattggtctttatgttttggtgtgtttttgcagtggctggtaccagtttttcctttccatgtttagtgcttcctgtgcaagtcccccagctccttgcacttcctgggagtcgtgatgccccaccctgcttctgctcactctctatgggttgcacccactgcctgaatcagtcccaatgagatgagccgagtacctcagttggaaatgcagaaataaaccaccttctccgttgggcttgctgggagctgcagactggagctgtttcgatttggccatgttggctcctcgccctactgggcttaaatttaagcactgtattta

SEQ ID NO: 183863 - DNA, 571 bp, Homo sapiens
atttcatgaaacttattcactattatgagaatagcataggaaagaccagcccccaagattcaattacctccccctggttccctcccacaacagatgggaattctgggagatacaattcaagttgagatttgggtgaggacacagccaaaccatatgacaccatattaagtatttgagtgtatttgtttcaactccatgagtgtcaaattttccagttcttttacttgaagggtcactttttagatcatttgacaggacagcagcaatacatgagaatttaaactttggagattatacacttgaacacaacaaagtggaaaataataatcaaaaaaagttatattaacagatcctgtgattcagtttttaagaaaaatcttaattcctaaagtaagctaaggcccacttcctaaattgctctgaaaacatatattaattccaatmtaaagaacccacagaaatatgtggcattattacccaaagtatctacatttatggctttttattttttttagatccttttagaagattaaaatccaaaagatttgtagggattgagtataatattctt

SEQ ID NO: 183864 - DNA, 349 bp, Homo sapiens
ttaagcaaaattaattcacagtttaattttctaaattaagaaaggggctaatatccataaatcttctacatggktcacaaaattcttcatgtaagatttcattttgtcagtaaagggaccgcttaagtaactcaattatatttggtgggcagcagccaaaataatttaaattaaggttgtctaaatgaaatccataatgcactttatatttcgtggagtgttcattacttgaatcttcatcttatactgttggaaaacatgacgcagtaatgaagagtcactttaactggttgaaggaatcacacagatgctagaaaaatctaaaatttttattctaagaagcagtaat

SEQ ID NO: 183865 - DNA, 349 bp, Homo sapiens
ttaagcaaaattaattcacagtttaattttctaaattaagaaaggggctaatatccataaatcttctacatggttcacaaaattcttcatgtaagatttcattttgtcagtaaagggaccrcttaagtaactcaattatatttggtgggcagcagccaaaataatttaaattaaggttgtctaaatgaaatccataatgcactttatatttcgtggagtgttcattacttgaatcttcatcttatactgttggaaaacatgacgcagtaatgaagagtcactttaactggttgaaggaatcacacagatgctagaaaaatctaaaatttttattctaagaagcagtaat

SEQ ID NO: 183866 - DNA, 565 bp, Homo sapiens
acacaatcagtggtctcagcagagcgaagtcattcgcattggccctagataaaagcatccctcacagatggggatgataactttgatgaagcaccttcactgttggaaactctgaccttctagtcaccagccagattgtttacaaacagataatttaaaaatagcctcataaaccaaccaaatcattagtgctataatgccttttaagttatagatacttttaggatctatctagagaaaaatagatgaaatgaagctataatattaatcagctatgaacagtatattttcagcattctcatcattcttttctttatagttttaaatgcactgttatctatttcctgttcttcagtaggtaaaattatccaacattcttcgtactgtgacagtatttcactcaatttgccatttaaccttaaattttgtcatagggtttttcactctctamagatagacttttcctttttactgagcttatgagtcttttagaaatataaagatatacgatagcttatattttcaaaaatgtacctgctttgtgatatatgcaaatatttatttt

SEQ ID NO: 183867 - DNA, 548 bp, Homo sapiens
gtattgatagtgggcatccttgcattcctcatattttaaaggaaatgttcttaagactcaacactgagtttaaaattcgttgtagaattttcatcatttttattgaagcagaacatatattaagagaagttctcaagtgataattgtacaggtggataatgtttaygatatgaacacatacttgaaagtatcactctttataattatttttgtttctgagtccataaattgatcccatcgagttcatgaatatattcttctaaaagctttattattttacttattacatatagactcacaatctttctgatattaatttgttatggtgtgatgtacagtttattttcatttttcccacatgaacatataaattatccagcaccatttattggaaagactctattccttccctactatctgcactgtcaatttttgccatatttcgagtggtcatgtatttgtggatttgtttctaaacgcttcattctgttccattgattcatttgtcattttgcttggacaccacattgttgtaattactacaactt

SEQ ID NO: 183868 - DNA, 474 bp, Homo sapiens
gaattccctctccatttcttcctccttctctgccctccacctttcagtgtagctacacactatgctatgtttctttatttatcttaccgtgtaagccagggacataatctgggtcaggaggagatgtcttcaagttatcaagtgtgagttstactaataagatgtcaccatattcagctaaagatgcatgttttatgagaaacacacatgcatactctcctttcagttcccatttagcttttaccttgagttctcctccctgaatggggtttgacatttgggaaacgaggttggaaaaattaggcttcagaagaacaatggacacagagaaatgatctgcccagtttccagggaaaaagagttgggatgtctgcaaacaattccaaatgtattttgggaggaatgatattaaagaggtgttaccctcctctcgtctggccctctagcctttgcagcaccaactcacccagtgct

SEQ ID NO: 183869 - DNA, 565 bp, Homo sapiens
aggtgtgtagtgataactcattgtgattttaatttgcacttctctaatgacatatgatgttgggcatcttttcatatgcttatttgccatctgtatgtcttctttggtgagatgtctgttcagatcttttgcccatttttaaaactggattgtttgtttttcttactgttgagttttaatagtttttatattctgaattaagtcctttattagatatgtgttttgcgagtatcttttcccagcctgctacctgtyttttaaattttttaacactgtctttcacagagtaaaaaaaaaaaataaataaagttcaactcatcatttttttttcatagatgatatttttggtgttgtatctgaaaaactcattgtcaaaccacaggtcatctagattttctcatatttaatcttctacaagttttatagttttgtgttttacatttaggtctatgatccattttgaattttcatgaaaggtgtaagttttgtgtttagattcatttttttttttttggcaataggatgttcaattgttctagcaccacctgttgaaaagacaggcctt

SEQ ID NO: 183870 - DNA, 565 bp, Homo sapiens
aggtgtgtagtgataactcattgtgattttaatttgcacttctctaatgacatatgatgttgggcatcttttcatatgcttatttgccatctgtatgtcttctttggtgagatgtctgttcagatcttttgcccatttttaaaactggattgtttgtttttcttactgttgagttttaatagtttttatattctgaattaagtcctttattagatatgtgttttgcgagtatcttttcccagcctgctacctgttttttaaattttttaacactgtctttcacagagtaaaaaaaawaaataaataaagttcaactcatcatttttttttcatagatgatatttttggtgttgtatctgaaaaactcattgtcaaaccacaggtcatctagattttctcatatttaatcttctacaagttttatagttttgtgttttacatttaggtctatgatccattttgaattttcatgaaaggtgtaagttttgtgtttagattcatttttttttttttggcaataggatgttcaattgttctagcaccacctgttgaaaagacaggcctt

SEQ ID NO: 183871 - DNA, 565 bp, Homo sapiens
aggtgtgtagtgataactcattgtgattttaatttgcacttctctaatgacatatgatgttgggcatcttttcatatgcttatttgccatctgtatgtcttctttggtgagatgtctgttcagatcttttgcccatttttaaaactggattgtttgtttttcttactgttgagttttaatagtttttatattctgaattaagtcctttattagatatgtgttttgcgagtatcttttcccagcctgctacctgttttttaaattttttaacactgtctttcacagagtaaaaaaaaaaaataaataaagttcaactcrtcatttttttttcatagatgatatttttggtgttgtatctgaaaaactcattgtcaaaccacaggtcatctagattttctcatatttaatcttctacaagttttatagttttgtgttttacatttaggtctatgatccattttgaattttcatgaaaggtgtaagttttgtgtttagattcatttttttttttttggcaataggatgttcaattgttctagcaccacctgttgaaaagacaggcctt

SEQ ID NO: 183872 - DNA, 565 bp, Homo sapiens
aggtgtgtagtgataactcattgtgattttaatttgcacttctctaatgacatatgatgttgggcatcttttcatatgcttatttgccatctgtatgtcttctttggtgagatgtctgttcagatcttttgcccatttttaaaactggattgtttgtttttcttactgttgagttttaatagtttttatattctgaattaagtcctttattagatatgtgttttgcgagtatcttttcccagcctgctacctgttttttaaattttttaacactgtctttcacagagtaaaaaaaaaaaataaataaagttcaactcatcatttttttttcatagatgatatttttggtgttgtatctgraaaactcattgtcaaaccacaggtcatctagattttctcatatttaatcttctacaagttttatagttttgtgttttacatttaggtctatgatccattttgaattttcatgaaaggtgtaagttttgtgtttagattcatttttttttttttggcaataggatgttcaattgttctagcaccacctgttgaaaagacaggcctt

SEQ ID NO: 183873 - DNA, 560 bp, Homo sapiens
ccgtctagcgatactgctagtaatatcctgttagaaaatgtgttaatctgtacaacaggcaacttcttggttttgaaaaaaatatttttactttccatcaatttaaaagacaaaagatctagatacaagaaatatgaatgttattttgctgtatgtttggaactcaaattcttgggaaatgtttcatttgaagacgaagaagagctagaaatttcaatttgataactcttcattcacattgggccacctaatctctctgcttcccctatttgccactatctggccctgcctttcttcccaatgtttgatagtgagaaaattctagaagctataatggaagcagatggaagtgacttatgcctgtcargagtggttgtggaggaagaagtaccctcagagccttctttcactgcacatttaaaaaaattgttgttgactttgtcctttattaaaatgtatgtttaccttttgaaaccgataaaatcagccagttatttatagaatgcttctcaatttggatttctataatgtttctccaggactttttctttcatttttag

SEQ ID NO: 183874 - DNA, 294 bp, Homo sapiens
atgttgagcatctttccctgtgcttatttgttatcaatgtattttcttcaagtcttttgcccattttttattggattgttagtcttattaagatgtaagagttcatatatactaaataaaagttctttgtcagatatatgttttgcaaatattttcttccaggttgkggcttgcattttcatttttattacagtgtcttttaaatagggaagtttactaattttgataaagtccaatgtgttagattttttcttttacatttgttgttttgtgtccttttaaataaatatttgc

SEQ ID NO: 183875 - DNA, 468 bp, Homo sapiens
cacatgggaattatgggagtacaattcaggatgagatttgaggggggacacagccaaaccatatcagagatggaataaaggaagaatctataggtagatataaattattggtactttttgatwcttggcttgggtgggtattcatcataacttttgtcggggagtaagtgaatataaattttcaaaataaaatagaagtgaaaataaataatacagattacccatgaacaaatgttaacaatgtattatgatcaattcaattttgtttacctgtgatgtaaacataatataatatgtagataaaaagcaatataggaatagcttccaaactaccgggaaaaagtaaaagttaagagggaaaaggcaccgcaaaaatctattcctttgtttttttctggtatatttctcttttcattgcagattagagaaattttcttcatgcactagttactggacaccagcgaccta

SEQ ID NO: 183876 - DNA, 535 bp, Homo sapiens
tggaatgatgaaggaatgttaaggtcaagttgcagaaaagcatgtgagrtgagatattttggtgaccatctttggaaaatacaacctgttatgaatagtaatcaggctcatgagtaacaccaaattcagaaaaattatttgtacttaagataaaagataaaggcactttgagaaggtaagcttctacaggaaagattccttatttagtatggtatctgtctacaacctcatttaaagcctatctccttttctccactaaaaacagaaacttttttaccaagagaagaaacaagaaaaagtgtaaactcacattactttccaaaactaagaccaatataatatcaagaattcttttcatggcatatctggactctgagtcatgaaatagagtagatctaaaaacataagtaggaagacaaaaatgaataaaatactcagctaaaagatgggaaataattggtggcataaagggactaatggccttgggcaattctaaacatttcagtattttattactaaatcaaacacatcagca

SEQ ID NO: 183877 - DNA, 565 bp, Homo sapiens
tagtctgaactgagatatgtcagaactgtaaaatacacagtgattttgaagatttasaaagaaggaaagaatgcaaaatgttttatgaataatttgttatattgattacatgtaaaaatgacaatattttgcatattttgggttaaagtgtattaaaaataatttacctatttatttgtacatatgtggctcacacagtatttctgttgggcagcactggtctagagcctccatagccacaggggtcaggtcaaagttcaactttatttgagaccatatatatctccagaaaaaaagtcaagattggataagcagagggctgaggtcagcctcccagtgaaaagtcagaatgccttagcagtttctacatctgaaccgattactctactcagaattcatcaactaaaggagagtctgggtccccacaaggtaaagaccttccaacactatggcaaagatatacagtaatgtgtgcatttgatcaccccattccttcccccaaagacacttgtagctgtttactaggttaaaaatcaactagggaaaagagaatacccacacctgt

SEQ ID NO: 183878 - DNA, 565 bp, Homo sapiens
tagtctgaactgagatatgtcagaactgtaaaatacacagtgattttgaagatttagaaagaaggaaagaatgcaaaatgttttatgaataatttgttatattgattacatgtaaaaatgacaatattttgcatattttgggttaaagtgtattaaaaataatttacctatttatttgtacatatgtggctcacacagtatttctgttgggcagcactggtctagagcctccatagccacaggggtcaggtcaaagttcaactttatttgagaccatatatatctccagaaaaaaagtcaagattggataagcagagggctgaggtcagcctcccagtgraaagtcagaatgccttagcagtttctacatctgaaccgattactctactcagaattcatcaactaaaggagagtctgggtccccacaaggtaaagaccttccaacactatggcaaagatatacagtaatgtgtgcatttgatcaccccattccttcccccaaagacacttgtagctgtttactaggttaaaaatcaactagggaaaagagaatacccacacctgt

SEQ ID NO: 183879 - DNA, 479 bp, Homo sapiens
attcaatcacatatctcatttccacaccctacaacttgtgcctcttagtgtaagtatagacaatatgattgatcaccagctggttaaagcactggatactttcagtccaatgcataccccgaattcaatgagctgttgtkttgagaccacatggcacaaatttgactgaaggcacctgcaattttaacaggcagctgctagagaagagagttatggggaggcagacacctcaagacatgtttcttttatttagtcacacttaatcctttaatgtcttacacctgaagagtgagtcaattttttattaggtttatgacctagaccaagggttttcactatttaacttttaagtatttcatacctcctctttttgcataaagctaatgattaaagtaaataagcacaatagcttatctgcaatatacatcatatactgttcaaagtcatacaatttttgttctttgtcagtttataatcat

SEQ ID NO: 183880 - DNA, 559 bp, Homo sapiens
tgatcccttgtgcttcctgggtgaggcaatgccttgccctgctttggctcatgcttggtgcactgcacccactgtccttcacccactttccgacactccccagtgagatgaacctggtacatcagttggaaatgcagaaatcacccatcttctgtgtcgctcatgctgggagctgtagactggagctgttcctattcggccatcttggctccaccccctcaatttttttttttttcactttaacttcataaaattgaggkgataaaaaagaatcccaaaactctatggtcagtctctccattagaccacacattttggagccagattgaatgaatttatatcctgactttgccaagttgtaagagctttggtaaattactaaacctctctttgtctcagtttcttcaattataaaatctaaataaaagaacttttgattccaaatatgaccaaatagtgggtatcagactaccttcccacaatagacaactataatactggaaaatgtacgaagcatctgttttggcattagacaataactccctcagtttagaaggaa

SEQ ID NO: 183881 - DNA, 563 bp, Homo sapiens
gtggctaagggactcacttatgtcatctttcaccaaaccccagggatcacagctcacagctccaaaagagaaccgttccttcttcttgacgagaaaggggaataaagaggactttgtcttgcatcttggatgccagcttagctacagtaagataggacacaaggcagagtcatgaggccccccattctagctaggccctaggacctagctcytggatgacatttctagacataccctgggccagaagggaacctgttgccttgaagggaagtacccggtcctggcaggattcatcacttgcttatgaaagagctcttggaccttgaataatcagcagcagtaacaaggtggtatgtgctgtgggccttgggtgagactcagacatgctagctgcaagtgtgacccagtgtattcacagctgtggtggctatgaggagatactccttctgcttcagaaaaagagaaggaagaataaaggggactttttcttgtagcttaggcaccagcttggccacaatgaggaagaacactgggtgaacttttggggtcctcattgtcaggct

SEQ ID NO: 183882 - DNA, 566 bp, Homo sapiens
gtggctaagggactcacttatgtcatctttcaccaaaccccagggatcacagctcacagctccaaaagagaaccgttccttcttcttgacgagaaaggggaataaagaggactttgtcttgcatcttggatgccagcttagctacagtaagataggacacaaggcagagtcatgaggccccccattctagctaggccctaggacctagctcctggatgacatttctagacataccctgggccagaagggaacctgttgccttgaagggaagtacccggtcctggcaggattcatcacttgcttatgaaagagctcttggaccttgaataatcagcagcagtaacaaggtggtatgtgctgtggrccttgggtgagactcagacatgctagctgcaagtgtgacccagtgtattcacagctgtggtggctatgaggagatactccttctgcttcagaaaaagagaaggaagaataaaggggactttttcttgtagcttaggcaccagcttggccacaatgaggaagaacactgggtgaacttttggggtcctcattgtcaggctttg

SEQ ID NO: 183883 - DNA, 629 bp, Homo sapiens
  misc_feature (1)...(629): n = A,T,C or G
aaatatttgaatattctacaggccacataaacttcacatgtccaaaaccataacaaaactaactaaaactaaggacgccactccctaacacagattgcacaaatggagaccatttctgttattttatttctacatctttagggtctttgttgctgnnnnnnnnnnnnnnnnnnnnnnnnnnnnnnnnnnnnnnnnnnnnnnnnnnnnnnnnnnnnnnnnnnnnnnnnnnnnnnnnnnnnnnnnnnnnnnnnnnnnttctaaattgcctttctcatgtcttacagcatgccagtggctggataactaaagctcaaatatcccagtttccyttacaattcaaattccacaccaagctaactttgacaaacctgatacacccacacaacattacaaaagcagaactgatggctgcatttgtactgtttcttgtggcaaatttggttttggaggtacatgattattctgcagcaaacatcacagcaattctagtgtccagttcctagctttgggagggctgagacaaagaatgtgagacttccatttcctggcaatggtcagggactaaagaaggcaattggtcctggagtcaacagctattgatgttgtttccccagtttccttattctcta

SEQ ID NO: 183884 - DNA, 542 bp, Homo sapiens
acatccaggtcacactgatgcaagaggtaggctcccatgtccttggacagctccacccctgtggctgtgcagggtaaagcacccctcctggctgctttcacaggctggcattaagtgtctgcagattttccaggtacatagtgcaagctgttggtggatctaccattytgcattctggaggatggtggccctcttcttacagcttcactaggcagtatccaatagggactctgtgtggggcactgaccccacatttctcttccacactgcctagcagaagttctctgtgagggctccatccccacagaaaacttctgcctggaacatccaggcattttcatacatcctctgaaatctagatggtttccaaaccttgattttgacttctgtgtacccacagacccaacaccacatggaagctgccaaggcttagggcttgcaccctctgaagtaatggcctgagttctacattggccacttttagccaaggctgggaggcagggcaccaagtcctgagactacacaaagcagcaaggccctgg

SEQ ID NO: 183885 - DNA, 604 bp, Homo sapiens
aactgtaaaaatttcaaaatgatctctatatgcagatccatgaaaatgaaacttagtgcctttgtagaagatatgtctttgctagataaaaccaaataagcaggtctttaatataatttattagcttctattatgcgtagtgtctaaawcacacccttttaataatacaagtcatcttaattcatttagctcactgaaaataatgtaatagaattactgtagatgactcagtgatttattacaaaccatgatatatggtcaattattttaattttcaagtataatactccacagacacataaggaaaaactgcctcttttcacaacagcttcctgtggccttaaacagacattttcttttatttatattaaataggcctaaaggtaagaaatacaaatatagtagaatgaaatgctgttaaatagaattatctagaaatattaggaaatactatgcaactatactaatggtagctttagtttctctcaattcagcgaaaaaaatgttttgttctaggattaaaatttttattaatttcctcaaaatgctgatatactggcaatttcctgaatacactaataacttagataaactagatggacca

SEQ ID NO: 183886 - DNA, 614 bp, Homo sapiens
atcttgtccattttaaatgaaaatgttaacctcacactcaattcaaagttcttcttcccttcatgactttcacccctgactgggacttgccacagggaaggaggtgtgtgtggcctatttttttgttttgttttgttttgtttttcactcatcctcccatcccttctttgctgctttggctcttttgaggctgggagggaaaaggagtattagaggaacaagagtaacggtcttacrggtactatcgtaatctgcctacataacaggcatcaaaagcctggctattaaattgggtacagacatggattctatggatattctgaaaaatttccatggtagatagttctgtgatataagcaacgtattccagtgaactcttacaacaacccttctcatgaaatgcattgttgatgcattggattctctgacatctgttggcttccctcttgagcaaaataaattcaaaatagcttgagcctagctactctctatgggctatacttggatcacagaaaactcatacattttagctacacagaataatcacagtgtaagatttcccactgctgccctctctctgtttttccattgagaggccgcactggccaacctcc

SEQ ID NO: 183887 - DNA, 614 bp, Homo sapiens
atcttgtccattttaaatgaaaatgttaacctcacactcaattcaaagttcttcttcccttcatgactttcacccctgactgggacttgccacagggaaggaggtgtgtgtggcctatttttttgttttgttttgttttgtttttcactcatcctcccatcccttctttgctgctttggctcttttgaggctgggagggaaaaggagtattagaggaacaagagtaacggtcttacgggtactatcgtaatctgcctacataacaggcatcaaaagcctggctattaaattgggtacagacatggattctatggatattctgaaaaatttccatggtagatagttctgtgatataagcaacgtattccagtgaactcttacaacaacccytctcatgaaatgcattgttgatgcattggattctctgacatctgttggcttccctcttgagcaaaataaattcaaaatagcttgagcctagctactctctatgggctatacttggatcacagaaaactcatacattttagctacacagaataatcacagtgtaagatttcccactgctgccctctctctgtttttccattgagaggccgcactggccaacctcc

SEQ ID NO: 183888 - DNA, 604 bp, Homo sapiens
aactgtaaaaatttcaaaatgatctctatatgcagatccatgaaaatgaaacttagtgcctttgtagaagatatgtctttgctagataaaaccaaataagcaggtctttaatataatttattagcttctattatgcgtagtgtctaaatcacacccttttaataatacaagtcatcttaattcatttagctcactgaaaataatgtaatagaattactgtagatgactcagtgatttattacaaaccatgatatatggtcaattattttaattttcaagtataatactccacagacacataaggaaaaactgcctcttttcacaacagcttcctgtggccttaaasagacattttcttttatttatattaaataggcctaaaggtaagaaatacaaatatagtagaatgaaatgctgttaaatagaattatctagaaatattaggaaatactatgcaactatactaatggtagctttagtttctctcaattcagcgaaaaaaatgttttgttctaggattaaaatttttattaatttcctcaaaatgctgatatactggcaatttcctgaatacactaataacttagataaactagatggacca

SEQ ID NO: 183889 - DNA, 620 bp, Homo sapiens
ggaagggaaaccatcatgatcaaatctaactgaggtaaaacaacgaaacaaacgaaaaccaaaaagctgagtatgtctcccaaagaagcggaagaaaacaatgacaggtgattacagtcactctgtctgttaaatttagaatttctgccaaactccattaattactttctagttcatgcctctttgatactgctcttagagaagaaatttttatttttgttgtttaaaaacactcattttttaatcaggatgaccaaacacacacttgaatattattcaggttttcctatgggttacttttatattaacacataaactttctyttctaggcccatagtgaatacaaaaaaaacctatataacaagtttccaattcttactaggattctgaatttaattgtgcagtgattactgaggctcactcatagtgggaataaaaaacattgactattatcttcagcttatgcctataacattgcacttaaaacattaaggtcatattaacattcgtaattaaaggcaaaattaattttaaccttggaaggggatgctttttgaataccattttagaatgttttcagtgggtcaggtgaaataaggtgagagacaaagagtcatgac

SEQ ID NO: 183890 - DNA, 540 bp, Homo sapiens
ggtgccctgtccagggctggttcccaccttgcaccctgagctgacagattaggtttctgccacctacaaccctaaactagaataactgggtgaatattgatcttattttcttacatgtcttgatttcttaaatgtctgtatagctcacatttactttaatgtttaatattagaagtgttttggtctttacttaaaagtttgatgtttttgtggccagaaatatgccataggcaattaactcttatttatatcaattagccaatggtaaaattggtttcattatactaaattctgattaaagttgcagtttccaagaacttatcaatgacatkaagtgaggacttactgcacataaataacaacagttagcaagtttgttccctgatgctgaggaactggggagaacacacccctttcacatggtatttctttatttcctaactacacaggaggtggttaataacaatttgcttactacgatgattttaactacataactttcatacacttggtatataaaactttcctatattagtaaat

SEQ ID NO: 183891 - DNA, 438 bp, Homo sapiens
tgaaaaaaatctagatagagaacaagttcatggccaaaataagtaaaataattgagaacacagaaaataactagcaattaagtagtatcagataaactaagggcaagaaacaagaattagggagtcagggaaagctttgtgaagagagtagtcttccagttgggtcttaaagtatagaggggatttaaatagcatcagccaagtagaatgaagagatatggacatctaaaacaaggaaaataaataagccaaaacactaagtygggaaagtgtagggttgtttggctagcagtaagtataatgtttgacttgagcagagaaagctttatttctgactctacagccttagtagttctaagtcagacacgtgtagctatacaaatatctattatacacttcacgtatcatcagaaaacagtctgagaattaacaaattcc

SEQ ID NO: 183892 - DNA, 422 bp, Homo sapiens
taggttacaacagagattacatgcaaatgtgcacatacacacagaacttcagcctacaagtaagcactgtcccctttgtagtagacttctgggaaggttgcaaattctaacaatgtctgtcattattttaaactatttttaaactgcccttttaaaactgccttcgtagccatcaggacaatcctttaaatatccttaatagtggtaaaatcttgaaggtagaactgagttttacaaccatgtagaaatcattctgccaaatttagcaaagaaaataggtactcaagctgaattagttttttgattaaaaaatagaaacaaaaacaagtgtttatgaatgttatcatgaaatgtttttattttgcttgtaaattgacyagaaatttcaaaaaatacaaaataattatgaatggcagcagcac

SEQ ID NO: 183893 - DNA, 533 bp, Homo sapiens
tttctggaaaaatccagagtaagtgcaaccccacaggaggaccacactccagattcaggcctgcatgagaggcagagtcacagttcctcctacatctggttttcttctgcagcagcctagacctaagcacttgccatctttatttttctttaacaaagtatgagatgtggcactgcaattgtgaaaagaaacatggccctcagggaaagctaattattagctttcatatcttttctgccgtggattgtaatcctcaagaggctagggattgtactttacttatttttgtcggcttggtgacacacttgttgggactggcataattctcctgtcttaataggggtaggtrtattttggctcccagattctagctacagtgataaatagacttgttatctgaaagggaacctccctgtggacatcgccaaaaggtttacctgagtttgctgagataatatgccaaattttctggcacctgattaagttccctgacaacctgaatgttcattctgtgagcccctaatgtgggtctc

SEQ ID NO: 183894 - DNA, 509 bp, Homo sapiens
ttaaagaagtgtctactaaatatttcctatgtgccaattgttttgagtgctagagacaaagtagtgtgtccaataaagttcttgtctcatggagcatactctttagtgaagagatgacaggtaataaactttaaacaaacaaaaaagaatggtaatttcatataatgatatgctatgaagtaaatacaactggatgtgagaaaaaaaggaatgaaagggtgactcacaactgagtgtatgggtgccaaagcatagtgcctacttaatgtgtcagcacaggcatatgctacaatgtggatgaatctccctgttccagctactggattcttctctgaggtcccagtgttttggttcttctcaatttgccaccacactctcctgaatttattctctgaaatgtttctgtgttctatgttgggttctgtaccctgaaaggctgatgtctacagaccattaactgggttctctrtcctatggcttctagttggattctgcaagcattggctggt

SEQ ID NO: 183895 - DNA, 498 bp, Homo sapiens
cctcacctcctgagtagctgggactacaggcatgagccatcatgcctggctatatgtttccatttctatttatttaatttaaaaaattctttctttccttawtttttgagacagggtcttgctctgttgtccaggctggagtgcagtggtgtgaatatggctcactgcagcctctatgtcctgggctcatgagatccccctgcctcagcctcctgagtagctggaatcacagtcacaggccaccatgcctggctaatttttaaatttttttgtagagatggaatttcaccatgttgcccaggctggtctgcagctcctggcctcaagcaatcttcccacctcagcctcccaaagtgctgggattacaggcgtgagccactgaacctggcctagaaatatgtttttaaaaagagtgcatagtataattctacttatttaaaagtctacaaaatacaaactaatttatagtgacagaaagcagatccatggtttcctgaa

SEQ ID NO: 183896 - DNA, 498 bp, Homo sapiens
cctcacctcctgagtagctgggactacaggcatgagccatcatgcctggctatatgtttccatttctatttatttaatttaaaaaattctttctttccttaatttttgagacagggtcttgctctgttgtccaggctggagtrcagtggtgtgaatatggctcactgcagcctctatgtcctgggctcatgagatccccctgcctcagcctcctgagtagctggaatcacagtcacaggccaccatgcctggctaatttttaaatttttttgtagagatggaatttcaccatgttgcccaggctggtctgcagctcctggcctcaagcaatcttcccacctcagcctcccaaagtgctgggattacaggcgtgagccactgaacctggcctagaaatatgtttttaaaaagagtgcatagtataattctacttatttaaaagtctacaaaatacaaactaatttatagtgacagaaagcagatccatggtttcctgaa

SEQ ID NO: 183897 - DNA, 498 bp, Homo sapiens
cctcacctcctgagtagctgggactacaggcatgagccatcatgcctggctatatgtttccatttctatttatttaatttaaaaaattctttctttccttaatttttgagacagggtcttgctctgttgtccaggctggagtgcagtggtgtgaatatggctcactgcagcctctatgtcctgggctcatgagatccccctgcctcagcctcctgagtagctggaatcacagwcacaggccaccatgcctggctaatttttaaatttttttgtagagatggaatttcaccatgttgcccaggctggtctgcagctcctggcctcaagcaatcttcccacctcagcctcccaaagtgctgggattacaggcgtgagccactgaacctggcctagaaatatgtttttaaaaagagtgcatagtataattctacttatttaaaagtctacaaaatacaaactaatttatagtgacagaaagcagatccatggtttcctgaa

SEQ ID NO: 183898 - DNA, 537 bp, Homo sapiens
catttccacaataatgataatcgtcaggaaagagacaaaatcaaactacctaaatatccagcaactgggagaatcaagtaaataaactatgacaaaaccatgtgattgaatactgtcaaaccactgaaagaaaaaaactatacaaatatatagatatagctatgggtgatgattcctgatttattaactgaaaaaagtcacaaaacaggaagtgttacctgactctatttttgtaaaaataaaatacacttacaaacaaatttttaaaatatgaaacgatgtacatcctaatgttaaaaaagagttatttaacatttgattggattgttggttataaattattatatgtaaatgattatatgatggtttataatatgaattgggtatctggttatagackatttttgtattttcaaaaaataatatagtgtaaaacctaattatatattcatatatatattttacaaagaacatgtatatttttagtcagaacaaaagtttctaaacctaaggcgtaatacagtaacagtgagtcaa

SEQ ID NO: 183899 - DNA, 544 bp, Homo sapiens
taatgggttgtatttatgcctctttgtctcttcttaattctacacatattaaaaattactaaagccatattggatttcaagaaaaaaaccaaaggagatttttcagagcacctagcagccatggcaacatgcctttacaaggggcatgtactctgttaaaaaatattccacttacaggtaatgacagacatttgccaaacagccccaagctaacccaagaaagaatgggcagatggtttgaggtgtgtcaggaataggatttacaaaataagattatggttatgctggaaagtaacagcaatggttgtaaacaaatggaacagacytactttttgccacggggcagaggaagaaaggggttttgcattgctgcttgtgaactagtgttggctcacttagatacacagctctctgggattttatgtatgttgttaggcacttgtataagacacatgactgggcctccaattgagtttcttctgatctgaagcagggaaacttcattctagttctagaagcccctgctggtgttggccctgtcttg

SEQ ID NO: 183900 - DNA, 596 bp, Homo sapiens
cctgtcttggttgtgtctggcaaatgaatctgcatccttctccacgtgaatttaactatcataccagttacgaactatcagttgagaagacactggagagaaccagcctgtttattcctgaatgtatatttttgactgtgggaattagagttataacagaggaaggtacagaacacctcccaatatgattgatctatttgctcatcagcccaaatcctggaccttgaagtggtaatgaatgagtctgcctctgccctgaatttaaaaatctcagctctctcttttccaattaaattaagatttagaaagatagtgcttcctctcttgggagaatttgggcattttccaagkgaaaagagagagggttgtcaaaggggatttgttgacaatgacatgagaagaaggtgatgacaaagaaagactgaaggtctcagactttgggatggggtcgaagctctctcacctggttaggaactgtcaccatgcaagtgaagggtggaatttggcttttagaatatatttccattagctctggagtttgacagctagctcccaatggcagcaaagcatgtgaggcctccaagttggcaaggctg

SEQ ID NO: 183901 - DNA, 637 bp, Homo sapiens
ttacagcactaatggcttaaatatcagcaatatctataatacaggctgataagccttaggtttctaggcaattcagcccacagatatgtactgatatactgcacagtaattacccacttgggttcagttgtcctaccagtagagttagtcaaactctggattctcagtgaaattatctagaagtcttataccttatctgttaacccagtgttttttggactgtgggttgcaacccactagtagattatgcagtcaatttaatgggtcatggccagtgtttggggratctatgatattaaatagaatagagtcagcagaataacgtagaatactaaatatcaaagtggattattcataataaaggttagtattgattgaaattttactccatattttatccactctaagacatacttttttttactatagatctttgaaatcaggatatcttataattataataggtagtttttctttctcagtcagtgataaaacaatggtatatcttgcaatcatggcaacttagatttggtatatgagcacattgggttttgatgtaaaatatatctctttttgtggtcatggtcaaaagagcttgaagaagacagatttgattcagtctttccaggtttccctc

SEQ ID NO: 183902 - DNA, 637 bp, Homo sapiens
ttacagcactaatggcttaaatatcagcaatatctataatacaggctgataagccttaggtttctaggcaattcagcccacagatatgtactgatatactgcacagtaattacccacttgggttcagttgtcctaccagtagagttagtcaaactctggattctcagtgaaattatctagaagtcttataccttatctgttaacccagtgttttttggactgtgggttgcaacccactagtagattatgcagtcaatttaatgggtcatggccagtgtttggggaatctatgatattaaatagaatagagtcagcagaataacgtagaatactaaatatcaaagtggattattcataataaaggttagtattgattgaaattttactccatatttyatccactctaagacatacttttttttactatagatctttgaaatcaggatatcttataattataataggtagtttttctttctcagtcagtgataaaacaatggtatatcttgcaatcatggcaacttagatttggtatatgagcacattgggttttgatgtaaaatatatctctttttgtggtcatggtcaaaagagcttgaagaagacagatttgattcagtctttccaggtttccctc

SEQ ID NO: 183903 - DNA, 402 bp, Homo sapiens
ttaaaaccatatttgataatatgaaaatagctctaaccatgatggttttcatcaattcagggcctttcaagtattctcctggcattctgagactaaaggtgtcatgatcaccctaagccatttggaaattgtcatggcaaattgtgcagtaagtacttccttgtgaatttatgaatctcatcagatttcggaaygtgctgatctcagaggtgagggcagggatccgagcctgactgcttcactgctcatccgtggcttccttttatcttcctttccagtgcagagctccaaagagtttttcaaagcccattagactgcccgatgacattcttaacagaagaaggaacagtgtttgtttagttgaattaggggaagtctcctgtggccagtgaagttttattg

SEQ ID NO: 183904 - DNA, 495 bp, Homo sapiens
aaaatgtcacagtgatcatttttacctccatcttaattatgaacattttaagctaagggagctaagggagacagactcataagtatcaaattggttttctttgttcctatacccagattttcatatggtcaaaatacccatggaatatatgagtggcagcagtaaacaatccttgaagttcttgcttgtttaacttgactgttggtgatgcccaatgaggccctgtctgctccaagcaaattacataaaaaagatgtgaataaaaactcatcaaatactaacagaggtgagatctgggaggagtggaattacatttatggtctgtttgttttctttttcttacttttctgaatttttatacagtgagtatatgtgtgtatgtgtgtgtgtattttaagtttttgtttacaaaagagataagtacatatgtttgtttttttaaaaaatcaagctatawagaagtgtatagagtaaaatacataagttttttttatt

SEQ ID NO: 183905 - DNA, 603 bp, Homo sapiens
gtatgatgatggtttgcttattcattagaaatatttattgagcacttattatatgacaggctctcttctagatactagaaacatagtggtgarcaaaactggcaaaaatctctgccctcataaagcttacaatcaagtctagaagactgatgctaaataatggcacactagatagcaatgagtgcaaagagctttccaggtaagaacaatggcctgagacagaagtgtgcttggagtatttagaaatagcgaggtggagtgtgatttgaactcagtgtgggggagctggaggagatcatgtcagccatgaaggacacagtaaatagtaaggacttaggcttttactaggagtgataggaagccgttggaaagtttaaatagagacgtcatgtgatcggagttgtgtaatttttctaaacaatttttaaaattgagatataacttatacatagtaaagtgcacaaatcttacatgtatatctcaataaatttttatatatgtatccactcatgtaaccaacacttggttcaatatatagaatattgaactcgaaggtttcttgctcctttcagtccataacccatctccttaatgagataatca

SEQ ID NO: 183906 - DNA, 561 bp, Homo sapiens
aggagagaaggtgggcgggtgacacaaatttgaggctcatcagcatatagattccatttaaagccatgaggctaggcacagtctccagagaaataagtagatatataaaaacaagaagttgaggtgttaagccttggtaagacatttattaataacttaattatatgytttataaaggtgaatttaacttaataaaagtcatcttataggcagcctaatggggaatggtggtggggagaatccctatttacccagaatccattaatttttatgtaaatttagatactgcatactgaccagttttctgaacactgaaacaccaagttcccatccttgcgtgagactataattataatttaatcctaacattccaaaataatgaaaaccaacctagatcaatgtaacaaattttgaagacattttgtctaaaactattttgtgtgtcatgaggatacacacataaaaaaagagtaaaaatcatttatggttactgatgacattggagcttataaaatagcacaaactcaattttttttgcctttaagtttttttttattattt

SEQ ID NO: 183907 - DNA, 561 bp, Homo sapiens
aggagagaaggtgggcgggtgacacaaatttgaggctcatcagcatatagattccatttaaagccatgaggctaggcacagtctccagagaaataagtagatatataaaaacaagaagttgaggtgttaagccttggtaagacatttattaataacttaattatatgttttataaaggtgaatttaacttaataaaagtcatcttataggcagcctaatggggaatggtggtggggagaatccctatttacccagaatccattaatttttatgtaaatttagatactgcatactgaccagttttctgaacactgaaacaccaagttcccatccttgcgtgagactataattataatttaatcctaacattccaaaataatgaaaaccaacctagatcaatgtaacaaattttgaagacattttgtctaaaactattttgtgtgtcatgaggatacacacataaaaaaagagtaaaaatcatttatggttactgatgacattggagcttataaaatrgcacaaactcaattttttttgcctttaagtttttttttattattt

SEQ ID NO: 183908 - DNA, 618 bp, Homo sapiens
ggagtctggctctgctgcttaggctggactgcagtggcacaatcatagctcactgcagccttgactcctgagctcaagcaatcctcctgcttcagtctctcgagaagctagcacaccaccacacctacctaattaaaaaaatttttttttrgagatgaagtattgctatgttgctcaggctggtcttgaattcttggcttcaagtgatcctcctgcctcagcctcctgagtagccaggattataggtgttagctactgcacctgattattattggtgtcttgatagtgattgcaatgaatctatcacttgctttgggtagcatggtcactttaacaatattgattcttctgttccaggggcatgagatgtttttctatttgtttctatcctcttcaatctctttcatcagtgttttgtagttttccttatagagaggtcttttacctctttgcttaaatttattcctaggtattttattattttgtagctattgtaaatgtgattgccttcttgataacttttacagctactttgttgttcgttcatgtgtagaaacactactgatttttgtatatcaatttttgtatcctgcaactttattgaattcagttattgat

SEQ ID NO: 183909 - DNA, 583 bp, Homo sapiens
tgatacgtaaggacttactcctatcattttattgattattttctggttgttttgtgtatcscttgttccttatttcccctcttcttgtttatctttgtagttgggcagttttctgtatttataaggtttgattccattctctttctcttttgtgtatctgtttaaacagtgagttttatagttttgcatgttttcatgatggtagttactgtcttttcacttccagacataagacttccttgagcatttattgtaaggctgatctagtggtaatgaattcacgtagtttttgcttgtctgtggaatcttttgtttctgaagaatagctttgctgggtgttatattcttggttagcagttttgttttattactttgattatatcatgtcactctagtgtattataccatgctctattctgccgcagactttagcagaggcttaattcttttttttttaattgagaaagtaccactgtatctctggggtctttatctgtaagcactagtgagttatgaatgttaaaatgaaattagagttacagccttcattttcttctgagaagtccattattagtcaaatgta

SEQ ID NO: 183910 - DNA, 583 bp, Homo sapiens
tgatacgtaaggacttactcctatcattttattgattattttctggttgttttgtgtatcccttgttccttatttcccctcttcttgtttatctttgtagttgggcagttttctgtatttataaggtttgattccattctctttctcttttgtgtatctgtttaamcagtgagttttatagttttgcatgttttcatgatggtagttactgtcttttcacttccagacataagacttccttgagcatttattgtaaggctgatctagtggtaatgaattcacgtagtttttgcttgtctgtggaatcttttgtttctgaagaatagctttgctgggtgttatattcttggttagcagttttgttttattactttgattatatcatgtcactctagtgtattataccatgctctattctgccgcagactttagcagaggcttaattcttttttttttaattgagaaagtaccactgtatctctggggtctttatctgtaagcactagtgagttatgaatgttaaaatgaaattagagttacagccttcattttcttctgagaagtccattattagtcaaatgta

SEQ ID NO: 183911 - DNA, 512 bp, Homo sapiens
cccccagggagaatcacacggtccacaagcttggtggtgaatgtggttgagaggagcacctggctgaccttctcaccacagccctggcacccagaaaaccaagtggctcccaaagtggagttctcggccagcagtgttagttaactagcacttcttacaaatacacactgtccagccccgcccagaccaatggacacagaagctgggattgggtyggggaggctcccagccatctgtgcttaccaagccctccaggggagcctgctgcagatgcagatcgaggccccagcctcatcctcccccaccaccctcgacccccttccatgggaaccagcttcgccctgcgctgtctggccacacacctggcactgcgcactctcctgccgcagtccttttcttcatcttgccttacaggtgcccaggtgtgtctcgtccctcttacagaacacaggctcagaaggccacagagagcatcttgtttctctcccagctcaaagcctcacatgctcaac

SEQ ID NO: 183912 - DNA, 512 bp, Homo sapiens
cccccagggagaatcacacggtccacaagcttggtggtgaatgtggttgagaggagcacctggctgaccttctcaccacagccctggcacccagaaaaccaagtggctcccaaagtggagttctcggccagcagtgttagttaactagcacttcttacaaatacacactgtccagccccgcccagaccaatggacacagaagctgggattgggtcggggaggcycccagccatctgtgcttaccaagccctccaggggagcctgctgcagatgcagatcgaggccccagcctcatcctcccccaccaccctcgacccccttccatgggaaccagcttcgccctgcgctgtctggccacacacctggcactgcgcactctcctgccgcagtccttttcttcatcttgccttacaggtgcccaggtgtgtctcgtccctcttacagaacacaggctcagaaggccacagagagcatcttgtttctctcccagctcaaagcctcacatgctcaac

SEQ ID NO: 183913 - DNA, 512 bp, Homo sapiens
cccccagggagaatcacacggtccacaagcttggtggtgaatgtggttgagaggagcacctggctgaccttctcaccacagccctggcacccagaaaaccaagtggctcccaaagtggagttctcggccagcagtgttagttaactagcacttcttacaaatacacactgtccagccccgcccagaccaatggacacagaagctgggattgggtcggggaggctcccagccatctgtgcttaccaagccctccaggggagcctgctgcagatgcagatcgaggccccagcctcatcctcccccaccaccctcgacccccttccatgggaaccagcttcgccctgcgctgtctggccacacacctggcactgcgcactctcctgccscagtccttttcttcatcttgccttacaggtgcccaggtgtgtctcgtccctcttacagaacacaggctcagaaggccacagagagcatcttgtttctctcccagctcaaagcctcacatgctcaac

SEQ ID NO: 183914 - DNA, 601 bp, Homo sapiens
gaattcatgattcatgtgattacgaatctaacatagcatcagcactgtctacttttccctgtttgaaaagcagttaggtggccaagttataatgggcccccagcactgctgtgcttcctaaagggagcttgcccatggtaggaccagtttcccaacactgccaaacaacggggccaatttccctgcaaagagagaccagcattcaaaaagttgcagtgatccgtcctccagcacccsctccaccctccttctgcagttgcccggagagatctgaatgtcttttcctaaatctctgtaatccaataagcttttgtgtttagcagcttgttttgaaggctgtgcggcaccccaacccaggtctccgcaaggccctcggcaggcaggtgagcgccccggggcctgagcgctacgccgggcgagaggcccgcgcagccccaaccagaacgtaatttgtaattaactgtcatttacttctgtctgcattgacttgttgttcaaaagacaatgcaactgggctggtcactcatttccctttgttgtggatataatgtctctgagatctggttgttttcataatgtttagaaactcagggcttactct

SEQ ID NO: 183915 - DNA, 562 bp, Homo sapiens
aaagcagttaggtggccaagttataatgggcccccagcactgctgtgcttcctaaagggagcttgcccatggtaggaccagtttcccaacactgccaaacaacggggccaatttccctgcaaagagagaccagcattcaaaaagttgcagtgatccgtcctccagcacccgctccaccctccttctgcagttgcccggagagatctgaatgtcttttcctaaatctctgtaatccaataagcttttgtgtttagcagcttgttttgaaggctgtgcggcaccccaacccaggtctccgcaaggccctcggcaggcaggtgagcgccccggggcctgagcgctacgccgggcgagaggcccgcgcagccccaaccagaacgtaatttgtaattaactgtcatttacttctgtctgcattgacttgttgttcaaaagacaatgcaactgggctggtcactcatttccctttgytgtggatataatgtctctgagatctggttgttttcataatgtttagaaactcagggcttactctcttgaaaccagaaggagaaggggaatt

SEQ ID NO: 183916 - DNA, 611 bp, Homo sapiens
ttaaaccagtgtttctcaaccttggcactattgacatttggggccagataattctttgttgtgcatgtttatgtgctgcattatagaatatttggcagcaattctcacctctgcccattaaatgccagtagcaatatccacttgtgacaacaaattatatccacagatattgccagttgtcatctaggatgcaaaactgctgctggtagagaatagatgggctaaaagaataaaaaaagacctaactcttgacacttttcctccacttcaagcagaaattatactttcttgttctttgcaatcataatatattctcccttggcataaaagataaaacgtatgtacaaatgatacatttggttttgtttgtttgtgttttagagatgtggtctcactatgttgcctaggctggccttgaattccagggcttaagcgagcctcccacctcagcctcacaagtagctacaactacaggcatataccactgccctggctaatttttttaaattattttattttaatgttcrtggaaaatattttgaaaagaaaattataagaataaatatattaagttattactaaaatgactccatttgcttctgaatgtttgt

SEQ ID NO: 183917 - DNA, 574 bp, Homo sapiens
attttgatgtttgtttacaatgtrgaatgattatttttatctttaaggtatttattttagaaacagggtcttgctgtattgtctagcctgtagagcagtgactattcacaagcatcaccatcacccactacaacctcaaactcctggcctcaagtgatcctcctgcctcagcctccagagtagctgggactacaagagcataacatcatgccctgctacactgtggaattattgaatcatactaattaataaattcatcacctcacatacttatcttttttgtgtgtagaaaacatttaaaatctaatattttagcaattttgatatatgcaatgcattattctttatgatagtcactattctgtgtaatagattactacagcttatttctcctaactgaaaccctgtactctctggtcaacatctcttttctcattcactctcttgctccagctgctggaatccacacttcacataaacaggactatgctttgtttccttctgcatttctcatgcatagaaacactgcctagcatatagcagaggctcgttaatcacgtttaaaaatttgtta

SEQ ID NO: 183918 - DNA, 467 bp, Homo sapiens
tctcacagcagcgaggtgttcacgcctcaytgccccacttctctccttctctctgcagccctggccacgctttcccatcacctcctccaggtgggtgcagcagcagaaggaaaggctgcttgaagttggttcaaaagaaaagaggaggggaggaatgaatttctggcgttgagacctgtaactgttttcaaggacataggatggttgctggaggggagaaggagtatcaacagaagtctatttggaatttcttttttttgtgtgggaagatgcatgtaaaataaaattttccattttaattattttttaggtgtacaaatttattagcaataacgaccttcataatattgtgtacccatcattagtatttccaaaactttttagtcatcccaaatggaaattctgaactcattaaataatccctttcagctgcctctccccagtccctggaaacctctaatctactt

SEQ ID NO: 183919 - DNA, 469 bp, Homo sapiens
tttcctgccgctctcacagcagcgaggtgttcacgcctcattgccccacttctctccttctctctgcagccctggccacgctttcccatcacctcctccaggtgggtgcagcagcagaaggaaaggctgcttgaagttggttcaaaagaaaagaggaggggaggaatgaatttctggcgttgagacctgtaactgttttcaaggacataggatggttgctggaggggagaaggagtatcaacagaagtctatttggaatttcttttttttgtgtgggaagatgcaygtaaaataaaattttccattttaattattttttaggtgtacaaatttattagcaataacgaccttcataatattgtgtacccatcattagtatttccaaaactttttagtcatcccaaatggaaattctgaactcattaaataatccctttcagctgcctctccccagtccctggaaacctct

SEQ ID NO: 183920 - DNA, 467 bp, Homo sapiens
tctcacagcagcgaggtgttcacgcctcattgccccacttctctccttctctctgcagccctggccacgctttcccatcacctcctccaggtgggtgcagcagcagaaggaaaggctgcttgaagttggttcaaaagaaaagaggaggggaggaatgaatttctggcgttgagacctgtaactgttttcaaggacataggatggttgctggaggggagaaggagtatcaacagaagtctatttggaatttcttttttttgtgtgggaagatgcatgtaaaataaaattttccattttaattattttttaggtgtacaaatttattagcaataacgaccttcataatattgtgtacccatcattagtatttccaaaactttttartcatcccaaatggaaattctgaactcattaaataatccctttcagctgcctctccccagtccctggaaacctctaatctactt

SEQ ID NO: 183921 - DNA, 362 bp, Homo sapiens
gggccatgggcacactgaacacagttgctgtgtttataaaaagcacgttagaataaacagtgggaaaacacttttgaagccaaaagtagcttttagtttcttaaccaaatctttagaacttgaataaattccaggaagtgctattttcaagtcttgttgcttagcacagtcatagcaataaagaaagcaaacaagatgtctgttgggtctaagagaactttaagagtacacttaacatgttgtgatgttttctytacttggatgaaaccagaaagcgactgatttattttttgtattctaactatagtgaatttaaaaacctgccatcatatgcaggtgcagttctactaagaaccttagaa

SEQ ID NO: 183922 - DNA, 581 bp, Homo sapiens
tctgaattccctcaagacaacttcctccatttgctttatgatcccggtggtgtgccggagccagtgcacactggcttatgcgagcttattgttaaatttgcaggaattttgtgagccgcttgtttgatactggccatgttaggagcaatcacacatggaaattgtcaaattctactaatcaaggttttaaatttatttttccctcttcctggagtgctggttgtttaacatttaccakcatatctccgtttctaaccaactcatctttgcttctagtgcaactttgtgggttctttcccttggaatctgggagtaagcatgatctgtgatcatttctatatctctctggaaagtctctaattttgtcgtaaattaccagccctttctgctaatgagcgagtaagcaaatgactttacattgatacagtgaacctcctcagtctctgtataagttttctattgctgctgtaacaaattaccacaaacatagcaacttaacacaaatttattgtcttaaagtttctggagattaggagtcctcatgagggcttaatgaggttctctgcttagggacttacaaa

SEQ ID NO: 183923 - DNA, 581 bp, Homo sapiens
tctgaattccctcaagacaacttcctccatttgctttatgatcccggtggtgtgccggagccagtgcacactggcttatgcgagcttattgttaaatttgcaggaattttgtgagccgcttgtttgatactggccatgttaggagcaatcacacatggaaattgtcaaattctactaatcaaggttttaaatttatttttccctcttcctggagtgctggttgtttaacatttaccatcatatctccgtttctaaccaactcatctttgcttctagtgcaactttgtgggttctttcccttggaatctgggagtaagcatgatctgtgatcatttctatatctctctggaaagtctctaattttgtcgtaaattaccagccctttctgctaatgagcgagtaagcaaatgactttacattgatacagtgaacctcctcagtctctgtataagttttctattgctgctgtaacamattaccacaaacatagcaacttaacacaaatttattgtcttaaagtttctggagattaggagtcctcatgagggcttaatgaggttctctgcttagggacttacaaa

SEQ ID NO: 183924 - DNA, 582 bp, Homo sapiens
tctgcacacaaaaggcagccatcccgctgcctrgcccagctagtgagtgaggccacccactgggcacccactcagatgcactggcagatgttaggtttcaggactgaatttggcctcactgtactcagtcctcctcacagccctttggagtcacctaatcttgctaatatgtctgtaaatgctttagatgaggagtccctgaacagacacatgcaccactaacttcatggatcagaaagtcctctgaaactttacctttttaaccctgttacatggagtcttcccagcagacgggtgccccagcctttccgctgttctggcaaaacaggcccacagtcgatatgtcagtttgatgtctcaagagctaccattaattatgtatccctttggttagaaatgcaaatgacccttggcagtcatttagatctccatgtgaattcgcttatcacgcacattccaccccaaacagagctggccaagccaagcgtgatgcttgatgagggctgggttgtttccccctgcactgcccaagtccatgtctggttagcctgtgcctgacttctacctcacaaggatacacag

SEQ ID NO: 183925 - DNA, 556 bp, Homo sapiens
gaagtaaaagatcacaaaattcaatagcgaagattcaaggtaatgactattttawggaggacatatctttttcagactggcatatggtccaacaaggtgctggcctcattactgacaaggtgtgaaactatttagagcagagaaacatttagggctctacaataagagcgctgggtacattagcgaaaacaaaacaatacctttaacaaaacagtgtatctcaaataataagttttatggctctttgtttttctgtgcttttccgtgcaagtatgatagcatacagaaattgcttaactaaagaaatgcaacagaatcttaaactaatgggtatggtgtgcaatgctttaacttaatgatgtggcactttttggactatcccactttatatgttaatttttgtaatccttataaatggaaaatctcatatagactatgcaacatcattgtgcagcataaaaattatatccaaatgatttttctgatgacatgcatccattagaaggagcccataaaaatgttataaacatacttggatctgctaggtgatgatttt

SEQ ID NO: 183926 - DNA, 594 bp, Homo sapiens
ttgccatatggaaccagccctggaacaggcccagatcaaacagaagtagctaaagatcctgcacctcttgaaccagccaacacagccagtgmgaagaccagtcagccttaatgatttctttagagtctatgcacttaggtctctgtattggactttctctaaagtttttgtttgaagaaagaattctgtgactaaaatgagttggaaatataccgtgatgggactttcttgattttttttaccctatcaaaaccttcctgttcttaattgccttttttctcggagctctactaggtaattggctaagtaaaccatactatgctaaagccaatgtaagggataaaacataatatgtttgtgcttttctggataacatttgcatttatactttagtcttcaacctcctaaccaaagagagttaagcatgaattttaggttccatggcagggctacttggcaaaatagttttgccgtaggcatgaagtacagaagagacttctcagtgcttgaaatcataccacccagcaatcaccaagacaatgattctccaaatgtggtacccataccagcaacatcagcattacctgggaattt

SEQ ID NO: 183927 - DNA, 544 bp, Homo sapiens
ggaaatggtgtcacatactacaacatggatgaatctcaaagacattatgctaagtgaaattaaccagtcaaaaaagaagaaatattrcataaatctatgcatataaagaaatcaaatttttaaaacagaaagaaagtagttgccaagagctggggggagtggggagggaaaattagcatttaatgagtatagagttttagtattgagagagaaaaaattcttgagttctgttgcaaggaaatgtgaatatatttaacactactgaagtgtacacataaaatatttgatatgataaatttaatattatatggtttttacaacaataaaaaattcttttaacgtgactggttttactgggctgggggaattatccctttttaagagaggaaaacaaacacagggagaggaaatcatttaaatgatttaactacaattgatgatacaattgatgaattttagttataaggcagcaaaaaattgtaacatatatggatagtcagttcatactgcataaaataaagattttagtatttctaaagaatta

SEQ ID NO: 183928 - DNA, 544 bp, Homo sapiens
ggaaatggtgtcacatactacaacatggatgaatctcaaagacattatgctaagtgaaattaaccagtcaaaaaagaagaaatattgcataaatctatgcatataaagaaatcaaatttttaaaacagaaagaaagtagttgccaagagctggggggagtggggagggaaaattagcatttaatgagtatagagttttagtattgagagagaaaaaattcttgagttctgttgcaaggaaatgtgaatatatttaacactactgaagtgtacacataaaatatttgatatgataaatttaatmttatatggtttttacaacaataaaaaattcttttaacgtgactggttttactgggctgggggaattatccctttttaagagaggaaaacaaacacagggagaggaaatcatttaaatgatttaactacaattgatgatacaattgatgaattttagttataaggcagcaaaaaattgtaacatatatggatagtcagttcatactgcataaaataaagattttagtatttctaaagaatta

SEQ ID NO: 183929 - DNA, 528 bp, Homo sapiens
gttctgttgcaaggaaatgtgaatatatttaacactactgaagtgtacacataaaatatttgatatgataaatttaatattatatggtttttacaacaataaaaaattcttttaacgtgactggttttactgggctgggggaattatccctttttaagagaggaaaacaaacacagggagaggaaatcatttaaatgatttaactacaattgakgatacaattgatgaattttagttataaggcagcaaaaaattgtaacatatatggatagtcagttcatactgcataaaataaagattttagtatttctaaagaattaagttacaaaatcaacttcattaatttaattatcagctcaaatgccacctcctcagagagattgtccttaacatccattttgaagcagccccacttactacactatcccactctattttattttcatctggatacttaaagtggattatttatttatttttagtttataccctcaccagcccgtaagttccatgtaagtagaaaccttg

SEQ ID NO: 183930 - DNA, 602 bp, Homo sapiens
atgcaactttctatctcaacatagtatcaaactcagaatgtacagtagggtagaagtaaataaatagtttaatgggtgtttgaatgagtaaaagaattcgattaaggatcagctcaataaaaacatccttctgtaaaatcaacagaaagaacaagtctgcacatctaacgcctactggaattaattaaatcctaaaacaaattaacaaatttaactagcacatacatttatttatatgtgtgttattttgtaccacatttcaatgagctattataagaacttcatagaaaaagctaccatttttgtttccttgattctagtgaataaaccatttctgatctcaattagwggttacttggcagacctctgcatctgtaacttaagtgttctaagcacacaactggggaagggtgggatgaagaatcaaggaaaaacatgtattcttcaaagtagaaaataatttatctgaaaagagaaatagcaggaactggtcacttggctcagaaaagctgattctgaaatttcatatataatgatgggtaactctaggaaaaacagaaaggaaagaggaaattaaagtagccagatgtcataaaaattcc

SEQ ID NO: 183931 - DNA, 576 bp, Homo sapiens
gtgcttatttaatcttggcaaaaaaaaaaaaaagaacaaaagaaaaaaaaacagacaattgaagctgagaatgatatttcccatacttaaagaattaactctgataagaagasagaaaaactaatgattcaaaaggagaatttcctctttattctctttctacagatgattttctgtatcatttcaagctacattagtaaacttaggagtatatagaagaacatatttgaagatctgtttagcccagtggttatcagtttagaatgaaattttaaaaagaaattatagacattcagaatcagaaattttatgcacatcattattttgattatgtagaagatagtcaattacttattaaacttagccacattgagattcattatctgcattaacaacattataggtatcttaaaaatgtccatcattcattacatagataactaattggtatgcagtcacgcaataaaattccctgagctggttcaactggggcttcaaaagagcatgaatactgtaactttttaaaaatgagcaatgatatgacaattttgcagtagtatacatagtactgttcaa

SEQ ID NO: 183932 - DNA, 508 bp, Homo sapiens
taaaagaccacatgaatagcttctgtttttgaatccttgttgtgatcttcctaacaccatatttactttcaaaatataattgcactattaatggaaacatattttctctctagagtttcaaccatttgtaattgcctattaaagttaatcttagagagtaataatgacagtggtctagggttttcatgcgctttttctttttctctttctttyttttttttttttggcggagtctagctctgtctcccaggctggagtgcagtgacgtgatctcggctcacagcaacctctgcttcccgggctcaagcgattctcctgcctcagcctcccgagtagccaggattacaggcgccctccaccatgcccaggtaatttttgtctttttaatagaattggggtttcactgtgttggccagattcatctcaaactcctgacctcatgatcttcccgcctcggcctcccaaagtgctgggattacatcatgtgctccttcatatgagcaaaatt

SEQ ID NO: 183933 - DNA, 634 bp, Homo sapiens
aatatgatttttctttaatttttcaataaattaaaatgaaatctactgcagttgaggtagtctatggtgttaaggttgtggatttgaattattaattttatgaaactgtgtaatgaattcatgtgaataaaattataactgaaaaagggatatcttacaatttattcaattgtgaagttttactggagacagaaagcagggctgtatactttgcactagagctcatgcaactttgcaaataggaatgaagaaataagacaktgatagttacccagagtaaggaccaaaagggggagggaagagacttcaatgataatatgaagcaattattaattagtatattataaatatcatatgtttttactaattttaatacccaagatgtttccaagagaagtcctcataaagtttaatacatttatatgcctgctctattttctagaatcacattaaacgatggtatgtgagcatgattattgtatttataatcaagtaataaaataaatgattcctttaatgatgctttgtatttttatctcaaatttggttactacctctacaaaattttatatatgccaatacttataatgttgttaaataccattttcctcaaattatatatacttcaatgatg

SEQ ID NO: 183934 - DNA, 617 bp, Homo sapiens
gagtgtcagctggggagacaaagaggtacacaggaagaggtggtacctcttttccctcttgatactttcattaagtataagacacccctagacccacagccaccaacttgtgaccctgtaaatggctaagttggctcatggaggatggtggaacagggagagaaaaagaacctaggtccttaatgagctgcrcaaataacccattctaaagctgtcctacctcaggatttattttccttcctacttaaatcaattgagttgggtttttctgttactcaaagtagaaaacacatcaaatgaaaaagaagtcgaaatgtaaataaaaacccgatgcattatttgaatggcttcaggcacacagcatgggaggcaaatgctattaatatgggcatcatccccactttccatgtcgagatgcgttttgtacattatttgccaagaaccccaagctggtcagcagttgaagtctcctgactccaacccagtgctgagacatatggtaattttcagttatggagaacatttaattaactaagaccctccatttcctaattgcagtaaataaaaacagtgggcatataacaactgacatgaacaggatgctttaaagctgacaa

SEQ ID NO: 183935 - DNA, 583 bp, Homo sapiens
ctctgtgcaccatccaactgcactgactgcgctcagaccccggcccaggtctccccactattggctgcactcttatcccggaaggctgtgggtcactgtctccatggagccagtgcccatcctacctgctcatttctgggacacacrctccctgacttcctggagagttcaaagcaacattcaacattttgtgaaaaggtttttgtttttttttttctttttaatgcaggccctgacgcatttcttggaacccaatggcaaccttggccaagaaatataacccaaataagagcatgtagagaccagtggggtgcgttagaatgcacaggattttccaaccctggttgcctgatctgccaagacactgtggcttattcaccaagcccaacttgtacaccttggaagccctcaccacagccacaggagagaaatgggccaaatgcagagtgagtgaggccaatcaggagagagagtgttggcaggtcttgctgatttagaggagaggtctccccttacagattatttccagtcctggctctgctccggctgaagcagagagattaaagatttgttaaaaaaacaa

SEQ ID NO: 183936 - DNA, 583 bp, Homo sapiens
ctctgtgcaccatccaactgcactgactgcgctcagaccccggcccaggtctccccactattggctgcactcttatcccggaaggctgtgggtcactgtctccatggagccagtgcccatcctacctgctcatttctgggacacacactccctgacttcctggagagttcaaagcaacattcaacattttgtgaaaaggtttttgtttttttttttctttttaatgcaggccctgacgcatttcttggaacccaatggcaaccttggccaagaaatataacccaaataagagcatgtagagaccagtggggtgcgttagaatgcacaggattttccaaccctggttgcctgatctgccaagacactgtggcttattcaccaagcccaacttgtacaccttggaagccctcaccacagccacaggagagaaatgggccaaatgcagagtgagtgaggccaatcaggagagagagtgttggcaggtcttgctgatttagaggagaggtctccccttacagattatttccagtcctggctctgctccrgctgaagcagagagattaaagatttgttaaaaaaacaa

SEQ ID NO: 183937 - DNA, 573 bp, Homo sapiens
tcagcctcccaaagggctaggatgacaggtgtgagccaccatgcctggccaaaagtgagtttcttatagatcatatacaatacaatttgatcatgtgtgtgattttttggtttgttcgtttgttttaaatccactctgaaatctctatcctttagttggtgtgtccagaacatttacatttaatgaaattataaatatrttagcacttttcagcaattttactttttgttttttttctgtttgttctctttggtttaatgttctcttttctttttcctgcctttcaatgggttacttaaacactttttggagtatcattttaattcatctgcagtgtttttgagtctatttctttatatagcttgcttacaggttgctctaggtattttattaaatatgcataacttataagcctaatggtgttatcattttaccagttcaaatgagttgtagaaatttaaccttccatctgttctgataccttttcccatttataatacaattattttgcatttctgctatatacatttaaaaccatattcagtgttatattatttgcttaagtcctcaaac

SEQ ID NO: 183938 - DNA, 574 bp, Homo sapiens
tcagcctcccaaagggctaggatgacaggtgtgagccaccatgcctggccaaaagtgagtttcttatagatcatatacaatacaatttgatcatgtgtgtgattttttggtttgttcgtttgttttaaatccactctgaaatctctatcctttagttggtgtgtccagaacatttacatttaatgaaattataaatatgttagcacttttcagcaattttactttttgttttttttctgtttgttctctttggtttaatgttctcttttctttttcctgcctttcaatgggttacttaaacactttttggagtatcattttaattcatctgyagtgtttttgagtctatttctttatatagcttgcttacaggttgctctaggtattttattaaatatgcataacttataagcctaatggtgttatcattttaccagttcaaatgagttgtagaaatttaaccttccatctgttctgataccttttcccatttataatacaattattttgcatttctgctatatacatttaaaaccatattcagtgttatattatttgcttaagtcctcaaaca

SEQ ID NO: 183939 - DNA, 210 bp, Homo sapiens
tggcctcttaaaatgaagaatatttccctcattttctrttatctggccccatgtccaagttccccatttctccagaaggtggattttataaccatagccataaataaaaaccttatggaacctctaaggtcatctaacaatttgaattaaaatccaaaccccgggaatacagaattgtttttcaaagtttgctttgtttttaagtttagt

SEQ ID NO: 183940 - DNA, 290 bp, Homo sapiens
aagcttatctgttatttggtctggtttctatttacctrttcaagtccagcacagtttttgtagttgctgaaaaatacctcactgatatcagtttgcataaataaaagttttcatctaattttcttttcagtaggttgccaggtttatgtgtatttgccataggacctcctcatttagccctacccacccatccacccacctggctccttcttgtggtacaggggtgtagtgagtgattctgtgaattttttaggagaattttatctctgtagcaggtgtgtgggaagtgt

SEQ ID NO: 183941 - DNA, 572 bp, Homo sapiens
tcatgtaaaaactccaatctcaaaaaattttagggtctgtagcagcacactaagaagcattttccctggaagttgccaatctaagcagctgtggccaatcataatccagagcaaatccattggccacatttatttatttcttccaggttgacaggtaatggggaaagcaaatgcactctggaaacaaygaccttcgaaaactgcctttgataataccagtgtcttgggataacagccatctatactggctttgcagcctctccacctctgcttggctgagtcagatgccttcgcttggcttcagccagtaggagatggcaaaatctgggggcacttgtgacctagtgccacttgggtgccgcctactgctctctaccagcctttgctgtagggaaggaggcatctgagcgcagaaatttcatggacttctggtgggaaacctctcttccaacaatcattgtttgactctggcatcataaatcacaaatacatttctatattacaaacagaagtaagtaaaatgcagtttcatgattcctagaataatataatataatataaaatgatttata

SEQ ID NO: 183942 - DNA, 338 bp, Homo sapiens
taagcgtgagccactgcgcccggcctatttcttatggttgttctattttcatgtacaccccaacaaaaactttattttgctaaggacatttgaagtctgaaataaaaatcyttgatgtctgggaaagatactgtttgtcaagcgaaaaatagaaatgttatgctttattttttccctcagccttcgtgtcactcccaacaaacacgaaaacatagacagacacagacacacgctcctgggtggtaaatttcttttctacactcaacatgatgttagaaactgaaagcttattgtctacatggagtgaagtgggggtggaggaatgaggctatctgtgg

SEQ ID NO: 183943 - DNA, 492 bp, Homo sapiens
atgtcattgaaaaaaatactttttttttcagagaagaaaaagccaagagagtttgatactagctaatgcacactaaaagaaatgccaaaggaaatttttcaggcagaagaattaccacaaagaactaaaatttggacctacataaagtaatcatgagctctgagcataactaaaatgaaggcaaaaatatacctttctagttttaattgctctaacatatatattctacagcaaatgttgtcgcattgtagtatgagtttatagtgtatgyaaaaatttaaaaatatgtatgtaaaatatacatacactataaactcatgatacaatatgataaaaatagcattaaaaatgggagggaggatttggaaatatagtgtatttgttttacactatacataaggcagcataatatcatttgaaggcagactatgataaattaaggatgtatattgtgaatcatatgttatagagtaaaaaatattttttaaaaga

SEQ ID NO: 183944 - DNA, 652 bp, Homo sapiens
ctgactaaggtcaatcatttgtcaaagaaccactttactcacttaaactcaataagtgagtttaagactgtctattcaggtcaagtatgaaaagtcccttctggtcactgtccaattctattaggtccaggaaagtagcagatatgagaattgttcagtctagattcaaatgaagctatcatttccccgtatgtaattcaacattcattgtttccattttaatcatttgtatgcattttattttattgttgaattatatataaataacaagatatacattaactagcattttattgactttattttaatgctatgaaacctaaaatctttcaagatttgacttttaaagaattctgcatgaggcctggcacagtggctcacgcctgtaatcccagcaatttgggagaccgaggcggataaatcgcttgagcctaggagttgaagaccagcctgrgcaacatggcgaaacctcatgtcttctaagcgaatcgcttgaaccctggaggcggaggttgcagtgagccaagatcgcgccactgcactccagcctgggtgacagagcgcaactctgtctaaaaacaaaacaaaacaaaacaaaacaaaaacaattttgcatgaagatgattaaagtaataatgtgaggagagggtaa

SEQ ID NO: 183945 - DNA, 403 bp, Homo sapiens
ttgtccctatctcttcttgacaaagaagtctgctatatttcaagccaggctcagttatattagaaaagaactcattaagataagtggcaattaacatctatgctgcagtaaaagtgctttygacattaaagaagaaaatacaaagcatgggattttttagataaacggaaacgtttctgtagggtgccttgctatgtatttgctgttctttgttttgaagatgactgaagtattaacagacttaaatttactataaatcagcttgaaagtaacagacaatattgctaatattgtaaaatgggcctctaggaactcaaacactgcgtgtgtttgctaaacagtgtccatacacttaggctcacacacagacacacacaggctggacttgctctgtataagttag

SEQ ID NO: 183946 - DNA, 560 bp, Homo sapiens
agactgataaaaatgtgagcataatatattagagaaattgttgttatggaggtttttttttgtggttgttgttgctgttttttytttctttctttcttttttccatcagtggcaaggggtttagcaatgctctgcttgtaaagttggatttgagtccctgtagagttaaaggatgttttattcatagccattggatttatgctgatagagtcccataaatatatatatctgcatctgtgaatactgttgatatgtcagattgctgatatttctttatggcagggcaggtggcttgactctggtgttgtacttaaaattcatctcaaggaattttcactgatggagcacgcaagttcctgtgtactgtattgaggggttggaatagatttttttgcaaaaagaaatcacttctgcaaatataaaaggcagaatgggatcattttatggtttacgttgagatagctactttagcacaattcaaacctgcttggaaggtccatgttaaatattgtatttggtataacaccattgaaaaagtgaattgtaataagtgcttactg

SEQ ID NO: 183947 - DNA, 551 bp, Homo sapiens
cctacatattttattgtctcagtggaagtatgctttgtcatcatgcgtatttctatttatcagattgcaaaggggtacaccttccaagctatagtaaaattgaaaatttagaaattttacatggccttcatttctctatgtctgaaaataaacattaggatgaagttgtttaaagactgataaaaatgtgagcataatatattagagaaattgttgttatggaggtttttttttgtggttgttgttgctgttttttttttctttctttcttttttccatcagtggcaaggggtttagcaatgctctgcttgtaaagttggatttgagtccctgtagagttaaaggatgttttattcatagccattggatttatgctgatagagtcccataaatatatatatctgcatctgtgaatactgttgatatgtcagattgctgatatttctttatggcagggcaggtggcttgactctggtsttgtacttaaaattcatctcaaggaattttcactgatggagcacgcaagttcctgtgtactgtattgaggggtt

SEQ ID NO: 183948 - DNA, 464 bp, Homo sapiens
aatcagaaacatttgggggaactgatatagttctgataaattttaaggacttaaagcacagagaagcagtgactgattttctcagattggaagaagcctactaaggattgaaaccaagacacaaaagaaaagagaaacaagagaaaccaacactgtttggagttgtcctggaatctagctagctagctcttgggtcttctactctgagtcagtaaactactttttttttttttttttgcatctctctctctctcatttatgatctgtcaggatactaaagcaaaagatctctgactaattgttcctgaacacttttsctaagcactttgaataacttcacaggaacaaatgcaacctttctcctttggccacatttactgtattccatctggaaaacccgagccatgattacaggaattacaaggaatgtactcattttagattcctctattcacttgtctgca

SEQ ID NO: 183949 - DNA, 601 bp, Homo sapiens
acaatgataaacaattggagagaaagaaaaggataaaggacatacaaaacaaccagaaattaattaataaaattactcaaataaatcctcacatattttattagtccattttcatgctgctataaatatactacctgagactgggtaatttataaagaaaagagatttaattgtctcagttctgcatgactggggaagcctcagggaacttacaatcgtagccgaagacaaagaggaagcaagatttcttcaaaaggtggcaggagagagagagtgtatggggacactgccactattaaaaccattaaatctcatgggaactccctcactaacacattgrggaacagccaccatgatccaatcacttcccaccagagggatccctcaacacgtggagattacaattgtagatgagatttgtgtgggaacacaggaccaaaccatattattctatcccagacacctctcaaatatcatgtcactctcacatttcaaaacactattatgcctcctcaggagtcccccaaagtcttaactcattcaagcattaacacaaaagtccaagttcaaagtctcatttgagacaaggtaagtcccttcc

SEQ ID NO: 183950 - DNA, 582 bp, Homo sapiens
gcttcgttaactgggtcccaagtcttgtgccccctacttggtgagacctccccaacaagagtcaacagacaccttatacaggagtgtttctgctggcatcaggttggtacttctcaaggacagagatagcagaggaaggagcaggcacacatctttgctgtcctccagcctcctcaggtgacatctccaggtgcataagggacccaggtaaatagggcctgaagtgaacccccagcatactgcagcaaccctacagaagaggcacctgatggttaaaagaaaaaaaaaamaaaacagaaagtaactaaaacagcatcaacaagagtccccacaaaaaaaaccaatctaaaggtcagcaccctcaaagataaaaactagaccaacactggtgtgtgcctgtagtcccagctactcgggaggctgaggcaggagaattgcttgagcccgggaggcagaggttgcagtgagctgagatcacgccactgcactccagcctggtgacagagtgagactccgtctcaaaaaacaaacagaagaaacaaacaaaacaaacaaacaaaaaactagaccaacacatgaaaa

SEQ ID NO: 183951 - DNA, 369 bp, Homo sapiens
attgtatgcatactgccattagacattttaaaaagtataaacaattcagactactgagaaataaaaagaaaacaaaaaaaacttctttctcaaaaaacaaaatccaagagaagaaaaaaacataaaggayttttaaatgtatatatagcttggatatccccttgtaattaagctgacttttaatcatagaactcttttttaaaaaatccttttaaatattttattaccagatttatacagaacaaatagccaatacctctggctttttagtctttttattgtccccaacactattttcccaagtgaaaccaacaagccttaactaagggtatgacttaaccatgggtgcacaaggtatctccaaagaga

SEQ ID NO: 183952 - DNA, 500 bp, Homo sapiens
actcgtgttcctccaaaattcttatgttgaatttctaamccccagtatctcagaatgtgactgcaattggagaatggcctttgaagccatgagggaaaatgaggtcatttgggtgagagctaatccaatgtgactggagtctttttaagaaaaggcaattagaaaacagacatgtacatacacagaagaaagttcatgtggggacacagagagaaggcagccatgtgcaagtcaaagagagaggtgtcagaaaaaacgttccctgccaacatcttgatcttctagacttagtagctgggaggaaatatatttctgttgtttaagtgccctagtttattgtcatttgttatgggcagccagccctagcatactaacacaggtaaatatttaggttgcttcagttttttcatgtttaataaccccttaatctaacataccatgtacactcatctttgcgcatcaggcttttttttttttttttaagatacattcacacaaga

SEQ ID NO: 183953 - DNA, 532 bp, Homo sapiens
atcttgccctaccactgggagtgaaatgagagtagaatagtaggctgtattcaatagttcaagtaaaatggacaatgaatagtaaaaatatgaggcagcaccacaatgaagttcacttgtaaagtggcttatgttaaaaacacacaataagggtaacagaatgcaaggagaatatactgctttcaggagtaggttaactgtgcaaggggcaagtgattgatatttacttccaagaaccttccctgttcatcactgtctgtccaagtcctgtgattctgtctcaggaaagtcaaactagccacttgacttactagtgagactttctgrattaaagcccatttgactgcttggaagccagcaccagtacaccctggagatggcgcaaccttggggaaagagggtaatattgtttggctctgtgtccccacccaaatctcatgtggaattgtaattcccagtgttggatgaagggcctgatgggagctgattgaatcatgggggcggactttctccttgctgttctcctgataga

SEQ ID NO: 183954 - DNA, 627 bp, Homo sapiens
aaccatgttttccactgttgatcatttatatacttccacagtcataacaatttgttatcattgggcagtaataggaattattctcaaactaatagaggaataatgatatcattttaaaaattcttgctttaaagaatactgatatagtttagataattaataattcagaggcttagttttttcaagtattgttattttatttaaattgtatttaaatttctacactgcttacttcatctctagttttgataaataaaacacagtaagtcacaggaaaatgtttttttaaataacagaatgctacactgatagacattaatatttatgttacccagcacataccaagatactaaaaaggcactgtaattaatactggggtcctctattataataatctattgagaaatkttagttctgttgcaaataattattattagtgctaatttcagatttgcacaaaattgactctaattccacattataatgtgaacaggatctgagtgaatgctggagactaaggacatggaatattctctagaaacattttcatagatatgggttaaaccagttgttctacccaatagtaatataggaaatatttcatttgtcaaaacatattccttcata

SEQ ID NO: 183955 - DNA, 607 bp, Homo sapiens
ggacccattgttctaagattgttggtgtgtggtcaatagcatgaggtcatccaaggaagtaacacgaagtacagacatcacatttgaaggataaaggcgagagcttggacttctgcagtgggtgctaacayggcatccaacaggactttgtaatagtagccacacactgagacgcaccagtgcagagtcacaggtacacagctgtggccatccaatgtgcagccaaatccaacaaaaacatagagaaaatccttcagaccaagctttttccccctaccaatgcaagggcactatacttgggaaagaagattacaaaagttgaaaaaccactgatagcgagttggaatatgaattgatatggtttggctctgtgtccccactcaagtctcaacttgaatttaattcccataatccccatgtgtcaggggcaggacctgatgggaggtaattgaatcatgggggtggtttccccaaggctgttctcgtgatattgagtgagttctcatgagattggatggttttataaacatctggcatttcccctgatgacactcactttctctcctgccgccctgtcaagaggtgccttccgccatggtggtaagtt

SEQ ID NO: 183956 - DNA, 619 bp, Homo sapiens
ggctcaagctctctatctaggacttgcattgttaagcaattgtataatttggcaggtgtttgagtggagttgagagcatgaagggatgagacattggttcctatgcctcacatccctattttccattagattaaatattggactactggtatccaaggatataactcattatacctctgagggtctaaaaattctgtattttgyttgcagcaaatagcagcaaagtatgcagcaatgaagaggacaggtgagccactacctttacctgagcaacaggtgccatttctaccatgaaggagcccaaccaacatcttcctctatatgagtcaccagtaacacatagacaaaccagagttctgccccaaacaacagtaaagaaatgccagtgtcaaatacattgcacatccctggaatagccctctggcagacatgggcagtgaccagaaacccactggaaagcctgaccaggaaggtgttattcatatgacctatcactcttcctacctcatggtaagcccccatctgggatagtatacagctactggagtttaataattaatgattgcttttgaatattcaaatgctgaagacatttgcgtgaggagaaatgtggtaccac

SEQ ID NO: 183957 - DNA, 636 bp, Homo sapiens
tttgctaggaaggagaaggtgggagggattattacaaagggccaccaaggtacttgtgatggtaatggatatatttggtatccttattgtygtgatcgttctacagatatagacatatgccaaattttacaaagtgtacattttaaacaaatataatttatcatattgtaattataattatgtatatatgtatacctacatttaagtgtcatctcagaaaggcactatgctttcaaggtaaatgtgtactaattatccatacagacaattgcaataatgtcaaatatcttagagaaaatgaaaaggagagaatgatatttgacttctttatttagtttagttgtattagtctgttttcatactgtgatgaagaaatatccgagactgggaaatttataaaggaaagaggtttatttggctcacagttctacatggcttgagaggcctcaggaaatttacgatcatggcagaaggagaagcaaatatgtttttcttcatatggcagcaggagagagacatgccaagcaaaatgggaaaagcctcatataaaaccatcagatctcacgactcactcactgtcaagaaaagagcatgggagtaactgcccccatgattcaattacctcccttcaggtct

SEQ ID NO: 183958 - DNA, 496 bp, Homo sapiens
taggcagaggttcccaaaccccaattcttgacttatgttcacccacagggtcaacaccacatggaagcagccaaggcttggggcttgcacactgaaaagcagtgtaccaagctgtaccttggctccttttagacatgtctagagcagaagcagctgaacatagggcaccatgtcccaaggacacacagagcagggggccctgggcctagcccaggaaaccattttttcttcctaggctccaggcctttggttggaggagttgtcacgacggtctctgacatgccctcaagacattttgcccattgrcttgacaactgacattcaacttatcatagcttatgcaaatttctgttgctggctataatttctccccagaaaatgggtttttattttatctcacatcatcaggctgcaaattttccaaatgtttatgctctgcttcctctcacacaatttgctgcttagaaatttcttccaccagataacctaaatcatc

SEQ ID NO: 183959 - DNA, 493 bp, Homo sapiens
ataatgaggacctattttgtctctggtaacacttttcacccaaagtctattttgtttgccattactactaaccattcagattttatcttccattgtggaaaaagatctatcttttcctatcctttcatgttcaaccctcctgtatcctcatattttaggtgtgtctcttgaaacagcaatcagcttgaaatttttattcaagtctgtcaatcttgtatttcagtccgaatgcatgtgtttaaatctaccaggttgctatttctcccacttattctgttacatttcctctactttttggctttctttgaagastttagtattttagaccactaattcccttcatataacttggagcgggggtggtgctccatctcactggagtcagacaaactgataacccattcacagtgaacctgcttcctatgtacaatatttccagactcattaggtctccataaaggcttgcagcaggagttgaggagatagctttgct

SEQ ID NO: 183960 - DNA, 495 bp, Homo sapiens
agaattctgggcaattaggacagaaatctcttggccaatcgtttagtgaggttgtggaaagataatgctgtaaacttttatttttcaggaaatctggaaacctacagtctccatgcctgctcagcaaagaaggagctcactgtgggcaccagagacagggacccaatgtggagacccacgagcctgtgtccagccttgtactctcaagcacagggcaggcttcctgaacattgaagagaatatgcgggagaacaaaacagaaactgaaagaatatgcaaagtatcgttctcagatgttattccrtgatagatggtaggggcatgagtgagtgaaagaggctgagaagatctggacagggagtctggaatggtcaggctgtgatttaagagggacatgagaaggaaggaggattttaaggctggaaatctaagggtcagtggtccaagtcactcagagacagaatcacagcacagcccttgctgatggcaaataaa

SEQ ID NO: 183961 - DNA, 367 bp, Homo sapiens
gagtgaaattggccagagttaagatctctgaaaatgcctgttttgatagatctcttatttcactgacataaactatttatttgtaaaaagaaagttttaattcccacaattcttataaaaccctcacccagaatgaaacactaaaattatttggtagctgaaaatacactgaattaaaataagcaraaacactttcataatcaattatgaacagtttcaaacaggttaaaactatgtctatggcccatgctactttaggctacgcacttgtgacatttatctacagtcttcaaattcattctgaaaattaaatgcttcagtaaacaccttcatcaaaattaacattaaagatcatgttcccctgtaa

SEQ ID NO: 183962 - DNA, 499 bp, Homo sapiens
ttcttatattgtttcaacgctcctaagaaaagttttgatgatgtatgttattaattccttttcataaaaagatgtctcaagaatctaaataaatcttaaattttgggggggaaatctatttttatgtaaaaatattacactgaaaacaatttatttactgatgtgtcctctttagtgacctaaaagatacactgagccagcatactttacatttgtattcagatgttgcttagttgtctagcaaaatctgtttgactactttaggtacaatattgctatttcaagtagtgggatttgtagtcagaactagttccttctgagcgtaccactcatcaaaaacaactctgtacacaaaacagaaggaaaatctttcagcacrttaaaagtcatgctataaacataggcctcagaaaggaagaaaggtataaaggaatgagagaggacataagaaaagaaagacaaaaccctaaatccacttacttcttaacatttagaattc

SEQ ID NO: 183963 - DNA, 425 bp, Homo sapiens
gccatataatcttttaattcaaaactgacataacttagctgtcttaagaaataacattatttccaacatgctgtatgattaaaatttgtcttttaaattgtgaaaataaatttcactccttaccgtactaacatccagaggcagtatgaagacaataagaaagcagagataccaagcaagcagtgttccaataatcacaagtctatgctgtttcttaaagtctccatatcgatgaagyagaaataatgccagaaaaaagacaaaaacaatctcaagtcccaaagctgcaccactcattattgaatatttcactctgactaaccaaagttattcatgtacaggtctggaccatatctataaagtaaaaagaaggttaaaatgcatcattaacacaggaaatgacatttggaaatttcatctgaata

SEQ ID NO: 183964 - DNA, 580 bp, Homo sapiens
agatctttagcatgggttccttttaagattgcctaattctgaagctatttttcaacaaaatagggcaagtcgtcaagtatgcaggaatcttggtagatatatatatatatatatatatgtatgttctggtgcataatcaccttgaaaattttaacccatgagaagacattcctgcctttttccttagaagggaatctgcctgcctcaaggccagctcagtttcaccgtttaacagaaacataaacagtggtcttcttgtaggattccttttgctttgtacccctgagtgatctttttgccttaatcactttagttatttatcagtggactgcgaagtgaacgttcacctaagtgggggagacatctccccaggcccactcccacccccatattggcttctcctggtatgttctgtctccattactgctgacactatctgtttaatcacccaacccgaaaacctgagagtcagtcagcttcccaccgccccccaacatccagtcattcatcgcatctttccctcytctctggtaactatttctcaagttctcgtcgtctcttgcctgaactattggagtgg

SEQ ID NO: 183965 - DNA, 633 bp, Homo sapiens
attaccatgttatagaatttcatatgcaatgtagcattcaggacacacttttgttgttctttggaccagtttttaaagccattattgactcatggcttcttcacacaaagtagtgtgaattcagccccacccacaggggagtacagactttcagtgctgattttctgatggtgactcctgtccagctgcaaaccaggcaagtgaggatctttcgtgttgtttgcctgsgcctcattttgtttttctcaagtccctcattccctggcaggacaagtctttattggctcctagagttatataaggggtcaagtccttgacctgggaccatttttccatcaatataactttaattaactcacaatttttagttctaaattatctttttgtttctggcacacttggagattatggtttttttttttttttcttttgagtccagttttatatttagaaataatgttcttacagttaagcatatctgtgtgcttattctaggagtactcagtcttctgtctcatccaggagtcctagtttgctgcttttggcactgaggcactcactgaaggaaactgtgctctgataagttgccgtttgttctgataatctgtacagagtttccaataaacaaccaaa

SEQ ID NO: 183966 - DNA, 633 bp, Homo sapiens
attaccatgttatagaatttcatatgcaatgtagcattcaggacacacttttgttgttctttggaccagtttttaaagccattattgactcatggcttcttcacacaaagtagtgtgaattcagccccacccacaggggagtacagactttcagtgctgattttctgatggtgactcctgtccagctgcaaaccaggcaagtgaggatctttcgtgttgtttgcctgcgcctcattttgtttttctcaagtccctcattccctggcaggacaagtctttattggctcctagagttatataaggggtcaagtccttgacctgggaccatttttccatcaatataactttaattaactcacaatttttagttctaaattatctttttgtttctggcacacttggagattatggtttttttttttttttcttttgagtccagttttatatttagaaataatgttcttacagttaagcatatctrtgtgcttattctaggagtactcagtcttctgtctcatccaggagtcctagtttgctgcttttggcactgaggcactcactgaaggaaactgtgctctgataagttgccgtttgttctgataatctgtacagagtttccaataaacaaccaaa

SEQ ID NO: 183967 - DNA, 588 bp, Homo sapiens
attgatgtttaatacagagtatgtttctaatgaaatcacaccttatgtatgaggttttccaatgagtattttaaaaatgtggcaggatgtatttaaaattgatgtaatgaatattctgtctatttgtaaagtttctagagaaaatatttacttgggatgagaacatgtgatggaggtagaatagtgatgatcatgatctggctggggtgaacattcatctctgacaatgaccttgagagtcagtccagaaaagacatgactaycttcatattgaaaattttgggggcttggtctctgtgatggctaattttatgtgtcaaactaattggccacagaatgcccaggttaaacattatttctgcttttgtctgtgaggttgtttccagatgagattggcatttgaattggtagactcagtagctcagattgacctccccaatatgagtgggctgatgtcatccaatccattgagggcatgaatagaacaaaaaggtagagaaaggaggattttgccccttttgttttctgcctgcctgtttgagctgggacatctaattttatcttctctggccctcagaactagaattt

SEQ ID NO: 183968 - DNA, 518 bp, Homo sapiens
ctttgtcacttcttacagtttttgtctggaagtctatttgtctgatttaagtatagctactcctgctcttttatggtttctgttcacatggaatatctttttgcatctttttatttttagtctatatacatctttatagatgaaatgtgttttttgtaagcaacagatcattgggtcttgttttttaatccatgtagctgccctatgtcttttgattggagagcttagttcatttacattcaatgttactattgataagtaggaatttctcccattttgctatttcttttctggttgctttgtggtcttctcttgcttcctgttttccttttagtgaaggtgattttctctggtagtatgatttaattttttgtttttaatttttttctatttgttrtgtttgtttggcttgaggttaccatgaggctttcaaatgctataaagctcattattttaaactgataatgacttaacaatcctcatttacaattgcataaagaaacatataaaaagaaaac

SEQ ID NO: 183969 - DNA, 416 bp, Homo sapiens
acacagtttgcttatgtattagcgagcatttgctatctaatagaccatgccacaacttagtaggtcaaaacaacaaccacttatttggcttaggattctgtgggttggttgggtggtccttctggtcctggcgggctcagctgatgtcagttgagctcatgtgtgcatcagctgatggttctgttgttgttagactgtcagtccagacaatagaaacaactggccaagtgtctctcgtwacccagtaggctggcccaggcatcttcacatgctgacagtcaaggggttctcaagagcagcaggacagcaatgtgatgttcagggaaaactgggtatatttgttcaaacatgttggtttgaaccccactcttggtaccaaaatctgtacttagtcagagttcaactagaaaagcaga

SEQ ID NO: 183970 - DNA, 468 bp, Homo sapiens
taggaatattcttcctagaagctattcttactagacaagctagcaataacttagctgtatgtggaagtggctgtgaaccacataartacatctcattaaatttaaatgtatttccaactcaactttctctcttagctggatcccaaaataactgcagccactttaacactctcctactgcaattggttgattaagactgctatttctttccactacaacatctgcttgaagaagatgttgaagtagaaggaaacaggggtcctaatcaaccaaatgcagttaaaatattttacttttgcattttttacaaaaacatataatcatggtgacattgtgagggcactttcaagggtcttggaaggggcccatgcaagtgaggggcctggaaattcagattcattagcttcaccacagatctacttctgtttaaccagttcttgagtctctgcagggtcagtaattacagat

SEQ ID NO: 183971 - DNA, 468 bp, Homo sapiens
taggaatattcttcctagaagctattcttactagacaagctagcaataacttagctgtatgtggaagtggctgtgaaccacataagtacawctcattaaatttaaatgtatttccaactcaactttctctcttagctggatcccaaaataactgcagccactttaacactctcctactgcaattggttgattaagactgctatttctttccactacaacatctgcttgaagaagatgttgaagtagaaggaaacaggggtcctaatcaaccaaatgcagttaaaatattttacttttgcattttttacaaaaacatataatcatggtgacattgtgagggcactttcaagggtcttggaaggggcccatgcaagtgaggggcctggaaattcagattcattagcttcaccacagatctacttctgtttaaccagttcttgagtctctgcagggtcagtaattacagat

SEQ ID NO: 183972 - DNA, 592 bp, Homo sapiens
accagtaaaaatgagtgttctgattttcaggaatgccatcttgtgtcttctcttcatttgagtcttttgtgtgggtacgttaatgagtccctctgactctgtcatgacatatctgacctagtactctggaaagaatatrtccttttagtatacagaaagtcctggtaggtcaggaagaatttagtttattcaagtggagacattcagttcatgctgggagaagttagtttatttgttaagtttgtggtgagactttaaattctcacattaagtttgacagagtagttgatgatatttggtcatgttttggcttcctaacagcctctggctgacttaaaaataaatcattacagacagaccattaagttttatgaactatgaatgtgcttaaaaacccattttaatgaaatgctcaaagtttctccatgggccattgcttttacctgagccatgactacatttcaaatcctactgaccatttcaaaggtgattattccactcagatgatagcatgactggtgcctttgtaaagcattgactgtgtttgacctcacagcgaggtgaggttgaaaactttggtagtattacagca

SEQ ID NO: 183973 - DNA, 592 bp, Homo sapiens
accagtaaaaatgagtgttctgattttcaggaatgccatcttgtgtcttctcttcatttgagtcttttgtgtgggtacgttaatgagtccctctgactctgtcatgacatatctgacctagtactctggaaagaatatatccttttagtatacagaaagtcctggtaggtcaggaagaatttagtttattcaagtggagacattcagttcatgctgggagaagttagtttatttgttaagtttgtggtgagactttraattctcacattaagtttgacagagtagttgatgatatttggtcatgttttggcttcctaacagcctctggctgacttaaaaataaatcattacagacagaccattaagttttatgaactatgaatgtgcttaaaaacccattttaatgaaatgctcaaagtttctccatgggccattgcttttacctgagccatgactacatttcaaatcctactgaccatttcaaaggtgattattccactcagatgatagcatgactggtgcctttgtaaagcattgactgtgtttgacctcacagcgaggtgaggttgaaaactttggtagtattacagca

SEQ ID NO: 183974 - DNA, 592 bp, Homo sapiens
accagtaaaaatgagtgttctgattttcaggaatgccatcttgtgtcttctcttcatttgagtcttttgtgtgggtacgttaatgagtccctctgactctgtcatgacatatctgacctagtactctggaaagaatatatccttttagtatacagaaagtcctggtaggtcaggaagaatttagtttattcaagtggagacattcagttcatgctgggagaagttagtttatttgttaagtttgtggtgagactttaaattctcacattaagtttgacagagtagttgatgatatttggtcatgttttggcttcctaacagcctctggctgacttaaaaataaatcattacagacagaccattaagttttatgaactatgaatgtgcttaaaarcccattttaatgaaatgctcaaagtttctccatgggccattgcttttacctgagccatgactacatttcaaatcctactgaccatttcaaaggtgattattccactcagatgatagcatgactggtgcctttgtaaagcattgactgtgtttgacctcacagcgaggtgaggttgaaaactttggtagtattacagca

SEQ ID NO: 183975 - DNA, 581 bp, Homo sapiens
caagatgaagctttcctcaggacttccagtgtgccaggcactgctctaaggattttctctctcacaagtattttatacatcacagtaaccaataaatatgagtttctacatatttatccccatttttcagatgaggaatcagcctcagaaaatatcttgcctaagggcatgtggttagtctgtggcaggcctatgtgtagtacacagcataatcactttccagctgcttaaattcagagcaccaacataaacttgttcaattctagcctgctttaatgcttttgtataaaacacmtgagaagccaaggcagcctggaggcaaatgccataaagcaaaccaccattggagcaagaaaggaggttgttggaagtcaccactaaaaacaaaaaaatcatcccttcctaagggatgctcaaagagaatcccttagggaggcacacaactctctgtgatgagccatgcttatacctctcccttggcttagtctcttgtctcagcatttgcccttcattctgctttaggccagcaattctcaaacctggctgcacattcaaatcacctggggctgggcatggtggtt

SEQ ID NO: 183976 - DNA, 577 bp, Homo sapiens
tcagggctatcttgaccttcctgcaagtaggcaaagctgagagcaggggcacagctagcccaatgggcacaatcctgcagaacaatgattctggaagtgtggtcctgtgcccacttacactgaaattatgggggctggggagaggttggggaaaatggacttgtttaaaacacagattttagaggcccatctcagaccaatttcattagcttctctggaatttcagcagcaaaatttggagttttcatgcatttccccaagtgatccgtgctcatactgtaaactgagaatcattatgacagaaaatgtgaaataaaagccatgtgtccacgtttcttgtgtatttactatgtgccagacactgttgtgagtactttccatacactcattcatctactcctcaccaatacccytttgaggtagttcccatcatgcccatttttcaaaagaggaaactggggcacagaaagatttagtaaatttcccaatatcatatatttggttattggcagagaagatagttgaacccaggcaacttggcttcagaggaggcataattactctatcatttctcaca

SEQ ID NO: 183977 - DNA, 434 bp, Homo sapiens
cctagtacagtgtctttctggtccattgggattcaaaaaataataggtatttgttagatttttcagaatcagactctgaatcaagaattagagtgtggttagttagtttgtaaggtgatttcagggagacagccaatagaggatgcataataaagtaaggtatttmtcactgtgggtaactaaagcttaatcctgctgggtaactctgggtgttaatgaagaagacagacattagtgttaccacatgtgaagaacaagaaagttggctattaatacatcagtttctatcacttattggttgaaggatgctgagctatggatatttattttttagatcttcacacttggcatgtaagtgggcaagagtaggttctgaccaaaataggctgcaggcaaaaatatgagatgctaacatttggaaattagagagcctg

SEQ ID NO: 183978 - DNA, 434 bp, Homo sapiens
cctagtacagtgtctttctggtccattgggattcaaaaaataataggtatttgttagatttttcagaatcagactctgaatcaagaattagagtgtggttagttagtttgtaaggtgatttcagggagacagccaatagaggatgcataataaagtaaggtatttctcactgtgggtaactaaagcttaatcctgctgggtaactctgggtgttaatgaagaagacagacattagtgttaccacatgtgaagaacaagaaagttggctattaatacatcagtttctatcacttattggttgaaggatgctgagctatggrtatttattttttagatcttcacacttggcatgtaagtgggcaagagtaggttctgaccaaaataggctgcaggcaaaaatatgagatgctaacatttggaaattagagagcctg

SEQ ID NO: 183979 - DNA, 585 bp, Homo sapiens
ctcctctaactctttttgaacatttcagtagtttccaacctctcagcattccaaaattgcataattgagttaaaagagatgcgtgatttaaaaagaaactcaaagtaggaaaaaaaaagttaactggaatccagtgactaagaatattaatttttcagcatgttgccacgttaaatacattgctttgctgtaagtcatggttaacttttggtctcatttctgcttttggcttttgctttgttatgtatacattttctgacagttcacgaatacctcctgtgtaagtgttccctaattgttttgcacgtgtgcttgaggtgtttgcaaggtggccaccattgaatatcatttctttgtctgcaaaggcagctccaggaacgagaaactttgtaaagtaagatggcttctgatatggtttggctgtgtccccacccaaatctcatcttgaattgtagttcccataatccacacatcatgggagggactcagtggttttataaagggcagttccactgcacaygctgtcttgcctcccaccatgtaaaacatgcctttggtcttcctttgcctcccgccatgattgta

SEQ ID NO: 183980 - DNA, 585 bp, Homo sapiens
taatgtatatggtcatttaattgttgaaattgacagaaacaatttttraagtacttttcagcactgtacctcacacagtatcttctattttaaatccatcttaaatattccaatggtctacaaaaaaaaacccttctaaatatatgtatttcaaacacttctactcttagtgagggctctaacaatattaacatttatcatttcttagactccaccttctcctcaaagttaaacgttctgataaaattctatggctccacaaacactttaattctgttattggcaaacacaaatggtgtctatgaaagcaccagataaaaatgttacaggaagatcccccagttggggaaagatggaatctgcagcaaaggatcaatcttttgtcctctcactgaaaaagaagccatttagagctccaatgaagaatgttagttccagccctcactttcacatgaaaggaaacatttaacatggtttagggccaaatattgaaaccctagaattgagcttttagatggaaatgctctgcacctgaaggtactttcctctcctcccaaattttttaggccctaaaaatagagtaag

SEQ ID NO: 183981 - DNA, 585 bp, Homo sapiens
taatgtatatggtcatttaattgttgaaattgacagaaacaatttttaaagtacttttcagcactgtacctcacacagtatcttctattttaaatccatcttaaatattccaatggtctacaaaaaaaaacccttctaaatatatgtatttcaaacacttctactcttagtgagggctctaacaatattaacatttatcatttcttagactccaccttctcctcaaagttaaacgttctgataaaattctatggctccacaaacactttaattctgttattggcaaacacaaatggtgtctaygaaagcaccagataaaaatgttacaggaagatcccccagttggggaaagatggaatctgcagcaaaggatcaatcttttgtcctctcactgaaaaagaagccatttagagctccaatgaagaatgttagttccagccctcactttcacatgaaaggaaacatttaacatggtttagggccaaatattgaaaccctagaattgagcttttagatggaaatgctctgcacctgaaggtactttcctctcctcccaaattttttaggccctaaaaatagagtaag

SEQ ID NO: 183982 - DNA, 585 bp, Homo sapiens
taatgtatatggtcatttaattgttgaaattgacagaaacaatttttaaagtacttttcagcactgtacctcacacagtatcttctattttaaatccatcttaaatattccaatggtctacaaaaaaaaacccttctaaatatatgtatttcaaacacttctactcttagtgagggctctaacaatattaacatttatcatttcttagactccaccttctcctcaaagttaaacgttctgataaaattctatggctccacaaacactttaattctgttattggcaaacacaaatggtgtctatgaaagcaccagataaaaatgttacaggaagatcccccagttggggaaagatggaatctgcagcaaaggatcaatcttttgtcctctcactgaaaaagaagccatttagagctccaatgaagaatgttagttccagccctcactttcacatgaaaggaaacatttaacatggtttagggccaaatattgaarccctagaattgagcttttagatggaaatgctctgcacctgaaggtactttcctctcctcccaaattttttaggccctaaaaatagagtaag

SEQ ID NO: 183983 - DNA, 567 bp, Homo sapiens
tgaggaaagtgatctgctagcttccaaaaaattcctgggaaaattaatgaagattcagaatccggattcctacccaaaaggattctatgtggagcctaggatctaaaatttcaggaagtattcccatttatattaataatactgaaatacactaatatgcagtgggtatggaaatggctattctgggtgacctctaaagtccttccaaaacttcaaatcttcagttgtctagcccctctctctamtcctttaataattatgtatttatcttaaatatgcatcaatctccgagaagttaagaactgaaaaattacaatactacatatatatatatatatacacatatatgtatatatatacatatatatgagagagagtacttactatgtgccaggccctgttctaaaagttttacagatttaacaaatgtaattgtaacaaactcgttactcagtttttcagatgagaaaactgaggcacagagagggtttaattcagttgaattgccttgcccaaggtcacagaactagtgagtagtgaaactgaggtaaatttttactgagtact

SEQ ID NO: 183984 - DNA, 680 bp, Homo sapiens
ggcttagggattgaaccatttccacatccaatccacaaacatgaattcaaaggagtaaacagaaaactatgtttacaactttgtcagcaagagatatgggtatctattttattttatttttttttgaaaagagcaagaygagaattttaatcatttctttagtctcatcttggggtcaaattctccttagctgaaatccacagtgagcagatacttctcttactcatactttcatgagatagtcataaaatattgaattgctactatgttcaagacattagggcaggcactatagaaaacttcaagaccaaaaagacacacagatggtgaccccaaaatccaataagggaaattagacatgtttattaatacttgaaatcctatccaaaaggcataaagtttgataggtgaagtcagataaaacatactgaaatttcagagaagggtattgtttctcaatgtgagaagcaggaagtccttctggatgaggtggcatttgagacagacctccattcatccaatcagcaaatacttatatttagtgcctattatgtatagaactctgtgtaaggcatttgaggttgagcaatgaacaagaaaaatttacatttagttggggtggataatatatgcagttaagacaaacagataaattattaaaataatgcaggctataatgt

SEQ ID NO: 183985 - DNA, 551 bp, Homo sapiens
tatcaaacctatcacctaaatgatggagtttggctttccatctcaataaagactgtcatttattaagctattactatatgtgaggcaccacagtatatcattttatatatatttgtctttaattagttaataaattaatagtagaaccaatcttgaaagggaagtgaaggtaagaatggaattgagatttggcagcctctaaaggccatgattttaaatacrtttgtgccttctatggcacttggaatgaggaatgggtgagagaataggaagctttgttgggaatgagaggctttccagcagctacaacctctgattttgaagaagagctagaccagcccgacgttttgttctcagacagaaactagcataacaattgccctcatgaaggaagagaacagtactggagtgaaagagtctaataaaactagtttttcttattcggttgtttaaaaaacgcattatattaccaaattgaagacagtatcaaatgtaagcacccccattttttgtgtactactaataaaaattgacatcaaaatatcaatttc

SEQ ID NO: 183986 - DNA, 551 bp, Homo sapiens
tatcaaacctatcacctaaatgatggagtttggctttccatctcaataaagactgtcatttattaagctattactatatgtgaggcaccacagtatatcattttatatatatttgtctttaattagttaataaattaatagtagaaccaatcttgaaagggaagtgaaggtaagaatggaattgagatttggcagcctctaaaggccatgattttaaatacgtttgtgccttctatggcacttggaatgaggaatgggtgagagaataggaagctttgttgggaatgagaggctttccagcagctacaacctctgattttraagaagagctagaccagcccgacgttttgttctcagacagaaactagcataacaattgccctcatgaaggaagagaacagtactggagtgaaagagtctaataaaactagtttttcttattcggttgtttaaaaaacgcattatattaccaaattgaagacagtatcaaatgtaagcacccccattttttgtgtactactaataaaaattgacatcaaaatatcaatttc

SEQ ID NO: 183987 - DNA, 502 bp, Homo sapiens
agggatttttttctcaattattccctcaaataagttttccaagcttttagatttctcttctttctcaggaacaccaattattcttatgtttggtcatttaacgtaatcccagatttcttgtccatttttttattcttttttctttgccaaattgggttaattcaaaagcctcattttcgaactctgaagttctttcttctactcatttgattctattcttgaaactttccagtgtgtyttgcatttctctaagtgtgtctttcattttcagaagcgtgattgtcttttctttgatatctatttcactggagactttttcatctatatcctgtatagttttttacatttatttaagttgatttcacctttttctggtgcctccttgagtagcttaagaatcttctaaattctttttctggcaatttgcagatttcttcttggtttggatccattgttaaagagctagtgtgaccttttgggggtattacagaaccttgttttg

SEQ ID NO: 183988 - DNA, 567 bp, Homo sapiens
atcacacgtaaaaccttttgtgcaccaaaagacacaatcaacagtgaaaaggcaatctatgggatgagagaaaatattctcaaataatacgtcggataatattgtgaataaagaactcctagaactcaaaacaattatatcactcaacttaaaaatgggcaaagtacttgaaaagacatttcttcaaagatgatacaccaataaccaacaaatgtacgcaaagatgctcactatcactaacattagagaaatacaaactgaaaccacactatcaccttacatccattaagatggctactrtaaaaaaaaaaccaaccacctgcaaaataacaagtgctggagagtatgtgggcaaactggagcacttgtacactgttagagacattgtacaatggtgtaactgctatgtaaaatagcattaaaatgaaaaatcaaaaaatagaaatagaactaccatatccagcaattctacttctgagtatctaccttaaaaattgaaaacagggtaaagagatatttgcacaccaatgttcatagaagcactattcacgatagtaaagaggtgga

SEQ ID NO: 183989 - DNA, 599 bp, Homo sapiens
tatactttttttggtgtatattactatgaaattttatcaattgtgtaggtttgtgtaaaaccactaaagcaggatacataattgtccatcaccacataaagggaatcatttagtatgcaatcctctgcaagtggattttttcatttggcataatagccttgagagcaatccaattgttgcaagtatcaatagttcattcttttttattgctgaatagtattcaattgtatgaatgtaccacactttgtttaccctttcacccttagaggaatatctgtgttctttctagtttgaggatattacaaagaaagttactatgaacattcctttctaggtttctgtgggaacatgtgttttctttcctctagggtaaaagcattatactgagggaaagaatatacacacaaaaagtgcttgattctctttgtttgaaatactatagcagtcaaaatttatcttastgacagaaagtagaggagtggttacaggggatggaagttgggtttggtgttgattgcaaagggcatgaggatgctttttgagattatggaaatgtcctatatcttgattatggtggtggttacacagctgtgcacact

SEQ ID NO: 183990 - DNA, 389 bp, Homo sapiens
tggttacaggggatggaagttgggtttggtgttgattgcaaagggcatgaggatgctttttgagattatggaaatgtcctatatcttgattatggtggtggttacacagctgtgcacactgtcaaaactcaatgaaatctacacttaaatgtgttcattttaatatatgtaatctctacctcagtaaaattgtttcaaaaatgttttgtgcatgagtctaataatttttccttgcattgtttatatatattttaggaaattctmcacatacattttgtgcttctcaaataaacaatttaaaaagagaaagaataagttgggtgttggtagccactagtgcagtgtcatgatgttgcttgtaggtgctgaattctcactgagaagaactt

SEQ ID NO: 183991 - DNA, 363 bp, Homo sapiens
ctgttttgtgtacacaatatcacttatcaaattactctctgttgagctctgasccataagagaggaggaaaagataagaacagcacagcaagtaacaaagcttagaatataaatgagaatggttgaaaggcaactctaaagggtatgcttcgggaggttaatatgcttaataagatgtaagcacatttgtatttttattcatatcactgtgctttgtacattgataaatagtggataaagaggaagtactcctctttaattatttgctattaaacatattcagccactgcgtttttcaactgtaccttgttgttaaagaggaactatgcgaagaaagctgataatgtatagtcttgttttgta

SEQ ID NO: 183992 - DNA, 657 bp, Homo sapiens
ttgcaattttatctagaaaacaggacttgcagtattttaagtgtatcatgctgcttttaaagaatgtgatacttcacacttcaaataagaaaagataaaatatccagacagaagatttggtacccatcattgcaaccagatgcatggtttttttgttttttgttttttgttttgttttgttttgtttttaatgggcaaaggatgggaatttgcctgtatgtggttttgctccattcctcacaggcctgatctaagcaggagctctcactgacttcaaagggaacactacacctttgactccagaacaaattcctgtatgcaattccaagggctcagagcaaaacaaaaatgggttggtacctttcagcatcatcatgatttatgtaaaattcccaaatacatgttctcctagggcttggtatcttgaagaaaaattttrtttatccctagatgaggtctggatttcacagctagtatttttctgagatgacagatttaagtaatgtcattttcataagcacagggaggacttcattaaaggcttgctggtgttagctttattttagtctcgaaaaaatatgactaaataagacaatccaaaagcattctgctgagtgaaagaaggcttacacaaaaatgtacatgttgaatgaattc

SEQ ID NO: 183993 - DNA, 607 bp, Homo sapiens
gctttactcaagtgtctttccattcagacagaaaagtctttgagaaaagggtctgcttcatatattctctgtataattgacatgttatagtactacctaatacatatttggagctcaaccaacataatatgaacatgatcacttttaacaaagttagtaatattctctaaattcctgacaaagaggatgagaatgaggctccctttatgatttcttatcagtaggccccaaatcagtcctggaagactttatgttctcatccaagctcaaggcagcactaaattatttctaacatcattaggctattaatattataaatgaagacagtgttttccctgaatttatgcagagttgcttcaaatacttcactttatgtctcttaagaaaaagcctaagggaatcatcatattctttatttttcaaaaattattaatgtgtcagagttttatttagtttttcacattagccaccattaatctttaatcattacttttctcccattttctagtagaaartaatgtatatttattttctttagaggatataatgtcacacttggcccactaatattttattattgagaattaaggaaatttcatgacagctc

SEQ ID NO: 183994 - DNA, 488 bp, Homo sapiens
agtcacccacttggccctcttccaagtgtactctacttgctttcttcccrctctaaagctttttaataaactttcactcctgctctaaaacttgcttcagtccctccttctgccttatgcaccctgggttgaattctttcttctgaggaggcatgaattgaggttgctgcaaatctgtatggattagctgccagtaacaaatatacaaacgtgataaaggttccacatggtaaaatgtgaaaggaaagtgagaaaaacaaacaaaaaaaatcctcccctcacacatccctctagcttcaattttatcttcttatcttcttaaaagtcgcaattttcaaagaagttatctacaattggcatctccctttcttcacttctccttttctctttaactcattcaaagcaggtttctgttccattgaaactattcttgctgagatagtcaataatcatctatatgtctaagtacagctgactcagtttttttc

SEQ ID NO: 183995 - DNA, 488 bp, Homo sapiens
agtcacccacttggccctcttccaagtgtactctacttgctttcttcccactctaaagctttttaataaactttcactcctgctctaaaacttgcttcagtccctccttctgccttatgcaccctsggttgaattctttcttctgaggaggcatgaattgaggttgctgcaaatctgtatggattagctgccagtaacaaatatacaaacgtgataaaggttccacatggtaaaatgtgaaaggaaagtgagaaaaacaaacaaaaaaaatcctcccctcacacatccctctagcttcaattttatcttcttatcttcttaaaagtcgcaattttcaaagaagttatctacaattggcatctccctttcttcacttctccttttctctttaactcattcaaagcaggtttctgttccattgaaactattcttgctgagatagtcaataatcatctatatgtctaagtacagctgactcagtttttttc

SEQ ID NO: 183996 - DNA, 488 bp, Homo sapiens
agtcacccacttggccctcttccaagtgtactctacttgctttcttcccactctaaagctttttaataaactttcactcctgctctaaaacttgcttcagtccctccttctgccttatgcaccctgggttgaattctttcttctgaggaggcatgaattgaggttgctgcaaatctgtatggattagctgccagtaacaaatatacaaacgtgataaaggttccacatggtaaaatgtgaaaggaaagtgagaaaaacaaacaaaaaaaatcctcccctcacacatccytctagcttcaattttatcttcttatcttcttaaaagtcgcaattttcaaagaagttatctacaattggcatctccctttcttcacttctccttttctctttaactcattcaaagcaggtttctgttccattgaaactattcttgctgagatagtcaataatcatctatatgtctaagtacagctgactcagtttttttc

SEQ ID NO: 183997 - DNA, 488 bp, Homo sapiens
agtcacccacttggccctcttccaagtgtactctacttgctttcttcccactctaaagctttttaataaactttcactcctgctctaaaacttgcttcagtccctccttctgccttatgcaccctgggttgaattctttcttctgaggaggcatgaattgaggttgctgcaaatctgtatggattagctgccagtaacaaatatacaaacgtgataaaggttccacatggtaaaatgtgaaaggaaagtgagaaaaacaaacaaaaaaaatcctcccctcacacatccctctagcttcaattttatcttcttatcttcttaaaagtcgcaattttcaaagaagttatctrcaattggcatctccctttcttcacttctccttttctctttaactcattcaaagcaggtttctgttccattgaaactattcttgctgagatagtcaataatcatctatatgtctaagtacagctgactcagtttttttc

SEQ ID NO: 183998 - DNA, 393 bp, Homo sapiens
aagcttctttacagcataacatttgatgccaagcaacaagccccaatattcaagtgctttatcaagcctttgcttgtgtcacactcgctaatgtcctgtttgccaaagcaagtcacatggcaaagcccaaagccagcatgaacaagaactactcaaagycttggaaaccacaaggaatggcctttgggggccaccagggtaaggctactatagacaatttatgtttgtatacttctgttgcctgatcattcattaatagtaaaatcctgattctccatcagctcccatgcaactataactttaaccaaaacagccttgaggctaggcacagtggctcacacctgtaatcccaacacttttgggggctgaggcaggaagattgcttgaggccag

SEQ ID NO: 183999 - DNA, 565 bp, Homo sapiens
tctcatttgtaaaatgggtgtaataagagtacctactaaatatagttgycttaaggattgaatgtggaaatgtttatacagagtttagcacggtatcaggtatacattaagaatttaatgcagcaaatatcaactaaacacacacacacacaaattacttgtcccagccccacttaaatcatcattgagattgtttgggattacattattagaatcatatttaaattactctgaaaactttcaccttctattaaccatgatcccctttagaacttccgggcttagtattttccttatgttgtctctgagagcctgacttccgttctccctgctaggctatccccaggcgtttccttccttgattcatgaactctaagatgactagatcaccaggtcggccccaagtattatctgctgtatcagcaatttggccatgtttgagtccaaatagtgattcctctcttcactctttctgccttctcattgaagccaccctaaaaatagagagcagttccctcagggcagatagatttgtgcaatgtatgtgtaatgcaaaccaaatgtt

SEQ ID NO: 184000 - DNA, 550 bp, Homo sapiens
agagtaaatcaacaaaactgaaaaagacctttttaaaaaacatttaataaaaytgggaagcctctaagcaggctatgaaaaaaagggacaagaaacaaatcactaatattagaaaggagagaagatacatactataaagcccatgaaattgaaaaggataataaaagaatattatacacaactttgtgcccacaaattttataacctggatgaaatggaccagtttcttaaaacacgcaatctgccaaaactcatgtaaaaggaataaatatataaataggcttatatctactaaagagattgaatcaataataactttccaaagcagaaagcaccagctatagatgggttcactggtgaattctgccaaacatggaaggaagaaattatacaaattctctacaatctctttcagaagattaaagcagaggtaatacttcttaacttatttaatggggtcagcaccagacactacaagaaaagaaaactacagaccaatgtttatcatcaacatagataaaaaattctcattaaaatagtaacaaatcaa

SEQ ID NO: 184001 - DNA, 550 bp, Homo sapiens
agagtaaatcaacaaaactgaaaaagacctttttaaaaaacatttaataaaactgggaagcctctaagcaggctatgaaaaaaagggacaagaaacaaatcactaatattagaaaggagagaagatacatactataaagcccatgaaattgaaaaggataataaaagaatattatacacaactttgtgcccacaaattttataacctggatgaaatggaccagtttcttaaaacacgcaatctgccaaaactcatgtaaaargaataaatatataaataggcttatatctactaaagagattgaatcaataataactttccaaagcagaaagcaccagctatagatgggttcactggtgaattctgccaaacatggaaggaagaaattatacaaattctctacaatctctttcagaagattaaagcagaggtaatacttcttaacttatttaatggggtcagcaccagacactacaagaaaagaaaactacagaccaatgtttatcatcaacatagataaaaaattctcattaaaatagtaacaaatcaa

SEQ ID NO: 184002 - DNA, 582 bp, Homo sapiens
cttattaatggatgagagagagattacatatatagataaatattcctctcatatactactttaaagctaaattggaaatattttttcacaagcaaaaaaaacaaaaatttattgaaacacatctgaaacacaattcatcattaaatagatttctcttgtatattatatttacaagatactatcaaaggttgtggaattatgccctaaataagagaccctctaactgtaggatcagaaaaaatrtatgtaggtaaaatctgttacaatatacatactgtcaccaaatgaacatgcaaatagcccacagttgaaggtcagatgccaatataatatgaaaagcaatatagatacttggagaatttttttaagtttattctcacagaattcaggaatgggttattgagaattgtaatacaaaagacttgaaaattatactaggtcttaagctagttggaactgttttcttcttcaaataaggtctagaaatcaacagaagaggaagtaagctatgtcccaatacctcatacccagaagctcatcttgtttatgacagaagaagcccatgactgtgttgaacttatc

SEQ ID NO: 184003 - DNA, 596 bp, Homo sapiens
tagctagtattttaattcagattgtcctttttctagagccagaaggcttaaccacttgctgatactgcctatccatatgatccaaatgttgtagttatatttggaataagtaaaatcaggcacrtattaagaagcagaaacaagatgcaaagtcaggtctgccttaccctaaactcacacacttgttgtgccatcctatcttctctcacacaaaagggaagcactgaaaaatcaataccatgataaaggaagattgaggtcaaatctacatgcttttggacaccagggcaaagagctttagctgcttatgttttgaagatagtaagcagtcctacaattattttagcaaaggtagtacaaaagtgcttaccttctttaggcagcgtaggggtagcaggaacactttcaaacatgccataacccaagaatgaattcggtatttgtgttttctgccaagcaaaatatctctctgcagaaaagggccctctctttagcttaaaaataaattcaggatgaataaacctcaaaaacttcaggggctaggtcaaaaacatatcttccatgcagaatataaacaccaactttttgtagagtca

SEQ ID NO: 184004 - DNA, 609 bp, Homo sapiens
gtaccatcttgcatctcttatttcaatggaaaatgataacataaaagttgcagtggttttttgtccttgcagtagtttcctgagaatgatggtttccagcttcatccatgtccctacaaaggaaaacttaaagtatgataataataataataataataataataataataataataataaaagaatttctgccccatctaaaaaaaaagttgcagtggaatggttgcacatttacattgctgatggcagtaagtttttataaatcttttctaggaagcatgttgtcaaatggtgtaaatatattcctatttagtaataggcattctgggagtctttcctgggtttgacaattctaaatatagaaaaagatgcataaattgagagattaatttgtggggggtgtgtgtgtaattagagcttaatatcagaaaaagccagcacaggataagttaaatgatgacatacccattgcctagatgaattaactaaacattttaattatgacagctatgtagcaasttcaaaagcatgtataatatccaactaggtgtaaaagaaataagcaggatatttaatgggaaatgcactaggattataactgtgtaaaaa

SEQ ID NO: 184005 - DNA, 620 bp, Homo sapiens
tagtaaattcttagtggatgtcagctattattgtcatcactgctgttatcatttgcatctcaatagatgacattctgttgctgaaactacagacatctctgggataaaaaatgaatggtacttttctattacttatgccttggagtgatgtcatgtattgagtaattttcctcttgagtggagctgacgrcagagttttatgaggaatgagagagggaggatgatgaagagcaagaaagaggatgaagatcaagattgagaacttggactttgtgtgagaaaggagatctgagtagcgactactctcctggaggatggaaaagaagattcaagagtgttcaagatctcactttcatagaatcagctgaactatgttcagggctggggtgagaccacagacaaagctagcaaggtgcctggattagggagctcaaggtctagtcagggatagaggaatgtaaatgggccattacaatacaagtctcaagtacttggatggcttagaaactcacaggcagtggcacttaactctgacccaaggcaatgaggaagacttcctggaggcatatatatcttagaggcttctgaagagttcagaggacataggaaaagacagcaat

SEQ ID NO: 184006 - DNA, 620 bp, Homo sapiens
tagtaaattcttagtggatgtcagctattattgtcatcactgctgttatcatttgcatctcaatagatgacattctgttgctgaaactacagacatctctgggataaaaaatgaatggtacttttctattacttatgccttggagtgatgtcatgtattgagtaattttcctcttgagtggagctgacggcagagttttatgaggaatgagagagggaggatgatgaagagcaagaaagaggatgaagatcaagattgagaacttggactttgtgtgagaaaggagatctgagtagcractactctcctggaggatggaaaagaagattcaagagtgttcaagatctcactttcatagaatcagctgaactatgttcagggctggggtgagaccacagacaaagctagcaaggtgcctggattagggagctcaaggtctagtcagggatagaggaatgtaaatgggccattacaatacaagtctcaagtacttggatggcttagaaactcacaggcagtggcacttaactctgacccaaggcaatgaggaagacttcctggaggcatatatatcttagaggcttctgaagagttcagaggacataggaaaagacagcaat

SEQ ID NO: 184007 - DNA, 520 bp, Homo sapiens
cagcatcaattgcaggtgtgacacctttcattcatttacattgggacagactaatgctgtagacataacactgcacttggagaccagctagttgcattcttactgtaatcatggagaatatacctaaactctttaaacttttttttcacaagtaaaacatttaataacaatctaaaagttaattttttttttttttttttttttttgagatggagtttcactcttgtcgcccaggctgtagtgcaatggtacgttcttggctcactgcaacctctgcctcttgggttcaagcaattctcctgcctcagctatccagtagctgggattacaggtgcctgccaccatgcccagctaattttttttttttttttgkatttttagtagagacagggtttcaccatgttggccaggctgagttaattttatttttgtgactcactcatctactatttatagggcaaccaccaaatgcctagtgatatctctgtgctgggatatgtatgaagtggaatacaacact

SEQ ID NO: 184008 - DNA, 569 bp, Homo sapiens
actggaagaaagctctaaattacttttctggagctagcgttcacctcttctttcttatcattctctgaggcttgggaactgctatggcaacaagaaaattcccaaagggaaggtcatctgttccatattagyaatgctaatgctgctctccattagtttggagagccatgtgctgactctgtgagcagagagcaaaaaccaaacagaagttagcatgattaggagttattaatttattatcaagacaaaatagtctcattctttttgctgcttgcagcatacattgacggcaggagtccaactgcctgtcatttattcttccaatgacccttaatctgacttgaaattgttagtcttttcacatttactgattgcattttaagacaaattaatttaagttaaataaggaactttcacaaatgtaaaaaattgcaagatattgatttatctctggggtatgtgaattaatttgtctttgtgaggagtttgatacagtcttctaactgtactattgtaatcactcaggttttaataaattttaaaaagtgcaatataatttaaatggctgt

SEQ ID NO: 184009 - DNA, 566 bp, Homo sapiens
ttattatcacaatagtttacctggagattacaattaatattttaacttaaaacaatttagttcagattggtatcaattttatttcaattgtatacaaaaatattctttctgcatagctctatatgttccttctccattgtgttattatcgtatagatttgagttactatctactgccctttcatttcaatctgaagaatttcctatattttttcctagggcagatctacaagctatgaatgctcttaatttttgtttatctaggattgtcttaatatctccttcattcttaaatggtagtttagctttcagcctttttcttttggtattttggatatgttgtcctactgccttctagtctccatggtttctgcagcgaagtcaggtagtcatcttcctgaagatcccttgtatatgatgaccaggttttctcttgatattttcagaattctctttggatttggctttcagcagctttactgtaatgtgtccatgtgtatatctttacgataacactactgaagatttttgaggacgcgtagrttaatactttttctcaaattataa

SEQ ID NO: 184010 - DNA, 450 bp, Homo sapiens
accaagtaggtgtgagtcagaaatgagtgacttgaggtggcaccacacactagaagaatgtatcttccggcacatagaaaagtaggaggcatttgtttgcttggggctactttaacagcattttttgcatccgttctctactgactgaatcctgtggcatagcagggcattttccctggctcattttccctggttctggttgcacaatattcagggctaggtccttgactcttctgtattgtatattggaatgattctttttattcaaccacctaaagtggattatgttgtctaaaaaaaaaaccaaatacatgatactacttctggagttgtgcagtaagaagctcaacaagccctctaccgaaaaagcattgaaaaaagaaggaaaaagaaaaggcaaaaattgacaaaayaggaatgaaagagggatcatcgctactgaccctgcag

SEQ ID NO: 184011 - DNA, 563 bp, Homo sapiens
acaggctgcatttattcctcactcacatagatctgttgttactggattggcattcatactgaagagggctagaatttaagactagaaaactactctagggaaacctgtaggtgaataactacatctgtcagtagctaagcaatttcttgtttcaatgacagacatgatatttacagtgaaactgacctttttttgtatgtaagagattcagcacaggrtttcacttcctatggcaggatatgaaattgactcatgagatctgaccttcttagtactttcaaggtaagacagagaaaaaaaaaagaatccctaaaattgacaagtatgttacaaccagtttctaaatgtgaacactgggagaaagatagttgaaacacaaagtttagataaattttgtattacaccggactgaatgcctaccttagttttagttcaacattttctaatactagattttcttgggaataaatgaggtgacaattgcatcaagataaagtagcatgtcatgaaaattatgcatagaatatctctatgaagtcagatttttccatcactcaaattag

SEQ ID NO: 184012 - DNA, 664 bp, Homo sapiens
ttctagcagttaacataggagaatatctttatgatggggtagataaagatttcttaaaaaggatataaaattgctattcataaagtaaaagtttgataaattggactttatttaaaataagtacttgctgtttctaaaaagataaaataaagaacatgaaaatgtaagctacagactgattttcccaatacacgtatctgacacaaacttaattccaaaagctactaagatatattagaagaaaaagattaacaatctagatttttaaaaaatgaccaaaagactcgaatagtcacttaataaaagaggatctagacagccaaaaagtatataaaaggttactaagcaacattatacattatcagggaaatgcaaattaaaaacacaatgaattaccattatttttcaccggagtggctaaaatgaagaagagataayaccaaaggataaaaagcaggcaaagtgattagaactcatacagtactagtaggaataaaaaatgtcacaaacactttaaaaaactgtttagtatgtatccaccaaagatagacctatgtatatcccatagccctttgattctagtctgagtagacttgtgaaagaaatgagttgaatgcattcactaaaaaattgtattataatgttcatgacaacattacttata

SEQ ID NO: 184013 - DNA, 422 bp, Homo sapiens
gacttcattctttttgtaactgcacggatggccaatttcacgtaactagttccatgttgatggacaatcagtctttgctgttgcagacagtatcacactgaatgtgcacatgcggcaggttgtttaaagatattcaaatstttccagttttcacgggtattgccaaactgtcctccatcagcaatgtataaaataggcctggtttcttaatatcccacaagcagaatgtgtcatcaaatacttgaattttttccagtcttatgtgaaaaacggcatctcagtgagggagaacgagtatatttcatatgtttcaggatcactattatttctttttttgtgaactgaatgtccatgtcttttgttctccctgaccccgctttttccattaggatgctatttttttttttttgaggcggagtctc

SEQ ID NO: 184014 - DNA, 535 bp, Homo sapiens
ggtaatccttgtaaaatccattatttacttggaggctaaaaaatgattatttttctaaagctatcatttattctacatatacgagtgtggattttttcataataaaaagctttcccttattatccaaggtaaacttcagttcctcctaaaagacagaatcaattcttctctttaattcacaatattcagaactaggacttgaaataatcrtcatttcaaatagtggagcaaagaggtttatcccctcttagtattataatactattgtctcaagagtatttgttcaatattttacaattatttctagtcattattctttttgatggcaagcaaatttttaatatggtcataagtttaggtatactatagcctgaaaatttaggaaatgatgaaagcattataatcagttttaaaatgaaagtagttatatttataatatattcctaatctttgtcttgaaatgacagaaggcaaaccttacacatacacagcaaatgtctcttgtttctaagcagagaacagaaatgtactaaaa

SEQ ID NO: 184015 - DNA, 394 bp, Homo sapiens
aattcagacatgcatgggtgaaatctgtgattctgctgcttaaatgctgtctgacccttacaaagttatttaatgtcctggtgactcagtcaaatgcctcctccatgggagtgtagggatgtgtcatgagacatcatgcggagagtgcctggcacatagtaggtgtttgtaaatcacagctgtcttcacctgtaatagattacgttcattaaaacttgtgttcactaaaacttcttaatagccgttcagttttcaaaaaaattatcacrtttaaatttgataaagaagaaacaaaacaaaaattcaacaaaaagttcaatccccaaatatcagatagcatgtcgaaattttcaatgagtttctgagtggggtattatggactcaagaagctttt

SEQ ID NO: 184016 - DNA, 535 bp, Homo sapiens
tcaaatatcagctcctccactaacaaactagcaatgtgatgttatctcattttcttcatctataaaatggggataataacagtgtctaattcacagtatcattgtgaagattgagtcaatgtgagcaaggcattttgaacactacttaacatggagtgtgccccataccagtgtttacaaaccttgtgagccggtggaggctaatctctgtgtgtagcctgacatcttcacttggaagcctatgtatctctacmacttaaaaatcatattcatttaaaacgttttaatttttgagattgatttaattacataaaaataattcaaattttaaaaaaatgtttattttaaaacaaaagatgataaggaaatatgtaaaagtgtcaaccactttctctggttgtagttttggacttttctttttcttctttaaacttttgttataaatcttccaagttttattgaactaagatatagcatagtctcatcagaaaaaaagaatataaaacatctaaagcaagatgtataatcaggtaat

SEQ ID NO: 184017 - DNA, 460 bp, Homo sapiens
caacacagtggaaagaacctgagtctgtgtgtcaccatgctgaagtaagccacctgactgagcaagggacaaacttatttgaggttaagcctctaaaatttcaggagtttatttcttatagtagtttgtgttgcattaactaataatagaggtaarctaaagagatcatattcaagaaagagaataataccaaagatcagccaggaaagcatgtctattaatcaccaaccaatggcagaaaatattaggacccaaattactgaagaaaacagagggttggagaattagggaagatgcaagtaatatgtggtaggttagaacaagcaagtagaaataggtttggactaatgccagataaatattttttttctgtgaaagttttttatgttctcctgcctgcaggttgtatgaaaacactgggttcatggaacagggctagcctgagatgaaccatttactt

SEQ ID NO: 184018 - DNA, 583 bp, Homo sapiens
gtgattaggaatgtgagctttgttgcttctggacagtagaaccacttagttttctctttttagatttatttctaatgttcttgtctccttcagtttgtctttttcttcccagaggcctcagtctatatattacttatccttgtttttctcttggactgatgttccctcttcattttttctttttttttaaatttgtaatacttctctattagaatagtagtttgtgttcattgagaaaatraaaaaacatagataagcaaaagaaaaaccacacactcacacttataatcaactcttctataatctaccacccagctatcattaccaacacagttaacattttattgtggacttttctagcgtttgttttcaatgcaaatttatacacaagcagaaaaacataagaagagagttaacagatagtttagggagtaaaagataacctaaaacatagggaaaatatccaaagagtatccttagagatatttgaaaagatattagatccataagataataaaaatgttggaaatgagctataatcagaagcaagaactttggaaaattcaatttataattgaataaa

SEQ ID NO: 184019 - DNA, 544 bp, Homo sapiens
ttcagtttgtctttttcttcccagaggcctcagtctatatattacttatccttgtttttctcttggactgatgttccctcttcattttttctttttttttaaatttgtaatacttctctattagaatagtagtttgtgttcattgagaaaataaaaaaacatagataagcaaaagaaaaaccayacactcacacttataatcaactcttctataatctaccacccagctatcattaccaacacagttaacattttattgtggacttttctagcgtttgttttcaatgcaaatttatacacaagcagaaaaacataagaagagagttaacagatagtttagggagtaaaagataacctaaaacatagggaaaatatccaaagagtatccttagagatatttgaaaagatattagatccataagataataaaaatgttggaaatgagctataatcagaagcaagaactttggaaaattcaatttataattgaataaaacagtactttaatgcaaggttaggaagatagagttgaaaaattatttca

SEQ ID NO: 184020 - DNA, 385 bp, Homo sapiens
tgacattgtacagcaatgtcagtgataatgtactgcatacttaaaaaattgttagaagggtagagttcaggttaagtgtttttatcacaaaaaataaataaattcaaaggaagtagataataacgaaaaatgaaatgtacttgacttatgaggcaatgtaagagttctaggctaggatcctgaaatatggcttctaactccaaggccatattcattcagctgtgggtccctgaggaagtcacttaacttttctgtttcatagatgctatatatatatatatayacaatgtgctgttggacaagatattctccagtgtcttctttagcctttaagttgcagtctcttttagttgatccctatgatcaagatatatatgagtggcaa

SEQ ID NO: 184021 - DNA, 454 bp, Homo sapiens
agaattccagatccatatgcttagcatactgatggcatcattactgaaatctatcacaggcatttccaactcaacttgttcaaactatctgtcccccttgctcccattgtccctgtctcccaccctgtttttattgtcattttagttaatgattctgttctccagttkgttatccaagaaataaatatgtgaattatcttgtttcctctctctcactcttcctaagggttccactcaatcaaatggttattaagctcttccagtgcactttgtaagcttcgctcaattttgtttatcccctttgctggtgacgtactccacatcctcgttatctctcttgtggacttttgccatagctttcctctgcactccttcctgtcagggctgccctcctctacatcagtctctacactgttgccagtttctaaaattcatactgggtcatgttactttc

SEQ ID NO: 184022 - DNA, 514 bp, Homo sapiens
tgaaaaacactgtaatgaatgaacatataaatattttcatatttataaytatttcaagggcagttgattgatagagcaaaaataatagcagtgcaatgtaggatttataacttttagaagtaaaacatatgacagcaattatacaaagcatgcgtaggagtgaaaggaattacactatggtaagcttcctacaaatttgaaaagtgatatactatttagtaaaggattactatgagaagttcaggatacatattataatatccagatccaccaaaatttctaatttaaaaattcattagaagatattatagagaattccaaaaatattcaattaatctcaaagacaatgggaaaagaggaagaacaaaaacaaaaccataagaataaaatagaaaacaaatgcaacatggtagacataggttttaaggttatccctgaatgcaaagcatatttttttctcttactgaggtatgtgatgtgtttagccatagtggttgcaggaaagttccagttt

SEQ ID NO: 184023 - DNA, 439 bp, Homo sapiens
tattcctgttttcagagggttaatacagatagaaatagagggtgccctgatagagagggagataactagatcaaaaataagaactcttaatgaaatcagagaacacaaataatgaattggaagacaaagaaaaaaagaacaagaagagtatgtgctcagaatgtgaaatagtaaaagtgatgatttcwcagagcaaatatgctgcaataaccagtagctgcaatattgtatatatacacaatattgtgtgagtgtgtatatatatatacacacacacacacatatatatacacacacacgaagggaaaacactagtcctatataaaaatctgatcaaatatcactttaattatttttaccaaaaaattttaattaacaaaatgtcattccttttacatgtatatgaccaaattagcatcatatagatccatattgtatt

SEQ ID NO: 184024 - DNA, 464 bp, Homo sapiens
aaaatatttttttcatagaaaagtatactataaaaatckttttcatatgttacaatgatcactatgcctctcttccatctgattgttcaggcacatctcttgtcagacagaagaactgctctaagttggtttctttcttcgctgtgacttgctttgtaaacctttctctgaatccagaggccgtaatgaccaatctttaaaggcaggatttagagagctttttgctatgtattatgctttcttcaacatagattttaaaaattattgcacaggatatttggctttttattccatctacaatttatttttccatatttatgaggggagaataagtaaaatgattatatatatatttgtggtttgtgtatcctcagtattccaggtattaaagaagttggaaatgtctgacttgacaaattaaggctaagaaatagtgagatattattgcaggagagaaatcatgt

SEQ ID NO: 184025 - DNA, 468 bp, Homo sapiens
aaaatatttttttcatagaaaagtatactataaaaatcgttttcatatgttacaatgatcactatgcctctcttccatcygattgttcaggcacatctcttgtcagacagaagaactgctctaagttggtttctttcttcgctgtgacttgctttgtaaacctttctctgaatccagaggccgtaatgaccaatctttaaaggcaggatttagagagctttttgctatgtattatgctttcttcaacatagattttaaaaattattgcacaggatatttggctttttattccatctacaatttatttttccatatttatgaggggagaataagtaaaatgattatatatatatttgtggtttgtgtatcctcagtattccaggtattaaagaagttggaaatgtctgacttgacaaattaaggctaagaaatagtgagatattattgcaggagagaaatcatgtaaca

SEQ ID NO: 184026 - DNA, 541 bp, Homo sapiens
ggcattttaattgtttttaattgtttaattttaagtttgtgtgggtccatattaagtgtatatatttatggggtacatgagatgttttgatacaatgtgaaataatcacatcatgaaaaataggatattcaccctttaagcatttatcctttgtattatgaacaatccaattacactcttagttctcaaacaggcatatgagtacatgctcaacatcatgagccattttaagtgcygtaagaaagattgtgaaaatgcgatgtgagaattatcatctgtaagttcctaaaaaggaattttatcatggcgagtgacatacctcatagcttgtcactttgcttctacattactcttttgtctccttctgtttcccaccctgtagccagaatgatttttagaaattaatgtcagattatggcactcttctgattaagatttttgcctggcttctcattgttttaatcataacattcaactctgttatttgatctacagaaccctacattgtaagacactggcaagctcttattctaacactttt

SEQ ID NO: 184027 - DNA, 383 bp, Homo sapiens
atttaattgtatatgaagagtttctagtataagaaagcagcattgtgtcaacagtgaggcagtggtgtgatctattcttatttatcttaacattctcaaatagaccgtcttcatttcctctatgtattttcacaattatgatattagcatcatttcatgtttcttgacattgtttttgtgactatagaaattcattttctttttatccaaacagatatattttaagtataattacagttactttgcttcatttgaaaatattttgtctaaatcacaatattttctttttctgaatatttgcagcattccttacrtttctcactcttagaaagtatttatcttctaaatgcctactcctgaacttgtttcacagattgccttgt

SEQ ID NO: 184028 - DNA, 588 bp, Homo sapiens
actagttatacttttgtgggagaattgatgttgggtttttacaattttattgttttgttgacatcacaaagtgtcaacaaattgacacttgatattgttgaaatagttttatgagtttgcaaaccattatgyttttagaatttgatgtctaccaaatattaaatgagttggacatttctcacttaaatgttctgtataattatcgggttgtgtgctgcttctagtaaataattattatatactgaagctatatgtttctaacacaaactttataatttctgttctaacatgcatctcagaatatagggacaatatagctatatgtatgacaacttcaaaattttattttaaaagtatacataaactatattattttatgtggtattgcatctttataatgaagacaattttttctctggagaaaatggaagaatttgcccagagctctgatgaagacggtgttgtgttttctctggagtcagctgtgcaaaaccttacagaagaaaaagctgatcttatcacttcggccctggctcagattccacaaaaagtcagtacaacctccaatctttataagaaactattcac

SEQ ID NO: 184029 - DNA, 588 bp, Homo sapiens
actagttatacttttgtgggagaattgatgttgggtttttacaattttattgttttgttgacatcacaaagtgtcaacaaattgacacttgatattgttgaaatagttttatgagtttgcaaaccattatgtttttagaatttgatgtctaccaaatattaaatgagttggacatttctcacttaaatgttctgtataattatcgggttgtgtgctgcttctagtaaataattattatatactgaagctrtatgtttctaacacaaactttataatttctgttctaacatgcatctcagaatatagggacaatatagctatatgtatgacaacttcaaaattttattttaaaagtatacataaactatattattttatgtggtattgcatctttataatgaagacaattttttctctggagaaaatggaagaatttgcccagagctctgatgaagacggtgttgtgttttctctggagtcagctgtgcaaaaccttacagaagaaaaagctgatcttatcacttcggccctggctcagattccacaaaaagtcagtacaacctccaatctttataagaaactattcac

SEQ ID NO: 184030 - DNA, 384 bp, Homo sapiens
aatggaagaatttgcccagagctctgatgaagacggtgttgtgttttctctggagtcagctgtgcaaaaccttacagaagaaaaagctgatcttatcacttcggccctggctcagattccacaaaaagtcagtacaacctccaatctttataagaaactattcacacaatggagaaagtatggctttccacctggaacttgaatctcatttttcaatttgcataacaggcactagatttatgtaacaatttggaaagtattatggtartttatgtgagcacaactgattatttgtctagtgatctttgctattactttagtaacacatctcttggttgtcgtttgttaataataaagtaaaaatagagcattgagtccctattt

SEQ ID NO: 184031 - DNA, 500 bp, Homo sapiens
aatccaagtatccatcgattggagaatgaataaacaaacggaggtgcagaatatgcagtgtactcatatacatctgtgacatgcaataatacagatgaatccaaaacatgttaggctgagtggaaactagccacaaaagagtacctactgcatgcataatttcatatataagatgttctaaaacaatctcttctgggaagcaagggctgagttgggctgggaagaggcatgaaaggacatttttgtggtgataataatgtcttagggggtttgggtttacagaggtgtaagcatttgttgaaactcaaaaaatgtgtagtgaagatatatgtatttcattgtatgtaaattttataataaaatactgaaaaayatactctactcaattatatatatatactgactataagtaaaaaaagcacatctcttcctagattttattgttaaattgaatgaataagaactgtatatctttcttatctggttattgtgagtagcca

SEQ ID NO: 184032 - DNA, 509 bp, Homo sapiens
gaaacactggcataaacatgctgaaaattagttaatactctaataatatttatgcttccctgcttcaactttgttctcagtcttccttataatttgttgttccatcttcagcaattccttttatttcatttttgactattttaaaacttatgcactagcctagaacctctgataaatatttccactaaaaccaccaaagagaagtataggcgacactccagtatgaaatgtgttaccacttcatgataaagactgggrattttttcccaaagaaaatgcagtcgctggaaataatagatgtgctgctatttttcagttgcaattgaaatatccctacatagggagaaagggtgtttgtaatgattgaattaggagacagacaacctagaaaattattgaacttttattgttgaagaggtaactacagttgaaatagaaataaagataatttgtttctggccataaagaatgtaactgtgtataaaaaaatggtaactgttgtagtttat

SEQ ID NO: 184033 - DNA, 509 bp, Homo sapiens
gaaacactggcataaacatgctgaaaattagttaatactctaataatatttatgcttccctgcttcaactttgttctcagtcttccttataatttgttgttccatcttcagcaattccttttatttcatttttgactattttaaaacttatgcactagcctagaacctctgataaatatttccactaaaaccaccaaagagaagtataggcgacactccagtatgaaatgtgttaccacttcatgataaagactgggaattttttcccaaagaaaatgcagtcgctggaaataatagatgtgctgytatttttcagttgcaattgaaatatccctacatagggagaaagggtgtttgtaatgattgaattaggagacagacaacctagaaaattattgaacttttattgttgaagaggtaactacagttgaaatagaaataaagataatttgtttctggccataaagaatgtaactgtgtataaaaaaatggtaactgttgtagtttat

SEQ ID NO: 184034 - DNA, 509 bp, Homo sapiens
gaaacactggcataaacatgctgaaaattagttaatactctaataatatttatgcttccctgcttcaactttgttctcagtcttccttataatttgttgttccatcttcagcaattccttttatttcatttttgactattttaaaacttatgcactagcctagaacctctgataaatatttccactaaaaccaccaaagagaagtataggcgacactccagtatgaaatgtgttaccacttcatgataaagactgggaattttttcccaaagaaaatgcagtcgctggaaataatagatgtgctgctatttttcagttgcaattgaaatatccctacatagggagaaagggtgtttgtaatgattgaattaggagacagacaacctagaaaattattgaacttttattgttkaagaggtaactacagttgaaatagaaataaagataatttgtttctggccataaagaatgtaactgtgtataaaaaaatggtaactgttgtagtttat

SEQ ID NO: 184035 - DNA, 256 bp, Homo sapiens
agccatagtggaaataagggaggctaaaaatactattactaaaatatctttaaattttggaaattaacaaaatacactccaaaaaaatttaaagtcaagaagtaaatcataagtatgcatgaacttttatctcagyaattctgctctcaattatatacccaacagatatacgtaaatatataaatctaatgttatatagaagagtgttcatgacagaattatcaacagtgtccaaaacttattagccacccaaata

SEQ ID NO: 184036 - DNA, 505 bp, Homo sapiens
aattagttaagactttggagaactgaagggagtgcatgattggttttaatatgtgaggacctgatatttggaaggggccaagggaagaatgatatgatttggctgtgtcctcacccaaatttaatcttgaattgtagctcccataattcccacctgttgtgggaggaacttcgtgagaggtaattgaatcatcgtagcacatctttcccatgatattcccatgatagtgagtaagtgtgttgagatcttatagttttataaaggagagtttccctacacaasccttcttgcctgcctccatgtattacataacattgcttctcatttgcctttgtcatcattgtgaggccgcccaagccatgtgtaactgtgaatctattaaacctctttcctttataaattacccagtcttgggtatgtcttaagtaacaacatgagaataggctagtacaatatcctaaaactataaaaccctagaacaaatcaggagaatagaacataactg

SEQ ID NO: 184037 - DNA, 432 bp, Homo sapiens
acatgacacaattcctctttagaaacttaaagatgataattctcaaattgtattttaaggtgtatatcttttaccacttaaaacggctcatgatgctgaccatgattttatacgcctgctggagaactaaaggagtgtaactggatatttcataacacaaagataaatgcttaagcaatgggtagcctttcttcatgatgtgattatttcacactgcagcctgtatcaaaacatctcatgcacctcatagaaaaatacccctactatgtaaccacaaaaactaaaaattaaaagaaaataaaattgctcatatgttctctgcctcaaataattaactttctcacctgaccctccattkttactttaaaaatatttgtcaattatgaaattccaatttaaaagccaaactttctatgatgactcaaattaaaa

SEQ ID NO: 184038 - DNA, 474 bp, Homo sapiens
agatattttcttcactgtaacaggttctgtggagatttgatgggaataaaccagatactttaggactcaatactcggctgtacaagtggataccccagaatgatcttcttggtaagtctctgaagaacaaatactgaatatattagtaacagattattaaagtgttaatagytatcatgaaacaagcttactgaacatttgttatggaaaaacttaaaaataaaatgaaacttctttatatttattttccagtcccgggggaaaagaataaattgttggcattttatgatatgcacccacattctttacaatcagagtcagagtatctttatttcaggtgttattacctcccacagaatttttctggcacttcctgggttgtcttcctttctcatatttctacaactttacacctgttctttcctcctctgtagggttatttcaaatgtcactaaaagtaacagctcttctgct

SEQ ID NO: 184039 - DNA, 381 bp, Homo sapiens
ggatcatgcctgtttggggaaagataacaccagtgtgaggcccaggagtttctcagaagaaattctagctggatgagcatttaaggaaggagatgaagtcagcgtttggagacaatgaattagatggctggatatgtcaccgcaatcatgaataataaatgagcaggaagaggctataattcacagagtgggagaggagactagaaacttgtagtgcctggggaaagagcatctgagacatgccttggacttgygaaaagaaaccttcttgaagaaatgcttttccgcaaaaatgcctgttatcgggaagagtgtccatgtttccgagagacaaaggatttatggctgtaacagaaactctctccgtgcaactccaccctc

SEQ ID NO: 184040 - DNA, 417 bp, Homo sapiens
tgcattcgaagaactttctttgcatctcatgggctaaagaataaattaggccaggtgcagtggctcacacctgtaatcccagcactttgggactcctaggtgggcgaatcacctgaggtcaggagttcgagaccagcctgaccaacatggagaaaccccatctctactgaaaatacaaaattggccgggcgtggtggtgcctgcctgtaatcccagctactcgggaggctgaggcaagagaatcgcttcaacccgggaggcggaggttgaggtgagccaagattgtgccattgcactccagcctgggcaacaagagcaaaactttatttcaaaaaaaaaaaaaaaaaaaaaaraaagaaagaaaaagaaaaagaataaatcaatacccctaaggggcacagaaagaaggaagaattc

SEQ ID NO: 184041 - DNA, 575 bp, Homo sapiens
ggccatggggcactttgggtctgggaatggcaagaccagcaaggagatcaccattgctgactgtggacaactctaataaatttgacttgtgttttattttaaccaccagaccattccttctgtggctcaggagagcactcctccaccccatttgctcgcaatatcccataatctttgtgctttcgctgcagttccctttgggttccatgttttccttgttcccttccatgcatagctggattgcagagttaagtttatgattacgaaataaaaactaaataacaacaacaacaacaacaacaaaggctataataggccactraaagaagcagccagaggaaaagaaactaataataatagctaacatttactgagcacttaccacataccaggtactattctaagtgatttacgtgtactaatttaattaatcttcaataacaactccgtaaaatatttactgtcattaccctcattttatagatgggaaaactaaggcttagagaggttaactaaactttcctaagatccaggatttgaatccaggcagtttgatctagaatctagagcaagct

SEQ ID NO: 184042 - DNA, 501 bp, Homo sapiens
ccttttgaaacaatggcatcagttgtttcaaggggcagcagtactcagccaagttcagaagagtcattgcttggtttgaagctccaaaatgatttttttttagccctrtgtgaagcatcaagttaagtcaagtattttttttatttgctggaattgggcttttttgaaagagaaagtgattttcttaaaaatacaaggatagatttttttgaaaatatggtgtcatgccatgggggatgaagatcacagaatttctactgtgagtcatagaataaggaagaagaaagatgtgctatgagaatagttaaaaaaaaaaaaaaatgaaaaagcctttccggtgctggcagaagctggacaaaggtaagagaagggcaaagtgtttgatgtgcgtgatgttgtctgactcttgtctttcaccaaactcagggctaagggattaagggatatcctaaaaacacccagattggtttgggaaaatctaaaaacatcgtgtgctgggac

SEQ ID NO: 184043 - DNA, 522 bp, Homo sapiens
attagtgatacatcttttaaagtcattgattaaaatgcgtatttcttggctcactctcagaaattaagattgatttagtttctggaagggtcacaatgtccaccttttaacaatcatcccagataattcagatgcaaaagatccagaaattaaggtctcaaaagcactgcaaatgttaaatgtaggttctatatgaacatcaccagcccagggccttagcccctacctgctttctatccatgatcaacggtgtatggggaagggaaggtgtctcaattaaarctttaaacaatcatgttaataccaacaactactcctcaaggtggtaaagtgtaaaatagaggtgaatagtggaatacctatgtcaaaaatctatgctttttaaaaaaatacttgcttgaaaaactcaggcttataatttatctagcaaagctttttagaaggaatagatgttgaactagtaagtctataatttgagatgaaaaaggatataattatctaaaaaggaagcttaactgcatt

SEQ ID NO: 184044 - DNA, 539 bp, Homo sapiens
gccactgtagcaagctatagctatgtaatccaacttacgattttgaaatactcttaagagttggctatataagttctcattttgcaaattttaaaaaaaggctcagagaattactctacatcatttgactactagtaattggcagaactaaaattctcctggatttttatgattccaactttgttctgttattcactgcccctttggacaacttttgttgtaatttcttgcataaaaaagaacacaactggctatgtttcattgaaaaaactgccatttcaggttatttattttcccttaactttgcagagacaatgcaagaattcaagctagtgagtctctctatgatatcaggaaatttggtgaatcacagaaagcacagatgttcacgaaatgtgatattgaatgaaaggccatgtatttgtgaaagaaaacctgtctgagaastctgttggcattcttttagttactcggataggaaaaaaaattttgctgtgtggaagagaatatacactggaccaagaggcagagaatgtggg

SEQ ID NO: 184045 - DNA, 636 bp, Homo sapiens
aaatgagtatttactattttgttgctgggagtaatttaaaaagagaaagtcaaatatatccattttcagttggtatgtgtgtgggctactaaaaagaataaaatgaaagaaatgttgatggtattcagtcgaaaaaaatgaggtaggaagtcagaaagccaaagwacactatggagaaataaatgttaatggtcagaatagtaagcagattgtaatatgttctatcatttttattcatcgcagaacaattgagaaagcctacttttatataagtacatgcacatataggtggtagttagaatcattcgtggtatgggaatgaatgataaataaaagatactgattactaaaataaattattaatattattaccttacttttggcctagacttttaaaagatttattgtgttcctactgcaagcttgttagtcagtcagggcaaggtaaaactatgactttttcaaagaggttaattgacttgcccaaggttaaatagcttgtcagtggaagcattggtgctggaaccattatttgctatcagttcaccattttattacaattttgttgctatcccaactccactccagtgaagagagaaaaaaataatttactcacatgaagtaataatatgggaa

SEQ ID NO: 184046 - DNA, 636 bp, Homo sapiens
aaatgagtatttactattttgttgctgggagtaatttaaaaagagaaagtcaaatatatccattttcagttggtatgtgtgtgggctactaaaaagaataaaatgaaagaaatgttgatggtattcagtcgaaaaaaatgaggtaggaagtcagaaagccaaagaacactatggagaaataaatgttaatggtcagaatagtaagcagattgtaatatgttctatcatttttattcatcgcagaacaattgagaaagcctacttttatataagtacatgcacatataggtggtagttagaatcattcgtggtatgggaatgaatgataaataaaagatactgattactaaaataaattattaatattattaccttacttttggcctagacttttaaaagatttattgtgttcctactgcaagcttgttagtcagtcagggcaaggtamaactatgactttttcaaagaggttaattgacttgcccaaggttaaatagcttgtcagtggaagcattggtgctggaaccattatttgctatcagttcaccattttattacaattttgttgctatcccaactccactccagtgaagagagaaaaaaataatttactcacatgaagtaataatatgggaa

SEQ ID NO: 184047 - DNA, 596 bp, Homo sapiens
aaaagatgggcaaagaagtttaacctgaatggctacaatcctggtaaaatatctataacatcaccaacaattctagaggttaaaaataataaaacatatatttttatattatattggcaaaacaatgaaaattacaaaactacatgttgaagaagccattggaaaacaagaactcaataactattagaagttctatacattgctgcagctgtttaataaaacaatatgacaaaatgtactgaagtggaaaatgtacacacctcatgacctagtattaccatttctaagtatattgctcaaagaaattcccatacatttgtggaagtagaygtgcagaccgctacagtctagcatgatctgtaatagagaaaacttggaaatgacacaaatatctatccgcaaacaaaataataaatagtagtatattcattaatgggatcccatatctggcagttaagataaatattctagaatagatgaataatagtcaatctggattttcaaaatataaagtagaataaaacaagtaaagtgcattttacatataatatgacattatttgtgaattttacaaaacacataagtttgtataatgt

SEQ ID NO: 184048 - DNA, 521 bp, Homo sapiens
attgaggtaacagcaaacaagtccatcttaagagtcagatggacagctaaaaagaatctaagaggtccccaataaccatcacttttcctttctattactccaaatgtttttcttttgtcaacatctattaaaacaattctaccaggctactaacgttggctacatatctgatcacaggatcawccatttagctttggtacttttcaaaatgtaattagcccagaaaatagtgtaggttggtttttatggcatatacttgaaagcaggttttactaaaggaattagagacaacctaaatattctggtgtatcttcaatataccttactaccacacttgtcacattgtattttaattttgtacctgtttattaatatactcccccaattcagcaataaacttaaactcaaaaattactaggtgctcaaaaatgttttgtgttttgatttttgtttgctcattcatttttaagaattaaatatgtcaggggctgtgaaaggagaaaagggtggtgattgtttga

SEQ ID NO: 184049 - DNA, 439 bp, Homo sapiens
ggctagtgtgctggccatgctccataacgtactcaataacccagggtccttctatcttaagctgctgttattttggcttttctttccacttgtgaccagattaaaaatcctcactgaaacaactatgctggtataagttatttggaagaaacctgaattatagcaaatttgtactttagatgacaggaaataattaagggtacattaygagatattgtcccagagtctacaaagttgtcacttccaccttgaaggatttcatcactccagagtctccgagtgtcactatgtaggcaaaataaaaaaactaacacatgttgcctagcatcctccccacgtcctctacccatctcatcatccctgtactcagtccctgatcctcaaatcctctccctccttaacccatttattagggaaaattatcattaaacggctgttg

SEQ ID NO: 184050 - DNA, 567 bp, Homo sapiens
ctcaacttgccccctcccctgtggctgtgccttgaccctgaaaatcttcgcgcactcctgggtttcaccaccacacacacgcgagcgcgcgagcgcgcgaacacacacatcaaaaaagaaaaaaaaaaccgtgataaatgccctggagagtctaagtgcattaaggacctcgttctcggagaccccagacatgccgatgttggtgctgctgtggttggaaaactgggttggaaagcttcgcactgttctacacttgcgtgtgcgcactcagcaatcctttggccatctcatctgttgtgggcgaagagtttcccgtgtgatcgcgttcggttggggaagcagagtcccgacatctcagccggaaaatgcgctcccggagcgattactggcggcgtctgtaattgcttattaacagcgaatattcaggcwtctccttatccgcaacgaaacgtgccccccgcttccgtaataatgaaacgataaaatatgacggccccgctcttgaatctatctgaggaaacgcagcgaagaaacaagcagctggagtttaattcaatatcaaactga

SEQ ID NO: 184051 - DNA, 408 bp, Homo sapiens
gttccatgtattctcaaatattgaggaatttttcagctacctacaaayacacacacacatactcacacaaatcacagctttcaaggatttgtcttttgtctgtcagactgataagtatctcatacaaaagggtaaacatcatataaatacacaactatataaatttatcaacatgtaggaaaaaacaataatactttaattctaatattcctttagatatatattttaggtcaatatatccagagacagcactattcatttttaatgactagaagtgcagtacaactgtgagaagtatgtttctagcacttagacttagcaacatcttcaccagctcacatggcagacaaaactgacataaaaaaaaatagtaaattgtctgtccacacatttctactgaaaaaccgg

SEQ ID NO: 184052 - DNA, 350 bp, Homo sapiens
tcatagttttgtgggcatgtaggagtgtgtatattccactaataaattcagtccttcgatgagctatttcaaatgaataaaacagtttattatacatagatataacatatagcactacattataaatstttcatgcatgattttattacttttattttcatgtttactgggtaacgtcgtaaaataacggccctgttaaggtaattaatgttgaattacagtggaaatccaattgaattacttgtgacattcacattaatactaaatgggttcactgtgattaatgctgttaaatagatactagaggaattaatattgattagacaattattttaaagtgttgctgttta

SEQ ID NO: 184053 - DNA, 633 bp, Homo sapiens
taaatctcattttgcaaggaaaacattatcagttctttgtgattgaaagtaaaatttgtgaaatggtatttttatgattcatagaaataaccagtagattgatttaatatatggaagctagtattatatttagttttaagctatgaatataaaaaatattaagcactttttcatattttagcttcctcttacatgttttatttgaaaaagcaaaagaaaaaatgtggagctctgaaaaaagagaaactactagaaaacgtttatgtaaaatagttactataaaatttcatttatttaaaagacttcaaataaaggaggaagaggcaacagagaaacaacatttacatagtgctggtagcaaaacagaaataattcttattgataaaataattaycaacgtaatacttcaagatattttggcatataattttagataatatgatatatgcataaaggactgacattaaagctgaacttaacagtagaaagaaatggttaaatatactgataatttagtatgtgccaggaacttgttaaatatttaatatacattatctcatttaagtctaataaaaagaaacgagatatatactatatactattgttattcctattttaccaatgagaaatctc

SEQ ID NO: 184054 - DNA, 590 bp, Homo sapiens
tacttcccttaagcatcaaaatgaccttttacatgtatccagcagaatgtccttactrtattttcttccattttcatgggttcaagtgtgaaaagtatgcaggaaagctgcagctgtgcttaaaactctcattttctatgtgtggttcttttgatcctccaatgaaaggccacagaaggaaaaagcatgaatttctttgttttgagaaaaattcattacccacttgctcaatagatttgaaaaatccagtcaaattcccaggtagggtagtaatattttcagtaatgttcatgtagattatctctttctctgagttgagtagaaactgctctgtgatatgggcaaaatatgtttcaaaccacataattggtcggaaatgaagaaaaaatatgtcattataagggtatcgttctctttatggcaaataaaggtagagaggttgacgatacaaagcagacaagaaattgcacttctattctgagtggctttctcagataatctctagaggctttacaagaattaaaaattcttaatagcaacatcaaacttcagttactttggtttaggttttaaaacaaattgatttagca

SEQ ID NO: 184055 - DNA, 590 bp, Homo sapiens
tacttcccttaagcatcaaaatgaccttttacatgtatccagcagaatgtccttactgtattttcttccattttcatgggttcaagtgtgaaaagtatgcaggaaagctgcagctgtgcttaaaactctcattttctatgtgtggttcttttgatcctccaatgaaaggccacagaaggaaaaagcatgaatttctttgttttgagaaaaattcattacccacttgctcaatagatttgaaaaatccagtcaaattcccaggtagggtagtaatattttcagtaatgttcatgtagattatctctttctctgagttgagtagaaactgctctgtgatatgggcaaaatatgtttcaaaccacataattggtcggaaatgaagaaaaaatatgtcattataagggtatcgttctctttatggcaaataaargtagagaggttgacgatacaaagcagacaagaaattgcacttctattctgagtggctttctcagataatctctagaggctttacaagaattaaaaattcttaatagcaacatcaaacttcagttactttggtttaggttttaaaacaaattgatttagca

SEQ ID NO: 184056 - DNA, 416 bp, Homo sapiens
gattttgagaagaataaatctcttcccaaatggcttctgtttatctttaraagcaatttataaggaaaataaatctgtcataatcaggtcaccccagacatagtgctaaaagcattctaatatctgagaaatcctgtgaaataagaagcaatgctgattctgctcttaaatgtcacctaatggtcttatataaggttgtcaattttagtgttagttgattgttacatcttagaaaaaaattaactgaactgaagtatattcagcatatacgttgttttacaataattttttaacatagtttcttttgggacacttaacaattttcccattgattaaatatgcctacttgaattagatgtagttgctttactatacaactatcttagaggcattttgggagctctgagctagatgtg

SEQ ID NO: 184057 - DNA, 591 bp, Homo sapiens
agtcaaaacataactactcatcacttagaaacctgtaatctaatggtatttcttaataaaatcaggaatttagtgttaatttaaagtggttccaactgctgcatcccacacatttattgtctctttttctttggctgtgattttcatgttagagaatacaggttaggtaattttcccttgaagtattttcacatcgtctacttagcctgtttcacagagtaaaacataycgtaaattttctccgtaatttttcattcctcaactacaatgtgggctccaatatgacagaaaccaccccgtccccatagttgatgaccaggactggtatattgtaagttctcattcactatttgccaaattaattaaatttaattgccctctgaaatccgggacctaaggaaggcctccccataagtgaaaataattgatgatgtaaaaaacagcattcttctcagaagtacaaagtatgcttttcagacaaagatcaattcacatctttcttacatagcaaaggtgtttcaaactgtgtaacttatttaaaggccaagtaaagtaactaggtggaggcttttctctatgttcatgaaatca

SEQ ID NO: 184058 - DNA, 545 bp, Homo sapiens
ccctgaatagtaccaattgctgttaaaatataggaagctgatttattctaaagagcatgtggagcataaacacatcaaacagatttccactggtcctctaattttttccccccaaatcatcaacaagccagacacttggagtacaagtatagaatattggacatggctgtgatggttattggcaaatcttatacaaatagacaacagctctctggggacaaaatgkaggctgtggaaaaatatatctgaatatgacacatgtggccaccactcagataagatctttgttactattcttttattcatatatcatattttaagaaaaaagttgaaagatgaaggatttggatgtgcttgtaataaattcagactgttttgcttgtcccgtctttgaatcttcaagctttccttattaagctacaatgcctatttccagcatatggtaatagtgctgattgcatagcacctgtcattaggaattcaggaatataaacctcaaaggctttgatgggaatttaaatggaataccgatttgtcaatgcagc

SEQ ID NO: 184059 - DNA, 615 bp, Homo sapiens
ccagctaatattgtattgggatatatctctctctttagctctaataatatttgccttatttacctgggtgttctactgttgtgtacatatatatttaaaattattatatctcttgctgaatcactkgtcattacatagtgaccttctctgtctcttcttacagcttttgtcttaaaatctatttttttctgatataagtaaacctactcctactgtttccagatattctaaaagatttggatgttgtgctgtaagctgcatctgctttatggggcaccacaaacccagtgatgctgtggttcttgaagactcagagatactgccttgatggtcttagacaaaatcctgaagaattctctggattaccaggcagagtctcttgttttccttccttattttctcccaagcaaagggagtctctttgttctgaaccacctggagttgggggtggagtgacaaaatcacttctgtggccaccgcgactaggactgcactggttcagacctgatgccagcacagcactgagtctcacccaaggcctgatttaaccattccctggctaccgcctatgttcactcaagaccttgggttcctatactcagcaagtggcaaggc

SEQ ID NO: 184060 - DNA, 615 bp, Homo sapiens
ccagctaatattgtattgggatatatctctctctttagctctaataatatttgccttatttacctgggtgttctactgttgtgtacatatatatttaaaattattatatctcttgctgaatcacttgtcattacatagtgaccttctctgtctcttcttacagcttttgtcttaaaatctatttttttctgatataagtaaacctactcctactgtttccagatattctaaaagatttggatgttgtgctgtaagctgcatctgctttatggggcaccacaaacccagtgatgctgtggttcttgaagactcagagatactgccttgatggtcttagacaaaatcctgaagaattctctggattaccaggcagagtctcttgttttccttccttattttctcccaagcaaagggagtctctttgttctgaacyacctggagttgggggtggagtgacaaaatcacttctgtggccaccgcgactaggactgcactggttcagacctgatgccagcacagcactgagtctcacccaaggcctgatttaaccattccctggctaccgcctatgttcactcaagaccttgggttcctatactcagcaagtggcaaggc

SEQ ID NO: 184061 - DNA, 452 bp, Homo sapiens
ggctgataatggctggcatagaggcttttttaaaagtcaaacaaataaaactataatttcatttggtaatggatgttcatctaataatacaagttcaagccctcgagtataagttcaagcccttgagtaaagtatgtattctggttcacaggcgatgattagctaagacatttagagactaaggcataaaaagaatcaatgaaaaacatatacaggaagagaaaatacccagtgcaaaggcttataggtggactagttgagtatgtttaaaggaaaagggtgatactagtttaggatagtgagagaaggcagagargattttgatatgagatcagagaagtagggatgggccacctcatttaagaccttagaggtctgaatagagagtttggatttttcctctaaatgtaaacgaaagtcattcaaaggttgaagtagccaagtaacatgat

SEQ ID NO: 184062 - DNA, 477 bp, Homo sapiens
aagtgcaattgtattgggaagtgatcaacaacctattggaaaaaacctcttatcttgaagcatggtttttgcaccagacttttaacttttacttggaaagagtactttgagggaaacgtgtarcacttttaaatacatgcccttatggaaactaaaaatgtgcatgagaattcatattttgaaaactacacaattacctcttgaccctctttgagtgttaaatattcccttaatatgtgccatataccgttttaggttctgtaaatgtggaaataacagcagtaaacaaaacagacacctctgttctcaataatctaatggagcaaaatggaacaacatcttatggaacagtatgagaggaaaagagtgatcaaagatggggtcagaaaaatagcagaaaacagatgtaatacaatttgtaggccttttaaaagagttaagatttgacggtaggtgaagcaggaagtcaataaagtt

SEQ ID NO: 184063 - DNA, 652 bp, Homo sapiens
tttataaaaggaaaaaaaaacaaatttggattttatcaaaattgagttgggagggtgataactaggacatattgactcgtgggcagtagacttttcactgtatgtgctagtatttatccatgtaaaatagttgaataaacatctatacaaatgtctatacagagagctaacctgagaccagacacacaatgtcctcctttaaaaggtgctaaaaacctatatattttaaagttgatttagataatttaagaaagtaaactattgctatttatattaatcacacctataataactaatatttttcactgcacaaacagcatatcccaacacaaaaaggattatcctcccaaataggttgagatacaaagtgcaattgtattgggaagtgatcaacaacctattggaaaaaacctcttatcttgaagcatggtttttgcaccagacttttaacttttacttggaaagagtactttgagggaaacgtgtagcacttttaaatacatgcccttatkgaaactaaaaatgtgcatgagaattcatattttgaaaactacacaattacctcttgaccctctttgagtgttaaatattcccttaatatgtgccatataccgttttaggttctgtaaatgtggaaataacagcagtaaac

SEQ ID NO: 184064 - DNA, 638 bp, Homo sapiens
cagttgtaaagattcaataattatgtgtagggatgttttaaaggagagtcacagagaagtaagagttttatagcctttatttatagaattcaatggtgcctgtggctttatttttcaacctcaaagacctgagagcttcagatacctatttcctttaccaagggccttgggtctgaagggaaaacctccatagcttagtgtagttccactttggattcagtggatcttaccatctatcacaatgttggaggcacatcaagggtgctcattaaatttcggttaaattgaaataaatgtcttgctcttttaagaattttgacatcagaaaaatatattacattttagtgaaaaatgtccttgaacaagccgttttattgaaatttttcttcatctagtgcctttttttttggtctgacattcttcaccacacacagtttcctcactgattttgaacaaaagaatcattttctaatccattattataatagtctagttatagtatttccaaattgagagggtgatktttttggagaaagcacagattgttggagtcttggttttaccacagtgagaacttgggcaagtaggtgaacctgaattagcatctgtttttccacagatacaaaataagtagggag

SEQ ID NO: 184065 - DNA, 450 bp, Homo sapiens
tgtttttataatttcccttaatcttgtacattttgtcactttgtctttcaaaaaattgacctttttttttttaaaggaattaggccttattttatagactgcattttagtttgtgcttgccgtcgctcctcatgattaaatgacagtttttgcatttttggcggcagcattacctgaaatgacgtgctccgtggtgtggtgcactgagaaagtccattttcccaagttgcctccytgaagtgttgatgttcactcggttagggtgctgtctgccatgcttctccaccaacaatttagaactctgtttgtaattaataatctttattttttcccttttgtatttacaaataagaacaaccaaattctgccactaatttgcgctttgttcttgaatggacgtggaataaagtggttctcacaaaagaggaatttgacagactatgtaagtat

SEQ ID NO: 184066 - DNA, 575 bp, Homo sapiens
atatagtctcatgaggatcactaatgatgacagaaagcaagtatatagggatgatgggttctgtaaatgtaccattcttcagggaaacacggggaattgtaaaattaggtcaagttgttgtgctaagaaggtggttattgcatatmtacttatctcagcagctaagggactgcttccaaaatgactacccagttaagctcagcccacacattgacacttaactgacaagttggcacatgtaagtggacatcttgcatccacatttagtacatatttagttccgtgagtatattagctcttaaactctgttttcaagcccctcctgaaccaagcctcaggcgttagttctcctccattcctccatggcaatcatgaggaatgtttgacaagctcgtggacagaaaacctgtcagtattttggacagagattcatccaaataaaacaggaaataatagagacaagctgaagaataaatgtttaaataattttaattgattagaacttatttcaagcactagaagagagaaaagtaagagtttatgcattatatacatatgtgtaggggtgtgtgtgt

SEQ ID NO: 184067 - DNA, 620 bp, Homo sapiens
cattgtctctgcacactttgaattgtaataatacttaataccatgatcttattaaactaaaacaaaaamaggaggagctatattagtaacagggacttacgtatggacctgacaagaaaggcaaacaggtgttctcaatggaaggcaaatgtgatagcaaatgaaaagggggtggggtaagctccaataaagaaggaacactggacactatgagcaaaaataatgaggtatgaaacaacctgtcatcctcgggaaataggagtagtttgtttggtcccagcattcatatagaaaggagatatgagtgaagtagggagaccctggagcatagaaggctagtgaaagatcagaagaacctcatatagcattataaaacatttaacgttgtcctttagatactgctgcatttgagggcattggtgttttaatcagtatattcaatgatcaggttgtaatactgggctcagtgatggtttcactagtccacttctgatctaagaagtcgtgaggattgagagaaagaaaagaatgtgacaggtgttaagagctagagatgccagcttttggtgaagaattagtgttgagggaaaaggaggaaaactaggataaattagttgaga

SEQ ID NO: 184068 - DNA, 620 bp, Homo sapiens
cattgtctctgcacactttgaattgtaataatacttaataccatgatcttattaaactaaaacaaaaacaggaggagctatattagtaacagggacttacgtatggacctgacaagaaaggcaaacaggtgttctcaatggaaggcaaatgtgatagcaaatgaaaaggggrtggggtaagctccaataaagaaggaacactggacactatgagcaaaaataatgaggtatgaaacaacctgtcatcctcgggaaataggagtagtttgtttggtcccagcattcatatagaaaggagatatgagtgaagtagggagaccctggagcatagaaggctagtgaaagatcagaagaacctcatatagcattataaaacatttaacgttgtcctttagatactgctgcatttgagggcattggtgttttaatcagtatattcaatgatcaggttgtaatactgggctcagtgatggtttcactagtccacttctgatctaagaagtcgtgaggattgagagaaagaaaagaatgtgacaggtgttaagagctagagatgccagcttttggtgaagaattagtgttgagggaaaaggaggaaaactaggataaattagttgaga

SEQ ID NO: 184069 - DNA, 620 bp, Homo sapiens
cattgtctctgcacactttgaattgtaataatacttaataccatgatcttattaaactaaaacaaaaacaggaggagctatattagtaacagggacttacgtatggacctgacaagaaaggcaaacaggtgttctcaatggaaggcaaatgtgatagcaaatgaaaagggggtggggtaagctccaataaagaaggaacactggacactatgagcaaaaataatgaggtatgaaacaacctgtcatcctcgggaaataggagtagtttgtttggtcccagcattcatatagaaaggagatrtgagtgaagtagggagaccctggagcatagaaggctagtgaaagatcagaagaacctcatatagcattataaaacatttaacgttgtcctttagatactgctgcatttgagggcattggtgttttaatcagtatattcaatgatcaggttgtaatactgggctcagtgatggtttcactagtccacttctgatctaagaagtcgtgaggattgagagaaagaaaagaatgtgacaggtgttaagagctagagatgccagcttttggtgaagaattagtgttgagggaaaaggaggaaaactaggataaattagttgaga

SEQ ID NO: 184070 - DNA, 620 bp, Homo sapiens
cattgtctctgcacactttgaattgtaataatacttaataccatgatcttattaaactaaaacaaaaacaggaggagctatattagtaacagggacttacgtatggacctgacaagaaaggcaaacaggtgttctcaatggaaggcaaatgtgatagcaaatgaaaagggggtggggtaagctccaataaagaaggaacactggacactatgagcaaaaataatgaggtatgaaacaacctgtcatcctcgggaaataggagtagtttgtttggtcccagcattcatatagaaaggagatatgagtgaagwagggagaccctggagcatagaaggctagtgaaagatcagaagaacctcatatagcattataaaacatttaacgttgtcctttagatactgctgcatttgagggcattggtgttttaatcagtatattcaatgatcaggttgtaatactgggctcagtgatggtttcactagtccacttctgatctaagaagtcgtgaggattgagagaaagaaaagaatgtgacaggtgttaagagctagagatgccagcttttggtgaagaattagtgttgagggaaaaggaggaaaactaggataaattagttgaga

SEQ ID NO: 184071 - DNA, 621 bp, Homo sapiens
cttcctacagttgtgaaaacaattaatatgatgtattcaaaagaaattcataacatacattttatccattaactaattcatcatcatcctccccccttccactccccttagccccctgagtcttcattatctatcattatactctatcattgtatgtccatgtgaacatatatagaatatatatctatatattatctrtcattatatgcctatgtgaacacattttttatcactcacttatgagtgagaacatgtgatattttttctttctgggcctggcttgtttcacttaagataatggcctccagttccatccatgttgctgaaaatgacaaggtttcattcttttttataactgaatagtatcttactgtgcatatacaacgcactttattcattcgttgatagacccttaggttgattctatattttgcttttgtgaatagtgctgagattaacatgaaactgcagggtttcttttagatgtattgatttattttcctttgagtagatacccagtagtgggattgctgggttaaatggtagttctatttttacttctttgcgaactcttcatactttttttccatagtggctgtactaatttacattcctaccaac

SEQ ID NO: 184072 - DNA, 621 bp, Homo sapiens
cttcctacagttgtgaaaacaattaatatgatgtattcaaaagaaattcataacatacattttatccattaactaattcatcatcatcctccccccttccactccccttagccccctgagtcttcattatctatcattatactctatcattgtatgtccatgtgaacatatatagaatatatatctatatattatctatcattatatgcctatgtgaacacattttttatcmctcacttatgagtgagaacatgtgatattttttctttctgggcctggcttgtttcacttaagataatggcctccagttccatccatgttgctgaaaatgacaaggtttcattcttttttataactgaatagtatcttactgtgcatatacaacgcactttattcattcgttgatagacccttaggttgattctatattttgcttttgtgaatagtgctgagattaacatgaaactgcagggtttcttttagatgtattgatttattttcctttgagtagatacccagtagtgggattgctgggttaaatggtagttctatttttacttctttgcgaactcttcatactttttttccatagtggctgtactaatttacattcctaccaac

SEQ ID NO: 184073 - DNA, 621 bp, Homo sapiens
cttcctacagttgtgaaaacaattaatatgatgtattcaaaagaaattcataacatacattttatccattaactaattcatcatcatcctccccccttccactccccttagccccctgagtcttcattatctatcattatactctatcattgtatgtccatgtgaacatatatagaatatatatctatatattatctatcattatatgcctatgtgaacacattttttatcactcacttatgagtgagaacatgygatattttttctttctgggcctggcttgtttcacttaagataatggcctccagttccatccatgttgctgaaaatgacaaggtttcattcttttttataactgaatagtatcttactgtgcatatacaacgcactttattcattcgttgatagacccttaggttgattctatattttgcttttgtgaatagtgctgagattaacatgaaactgcagggtttcttttagatgtattgatttattttcctttgagtagatacccagtagtgggattgctgggttaaatggtagttctatttttacttctttgcgaactcttcatactttttttccatagtggctgtactaatttacattcctaccaac

SEQ ID NO: 184074 - DNA, 621 bp, Homo sapiens
cttcctacagttgtgaaaacaattaatatgatgtattcaaaagaaattcataacatacattttatccattaactaattcatcatcatcctccccccttccactccccttagccccctgagtcttcattatctatcattatactctatcattgtatgtccatgtgaacatatatagaatatatatctatatattatctatcattatatgcctatgtgaacacattttttatcactcacttatgagtgagaacatgtgatattttttctttctgggcctggcttgtttcacttaagataatggcctccagttccatccatgttgctgaaaatgacaaggtttcattcttttttataactgaatagtatcttactgtgcatatacamcgcactttattcattcgttgatagacccttaggttgattctatattttgcttttgtgaatagtgctgagattaacatgaaactgcagggtttcttttagatgtattgatttattttcctttgagtagatacccagtagtgggattgctgggttaaatggtagttctatttttacttctttgcgaactcttcatactttttttccatagtggctgtactaatttacattcctaccaac

SEQ ID NO: 184075 - DNA, 366 bp, Homo sapiens
gatgaatagtttgcaaatattttttctcattcaacaggttgtctcttcactttcttgattttttttcccttgctgtgcagagtttttagtttaatatagttttatttgtctatttttgtttatattgcctgtacttttcaggtgttagccataaaatctttgcctacatcaatgtcctgaagtgtttttcctgttttcttatagtagttttgtaatttcacctcttgcatttaagaccttaatctattttgagtygacttttgtatatagtgagagatagcatctggcttcattattctgcatatggatgtccaatgttcccagcatcatttattaaagagaatgtcattttcctaatatatattc

SEQ ID NO: 184076 - DNA, 412 bp, Homo sapiens
gtatctggaactggacttttggagcgctttcagggctaaggtgaaaaaggaaatatcttcccataaaaactggacagaagcattctcagaaacttgtttatgctgtatctactctactaacaaagttgaacctttcttttgatagagcagttttgaaatgctctttttgtggaatctgcaagtggatatttggctagwtttgaggatttcgttggaagctggaattcatacaaattgcagactgcagcgttctgagaaacatctttgtgatgtttgtattcaggacacagagttgaacattccctatcatagagctggttggaatcactccttttgtagtatctggaagtggacatttggagcgctttcaggcctatgttgaaaaaggaaatatcttcccataacaactaga

SEQ ID NO: 184077 - DNA, 630 bp, Homo sapiens
atcttactattattgctatctgctctttctcctttcatttccattaacatttgattgtgtatttaggtgctccaatgttgattgcatatatatttataatggttatgtcttcttgatgaattcatccttttacattaaataatgacctctgacttttatgacagtgtttgacttgaattctattttatcagacatagatgtagccactcctgctctcttttagttaccatttacataacatactttcttctatccttttactttcagcctatgtattcttaaagcttaagtgagtctcttgcaggcaggccactctgtgtcttttgactggaaaatttaatccatttacattcaaggctatattgatagttaagtactattattaccattttattatctgttttccagttgttttgtgggttctttgttcctttcttttttatttcttsttgtctgcctttgtgatttgatagttgtctgtaatgctaagctttgatttcttttgctttatcatttgtatatctgctgtagatgtttacgtaaaacatcttatagatataatctactatttttagctgatgacaacttaacttctgttgcatacaaaaacctccagacttttacttttcc

SEQ ID NO: 184078 - DNA, 574 bp, Homo sapiens
cgactatagccttctacccctggaaccccaaagttcattttattttcacgtgtgagagagatttattttatcccaatagccccracagttttaagtgacaccagcatcaactcaaaaatttaaagtctcatataaatatcatctaaatctgatatgggtaatattcaagatagaattcatcctaaggcaaatagctccccagctctgaacctgtgaattcaaacatgttatgtgcttccaaaatacaactgtgggacagggcataggacagaaattcccatccaaaagggagagacatgaaaaaaagaaagaaagaaatgacatctcccaggaagatctaaaatccaacagcacatgcaacattaaatcttgaggcttcagaataatcttctttgatccaatactctaccctctatactcattgggacagaggtctcacgttctggacccactgagtggaagttctgttcctgcagcttttctgtgcaaggttgggcccccatgggtttgggaggctctgccccacagctgtgagacatgcctcagctttcatggattggagttatatgcctgc

SEQ ID NO: 184079 - DNA, 574 bp, Homo sapiens
cgactatagccttctacccctggaaccccaaagttcattttattttcacgtgtgagagagatttattttatcccaatagccccaacagttttaagtgacaccagcatcaactcaaaaatttaaagtctcatataaatatcatctaaatctgatatgggtaatattcaagatagaattcatcctaaggcaaatagctccccagctctgaacctgtgaattcaaacatgttatgtgcttccaaaatacaactgtgggacagggcataggacagaaattcccatccaaaagggagagacatgaaaaaaagaaagaaagaaatgacatctcccaggmagatctaaaatccaacagcacatgcaacattaaatcttgaggcttcagaataatcttctttgatccaatactctaccctctatactcattgggacagaggtctcacgttctggacccactgagtggaagttctgttcctgcagcttttctgtgcaaggttgggcccccatgggtttgggaggctctgccccacagctgtgagacatgcctcagctttcatggattggagttatatgcctgc

SEQ ID NO: 184080 - DNA, 574 bp, Homo sapiens
cgactatagccttctacccctggaaccccaaagttcattttattttcacgtgtgagagagatttattttatcccaatagccccaacagttttaagtgacaccagcatcaactcaaaaatttaaagtctcatataaatatcatctaaatctgatatgggtaatattcaagatagaattcatcctaaggcaaatagctccccagctctgaacctgtgaattcaaacatgttatgtgcttccaaaatacaactgtgggacagggcataggacagaaattcccatccaaaagggagagacatgaaaaaaagaaagaaagaaatgacatctcccaggaagrtctaaaatccaacagcacatgcaacattaaatcttgaggcttcagaataatcttctttgatccaatactctaccctctatactcattgggacagaggtctcacgttctggacccactgagtggaagttctgttcctgcagcttttctgtgcaaggttgggcccccatgggtttgggaggctctgccccacagctgtgagacatgcctcagctttcatggattggagttatatgcctgc

SEQ ID NO: 184081 - DNA, 614 bp, Homo sapiens
ggatttcaacatatgaattttgggggtacaaaaatatcccgactatagccttctacccctggaaccccaaagttcattttattttcacgtgtgagagagatttattttatcccaatagccccaacagttttaagtgacaccagcatcaactcaaaaatttaaagtctcatataaatatcatctaaatctgatatgggtaatattcaagatagaattcatcctaaggcaaatagctccccagctctgaacctgtgaattcaaacatgttatgtgcttccaaaatacaactgtgggacagggcataggacagaaattcccatccaaaagggagagacatgaaaaaaagaaagaaagaaatgacatctcccaggaagatctaaaatccaacagcacatgcaacattaaatcttgaggcttcagaataatcttctttgatccaatactctaccctctatactcattgggacagaggtctcacgttctggacccactgagtggaagttctgttcctgcagcttttctgtgcaaggttgggcccccatgggtttgggaggctctkccccacagctgtgagacatgcctcagctttcatggattggagttatatgcctgca

SEQ ID NO: 184082 - DNA, 504 bp, Homo sapiens
cttctgcacagaacacacatacatacacacacacaaacacatatatacacacacacacccacttcagagtgaagagaccacttatagaatggaagaaaatatttgtaaaccacacatctagtaaggggttaatattctttcagtgacacaatgggctgactattgttaacaataatttattgtatatygcaaaataaataagagtggaattggaatgttcgtaacacaaagaaatgttaaatgcttgatgtgatgaatatcccagttaccccgatttgatcattatgtattgtatgtttgggtcagaatttcacatgtacctccaaaacatgtacaactattatgtgaccacaataattaaaaataaagcaacttaatagcaagaaaaaaaaatcccatttaaacatgggcataagacctgaatagacatttctccaaagaagatatacagatgcccaacaggtatatggaaaaatgctcaacatcactaatcaccagggaaac

SEQ ID NO: 184083 - DNA, 504 bp, Homo sapiens
cttctgcacagaacacacatacatacacacacacaaacacatatatacacacacacacccacttcagagtgaagagaccacttatagaatggaagaaaatatttgtaaaccacacatctagtaaggggttaatattctttcagtgacacaatgggctgactattgttaacaataatttattgtatatckcaaaataaataagagtggaattggaatgttcgtaacacaaagaaatgttaaatgcttgatgtgatgaatatcccagttaccccgatttgatcattatgtattgtatgtttgggtcagaatttcacatgtacctccaaaacatgtacaactattatgtgaccacaataattaaaaataaagcaacttaatagcaagaaaaaaaaatcccatttaaacatgggcataagacctgaatagacatttctccaaagaagatatacagatgcccaacaggtatatggaaaaatgctcaacatcactaatcaccagggaaac

SEQ ID NO: 184084 - DNA, 504 bp, Homo sapiens
cttctgcacagaacacacatacatacacacacacaaacacatatatacacacacacacccacttcagagtgaagagaccacttatagaatggaagaaaatatttgtaaaccacacatctagtaaggggttaatattctttcagtgacacaatgggctgactattgttaacaataatttattgtatatcgcaaaataaataagagtggaattggaatgttcgtaacacaaagaaatgttaaatgcttgatgtgatgaatatcccagttaccccgatttgatcattatgtattgtatgtttgggtcagaatttcacatgtacctccaaaacatgtacaactattatgtgaccayaataattaaaaataaagcaacttaatagcaagaaaaaaaaatcccatttaaacatgggcataagacctgaatagacatttctccaaagaagatatacagatgcccaacaggtatatggaaaaatgctcaacatcactaatcaccagggaaac

SEQ ID NO: 184085 - DNA, 504 bp, Homo sapiens
cttctgcacagaacacacatacatacacacacacaaacacatatatacacacacacacccacttcagagtgaagagaccacttatagaatggaagaaaatatttgtaaaccacacatctagtaaggggttaatattctttcagtgacacaatgggctgactattgttaacaataatttattgtatatcgcaaaataaataagagtggaattggaatgttcgtaacacaaagaaatgttaaatgcttgatgtgatgaatatcccagttaccccgatttgatcattatgtattgtatgtttgggtcagaatttcacatgtacctccaaaacatgtacaactattatgtgaccacaataattaaaaataaagcaacttratagcaagaaaaaaaaatcccatttaaacatgggcataagacctgaatagacatttctccaaagaagatatacagatgcccaacaggtatatggaaaaatgctcaacatcactaatcaccagggaaac

SEQ ID NO: 184086 - DNA, 587 bp, Homo sapiens
gcactttacaaacattaaccaattgagcataccaggttgcagattgttagtctagtaatgagtctttgtttaagctctatttctttctaatatgcctgtctactctttgaagttgtgacttctacgttgacttcaattgacaaagaaatcctttctttgtcccaccttctctactcctagagaaccttatctcagtttggggagtagagacgtttggtgaagatggcacctaacagaacattagatttttttccctatagtcaatttgagaacttttgtgttagatatttttgttaatgcatctaagactgtagcatccagccctgtttggatctttccyatgctttctgcactcagtgacatccctaatattggccaacaatcacaaccatattttatcgtaagaaagacttggaacaagagcataaatagatccatgcttcagaattacttgttggctatttgaaaacacaggttcctggcaccctcactaaactatggaatcagaatcccaagaatccacattttaataagcttttgagttgctttttacatgcatgcaaaattgagagccactgcagtaaaaa

SEQ ID NO: 184087 - DNA, 587 bp, Homo sapiens
gcactttacaaacattaaccaattgagcataccaggttgcagattgttagtctagtaatgagtctttgtttaagctctatttctttctaatatgcctgtctactctttgaagttgtgacttctacgttgacttcaattgacaaagaaatcctttctttgtcccaccttctctactcctagagaaccttatctcagtttggggagtagagacgtttggtgaagatggcacctaacagaacattagatttttttccctatagtcaatttgagaacttttgtgttagatatttttgttaatgcatctaagactgtagcatccagccctgtttggatctttcctatgctttctgcactcagtgacatccctaatattggccaacaatcacaaccatattttatcgtaagaaagacttggaacaagagcataaatagatccatgcttcagaattacttgttggctatttgaaaacacaggttcctggcaccctcactaaactatggaatcagaatcccargaatccacattttaataagcttttgagttgctttttacatgcatgcaaaattgagagccactgcagtaaaaa

SEQ ID NO: 184088 - DNA, 572 bp, Homo sapiens
atctcaaattaatgtagacaattggcaggatatagccattaacaaaaataaatatattctctttgtggcttatatgttatatattagatgaactaattggaaaaaatatgcagtgcacttttataccaataacatcagtacaagactggtgaaatgagagtatataatcaggataactctcgatttcatacatttcagaagacgaaaaagagacaattattccctttgytcccagattttccccctatgaatagttggattcaatgtctgttaaaagtcattggggaaatttattttcttggtgagggcagaaaaggatactttattaatacacctaaatggcttaaatccagattttgtgtaaaaacacagaaattcctgtttttatgtaaagttcggggaaattttctttacaataccagatatccagttatcctttattttttccaccagtctgtatctctttttcatccaaagtctcctttgaagtcaactgtgatccaacacaaataagagatgaagtgtgagggataagaatctagattaagataaatagcaggttccaccccagc

SEQ ID NO: 184089 - DNA, 573 bp, Homo sapiens
aatcaaaacaaaactttcttattcctccacccatacctgcctacaattgtaacctgttgtaccaggaacacccctgcttaygtgcaactatatctcatgggctaccattgagtttttaatgcatggaggactaaagcttggagagtggaaatctattcacagatgcaatcctcatttatttactcaattacaagggaaaattcaatcacctcccaggggttcctggcagtatcctcaatgctggggctggaaaaatgcctaagatacatttcttattatggaggttctaacaaggagaaacagagattcaaatattacagtgtaatgtgataagatgctatagatgctataagaagtgctaattaataccaatgtttatgagcaatgaacttaaaaataaagaccagtgcccacttgaaggctttgccttctttttctgaagataacgcccccagttttcatgatttttgaatagtcttaagtgctttctgtatttatgcagtctgttaaatcttttttagctgatatgcttatttacatatcagatcattttaacaatagactttgttacaa

SEQ ID NO: 184090 - DNA, 569 bp, Homo sapiens
cttaaattaagaacatgtgaacaaaacctgctctaaaagcttactccaaacccatgtacattcatataagttaatttccttagaataagaatacaaaatacatatataatcctaatattaataagtcccaaattaagttacattagcattaatacttatcagggtagctacataatttatgggkcccagtgcacagtgaaaatcggggggctactggttcaaagcacaggaaagaattttcattaaaggaaataaaataaaagatatgtttttgcagtcttttctttggcttttcatggtgtttttaaatgtccaagtaaaaaaattaataaatttatattagcttgaattttaccattcatctttatattgtgcaataagttttaaatgcaaatgtaacatcatttagcttgtatacagaatcaataatattgcacgattcttactttgtagttcatatatgcatatgcatttctttcttcccagaatagtagaaacactggacatgactaaactaactcacgtgtttttattttacttcttgatatgcacacattctactaactctc

SEQ ID NO: 184091 - DNA, 472 bp, Homo sapiens
tttcaattctggcttgctcatgaatacttctgttgtataatccatgataccatctggaaatttcttagagtatgtgtttctcagaactattgatataaatggatctttctgatgcattttattgctgtttataaaagtaaaatattgyaaaactgaattttattcaaaaattcagatacctcccatttaaagacaaaattaccaactggattttcaagttggtaaaaatctaaataataatatgctggttttacaactttgaaagagtttgtgtgatttttgtccagttaagacaaaaatgtagacaaatggaggcatgaacacaaggttaaagagaaggtgaaataattataggaagactaatgattctaagtgatgtcagcaggaattctggtgcttttgaaaaaaaacagtcatctcctctccagacattgaattcttcttatttagatcacttaatataataatttcc

SEQ ID NO: 184092 - DNA, 419 bp, Homo sapiens
cactctctcttgctcctgctcttgccatatgagatacctgctcccgcttcaccttctgccatgattggaagcttcctgctccccagaagcagatgatggtgctatacttcgtatacagtctgcagaactctgaggcaattaagccccttttcttatacattgcccagtctcaggtatttctttatagcaatacaagaagagcctaatgcacattgtcaggcatggttaaaaaaaaaaaaagtacaattcaccctttttttctaactgtgctattttaaatgtagtcagctatgactcctgaacatctgctagggcttttaatattaccaggtacttctaaccccccatccccaatcctcatatacattaaccatcytaattattaaaatcctcacatttctaccaaattttagataatt

SEQ ID NO: 184093 - DNA, 627 bp, Homo sapiens
tttaatattctggtgtatattattccaaacactttatcaacatatatacataaaatgtaagaatttttttgttcttttcatgctgctttaacacatcatattttatctggcaatatatgatagatatctttcccatatcattacatattattctgtaatataacttttaatgctatagagcctctcattgtgtgccaatcctgagagtttagggataattttgaaacaggtgtgatgagactttctaaataatatgtatgacatacactataaaattatatggctagaagagctgagtttgaaggatctttcatactggacagattccaaggcatcagtaagtaagagctagctttgagtgcttacttaccatgtgccaaatgagctttaatcagtttacatatgtaaatccatttattccttacaaaatccctattctatattaactactcaagtccatggatcaggtttaagaatccctggattacaaacttctaacaggtcctacataccttaattttktaaaacctcgattgcactaaaaaaactgtttagtattctgaaaagcaaagctccaattctaggggtttgtaaataaataaaaactcctttcatcatagccctgac

SEQ ID NO: 184094 - DNA, 627 bp, Homo sapiens
tttaatattctggtgtatattattccaaacactttatcaacatatatacataaaatgtaagaatttttttgttcttttcatgctgctttaacacatcatattttatctggcaatatatgatagatatctttcccatatcattacatattattctgtaatataacttttaatgctatagagcctctcattgtgtgccaatcctgagagtttagggataattttgaaacaggtgtgatgagactttctaaataatatgtatgacatacactataaaattatatggctagaagagctgagtttgaaggatctttcatactggacagattccaaggcatcagtaagtaagagctagctttgagtgcttacttaccatgtgccaaatgagctttaatcagtttacatatgtaaatccatttattccttacaaaatccctattctatattaactactcaagtccatggatcaggtttaagaatccctggattacaaacttctaacaggtcctacataccttaattttgtaaaacctcgattgcactaaraaaactgtttagtattctgaaaagcaaagctccaattctaggggtttgtaaataaataaaaactcctttcatcatagccctgac

SEQ ID NO: 184095 - DNA, 440 bp, Homo sapiens
taatctatatatagggtagctgtttcatctgaaacaaaygttataaaatataattgattaaaatagattctaaaatagcattatttttctaagtattaataataatttaagtagtgcttttgcattcccaactagaataatttttaccaagtactccttcaaataacactgagaggtagatcgttaagcattagttcattcaacaaatatttactgagcatctggagtttgtaagacaccatattaagtcactgattcctatcctattttattaaccaagttacagaaaggggaaagggaatgtttacaggaacaagtcatcaaacacctttgctcagtttcgccatgtcctaaactattctgatagcttgcatctgtatagcattttacagtctcaaagcacgttttcatgacatgaattctcatatcacattatttta

SEQ ID NO: 184096 - DNA, 513 bp, Homo sapiens
cgaattctcattttgcttttctagatgaaagcacataaggargaaaggtaccttttgtatcttttgccaagcctttgcctaagaagtaaataaaaacaatacttactaaacacaaagaggttgaaataattattacagctaattcacctacaggtgtattcagagggcagattctgatgttaggaaactcttggttccaatcctggctttatcactgactggccacgtaaatttaaagtcgaacattgtctgtaagttaatacacttatccttttaatataatgggaacataataaatagctaccttgtaggttgttgtgaaaattaaatgcaaagatacgtgtaaaattcccaggacagagctcaacacagagtaaatactcaacaatgctattttcattgcaattgttgctaacattgtcgagcatgtgtctgcattttatttcttgtctccctaggaaatgtagtcacataatacaagatcctgtgtgactggtccccagccaccttcag

SEQ ID NO: 184097 - DNA, 634 bp, Homo sapiens
ttctgcactttctcaaaagaaaaaaatatataagcaaatattgattctcaatgatgcatatgctgaagtttttgaggaggagagcttgatggtttttatttactttgaaatgcataaaaaataagatggcttgatggttggatagagaaatggagagatggatagatacatagtaaatcaagtagagaaattttaattgttgagccaaggtggagagtatataggtgcttaatgtaaaattattttgacttttctgtatgtttgaaatgtttcataataaaatggaaggaattgaatgatggtatcaaaccatttggtatttagtttacataggacatagaagataaatgcaaaggttatgttttgaaatcacaatattgtaaaccaaaaataaaatcctaaaccctccagtcaactgaatggatattctctaccttttggagtttagacaaaactaacsagcattaatgttaaaatagagatctgaagactgacaaaacagactctttggcaataagaacaaattccaacctgactcttgtatagcatcacatgatcatgaaggaaatcaacatattttacccaaaatatatttctttgacatattttgaaataaccttgcaaagccatcttt

SEQ ID NO: 184098 - DNA, 483 bp, Homo sapiens
gatccagcccattttccagttaacttcctgccaaaaaaactcaacactttgtacaagaaaataatattcaaactctcaacaaagcagtattcacaatgtccagataygctaaaaaattagtagtgctaaagcaaaaaaaaaaaaaaaagtgactcataaccagggaaaataaacaataggaacagatacagagataacacatctgttggaattagcaaccaggactttcaagtagctactacaaatacgtccaggtttagtgagtcactcaccaggtaaattgttgagatggatgaaaggtgtatctatgggtactattatgcatacttgtgtatatgtttaaatttttccacattacatctccagaacctgattacttctcaccacttctatgctataaccctagtccaagtcatgaagacttctctgcattagttacaacagcctctgaacaagatgctctctttctttccttgccccgct

SEQ ID NO: 184099 - DNA, 280 bp, Homo sapiens
caggtctgttggagtttgctggaggtacactccagaccctgtttgcctgggtatcaccagcggaggctgcagaacagcacatattgctgcctgatccttcctctggaagctttgtcccagaygggcacctgcctatatgaggtgtcagtcagcccctactggaaggtctctcccagttaggctacacagggttcagggacccacttcaggaggcagtctgtccattctcagagctcaaacaccatgctgggagaaccactgctctcttcagagctgtcag

SEQ ID NO: 184100 - DNA, 488 bp, Homo sapiens
ccaactttctttttcttactactttcttattcacttattgtctaattggggtaaaactctttcccctcgatgtgatctttccctccttcaccttatccttcagatcagaggaaaatatatctatctctacgtctatctttgctactgtgcttcacaataaaaacttttttcaaagattaaaaaaagctacttttatcttctcacacatttctagaaaattatccaaaatcaatcatcttgtcctacctcattcctttcaaataaatttagatttttactgttcattctcacctgcatgctcataaaataactaaagcggcacagcctggaggtgacagcttgaarctgctggccaaagccagtgggtgtgaatggcaatgtggaaataaatggagacccaccgaatgagaacaaacaaaggctgttattattcagagcttgctacagcaagggagtcagccatcatcacttgtgttttagcagaggct

SEQ ID NO: 184101 - DNA, 561 bp, Homo sapiens
ggtcattatgttgagtgaaataagccaggcacaacaagaaaaatattgaatgttctcactcacatgtaagctaaaaaatgttgacgtcatggagattgtaaaatgatagataccagaggctgggaaaggtaatgtgggggcagggaaaaaagagaggttgattaatgaatgcaaaactatggttggataggaggaataagtcctagtgtttgatagcacaatagggtaattatagttaacaaaaatatattgtatatttcaatagctagaagagaagatttggaatgttccaaatgcaaacaaataataaatgtttaagccaatggatgtcctaaataccttgatttgatcattacacattgtatgcatgtatcgaaatatcacatgtatatacaattatgaygtatcaaaaattagtgagttttaaaaaaagacttataaagcaaaaaaagattagccatggctttttggggttcttgtttgacttcctggactgttgctagacaaagcaacctgactttccacaagtctgacacagccggctggcttcctgggctggct

SEQ ID NO: 184102 - DNA, 394 bp, Homo sapiens
gaaaactagtaaagaagaaagagcagaaagcccaaggctgtgccctgagaaacacctgtctcagggacaagaagagggacctgctatggatacagaaaagcatccagaaaaggagaggccagatataggaaaccaggagacataatgtttggagattgtgcaggagaaggcttggaactgtgattgcccccaaacaaagaggctgagggtcaatcctgacctttatgataagagttgcttatactgatcartaatttctgcaggaaagagaaagacatgaacatctatttctaactcagatgactcttccaaaagcccagctggctaaaaatatagaaggtagttgaaaaaaatacaaataggcaatatataagttttctttgcctgtgaaatt

SEQ ID NO: 184103 - DNA, 405 bp, Homo sapiens
cttgcatagctgaaatgttacacccattgaatagcagctgttcatttcttcctcctccctgccccagaaatcatcattctttgtgcccactttatatatctcataaatattgctatcatgcttatttcacttrgcataaggtcctcaaggtttattcatgttgtcacatatgcctcaaggtttatttatgttgtcacatatggcaggatttccttcattttttaaggctgaaagatatttcattatatgtgtataccacattaatatggtctgggtctgtgtccccaaatctcatgtcaaattgtaatcttcagtgttggagtcggggcctggtgggaggtgattggattgtgggggcagatttcccctttggtgctgttcttgtgatagtgagtgaaagattgt

SEQ ID NO: 184104 - DNA, 531 bp, Homo sapiens
tttattctttattattttccttcttctactaactttggtcttagtttgtttttctttttgtagttctttgaggtataaagttaagttgttggagatcgtttccaatgcaagtatttattgctataagcagtcctcttatttctgcttttgttgcgtctcataagttttgacatgttrtgtttttgtttttatttgtctggagacattttctaatttctcttttggtttcctttggcctatttgtggtttaaacatgtttaatatccacatatttgtgtactttacagtttttcatttgctattgatttctacttttatcccattatggttgggaaaattaattttttcaaatttagtctttgtaaatttgttaacacttgttttatgacctaacataggatctattttggagactattccatgtgcacttgagagtatattttctgctgctgttgggtgaaatgttctgtttatatctgctaggttcatttggtctatagtgtttttcaagtctgctgtttcttatttatt

SEQ ID NO: 184105 - DNA, 475 bp, Homo sapiens
tttggtttattaatagtattattactggcaaatgctacatartgttgcatctttatcatctagagttatggaatagacttagaggtaatcacttgcatggagcctgaggccatcaaacccagcattttatatttttttctctcatagaaagaacacggaattagaaatcctgtctgttttcttttagttttttctttataaaatagaaagggtggattgaagaagcctactcctccctttacaaaatgaggtcagagagttgtgattgtgtatcacagaggcccacaatttatattccaaagaaagtagcacaggttgtagaatgtggcttttttctttttttaaactagtgccactgaagccatcagcctgttggtctcataggggctcaactgtacgctccagtgaaaactcctctgttatccacatccaaccaactacgtgaacagcatcagctctgagtgaggctcaggac

SEQ ID NO: 184106 - DNA, 584 bp, Homo sapiens
cctaaaacatttccttgcacttgttggtctgtcgcctcctgctgaattataagttccttgaggacttgtgtccccagcatctagcaagagatgccttttgcatactacaagggcttggtggacatgaatcaattcattaaattagccactggaaaatatattttctaaaaactatagttttgaagaccagtaatactataatgtttataaaatgaggttaggtataaaaaataaaaagaattgtatttagtctatggttataactgttaaatctgtgcttaaatatagacgaaaactagagaggaagagggaaaatgggcatagttgacttttayggtagaggggttatgagtggtttctaaagagtgctgtcttctgcataatgctgtcagtacaatgaatgtgggagcaccagcccaggaagcaccattacctctctgattcctgaatgacatccaggctctttgagccatcggtaggttccttgaccattatgctggtctcccaacgctgatctccagattcaaagaggaagagtttgcctgtgtcagtgccaacgacaatcttgtcatcagccacccagg

SEQ ID NO: 184107 - DNA, 565 bp, Homo sapiens
aagctttccttcttcccctctaccttccatgagcaaaatttggtgaaggacagatgaccgcggctgggatgggaagtgggggagcagaggctctcagagcattacgaaggaggcagataagtcagtagactaatagagagggcatcatcacaggcaataaggtgttatctgtagtgcactctcctgactagggtaaaggatgcaagctgggaacctgtagcaataaggaatagaacaggaaatgagggtcctgaaagccaggcaggagttagctgctcgctctcttatatkaaggatgtgccagcccagtgtcagtcccttgaatcaccttccttcatttcattcccagccatcttgctgagatagacattttcctcccatttcacagatgagtaaagtggcccagagaagtgatgccacccaacaagccggtagtagcactgactccaaagcccaggttcattccattgtccgcctgcgtctctccggtggagactcgatagggcagaactatggagctgcaaatccatctgttgtcggcagccatacttatttcaatacacaa

SEQ ID NO: 184108 - DNA, 535 bp, Homo sapiens
caaaatggatcaaagatctcaatgtaaaagctaaaaatagaaagctcttaggtagctggatgtggtggcatgcacctgtagtcccagctagctgggggcctgaggagggcagattgcttgagccctggaagtcaaggctgcaatgagytgtgttcatgccactgcattccagcctgggtggcagcgggaaactgtctcaaaaaaaaaaaaaaaatatatatatatatacacacacacacacacacacacacacacacacatataaatgacataaaataaagctcttagaagaaaataaagggtaaatcttcatggcctcagattaggcaataatttgttaaatctgacccaaaagtacaagcaaaaacaaacaaacaaaatagacaaattggatttcatcaaaattaaaacttttacgctgcaaaggacaccatcaagaaagcaaaaaacccatagaatgggagaaaatacttgcaaattatatatctgataagaaacttatatctacaatatacaaagaacacttacaactcaa

SEQ ID NO: 184109 - DNA, 521 bp, Homo sapiens
gatctcaatgtaaaagctaaaaatagaaagctcttaggtagctggatgtggtggcatgcacctgtagtcccagctagctgggggcctgaggagggcagattgcttgagccctggaagtcaaggctgcaatgagctgtgttcatgccactgcattccagcctgggtggcagcgggaaactgtctcaaaaaaaaaaaaaaaatatatatatatatacacacacacacacacacacacacacacacacatataaatgacataaaataaagctcttaraagaaaataaagggtaaatcttcatggcctcagattaggcaataatttgttaaatctgacccaaaagtacaagcaaaaacaaacaaacaaaatagacaaattggatttcatcaaaattaaaacttttacgctgcaaaggacaccatcaagaaagcaaaaaacccatagaatgggagaaaatacttgcaaattatatatctgataagaaacttatatctacaatatacaaagaacacttacaactcaa

SEQ ID NO: 184110 - DNA, 392 bp, Homo sapiens
gaattcactctttcacctctcagcactttagtttccagtctgtaaaggaagggatgcaaatgagtgcatcttgaagttctgtttttataggaagacatgctctttttactcatgcatacaaaatccctgaaatgtcaaagagaaaaacaaaaaaacagaactaccttatttaaccaaggatgagagtccagatatctacctgccaggcctctctccaaaccctgagaaaatctagttttatcactagataaactagtgataaactctaggcctagagtttccttctcttctacaagccccatgctgtctttaagattgaattactaatatataatggtttaaggaattaaatttccaaaggaaaaatatcyttgtaaatgaatcatcacaaa

SEQ ID NO: 184111 - DNA, 557 bp, Homo sapiens
cggctaattgtggtaacattaagacaatgtttattcctcycagtgtttgggcaagtttattttaagttgtcatcttcaactagtaatgatacagatgattttacagactccataaacctttctaatctaaactcttctcaactgaaagttggccgcttccctcagagcaacatctgcgaaggcctgatttcgtaagaacccgcttttatggtacatttgcagaaaaagccaccaaaacacatttagaaatctcattttagaaagctcattactaaggtactctcctaagttatgtttaagatattatgaaagtaataaaatatgcacttcatatttttcacaactgaagcatttgtttttaaataagtacaacaaaactttatcccctcaccaatattattgggtttccttcaaagataaatacttatttttggaagggaaggtggttaggaagcgggagaattcaggaagcacacagcacacagtagtgattatatccacacctacctcctggacaatgcctcattgtcatcttgcatctcctggattcagcaatg

SEQ ID NO: 184112 - DNA, 361 bp, Homo sapiens
tcaaaagcaaattcaacattctgaatatgttcttctagtgactttcttattttaatagtggtgcctataaaatgtattaactcacacataagtagaaacataaatgcacayatttcttcaaaaaccacttgtttaaatgtcttctttgcaagctctcaaatacacaattacagactacttcagcaatattttcatagaaaaatgtcaacttttcttctaagtctccattttaagggaagtaaagtctaatacatagctgtgttgtatatcatatcagatatataacatcaaatgaaattctggggagggggcatgacaatacatccatgattagattaagagattcatcataatgtagcca

SEQ ID NO: 184113 - DNA, 361 bp, Homo sapiens
tcaaaagcaaattcaacattctgaatatgttcttctagtgactttcttattttaatagtggtgcctataaaatgtattaactcacacataagtagaaacataaatgcacacatttcttcaaaaaccacttgtttaaatgtcttcttygcaagctctcaaatacacaattacagactacttcagcaatattttcatagaaaaatgtcaacttttcttctaagtctccattttaagggaagtaaagtctaatacatagctgtgttgtatatcatatcagatatataacatcaaatgaaattctggggagggggcatgacaatacatccatgattagattaagagattcatcataatgtagcca

SEQ ID NO: 184114 - DNA, 552 bp, Homo sapiens
aagttacagctccaagcaaaaccactttatgagtgtgtggctggggtgcacgttaatgacaccagtgcccaggtggccaaatttatgtccacmctcttgatctgataatacagagcaggaggatgaattggtaatgaaccaggctgaaaacagatggtgactccatgtgtgtatgctgctgaaaacctacaaagggaaaacattaaatatgtgtctttaaatttaaattagtgcatttcaaaaacagacagttgagcttttgaaaataggctggctgaatgtgtttcatcttatagttttgaactctgatgtgttttgtgggatagcaacagacaaaatggatggtatgttagttaccctttctttacctcctcagtatcagtggtgttccactgtaattaggtgcttgtgtgtagttctttgtcattaaatttgctacaccctaattaggaaatttagaaaattcaaaagaccaccatctaaatattggcaccaattattaaatatattttctctgattatatgatttttttttgctccacaatactgatt

SEQ ID NO: 184115 - DNA, 552 bp, Homo sapiens
aagttacagctccaagcaaaaccactttatgagtgtgtggctggggtgcacgttaatgacaccagtgcccaggtggccaaatttatgtccaccctcttgatctgataatacakagcaggaggatgaattggtaatgaaccaggctgaaaacagatggtgactccatgtgtgtatgctgctgaaaacctacaaagggaaaacattaaatatgtgtctttaaatttaaattagtgcatttcaaaaacagacagttgagcttttgaaaataggctggctgaatgtgtttcatcttatagttttgaactctgatgtgttttgtgggatagcaacagacaaaatggatggtatgttagttaccctttctttacctcctcagtatcagtggtgttccactgtaattaggtgcttgtgtgtagttctttgtcattaaatttgctacaccctaattaggaaatttagaaaattcaaaagaccaccatctaaatattggcaccaattattaaatatattttctctgattatatgatttttttttgctccacaatactgatt

SEQ ID NO: 184116 - DNA, 552 bp, Homo sapiens
aagttacagctccaagcaaaaccactttatgagtgtgtggctggggtgcacgttaatgacaccagtgcccaggtggccaaatttatgtccaccctcttgatctgataatacagwgcaggaggatgaattggtaatgaaccaggctgaaaacagatggtgactccatgtgtgtatgctgctgaaaacctacaaagggaaaacattaaatatgtgtctttaaatttaaattagtgcatttcaaaaacagacagttgagcttttgaaaataggctggctgaatgtgtttcatcttatagttttgaactctgatgtgttttgtgggatagcaacagacaaaatggatggtatgttagttaccctttctttacctcctcagtatcagtggtgttccactgtaattaggtgcttgtgtgtagttctttgtcattaaatttgctacaccctaattaggaaatttagaaaattcaaaagaccaccatctaaatattggcaccaattattaaatatattttctctgattatatgatttttttttgctccacaatactgatt

SEQ ID NO: 184117 - DNA, 536 bp, Homo sapiens
aagaccatggctcctgagacagctgtatggaagaacagccctagcctgagacattctatgactgaaaacatccattctcaattttctctgcaacctcccagcatcaactatatttttttctctgctcaagggaaacaaaagcctctcgattggttctgatctctctcttcaaaaacttccacaagaccctaaattttactcttcctatkatatactcttcctcaatgcacagccataattaaagaaaaactactctatgaattgctctcagttttcaaatttgaagaaaaattaatgacaaagaggaaaacaaggtgtttgggaacaagggcagtaagaaaagttttatttaagatttcaaaaaagctcaagtatatcctatcaaaactttaatacatttgaaattggagaagataaaaaagcgagttattctgatgtgaaaatgctttgaggaaatgagcaaaaattattcatacaagaggaaacccaagtgaccactaaacatgtgaaaagatgctaaactccactggtaataa

SEQ ID NO: 184118 - DNA, 536 bp, Homo sapiens
aagaccatggctcctgagacagctgtatggaagaacagccctagcctgagacattctatgactgaaaacatccattctcaattttctctgcaacctcccagcatcaactatatttttttctctgctcaagggaaacaaaagcctctcgattggttctgatctctctcttcaaaaacttccacaagaccctaaattttactcttcctattatatactcttcctcaatgcacagccataattaaagaaaaactactctatgaattgctctcagttttcaaatttgaagaaaarttaatgacaaagaggaaaacaaggtgtttgggaacaagggcagtaagaaaagttttatttaagatttcaaaaaagctcaagtatatcctatcaaaactttaatacatttgaaattggagaagataaaaaagcgagttattctgatgtgaaaatgctttgaggaaatgagcaaaaattattcatacaagaggaaacccaagtgaccactaaacatgtgaaaagatgctaaactccactggtaataa

SEQ ID NO: 184119 - DNA, 547 bp, Homo sapiens
tatgcatatgtagtatgtatttgtgtgtgtgtgtgtgtgtgtrtgtatatataacatatatatatacataaattagaaagaaatgcatgggattgatagaagccaaaatcaagatggaatttacttctttgggaaacggatatggctaggtgggagatgcaagcatcagatacacagcatatgtcaactgttgttgataatgcttcatttctgaagctgggtttattgttttattatttacactttttgtatctaaaatatttcataattttttctaagactttgaagtataagatacaagagggatttggccaagtctaattggttccaaagaactagacccaggattccaaagagaggagaaaaagctccagctcccagaaaaaattatggaggacaccccataatagaggtcctgacaagctttccttcttctgctttacatcgtaagttactgcctcttgcaatttcctttctcattcattttcgtggttgtctatgactagtggacaataagctattcaagtattcaaagtctatgtatgat

SEQ ID NO: 184120 - DNA, 585 bp, Homo sapiens
gaagtcttgggtggtgaggtgaggcaaacccaaatgcctaagtatctatttcataaagacaaatcatggtttctttcatgaaggtagggttgcaatataatcagcattctaccagatagctagctggacctccagggatttgatgctggtttctacagaatattgactacccagaagaaggaacaatctgaccagccttggtgagagcaacttatgttgcataaaatacatttctgcttttgtgaccacattgttcatgaatctactgatcaatcattagggagactgggaataagaatgacttaatgtacatgggatgaatcatcctkttcctgttactgagagactgttctacagaggggagcttcagtgaacattcacacatattattctttcaccctgggcctattttgaaggggctatccacataaaccttccccaaatctctaatatgcaaaaatccttccttctgagtctctgtgtgtccaaattgtgcctaaggatcactaccaatctataccttaggtcatctgtcctccaaggcaaactggacaaccaatgtacccacagtcctcattttgcaca

SEQ ID NO: 184121 - DNA, 585 bp, Homo sapiens
gaagtcttgggtggtgaggtgaggcaaacccaaatgcctaagtatctatttcataaagacaaatcatggtttctttcatgaaggtagggttgcaatataatcagcattctaccagatagctagctggacctccagggatttgatgctggtttctacagaatattgactacccagaagaaggaacaatctgaccagccttggtgagagcaacttatgttgcataaaatacatttctgcttttgtgaccacattgttcatgaatctactgatcaatcattagggagactgggaataagaatgacttaatgtacatgggatgaatcatccttttcctgttactgagagactgttctacagaggggagcttcagtgaacattcacacatattattctttcaccctgggcctattttgaaggggctatccacataaaccttccccaaatctctaatatgcaaaaatccttccttctgagtctctgtgtgtccaaattgtgcctaaggatcactaccaatctataccttaggtcatctgtcctccaaggcaaactggacaamcaatgtacccacagtcctcattttgcaca

SEQ ID NO: 184122 - DNA, 488 bp, Homo sapiens
gccttaacaacacagttcaaattttagtaaccatggtgtgttagctgtgaaagattaaatgaagcacaaacttcactgcaatctttttagtccacaaatcactttgtaaacaacgaatgcagatcctgggaacagacggtggataggagacagggctaatgtgcagctagctcccacttggatggacagatcagtgtgtggggagtcacactgcaaacctttgctccaagaaccagcacaggaacatactgggaaaaccagaagaattcacagatcctttgaaagaagctgcatgccactgcaaattccatgagacaagtgaaaaactgagagctcccaaaatgtgagcgtggggagaagatgcctccraacacacatccccactgggaaatctgaaaatccagatcacagcagaatgttttaaccttacctggagctgaaatggatgaaatataaaagtaagcagcagtgcttataggcactcccat

SEQ ID NO: 184123 - DNA, 568 bp, Homo sapiens
gccaccttctggctgtaggcccaccaacccaggccattacagcaactcatgacagaatagccatgcccccaggaaggagaaaacagcagctaataccactgcctgcaacatccttgctaaccagaggtcctgagtctgtccatgtgacaacttcactgctagcataaatagcagttaagaaagccagcaccataaacatatctaccatcaaggattctcacagaatctacttcactcccctcycaccaccaccagagcaggtgctggtatttatggttgaaagacctgaagatggattagatcacatcacaggactctttgcagacaatccccaacaccagcctggagcctggtagccccgctggatggctatacccagaaaagcaataacaatcactgcagtctggctctcaggaagccccatccataggggaagggtgagagcaccacctcaagggatcaccctgtgggacaagagaatcggaacagcaggccctgggttccagatatttccactggtgggtagtttctaacagcagagacacaattgtagtgctggaagcagtag

SEQ ID NO: 184124 - DNA, 392 bp, Homo sapiens
gctggtcaccagttcttgacctaagctaagttgggcaggaaagatttgagtcaagccaagaacctgctgttctcctttggtcaccccatcctccagcttcttcatctgcggttctrtgggatgacggagctgtggggaggtaaggagttctatggctgccattcttttaccttgaacatcatggaggaagttcatactgatttagtgttacgttatatttttctgcttctgtttttacttactattaaaggacttttagctcacttcaaagactccttggttattttaggagaatctagagaattcacaaataaagtcctctgagcttctttcaactcttcacattgctactggtgcctgccaatgatctgctccagctattgcccccatca

SEQ ID NO: 184125 - DNA, 546 bp, Homo sapiens
ttgtccctctaaatgcctatactgacccagccaattcagttaagaacaaatatattttaatgtaagaagggaatctctttttatgacgggtagaaagaagagtaaaatatcatagatttttccctatgagtaaaactgcccagtatttgtgttacaaaagtgtttgtatttcactcagtttatattttayggttgtctaggacaacttagcatagaaaattgtttctttattatttaactatagatcccttttgtttctcctcttgcacactattcttggcctctgatagactgactcagggctttgttgaactttgggagagatcggttggtggggaacgagggtactcatggcctccagcagcatctgccaggttccagaggaacttgttttatgaacatgtaaaagaggtatttccttcagggctgagttctcacaactcactgttggatgctagctataaggttaatatataagagatggtaggaagttttgaataatgtttaggcacacagactttacaacccccatccccagatccccag

SEQ ID NO: 184126 - DNA, 606 bp, Homo sapiens
ataaataagcagaatttttcagagaatatttcttcctcataatctcctgctctagtaggttacacagttttgcttatgatgtgatcaaatttgtcccactccttcttgtgtgtctatgacctccccaaccagctcagagtgacttctgcacaggggaggtctaggaacgaatattttgaatacaaacaaaatcaaggaagccttggaaagtttaaatgctttttccccaaacattggcaagcacatcaaatgtaccacacctacctttaacaaaaattcaacatttcgcttactttttatgatgtttttgaagtctataaatcttcattgtacattttccacagaatacacttcaatcccattgatattaaggaaagtacacgaagcactctggcccactaaatggggaaatcagaatgcgacggaagagtggccaagactcagagtttccattctcttccaagggaaaccaaatgagaaaaataatacatcrtaaaagcccaagttctgattacaattctggaaatagggatgaaataggatatttcatttaaaaaatattgtgccttgaattccaagctcaatctaaaaggttatgcagagtgc

SEQ ID NO: 184127 - DNA, 373 bp, Homo sapiens
gtgtaattagttattaaaagtgagcttttataagtataaaaatttactaccaatgtgatccagcaatcccactgctgagtatatatccaaaagaggggaaatcaatatatcaaagagatatcttcactttcatgtttattgcagcactatttataatagccaagatatggaattaacctgagtgcccaccaatggatgaaaggataaagaaaatattttatgtrtatacacacaatagaatgttattcagctataaaactagaatgaaatcctgtcatttccagtgcatggatggaactgggggacattatgttaagtgaaataagccaggcacagaaagacaaatatcaaatattttcattcacctgtggga

SEQ ID NO: 184128 - DNA, 459 bp, Homo sapiens
agtgttctcctagcctaaatacatatttcacaaaatgtcaaaacaagggtagaatcataaaatgtagcagaaatagttaaaatrtagcaaattcatggatctaaaattataaaatatctcatttctgtatttgtttacagatgattttccaaagtactatttctggcaaagtatattgttttcttatacataaatttggaggttaaaaaagtttactcctcctttttccttaatttcagcatatttctgataccttcctggtacatgacaaaaaagaatccttaaccttgattgacatgaggtagatacttcataaattgctgaataaatgtttgtccaaggctaattttcccacctatgttttggactctatcctcttctgtcccttcagtgatcttgtttcttcattattttttgtctttcctcctcagctggctctttcctagttatgtctcctgt

SEQ ID NO: 184129 - DNA, 523 bp, Homo sapiens
cttaccccaaatatctaaatttgcaattctacattacggcttttctgtaaagttactctcaccaaaatttttagtaactggatgcttcaccaaatgaatttgatccatatacaggtagtgctccccatcaatattttcagsagaccagttatgaaaatacacaatttgctcatatacacacactgaacaaatggggtatatataaatatttcttgttagtctactgaaaatcctaaacctgtccacaataatatccttgaaatgaaattgcagcataaaagtgctgtatcaaataacactccgacaacataaaaacttagtgacattagagtttaaatttcaagttaggataaaacattctacaaaattagaagtcttatcaccacattaagctaaaaattttagttttgctacatttcttggtatgtttatcaaatattttgcctctttttaaagtctttgtgaatttagtttttaaaatattaatacattaaaattaacccagaaatactcatgtaatttc

SEQ ID NO: 184130 - DNA, 523 bp, Homo sapiens
cttaccccaaatatctaaatttgcaattctacattacggcttttctgtaaagttactctcaccaaaatttttagtaactggatgcttcaccaaatgaatttgatccatatacaggtagtgctccccatcaatattttcagcagaccagttatgaaaatacacaatttgctcatatacacacactgaacaaatggggtatatataaatatttcttgttagtctactgaaaatcctaaacctgtccacaataatatccttgaaatgaaattgcagcataaaagtgctgtatcaaataacactccgayaacataaaaacttagtgacattagagtttaaatttcaagttaggataaaacattctacaaaattagaagtcttatcaccacattaagctaaaaattttagttttgctacatttcttggtatgtttatcaaatattttgcctctttttaaagtctttgtgaatttagtttttaaaatattaatacattaaaattaacccagaaatactcatgtaatttc

SEQ ID NO: 184131 - DNA, 242 bp, Homo sapiens
gagaccactctgaccatgaataaatctaaycagtgagagtcagcatgttgcttattctgttctgttcacacgcagaaatctgcttggtttcacagtgagcagacttggtaatggtgtaattctgaagtgcttcttgattgaacactctataaacaatgtagtaaaactatgaagtgaattctttatagttagtgattcataaatcaggttaggcccactgaaaactgacaaaggaaaaaaac

SEQ ID NO: 184132 - DNA, 587 bp, Homo sapiens
tatcaatttatatatataatattaaaatttgtgttgtggacaggtacttaggcaactctcagataatattrttcctagtgccactacttattataatgtttctaaaattaattaaagaagctagaagaaactagcaagtctctcagtcacagtagaggttaaactttgtcttttatgtaagaaatggacaattataattacagattgatggatagttgtgaattcaaatcaattttcagttatctgcacaagcttgaggtactaggtaggaacgaacatggatttataaagtataaatacttccaaaccaatttaatttgctcctgtgataaacttagaggcaatgtagataaggggaaagcaatatatttaatctgtggactacagtgattgttttgattttaacccatacagcgcctattaaaaaaataaataaataaaaattttgagactaaacaagccaattcccagctatctacaggaggtgtgccaggaacacaatgctctgagataatgcatgtcaatcgttacccctaggaatcaatccaaaagatgataaatataaacatatttgtgaacattttgaa

SEQ ID NO: 184133 - DNA, 590 bp, Homo sapiens
ttaattcaaattgaaaaattccccacagcagtcagtggcttgaaccagaatgttttacattcactctctctttctggccatcaaaagccttccatgcttggaaaggaaaaactataataaaaaatatatggttatactggggtttttaaagtataaattattaaggcgcataatcatatcttaactttgaataacccagatattaccctaagtatttatcagrcattaagaccaactcattatacttgctctctctcccaaatcctcctgctttctattctgaattggtagcactatcacccaacccagatgttcaaggaaaacatctaagtcatctttaaattttgcttaacagtactattttcttctactcctcataactgccttcttcctcttattacctctcccagtccaagcatgaccttctcttctagatgatcagaaatagttcctaaatgatctccctgatcagcttttcaccctccccaatctaacaattacagtgtgtcacaatatgattgtcacctctttacttgcaataatcgaatggctcccttttacatattccagcctattttcaaactaacgtc

SEQ ID NO: 184134 - DNA, 696 bp, Homo sapiens
atgtagggatgtgtgcctggaatcccattggttacgtctctagcagtcacagaaactacaatgtagaaatgataagctagattgaaagaaatggaagtccttggtttgctttaataagccaataaattctgtgacctatttcagtttgtggttctgtttcttgcattcaagaatcctagttaatccttttcctgtcggccattttacattatttcttgtatttataggctggattgtgaatgtcattaccctaattccatagttgaaaaagttagccttaaggagtaagtaccttgactaacatcacatggctattaagtggcagaaatagtagttaaagcsaacctcactgatgttaagcttatcctcttttttttcttctttttaacaaaatcttagtgtatttttttgtgttaaaatatacataatgtaaaacttaccatgtaaaccatttttaagcgtacagtccactggcattaagtacattcacattgttgtgcaactattgatttccagaactttttcatcatctgaaatgaaaactctgtacccattaaacaataactcccattcctttccttcccagaccctagtaatcaggatcctactttctgtctctaacaatttgactactctaggtatcttatataagtagaaacatataatatttgtactttggtgtctggcttacttcat

SEQ ID NO: 184135 - DNA, 696 bp, Homo sapiens
atgtagggatgtgtgcctggaatcccattggttacgtctctagcagtcacagaaactacaatgtagaaatgataagctagattgaaagaaatggaagtccttggtttgctttaataagccaataaattctgtgacctatttcagtttgtggttctgtttcttgcattcaagaatcctagttaatccttttcctgtcggccattttacattatttcttgtatttataggctggattgtgaatgtcattaccctaattccatagttgaaaaagttagccttaaggagtaagtaccttgactaacatcacatggctattaagtggcagaaatagtagttaaagccaacctcactgatgttaagcttatcctcttttttttcttctttttaacaaaatcttagtgtatttttttgtgttaaaatatacataatgtaaaacttaccatgtaaaccatttttaagcgtacagtccactggcattaartacattcacattgttgtgcaactattgatttccagaactttttcatcatctgaaatgaaaactctgtacccattaaacaataactcccattcctttccttcccagaccctagtaatcaggatcctactttctgtctctaacaatttgactactctaggtatcttatataagtagaaacatataatatttgtactttggtgtctggcttacttcat

SEQ ID NO: 184136 - DNA, 507 bp, Homo sapiens
tgggttctggtgaggcctctcttcttggcttgtaaatggccaccttctcactgtgtcactgtgtcctcacatggcctttcctctgtgcttgtgctgagtgtgtgtgtgtgcatgcatgtgtgaaacagagaaagttcttgtgttttttccttctcttataaggacaccagtctatcgggcaatctgccccgatattcacgtaggttcttttctattttccttaagcgtcggccagcttgagaaataaagggacagagtacaaaagagagacatgttaaagctgggcgtccgggggagacatcacatgtcagtaggttctgtgatgccccacaagccrcaaaaatcagcaagtttttattagggagtttcaaaaggggagggagtgtgcgaataggtgtgggtcacagacatcaagtactttacgaggtaatagaatatcacaaggcaagtggaggcagggcgagatcacaggaccacaggaccgggaagaaattaaaagtgctaatg

SEQ ID NO: 184137 - DNA, 507 bp, Homo sapiens
tgggttctggtgaggcctctcttcttggcttgtaaatggccaccttctcactgtgtcactgtgtcctcacatggcctttcctctgtgcttgtgctgagtgtgtgtgtgtgcatgcatgtgtgaaacagagaaagttcttgtgttttttccttctcttataaggacaccagtctatcgggcaatctgccccgatattcacgtaggttcttttctattttccttaagcgtcggccagcttgagaaataaagggacagagtacaaaagagagacatgttaaagctgggcgtccgggggagacatcacatgtcagtaggttctgtgatgccccacaagccgcaaaaatcagcaagtttttattagggagtttcaaaaggggagggagtgtgcgaataggtgtgggtcacagacatyaagtactttacgaggtaatagaatatcacaaggcaagtggaggcagggcgagatcacaggaccacaggaccgggaagaaattaaaagtgctaatg

SEQ ID NO: 184138 - DNA, 389 bp, Homo sapiens
ataaccacatatgtttaaaataattctagtataaaattcagaaacttgaggtggggaattcctacttgtcaggcaactcaatgtttattttatccatctattacctagctcaatttgtgaaacattttgtgtttttagaaattttaaagcaaaaattttaaatacatgttaaacttcayaatgctcattacaaaactttagcatgtagatgtagtatattgattctactttgagattataagtacatgagcaaataaaaatgataaatgtatgaattaacaatgtagaatgagataattatgcacgtgtacatctacctactggaagtatagcaacatatgtgcacatgtgggcttactgactggtatatttgtatcattacaaggatc

SEQ ID NO: 184139 - DNA, 528 bp, Homo sapiens
tttcagttcattgtatttttttgaaaaaaacatttgttttcaatttgtctataaataatggaagaaatcacagctgaggggcccagtgtgatttttatagaaggttcatttttggaaatctgataagcttataaccacatatgtttaaaataattctagtataaaattcagaaacttgaggtggggaattcctacttgtcaggcaactcaatgtttattttatccatctattacctagctcaatttgtgaaacattttgtgtttttagaaattttaaagcaaaaattttaaatacatgttaaacttcacaatgctcattacaaaactttagcatgtagatrtagtatattgattctactttgagattataagtacatgagcaaataaaaatgataaatgtatgaattaacaatgtagaatgagataattatgcacgtgtacatctacctactggaagtatagcaacatatgtgcacatgtgggcttactgactggtatatttgtatcattacaaggatctgtcctata

SEQ ID NO: 184140 - DNA, 528 bp, Homo sapiens
tttcagttcattgtatttttttgaaaaaaacatttgttttcaatttgtctataaataatggaagaaatcacagctgaggggcccagtgtgatttttatagaaggttcatttttggaaatctgataagcttataaccacatatgtttaaaataattctagtataaaattcagaaacttgaggtggggaattcctacttgtcaggcaactcaatgtttattttatccatctattacctagctcaatttgtgaaacattttgtgtttttagaaattttaaagcaaaaattttaaatacatgttaaacttcacaatgctcattacaaaactttagcatgtagatgtagtatattgattctactttgagattataagtacatgagcaaataaaaatgataaatktatgaattaacaatgtagaatgagataattatgcacgtgtacatctacctactggaagtatagcaacatatgtgcacatgtgggcttactgactggtatatttgtatcattacaaggatctgtcctata

SEQ ID NO: 184141 - DNA, 528 bp, Homo sapiens
tttcagttcattgtatttttttgaaaaaaacatttgttttcaatttgtctataaataatggaagaaatcacagctgaggggcccagtgtgatttttatagaaggttcatttttggaaatctgataagcttataaccacatatgtttaaaataattctagtataaaattcagaaacttgaggtggggaattcctacttgtcaggcaactcaatgtttattttatccatctattacctagctcaatttgtgaaacattttgtgtttttagaaattttaaagcaaaaattttaaatacatgttaaacttcacaatgctcattacaaaactttagcatgtagatgtagtatattgattctactttgagattataagtacatgagcaaataaaaatgataaatgtatgmattaacaatgtagaatgagataattatgcacgtgtacatctacctactggaagtatagcaacatatgtgcacatgtgggcttactgactggtatatttgtatcattacaaggatctgtcctata

SEQ ID NO: 184142 - DNA, 592 bp, Homo sapiens
caaaactaagcgaaatggatcaatattcaatttcacaaagataatgcaataccttggaagaaaaaaaaaccatgtttctcagatactttccaaaatataaaattttgggatacagaatcaaaccttgaaaagtaaaaccactaaaaagatttttagagacagctactggattaaggagaacttcactgaaacagctgatcacccccaacattgccaggtcattctgggttcctcagcctctcccataatactgtagacactaaatataaagctgcagactactgaccaccagcccactgataaatttcctctcaaaatgaaacagagaaagattattataggaagccaaattctttcttcttttattccagatacaaaattaaagaaaggtcaataatttggctgacatttaaaaattaaatcatttcaaataaaattggaactttttatggtgaggttaaataaatggcataagataggggatcatatgcatttaaatatttttcagatttaagagggaacagaagatagycgcagcaaggttcttaggttaacattcacagtgagcaagcacagtttaaaacttagccac

SEQ ID NO: 184143 - DNA, 514 bp, Homo sapiens
gtccttgggccccaggttgcatatgctggcactagtgtgagtccaggcaggctgacccttgggcctccagatggcttactcagataccagtagtaggttcttggcgtggggaataggttcttgggactctgggcactggcatggcaggagtgatgacagtagcagtagcaggatgacatcatggatcctgagttgtgtgcactgatattggcagtggctgtgacaggctgggcakgtcactctctaagtccacaggtagtgcatgcaggtaggtgccagctgtggcagtagaagttgggtgggtaggcctaacttcatgcccctggaatgagtgtgcaggtgccaatattggttgactgggatgggcagtcccctggcccctagtctgtgtatgctggcatggggtaggggtgaacccaggctaggatggcttgtcctcaagtcccccaatggtgaattcaggaaccagccatggaaggcaagtgaatggtgatccctagccactagaggaatg

SEQ ID NO: 184144 - DNA, 473 bp, Homo sapiens
gctgggttgaattatagttctatcacattctttgggaaatctcttgactgctttccacagtgattgaactagtttacattcccaccaacagtgtataaattctcccttttctccacagccttgccagcgycttatgatttctgacttttgaagaatagctactctgactaaggtgagatggcatctcattgtagttttcattggcatttctctgatgattagtgatgctgggcattttttatatattcattggccacttgtatggcttcttttgagaagtgtctattcatgtcctttgcccatttttaatggggttattttatttttcttgaattgtttaagtttcctagagattctggatattaggactgtactggatgcatagcttgtgaatagattctcccattgtgtacattgtctgtttagtttattgatagtttctcttgatgtgcagaagctcttaaatttaatga

SEQ ID NO: 184145 - DNA, 537 bp, Homo sapiens
tgagcaatgattttaaaataaatataatgaaaacataagacaatgaaatggtataattaatggttaaaagaaaatacccagcaaactataattctttgcctgatgaaaatagttttttaaaaatgaaggtgatattgaagatatttctcaaaaaagaatttatcataaaaagactgcactaaagaaaatagyaatgcatttcataattcattatgaaaagaatggattagtcaataaatagtataatttgttatccatataaaaattgtgctctctacttcatatcatacaaagaagtaaatttcagatgattaaagacctgatgtgaaaagcaaaactaattttagcagaaatatatgttagaatatctttacgactgcatgacagggaaagatgtcttaagcacaaagcctaaaagaaaagatgtctgtttataataatattaaaactttctttaaataaaaattcctcatgaacaagagagtctacagtaaaacacatactgaaagaaaatatattccagacaactggtaaaag

SEQ ID NO: 184146 - DNA, 537 bp, Homo sapiens
tgagcaatgattttaaaataaatataatgaaaacataagacaatgaaatggtataattaatggttaaaagaaaatacccagcaaactataattctttgcctgatgaaaatagttttttaaaaatgaaggtgatattgaagatatttctcaaaaaagaatttatcataaaaagactgcactaaagaaaatagcaatgcatttcataattcattatgaaaagaatggattagtcaataaatagtataatttgttatccatataaaaattgtgctctctacttcatatcatacaaagaagtaaatttcagatgattaaagacctgatgtgaaaagcaaaactaattttagcagaaatatatgttagaatatctttaygactgcatgacagggaaagatgtcttaagcacaaagcctaaaagaaaagatgtctgtttataataatattaaaactttctttaaataaaaattcctcatgaacaagagagtctacagtaaaacacatactgaaagaaaatatattccagacaactggtaaaag

SEQ ID NO: 184147 - DNA, 427 bp, Homo sapiens
ctggaaaatacgcaaaacctgaacagaccaataacaagtaatgagatagaagctgtaataaaaagcctcccaataaagaaatgcccaggacaggagatggcttcactgctgaattctaccaaacatttaaagaagtaacaccaatcctactcaaactactccaaaaaatacagtaggaggaaatatttccaaactcatgctatgagaccagcattaccctaataccaaaatcaaagacatatcaaaattagaaaactagaggccaatatctctgttgaatatggaygcaaaaatcctcaacaaaatactagcaaaccaaattcaacaatacattagaaagttcatttatcatgaccaaacagaatttatctatgtgatgcaaggattgttcaacatacacaaatcaatcaacatgatacttatatca

SEQ ID NO: 184148 - DNA, 614 bp, Homo sapiens
attatattttcctttatcctgaagtggctggcctaatagaacattggaacggccttttgaagactcacttatgtgtgccaggtacgggacactagtttaaaggcttgaagcaatgtcctccaagttgtagtatatggcttaagttggaaacaaatatagatgttgttctcccatatcctggattgatgagtctagtaatcaaagggtagaaatgtgagcggctatgctcaccaatgcctttgtgaggcactagcaagatttggccctcctgtcagtgcaactttggactccacttgtctagaaagcatagtctccgaaggaaagaagcttcatcaaaggacrtagtaatgctttgaccaagacacatggcagtggtttccacaaagtggaaagaaagaaagccatctgactggtttatgctcctcatcctagggaatctggaaggcagaaggggattgctgtatcttttggggcaattgatcctgactaccaaagggagattgggttgctgctacacagtgagggtaaggaggaacatatctggcatgcaagtaatcccctacatttcttcttattactcatatgaccttgtgactaaagtcagtggaaaactg

SEQ ID NO: 184149 - DNA, 614 bp, Homo sapiens
attatattttcctttatcctgaagtggctggcctaatagaacattggaacggccttttgaagactcacttatgtgtgccaggtacgggacactagtttaaaggcttgaagcaatgtcctccaagttgtagtatatggcttaagttggaaacaaatatagatgttgttctcccatatcctggattgatgagtctagtaatcaaagggtagaaatgtgagcggctatgctcaccaatgcctttgtgaggcactagcaagatttggccctcctgtcagtgcaactttggactccacttgtctagaaagcatagtctccgaaggaaagaagcttcatcaaaggacgtagtaatgctttgaccaagacacatggcagtggtttccacaaagtggaaagaaagaaagccatctgactggtttatgctcctcatcctagggaatctggaaggcagaaggggattgctgtatcttttggggcaattgatcctgactaccaaagggagattgggttgctgctacacagtgagggtaaggaggaacatawctggcatgcaagtaatcccctacatttcttcttattactcatatgaccttgtgactaaagtcagtggaaaactg

SEQ ID NO: 184150 - DNA, 572 bp, Homo sapiens
catgttcccttccattttactcaccattaacttattatatacctgatattgtttattaactctttggtaactttttcatcgatttcaatgaatctcttactgtttggtgtaagacacaggtttcctagacctgggttgtatcgtttattctggcatggggcctataatgaaacctataatgaaaacactcttggcatagacttatacgtacaagttgattgcaaagtaagaatacattaaaaataattcactcagctatatatgaccttaataagactctttgctccttgatatcaagttccctatctttcaatgtcttgtacctccttcataatgcagcaaatttgacaggtcttactgtttgggccctattgcctttgcagtatatatacactgcctgctgctcatactgatattctctcctgttttatagagcctcatttcggtatagtgtttcctattcttttgaggtctatacctgtctgtgctcctgaaggttacatagggtagttgggtacttgtgtacttctgttattgtaaaatatcayacagtctgattacaaacagaatac

SEQ ID NO: 184151 - DNA, 334 bp, Homo sapiens
agaagatctgggagttatttttccaaggatattgagaaactcatctctaacggcagctcgaggccaaggtgcaccaataaaggtacttaaacacaaaactgcaatgtgttaaacagtstgttacggataaatttctagagaaataagaaattgtgagctaaggtagaggtggtagaaatggagagaaatatatcaaagagaaattgggaaaataaaattgacaaatgtgagaaatgtttggatatgggggttgagggaggaaagattaaatagtaaaggataatttccaggtttcatgtttgaagtagtaggtggtactaataattcatatgga

SEQ ID NO: 184152 - DNA, 334 bp, Homo sapiens
agaagatctgggagttatttttccaaggatattgagaaactcatctctaacggcagctcgaggccaaggtgcaccaataaaggtacttaaacacaaaactgcaatgtgttaaacagtgtgttacggataaatttctagagaaataagaaattgtgagctaaggtrgaggtggtagaaatggagagaaatatatcaaagagaaattgggaaaataaaattgacaaatgtgagaaatgtttggatatgggggttgagggaggaaagattaaatagtaaaggataatttccaggtttcatgtttgaagtagtaggtggtactaataattcatatgga

SEQ ID NO: 184153 - DNA, 475 bp, Homo sapiens
tatcaacattgcatcaccagaaatcattcccattggtggcctttcttaagaaaagcagcatgctctttccctcggaaagccactggaatctgtayacacccaggaatttacatcttcccaagacaaataaaatacctctgacactcaactcagagtgcttgcccatgattatatcatggagagagtgtcgtttttaaatctggggagtaaggaatgcagagaaggaaatgaagaataagttaagagctttctgccattgttagactcaggaggggttctgaatttcagaaccaggctgctcattgatgatatcttgactctcccaggttctcaccaggatccaatggccctaaggagacaagtacatttgcttggaaaactggtcacctaattcccaaaaggacagagctaacattatatgtctcagcatccagtccatcctagatggatttcgattctatctaggttagtagtc

SEQ ID NO: 184154 - DNA, 475 bp, Homo sapiens
tatcaacattgcatcaccagaaatcattcccattggtggcctttcttaagaaaagcagcatgctctttccctcggaaagccactggaatctgtacasacccaggaatttacatcttcccaagacaaataaaatacctctgacactcaactcagagtgcttgcccatgattatatcatggagagagtgtcgtttttaaatctggggagtaaggaatgcagagaaggaaatgaagaataagttaagagctttctgccattgttagactcaggaggggttctgaatttcagaaccaggctgctcattgatgatatcttgactctcccaggttctcaccaggatccaatggccctaaggagacaagtacatttgcttggaaaactggtcacctaattcccaaaaggacagagctaacattatatgtctcagcatccagtccatcctagatggatttcgattctatctaggttagtagtc

SEQ ID NO: 184155 - DNA, 474 bp, Homo sapiens
ctaaaatatcaacattgcatcaccagaaatcattcccattggtggcctttcttaagaaaagcagcatgctctttccctcggaaagccactggaatctgtacacacccaggaatttacatcttcccaagacaaataaaatacctctgacactcaactcagagtgcttgcccatrattatatcatggagagagtgtcgtttttaaatctggggagtaaggaatgcagagaaggaaatgaagaataagttaagagctttctgccattgttagactcaggaggggttctgaatttcagaaccaggctgctcattgatgatatcttgactctcccaggttctcaccaggatccaatggccctaaggagacaagtacatttgcttggaaaactggtcacctaattcccaaaaggacagagctaacattatatgtctcagcatccagtccatcctagatggatttcgattctatctaggtt

SEQ ID NO: 184156 - DNA, 270 bp, Homo sapiens
ctttctctctgtttatgagattttctaatgatagcatcacagacaaattcctktcacctttagtgttgctatcttctctcttaagcttcccataggttttctgtcttacatcatgacttctgcctccaaattcttccattcaatttacttttatgaaattgaatggaattcaatttcccatgattcacctgcctgtatttcttgcttagagatatgaacctagtacttctagatagctttataattataatataaaattcttgaaaacta

SEQ ID NO: 184157 - DNA, 496 bp, Homo sapiens
agctctaaatcttgaaacaaatcaaaatagaacctctttaaaacataaatcacatagaacctataaaacaaaaatacaagttaaaaagcaaaaacaaaaaagaaaccaccaaagtacacaggcaacaaggaacatgatgaaagcaatggtacctcacgtttcaatactaacgttgaatgtaaatggcctaagtgctccacttaaaagatagagaaccacagaatggataagaactcaccaaccaactatatgctgccttgaagagactcaactaacacataagcactcacgtaagtttaaagtaaaggggtataaaaaggcatttcrtgcaaatgaacaccaaaagcaagcaggagtagctattcttatatcagacaaaacaaattttaaagcaacatctgctaaaagagacaaagaggtacaaggccttgtccagtgggaaaatatcacaatcctaaacatatatgcacctaacactggaggtctcaaatttata

SEQ ID NO: 184158 - DNA, 599 bp, Homo sapiens
ccttttctctcctttgtgtcaactgtcaaaactgttcaaattagcaagcttgatgtttttgctgttttcagaaataattgttttgtttctcttttttcaaaatgtaacttagaataaccatgttcctatgctatttagctcttgctgaatgataaatagtacaaatgtctactgtcttttggaaacatactttcaaagaattctttttgtattttttaaatatcagaaatacagcatctgacctgcattctgactttgctgtgaatcattaaagttggaatgtttttgaattttagtacattttgtggcattaactttcctacccacaaacgaagagccttcaaactaccyagatgagatcaaacgtcgatgacatttatatttttctaggagtcaggaagaaaaatataatcccacaacgttaaatgcctttcaaggaaaaaaagtgagcacgtggctggatgtttgacgtgaaagacagaaaaatcttctgtctctgtttagtgttcccaaacgtcaggcattcttctttttttttttttttttttttttttacttttttctctttcccctggctctctgaattataattagggacc

SEQ ID NO: 184159 - DNA, 557 bp, Homo sapiens
tgtttttgctgttttcagaaataattgttttgtttctcttttttcaaaatgtaacttagaataaccatgttcctatgctatttagctcttgctgaatgataaatagtacaaatgtctactgtcttttggaaacatactttcaaagaattctttttgtattttttaaatatcagaaatacagcatctgacctgcattctgactttgctgtgaatcattaaagttggaatgtttttgaattttagtacattttgtggcattaactttcctacccacaaacgaagagccttcaaactacctagatgagatcaaacgtcgatgacatttatatttttctaggagtcaggaagaaaaatataatcccacaacgttaaatgcctttcaaggaaaaaaagtgagcacgtggctggatgtttgacgtgaaagacagaaaaatcttctgtctctgtttagtgttcccaaamgtcaggcattcttctttttttttttttttttttttttttacttttttctctttcccctggctctctgaattataattagggacctggtgaacaga

SEQ ID NO: 184160 - DNA, 611 bp, Homo sapiens
ggctctatactatagacccatccttgctctgtgctggaatcatcacaggaatcgcacccattcgacttagattaggggcagctaccttagcaggtgggagagtcggactctgaggagtgcgttcaaagtcttcacttggtacttggttatactgagtcttggaatatccttccatgttggaaggagacatggaccccagggatgaatgattactgccgatgtagcttctggcagtggacgtacggctctttggaggyggcacatcttccctgcaaagcaaaatccccaatacatgtcaagagaataagtttctaaaaacctacaattatgcaagctatgaatcatggataagagcctgtatttaggtactaaacatataaaagtgtgtgtgtgtgtgtgtgtgtgtgtgtgtgtcacaaaaaagcaaaaagcacaagccataacgtcataaattgtgtatgtctccaatctgtcattctgattaaagagttataacttcacacttaatgaaatatggtatttacacaaatgtagatgattctagaatgttgtcttacaaaacacaaatctcaaatagtttcatattctagtatcactggtcaagacaatct

SEQ ID NO: 184161 - DNA, 589 bp, Homo sapiens
tatgacagtgcagagtttaatagcactttcttttcactaaagtcagttaaataaatgatcttttgcaaagctaaaaccataattttatttcaaccagttataggtattaaaactagaagtaacatcattgagtgaaaggttttagatgagataaatgaatgggatttgttagaagtaaaaagtaaagggtaagaagacatgattatacccactttacagtccatggagacaaaatgatttacacaagctagcaagctataaaccaaatactatattagacatcttaggaagagaggaaaaaagtgtctatattacacacacgcagagccatctttagttactcatagagcataggaacaatttcttagactgcttcaggctgtcaaggtatggatcycccaaggaatagttttgaagtgaagggagctttcactaatggcaaagccagccaagaatttcccatgtgaaaatttatcagtaatcaccacaatttggcaacattgcagaagtaaagacttttgtcttaccctatcacaaaatcaagctcaccaggtttgtgacagtcttggtatagtctaaaccctggata

SEQ ID NO: 184162 - DNA, 473 bp, Homo sapiens
ggcctcttgtgcctcagtgttcttactggttaaaagggaataggtaataataattctatcttgtagggttgttataaggattaatggagataatattagtaaagcatttagagtaatcctggcacataggaagatactatttgttagctgctatcatcatcatctttataatattcttgttatggagcaytgtatatttaatatcaagaatttctcattcatggttgccaataaccctcagcacaatcagggttggttgtgctgagttgtgcagagttggttcttcccatataatgaatgatgaaatgaagctcaaggaatttaagttatcagctcaaggtccatcaactgctagatgtcatcttccactgcttatccctaaggactgtcttctttctcttacagtatgttacttcccaaaataaaaggtaaagagtgtagccaaaaatagtgaacttgcaatggtggaattc

SEQ ID NO: 184163 - DNA, 494 bp, Homo sapiens
ctggccttttttgttagtttttcccttattctctagttatccattctaattaataagagactaccatatagtcccctttttcgccccttgcccagctcaaagtctgaaaggaaacatgagaactcagaagacactggaagacrtcactattacgggcctttcccaagccccatactagtgagtccttctctccgttgtgactcacaccccatcaccctccctcctcccaggacaaacagcgttatgactcactgtggcttctgacagccttaaaagaaccatgaacttgagcccaacccttgaaggtcaaggagtactatcattctttaagccacaccactgtgcacatgctttttcctttagccaaggggaactccatgcctctgtgggtttttccctttagactaatatctttcttcttggttccaccctgagaggattgtcagtcaaggggggtgtttttgggtttgagatcagcttacaaaagctccagg

SEQ ID NO: 184164 - DNA, 582 bp, Homo sapiens
tacaaatgattaacagatatatgaaaaaatgctcaacatcactaatcatcagagaaatgcaaatcaaaaccacaatgaggtatcatctcactccagttaaaaccacttgcatcaaaaagataggcaactacagatgctggtgaggatgtgcagaaaggggaaccctcagtgttagtgggaatgtaaattagagcagccactacgaagaacagtatgaaggttcctcaaaaaaaaaaaaaaaaaaaaaaaaccagaagtaaactaccatatgatccaacaattccactactatacatatatccaacaaaaagaaaatcaatacactgaaggtatatctgcactcccatgtttattgcagcactattcacaacagtccaaatatggaatcatcctacgtcaattccatttaatacatgaatggataaagaaaatgtggtgtatatacacatacacaatgaaatagtattcggccataaaaaaraatgaaatcttgtcatttgcagcaacagggatggaactggaggacattatgctaaatgaaataatccaagcacagaaagacatgatctcactcatatgtgg

SEQ ID NO: 184165 - DNA, 522 bp, Homo sapiens
gcaatctccagctgtggcaaatggaactgcatttccaaatattgttttggaaaaaagaaggtccgtagctagaaaataataaataaaactctttagcatggagacaataatgcaatckttgttgtcaaacacagagttttcttattacttacttagtaaatatacatatttatatattaattttaaaattttaagcacaaatgccacaattctggtatatatcatagaataagctctcattgaacaaattttgtttaatataaaaatgttcatatcataaattgccctaacaaagggcaagcacatttgtaattaaacagaagagttaaaacgaaataaatgcattattacatttgaagtcatagaatatctgaaataggtaaagtggggtcaggagcaaaatcactggagaaaaaagggttatgtaaacataaatgacaaaacaataaaattgaatgcttataaacagcacatacaaaaattcatttaggtaattcaaaatctctccacaaaaaagtatgc

SEQ ID NO: 184166 - DNA, 574 bp, Homo sapiens
ttacattttaatatcttttagggctaatcacccaccattacacgtgatacaatcttttattgagattgacctggagaaacactgatagaagagtgtgtgtgtgtgtgtgtgtgtgtgtgtgtgtgtgtgtgtgtagattgtcctgaactgcagatacaggtattcaagttactgtaaaggtacccttctccctgccccctcacctctaatcttaaattaatacattaatcttggattataaatcagttttttacaaattggttagcaagaatcagacctttggcctggcacagtggctcacgtctataatcccaccactttgggggccaagacgggcagatcacttgagcccaggagtttgagaacagcatgggcaacatggcaaaattccttctctacaaaaattagctgggcggtgacacgcacctgtagtcccagctacttgggaggctgaggtgggaaaatcacttgagcccgggagtgagcctcgaactaggtgacaaagcaagaccctaacatctcaaaaaaaaaaaaaaaaaaaaaaaaggawtcagagctttacttaactagtaaa

SEQ ID NO: 184167 - DNA, 363 bp, Homo sapiens
atatgcagttctttggccaggcacagtggctcacccctgtaatcccagcactttgggaggccgaggtgggtggatcacctgaggtcaggagttcgagaccagcctgaccaacaggagtaaccccgtctctactaaaatacaaaaattagccgggcgtggtggcacatgcctgtagtcccagctacttgggaggctgaggcagagaatcacttaaacccagaaggcagaggttgcaatgagccgagatcacaccactgcactccagcctgggcaacagagcgaraaactgtctcaaaaaaaaaaaaaaaagcagttcttttggagtacagtatactttctcctaggacatattttggagtatag

SEQ ID NO: 184168 - DNA, 526 bp, Homo sapiens
aaaaatcagaaaactatcaaatttttaaaaatgatagtaagatttggacatttcaccaaagatatacagatgcaaaataagcacatcaaaagatgcattaggaaaatgcaacttaaaactacagtgagatactactactcatctattagaaagaatacaatttaataaagatggacaataccaagggctaacaaggatggcgaacacctggaattcatctattgctggtagaaatgcaaaatggcacagccactttagaaaatagtttggtaatttcttataaagttaaacacacatctaccatatgacccagcgatcttactcctaggtattgactcaaatgaaatgaaaacttatgctcacacaaaagcctgtatacaaatgttgacccccgttatctgtgggggattggttccacgacaaccccaacccacagcagataaaaaaatccatggatactcaagtcccttatataaaatggcagagtatctgcawataccctacacacatcctcccctatattgaa

SEQ ID NO: 184169 - DNA, 434 bp, Homo sapiens
acgagttttacttttaagtgggaacgctatctttaaacattatgtgaagaaatctgtgccgaaaatgcccactccataattgatttgcataaaggtcagattatggtacttagaatattcaatcggaacttcaccagtaaaaacaaaagcatggaaaacccccaaaacgtgacaagtaccttgtgtattaattacagctacacattttgataacgcttattgtataccaatccagaaacaagtgaaattacacgtgtactgtgagagctctcaacagcaaagacaactagaattctctcatatataatcaaatataacttgttaaggatttcactcaaaatgtgcaatagggaaaccyggatatttgatattttcataccctgaagaaaataaaatgaaaattatcttaattagtttcaaaaattttgtttgtt

SEQ ID NO: 184170 - DNA, 578 bp, Homo sapiens
catttaggaaaatggaatggttgataaatggttggtaagtattttgccaaaagtagcttgggtccttcaaaactagatgatacaaatgaattttttatgctgtaataaactccaatttttgttaattttttttttttgcaactgaaaagttccaacttgaccttttttttttttttctccctgtggaaagcaaaaacctggtcaatatttttgaagtggctaaactatatgtttaggccatttggggacaaacttgaatgctcagtaagttaraattgtatgaagtttgatgtggtgcacaaagccagccatcttgtgaaaaagtgaaaaaaagtaattctcggggctgatttttaacataattagtttcacagcttccatttttggaaaaagcattagggatagcactgattcaaaaacaatatgatgagacagcattagaggagaaaaaaaatgtcacatttaacttgtgcaaaatgttcaaagataaaccagcaatcttccccgttggtaaaataaacaagcaaaagctggtgaactagaccaaggaacactgccaaagtcaattgcccctggac

SEQ ID NO: 184171 - DNA, 578 bp, Homo sapiens
catttaggaaaatggaatggttgataaatggttggtaagtattttgccaaaagtagcttgggtccttcaaaactagatgatacaaatgaattttttatgctgtaataaactccaatttttgttaattttttttttttgcaactgaaaagttccaacttgaccttttttttttttttctccctgtggaaagcaaaaacctggtcaatatttttgaagtggctaaactatatgtttaggccatttggggacaaacttgaatgctcagtaagttaaaattgtatgaagtttgatgtggtgcacaragccagccatcttgtgaaaaagtgaaaaaaagtaattctcggggctgatttttaacataattagtttcacagcttccatttttggaaaaagcattagggatagcactgattcaaaaacaatatgatgagacagcattagaggagaaaaaaaatgtcacatttaacttgtgcaaaatgttcaaagataaaccagcaatcttccccgttggtaaaataaacaagcaaaagctggtgaactagaccaaggaacactgccaaagtcaattgcccctggac

SEQ ID NO: 184172 - DNA, 578 bp, Homo sapiens
catttaggaaaatggaatggttgataaatggttggtaagtattttgccaaaagtagcttgggtccttcaaaactagatgatacaaatgaattttttatgctgtaataaactccaatttttgttaattttttttttttgcaactgaaaagttccaacttgaccttttttttttttttctccctgtggaaagcaaaaacctggtcaatatttttgaagtggctaaactatatgtttaggccatttggggacaaacttgaatgctcagtaagttaaaattgtatgaagtttgatgtggtgcacaaagccagccatcttgtgaaaaagtgaaraaaagtaattctcggggctgatttttaacataattagtttcacagcttccatttttggaaaaagcattagggatagcactgattcaaaaacaatatgatgagacagcattagaggagaaaaaaaatgtcacatttaacttgtgcaaaatgttcaaagataaaccagcaatcttccccgttggtaaaataaacaagcaaaagctggtgaactagaccaaggaacactgccaaagtcaattgcccctggac

SEQ ID NO: 184173 - DNA, 578 bp, Homo sapiens
catttaggaaaatggaatggttgataaatggttggtaagtattttgccaaaagtagcttgggtccttcaaaactagatgatacaaatgaattttttatgctgtaataaactccaatttttgttaattttttttttttgcaactgaaaagttccaacttgaccttttttttttttttctccctgtggaaagcaaaaacctggtcaatatttttgaagtggctaaactatatgtttaggccatttggggacaaacttgaatgctcagtaagttaaaattgtatgaagtttgatgtggtgcacaaagccagccatcttgtgaaaaagtgaaaaaaagtaattctcgkggctgatttttaacataattagtttcacagcttccatttttggaaaaagcattagggatagcactgattcaaaaacaatatgatgagacagcattagaggagaaaaaaaatgtcacatttaacttgtgcaaaatgttcaaagataaaccagcaatcttccccgttggtaaaataaacaagcaaaagctggtgaactagaccaaggaacactgccaaagtcaattgcccctggac

SEQ ID NO: 184174 - DNA, 609 bp, Homo sapiens
ctaccaatattgcaggggcgttacacacccctgtgatagtgttcctaatatccaggggaatagaraataatattacttttaatgttgcagggtgtgttcaccccccttgtgatattgtttctaacatgcaggggggagggaatgattttactcccaatatggcaggggctgcacacccccttgtgatattgtttctaatatccagagatggagaggatgatattacaaccaatatcgaagggactgtacactccccgccgtgatactgtttttaatatccaggtgaggagagaataatattactcccaatgtcacaggatgtgtacatcctttctttaatattgtttctaatatttggggggggaggttgatattacttacagtattgcagggggtgtacagacgccctgtggtattcttcctaatatcaaaaaaaaagagagaacgacattactcccaatatcgcagggggtgtacaccctctttgtggtattgttcctaacatttaagagggagaaaatgatattactcgcagtaatatcgcagaaggtgtacacccccctgtgatattgttcctaatatccaagaaggagatgatgatattactgt

SEQ ID NO: 184175 - DNA, 609 bp, Homo sapiens
ctaccaatattgcaggggcgttacacacccctgtgatagtgttcctaatatccaggggaatagaaaataatattacttttaatgttgcagggtgtgttcaccccccttgtgatattgtttctaacatgcaggggggagggaatgattttactcccaatatggcaggggctgcacacccccttgtgatattgtttctaatatccagagatggagaggatgatattacaaccaatatcgaagggactgtacactccccgccgtgatactgtttttaatatccaggtgaggagagaataatattactcccaatgtcacaggatgtgtacatccttyctttaatattgtttctaatatttggggggggaggttgatattacttacagtattgcagggggtgtacagacgccctgtggtattcttcctaatatcaaaaaaaaagagagaacgacattactcccaatatcgcagggggtgtacaccctctttgtggtattgttcctaacatttaagagggagaaaatgatattactcgcagtaatatcgcagaaggtgtacacccccctgtgatattgttcctaatatccaagaaggagatgatgatattactgt

SEQ ID NO: 184176 - DNA, 479 bp, Homo sapiens
aacatcatgtttggaattactctaaaagtacacacagtgaagcataaactgcatttgacccatctattatctggaagttaaatatatctaattcatttatttccactaatcagctgctacacatttttctccggcttctgccatctgcttttaattaccaaaacaattcacaatccaaactgaaatgataaatagttaatcatcacaggcttttacaggtgcgggtcaaaacttgaagaaataagcagctttatttcatttcraagagagtcaaaacttacataaatttagaacattgtcagttaccttttttatcggccattttgagagttcataaaatcaatttgaaaagtaatctttgctaacaagattaacagtgttattttcggcagtatgtttgaaattaagttttaaagacccagactaacagattcatggaaggaaggaagcctatgaagaaaaataactaacactgcctc

SEQ ID NO: 184177 - DNA, 609 bp, Homo sapiens
atatgtttattctttctcccctaaagaaaacccaggatcttttatggcaggcactgtcttctacttttatgtatctctatcctctttttgtcagacttcaggcccatataaatttccagcttgtttaaaacatttttgccttggctaccttgtacaatgggatctttttagcctctttcttrtgaaaacctcataccttggaatttctcttactattgatagaaaaattatgcacatggtagagaaaagctcaatctaacttgtcttcataggacttccatatttagggaaagaccctaagatgtcgtgctggatcatttgctttttgatatatccagattgctccttatcccaatgaaaacagataaaggaggttgtactgtaattagctaattctgtaattcttgccaagatagtaggggttgttcattgtgaacacattctgccacaacagctgaggtagaacattgtgtttatttgtgagagaatttgagtatgaacaatttggtttaaagattaaatgggggaataaattatattgataaaactgatgaaatattttattaaaaattactaagttacacagaggagtttacatttaaagcatta

SEQ ID NO: 184178 - DNA, 538 bp, Homo sapiens
ataattatgatatgagccaggcacagkggctcacgcttgtagtcccagcattcagcactttaggagcccaaggcggtcagatcacttgagctcaaaagttcaagaccagcctgggcaacatggtgaaaccctgtctctacaaaaccatacaaaaattagcagggcatggtggtgcacacctgtagtcccagctactcaggaggctgaggtgggaggatggcttgaccccaggaggcattgattgcagtgagccaagatcacaccattgcactccagccttggtggcagagtcagactctgtctcaaaaataatagtaatcattattgtggtaataataattagttacaatatattatactatataatattactatataatatcatatagtaataattattattactataataattattattgtataaggcaagatacaaaaggatatgacaaaagtcatgtcctgggaacaaataagtaaaatagaagctcaggaaggagaggcatatttaacttggaatcttcaaggaaagttccag

SEQ ID NO: 184179 - DNA, 458 bp, Homo sapiens
tttaaaggaaatacactcttaaataaaatcttaagtcaatttgtggcatatcatgtttagataactaaaacagagaatgttagttaaagtttaagtgagctgtaaatttatacaatacaatctatttcatcttcattattataatctagtcagccaaaatagcaattttatatataaataaataawtgtaatatataatatatattttagatgtaaaacttatttaatatattatgtatttaaacatatcaaataaaatatataatacaaatatggtatactttatctacatatatgaaaacaaacagaaagtggttctttcttgtgtcttcaatttcctgctggaaactggattgagagtgagctgaataaatttactgagaacccagtataacagagtgggagtaaattcaagggcagaacttggaatttcaagtgtgggaaccagaaatcaatag

SEQ ID NO: 184180 - DNA, 486 bp, Homo sapiens
attttcaaaatgaaacttgtaatgtaatgttaactaatttcctgatggtagccatcaataaaaattagcattaggtctctgggaagctgatgctacttattttggaaatcagtgtaaaggtatttggggaatttctaatataaattgaaggtgtcttttcyatacatcttatttgagccacaaaatgagtcaaaatttaaatcaagggtaaataatacagtagaacaaagtatacaacactcattaaaatttaaagtttaaaaattattcagaggaatgtattatttggtatctgaaagaatagctttattttcacaattttaagtgccaaaaagtaagaaaatagaagtctacattttattttatcataaaataatattctattcttcaaacttgctatatgtgttatgtaattcccttatgtcaactattaaagggctgtctaaacagataacatgtgtgacagagattgggtgatttctcaca

SEQ ID NO: 184181 - DNA, 579 bp, Homo sapiens
attctgaattctatttctgacattttagccatttcagcttggttaagaaccattgctggtgaacgagtgcaatcatttggaggtaaaaaaacactctggctttttgagttgccagagttgttgtgctgggttttttctcatttgtgtgggctgatgtttgttcagccttgaagttactgtccttgtggggattttttttttttttttttttttgcttttttcttttttaatacccttgaggggttaattatggtatatggtgtgtttggtttactcacttcaattctagttcattcctggtcttggaggaacctcctccactaactctccatgcccacatttcttatgtggggtgttctgcttcgtgagttctcacaggcaggggcctgagttagcraacaagctatatccttgtgaggtcagccctaatctgctatatgtatgcctcctggggaaatacaaggttgtgcctgccctcagacagaagtaggtagaagtaggaccactgggctggaagctctagcaggcatggctttcctggctaccagaaatagggatgggtggggatgcctgccttgc

SEQ ID NO: 184182 - DNA, 433 bp, Homo sapiens
ctgcattctagaaatatattacaatattcctttatttgtttaaatgttttgtttttaaatgtatttgcagcgactatgatcatctcaagcctttccactgtgacagtgattagatttttagtggcttatcttctctttatttttctttctaattttaaagttcaaattgtctgacactgaaatttgctctgactatgtaagaattcttgtcatccttcccactgaggacagtttattttctcctctgagctatagttagtttgaggctaagtatcccttagaacggatgatgagaggaggtgaaaattcttagttgygttgataacgctgtggtctattttagaacaaatgggctatgctttttcttctgatagttgtaaaaatatctgtactggagttcattctcataaatgtcaagagcaagggaggaaga

SEQ ID NO: 184183 - DNA, 580 bp, Homo sapiens
tttcattcttctgcatgtggctgctacccagttttcctggcaccatttattgaacagggagtcctttccccagtttatgtttttgtgtacattgtcaaagatcagttggttataagtatttggctttatttctgagttatttattctgttccattgttctatgtatctactttttttattttaaccaatgccatgctattttggtaactatgcccatgtagtataatttgaaatcaggtaatgtgatgcttccagatttattacttttgcttaagattgctttggctattggggctctttcctgatccatatgaattttagctttttttttctaattctgtgaaaaaatggtggtgatgttttgatagaaatcgcattgaatctgtagattcttttgggcagtatggtcatttttagaatacttatccttgcaatccatgagcataggatgtatttatattcgtttgtatagaagatgatttatgttaccacacttttgtatttctccttgtaawgatctttcacattttttaagaatatttctaggtatctcaatttttttgcagctattgtaaaaggg

SEQ ID NO: 184184 - DNA, 631 bp, Homo sapiens
cgggtactatgattactcatctgagtttctggttcctatgaaggcgatttcttgcatggatagttgtttaattgggtgttcctacaggggggtggtcactatttggccattgtgctctgcttctcctgtagaattacctacgtttattattgaagaaaaattaatagatttagtgtagtttaagtgaacagtgttctaaagtctacagtagtgcacattaatattgtaggcctttacattcactcrccactcactcactgagttgcccacagtaactttcttttctataagcttcattcatgataagtgccctatgcaggtgttccatttttttatcttttatgttctatttttaccgtgctttttctatgtatcaatatgtttagatacacaaatactgatcattgtgttacaattacctacaagtattcaatatagtaacatgctacgcagattttaggctaaaagcaataggctatatcatatagcctgagtgtgttataggctataccatctaagtttgtgtaaatgcactctataatatccccaggatgacaaagttgcctaatgatgccatttttcagaacatatccccatcattaagaggcacatgaccatatttatattctgg

SEQ ID NO: 184185 - DNA, 631 bp, Homo sapiens
cgggtactatgattactcatctgagtttctggttcctatgaaggcgatttcttgcatggatagttgtttaattgggtgttcctacaggggggtggtcactatttggccattgtgctctgcttctcctgtagaattacctacgtttattattgaagaaaaattaatagatttagtgtagtttaagtgaacagtgttctaaagtctacagtagtgcacattaatattgtaggcctttacattcactcgccactcactcactgagttgcccacagtaactttcttttctataagcttcattcatgataagtgccctatgcaggtgttccatttttttatcttttatgttctatttttaccgtgctttttctatgtatcaatatgtttagatacacaaatactgatcattgtgttacaattacctacaagtattcaatatagtmacatgctacgcagattttaggctaaaagcaataggctatatcatatagcctgagtgtgttataggctataccatctaagtttgtgtaaatgcactctataatatccccaggatgacaaagttgcctaatgatgccatttttcagaacatatccccatcattaagaggcacatgaccatatttatattctgg

SEQ ID NO: 184186 - DNA, 637 bp, Homo sapiens
ttattagagttagctcatttgacttttagtgtagaaattcagattacaaaaatatttatcttctgatttaaatgctgtggttttttggtagttaacgataaaataaccatggaagacagctactagtactatcactgcagtgttctggctgaattgttctaatcttgtcataataactttgggttttaaatgattatatgtaattcacttagaggaacagtacatttatttcaaataaaatgatgaaaataaaaattatttatttctttaacaaatatttattgaataattacaatgtatagaggatagagcaatggggaagatagacatagatctcagaagtttacattcagactgtgtgtatatgacagtatgttttgtacatgactctgtgtgtgtgtgtgtgtgtgtgtgaaytgggagagaaataatgattagaagttgattagaaatagataatgtgtgttgggggagagaaagaaggaataggaaaatagacaacctattatcagagtttgtaagaaaaataaagttatgtaatagacaaatgacttgaataagaagtctactttaaatatagccttccattttacacagaaatataaaataaattttacatagctttcaggcccgtcaa

SEQ ID NO: 184187 - DNA, 637 bp, Homo sapiens
ttattagagttagctcatttgacttttagtgtagaaattcagattacaaaaatatttatcttctgatttaaatgctgtggttttttggtagttaacgataaaataaccatggaagacagctactagtactatcactgcagtgttctggctgaattgttctaatcttgtcataataactttgggttttaaatgattatatgtaattcacttagaggaacagtacatttatttcaaataaaatgatgaaaataaaaattatttatttctttaacaaatatttattgaataattacaatgtatagaggatagagcaatggggaagatagacatagatctcagaagtttacattcagactgtgtgtatatgacagtatgttttgtacatgactctgtgtgtgtgtgtgtgtgtgtgtgaactgggagagaaataatgattagaagttgattagaaatagataatgtgtgttgggggagagaaagaaggartaggaaaatagacaacctattatcagagtttgtaagaaaaataaagttatgtaatagacaaatgacttgaataagaagtctactttaaatatagccttccattttacacagaaatataaaataaattttacatagctttcaggcccgtcaa

SEQ ID NO: 184188 - DNA, 577 bp, Homo sapiens
caaaagtatacggcctttagctaaggtgacccttattcacattaaataaataatatcacgtgaacaattaaataaattttgaaaataaaatctttcactgtcaaactcaaaattgtgatttgtttttgacttagagtaaayattatttcttgtaacctttatggacatttgcatggaaaatattcttggtctattggtatatttaaaatatatatatatatacacacatacttcaaaaaccagcatctgaacattatatccaagcattaacagtgatgactcggcaaactaaaacactatgaaggcagaaagacagaagagtgatgaattttatattgcgattaataccttatttatactcaatatgaaagacacagtactaaaaaaatagagacaagctataatgaaaatgagttgaaaggaattctattatgtttggatgtttatccccaatgtgatgatcactctcaaatgtgatccccagtgttagaggtggagcctcatggaaagtgtttgtgtcacgggagcagatctcacatgactagattaacctttctagtgtgagagttgagtgagt

SEQ ID NO: 184189 - DNA, 577 bp, Homo sapiens
caaaagtatacggcctttagctaaggtgacccttattcacattaaataaataatatcacgtgaacaattaaataaattttgaaaataaaatctttcactgtcaaactcaaaattgtgatttgtttttgacttagagtaaatattatttcttgtaacctttatggacatttgcatggaaaatattcttggtctattggtatatttaaaatatatatatatatacacacatacttcaaaaaccagcatctgaacattatatccaagcattaacagtgatgactcggcaaactaaaacactatgaaggcagaaagacagaagagtgatgaattttatattgcgattaataccttatttatactcaatatgaaagacacagtactaaaaaaatagagacaagctataatgaaaatgagttgaaaggaattctattatgtttggatgtttatccccaatgtgatgatcactctcaaatgtgatccccagtgttagaggtggagcctcatggaaagtgtttgtgtcaygggagcagatctcacatgactagattaacctttctagtgtgagagttgagtgagt

SEQ ID NO: 184190 - DNA, 607 bp, Homo sapiens
ttctataattccatagaaattcaaagacctctcaaattctttcttatctccttttcttcccctcattctccccctctctctacttgtacacacatacactcaggcaagtcatcacttatttaattgactacctttcatagtagactataagcttaaygaggacagaggccaagtttgcctcatcactatttgatcactaggaccatagacagtgcctcgcctattgtctaagtgtgaagtaaacaatgaataaatacattttgatttctgaggaattgtattaatccctattcatagtctgtgttatctctttgaaaacatgttctttgggaaagaaaggaaagaggagctgagtaaatacaaaaggaaagtggagaaagcaaggagatgtaagcaagatggcagaaatgagaaatgttgaagcagagtacacagtggtgcattcccaatataatggaaaggagctctaattggagtgatcaaaaagaatgttcaatttctggtataaggcaactgtcttctatctaaaatgtttgaaataaattgactacaattctttgataacaaaaggatggatattatttgtactataaaaggcagagatgat

SEQ ID NO: 184191 - DNA, 562 bp, Homo sapiens
agttttttgttcagtagctataaatattgtttgcagaatttgttctataatttccaaaccatcaagagtttctgggtggcacacgcctgcagtcccagctacttgggaggctgagacaggagaattgcttgaacctggaaggcagaggttgcagtgagctgagaccatgccattgccagcctgagtgacagagcaagacgaygtctcaaaaaaaaaaaatgatctagaaatttggataataaaatctttgatttaaaatttatatcaagattctccttgtgatcaatgtattatttcttccagtattggtgaaaagaaacctaatttttttattaatttttttatcagtgggagtctttagaattttcctttatttcttgaatttttcaaagtttgcattgttctcttataaatactacccagaataatatccatagggacattatttttctttcatcagaataattagtatctcccttctatttatttatttcacttcttcttatttcatattgtatcacctggattcatctgtcatttctctcatttttttcttccacaa

SEQ ID NO: 184192 - DNA, 590 bp, Homo sapiens
agaaatgggttggaagtcagtcaaggatttcttctgaacacattattaggcaattaaaatgttgtatataaatacctatataaaaatgtcctccttactgtctttatatttgtacaaaactggtcatgtcaaaatggtctgtttttatagatacagagtgagaacaccatctccaaatcaagaaaaaaatcagggtctaggttatatattttgcactagagaactgaggagacccagaaacctctgaaaccaaggaagagtcaatgaacatcaaaattcacacatggaaatcataattaagatcataacctgtaaaaatcaasattcaagaaacaaagcacaaatttgtctaatgcctaagtttatatgctcttgaagggaattattaaatatactcataaatatcagttgtggattcttcagtccttcatttttattcttgaattggtcagatgccagctatgctggagataagtgtaagtaatgtcagacccaagggttcaattttctgtttaattttattaggttatcattttcattacatttgagaagaggcttttgccagtgtcaaacataaataaaagagcaaa

SEQ ID NO: 184193 - DNA, 536 bp, Homo sapiens
agaattgctgccggtttctattcatttgaatggcagcaacccagaacactcttttacggtttcgtgtggagggtcaatccattatctttttttcccctccctgagatcaaatagyatttttgtgaggattacatccctgtagtaagcagcaatggaactaatactatgaggtttgaatgtcaagcttatttccaaatcccactcctttacaattgcagagttgacttagaaattgaaatccccattttgtaattgttttttaaaagtttttaatggaaaactcttctttcaaaataagcattacagaattcattggaaataaaaagtagcagaagaaaaaatatgtttttgtatcatctggaattctagcaagattgtacggaggccaaataactgatatttacaaactagttttgtgcaagtaatttcgtcagcagtttttttgtaaatgaggaaaatgaagcatataaaggttaagtatatttattccaagatgtacatgcttagcctgcagttataaaacttagtgatttttg

SEQ ID NO: 184194 - DNA, 494 bp, Homo sapiens
tattttttgtaaatctgcaaatcatactaattttatgcctgtctataaatttgtgtaataaatattacactatattcatataaaggagtgctagcgctatgtccatgcatattgacttgacagtagacaaatacagttcaagtcaaaggcaartctcttagcctcctgtcctaaccaattgcttttcttcaattgctcttataaatagtatgaaatatgtaagactgctataagtattaacagcctcagagtttaatgaatacctatatttttttcaggtcttaaagaggaatcagaaatgaataagatctcatttaatataattaaatgcatttctgaacctttccctatcaggataaacaagaagtaggtctagctactgcctgttatcaagatttctaatgacaaaaccgcaggagtaagtccaaacaagtttctcaattaggaacaatggcacagaaagtaaaaacagcatcaagtgaaaataagataaa

SEQ ID NO: 184195 - DNA, 489 bp, Homo sapiens
aatttatgggtaacactattttaaaagaaaaatgctacctttaatattattttgttaattataatttatttgttaaatgtctggtatgaatgyttttagtgatttaaacatatttttcagtaacttggcaaatgatggaaaaatctgttattacaagcataaattagacttatttaatccttatgttaagaaaactatatgaaatgtttctatagctgaaaaaaagttaatgttattaaactaattttaaaccataacttcatcagaagtgttctatactttcaattgctatgctatattacttggaattttaagtgagtttactacacaaaaaatgatatagagtatataactacagctaaagtgtctttatagacctaggtagacatagagttttagtatcataacttgttttatactttaggagttagggtctgtatgttttataataacaaatcctctattgctgcatggggcggggcagctgta

SEQ ID NO: 184196 - DNA, 466 bp, Homo sapiens
aagaagatagacaaaaaattgctaaaatcacttatatacattattacacctctctccaaataactgaaattacttttaaaatacatttcttcaccagtctgtgagccattcaaggtcaggtgctagttctattttttattgtttatcaagcctatgtaataaagatttgtggacataatgaatataatgatcataataatgatcatctcaatctgtgctcctataacaaaatatctgaaatgaggtaatttataaagaccagaaatttactttttcacagttytggagcctgggaagccccatatcaaggtgccagcaggttttgtgtctggtgagaacttggtctttactaccaagttggtactttgacctcacatgaaggaagagcagaaaacaaacccactccctcatgcccttttataaaggccctaatcccatccactagagctcacccttatacttaatc

SEQ ID NO: 184197 - DNA, 416 bp, Homo sapiens
tttttttttctaatgttggcatggagttggatatttttcttttgcaatcattatttccataagtaggatytttccccctagtttaattgagagtgcaattcatttgaatgttttaattttagttaggtgtttccagttctgctttccactaagttgcttgggtaaacatttccctctgatgccagctatttttttatttttataatttctacttctctgctgatcaatagaccctcattttagaggtgtccaccctatacccagatgaaaggactgttcttatctttcttatctcttaaggcacaaaaaataatctgaacatatagaccttgctaagctcttcccagtttattagatcatgcccctttgtccaatcatactgttccacacatattacatcaacaaacatagcataa

SEQ ID NO: 184198 - DNA, 587 bp, Homo sapiens
aactgtatagaacttatatgcttaaaaatagaacccactgctaatagaaatgaaaaatgtaaatagatgcaaagaaatactatgctcatggactgtaagactcaacatggcaaaattgtcaactgtcttcaaattgatatacagatttaatgcttttcccttcaaaatcacagtaatatttatgtagatatagatataaactattttaatatttctgtagaaaggcaaaatatctaaaattactaaaacaattttgaaaaagagtataaaatagggggaaacactctaaccaatttcaagatcatgatatagagtactcaaaactgtgcgttattgatatttcaattaatatggagaggataaacactcagatcaatatcagatcaataaaacagtatagcgcatccagaaaaggccgayataaatatgcccaactgatttttttttacaaaggtgcaaaagcacttcaatgaaggaaagatagcctttcaacaaatggtgctatagcaatttggacatcaatagttaaaaaataaaactcaatctatgtctcatacattatataaaatattagctcaaaatacatc

SEQ ID NO: 184199 - DNA, 550 bp, Homo sapiens
aactgttacagatcaaggcttattacattctatttttttcctagtgtctttaggaaagaaatttgttgatgttgaactaagtgagcaacagaattgttcctatttagtgtggtcaagctctaatttgcaactaggatttcaaggcaactaagtgctaatttgcaggtctataatacatgttatttagctacttcaaagcatggttatagacagtcaagacaacagaattttttaaagagaagaaaattatcacagtcatgcttccaaagaaaataaataattttaaaatacctaattactatgtatctgcttaggttttatgtaacaccaaaaataatttgtgagcaaaaatacaaaaatataaaactaaaacttaaacacacacacacatttttatttcttcttgtaaaataccaaamactcttgcatcaggattatataatgcaaatcttattaaatttactcacatgatgactgtatcctttcccattcaagcataataaatataggtgtttcttgtcattttttttttaaattggagatgacaatt

SEQ ID NO: 184200 - DNA, 495 bp, Homo sapiens
actgccctgggacacaaagataggcacacccagcccaccactgccaccactggcctgcagactggcccactggcatcacagtacccagcacagctttaccacagccttcactaaaactgccacccagcccactgaggaaatcacaggtaccactaacactgtttacagccaaagaaatcagagactacactactgcatgtacccagaatcaaagggaagtatgccacccaactaacaccgagatacatctccaggaaagagtcttatcagatgtgcaaatgtcaacataaggacacatgaaacaggaaacaaggaartatgacacctccaaagaaacacaataattttctagcaataaaccttaataaaaaagaaattttcagaatcctagctaaagaattcaaaatattgagtttaaagaagcccaatgaggttcaagagaattctgaaaaacaacacaaagaaatcagaataataattcaagatattaatagg

SEQ ID NO: 184201 - DNA, 450 bp, Homo sapiens
ttggccttaaaagctggccctggtgcagacaagttcaagtccctaggtgtccgaagggccccaggattcccagttccatttctagagtttgtcagctttaggacttccaaccaagtagctaccagtagacagggacccargtgaacaggtgttattgctctagattctaggtatccaagtctggttggagcatagaaacaggatgaagtgagggccactgaagggctgaacaaggaactgaggtggtaaatgagtacacgagagctcaggatgagcctctaaacaaaaccagccaggggcctgtgcagtgccacttctctaaatgaggatcattgggagaatggggtaggggctgagattgggcctacataagtgaacgctgatgcacccacttatgtgactgttgcagagagaacaagcccatgttctggaaaatactactcctcaatc

SEQ ID NO: 184202 - DNA, 453 bp, Homo sapiens
ttggccttaaaagctggccctggtgcagacaagttcaagtccctaggtgtccgaagggccccaggattcccagttccatttctagagtttgtcagctttaggacttccaaccaagtagctaccagtagacagggacccaggtgaacaggtgttattgctctagattctaggtatccaagtctggttggagcatagaaacaggatgaagtgagggccactgaagggctgaacaaggaactgaggyggtaaatgagtacacgagagctcaggatgagcctctaaacaaaaccagccaggggcctgtgcagtgccacttctctaaatgaggatcattgggagaatggggtaggggctgagattgggcctacataagtgaacgctgatgcacccacttatgtgactgttgcagagagaacaagcccatgttctggaaaatactactcctcaatcagg

SEQ ID NO: 184203 - DNA, 622 bp, Homo sapiens
cctttcctatctcacttttatttttctcttattcttactgcctgctatggcacacccctcagccccaccaccactccccataggaagtctgggcttagacacaggaccatctttctctgatcatcacacatttacagtgctctgtagggttattccaaggtcagctatcttctcacagcacacatttttcttgggagcatcactcatgcctgagatttcaatcaccaaccataatctgatgatgcccatatcttcatctcctttgggttctgctcctgagctccagatccacagattcagctgtttctgtacatcactacttagaaggctcacaggtatctccagttcaacatgcacaaagcttatccacatgccaaactcaaactgctctttccttgatttttttttttttcttagtgactggcaccaccacgcacccagctgtctaartcagacatctgagaatcaccttgattctttactctttcctactgctcactctgcataacctgtctctcttcaggccttgacaattctacctctaaatccaccccagccttattaacttcattctgtctccaccaccaaacctctgcaagccatccacttaacctcacctgca

SEQ ID NO: 184204 - DNA, 528 bp, Homo sapiens
cacatgtgtacagtaactggcctaatcttttctataaattgctgcctgcggttttcaaaaacatagtaarttgctggcaattgacaatgtgtctctttgcatggctaacttcacttctgcacggttaacaaatcagtctttaattattcatgcacatcacactatgtctaggccttgattgacagctattgattttagggaactgtaattctctcttttatagggaagaaaaatatgtcacctgattgtttccattttattcagatgtaaaattaaaactgtaagcaggaaaaataactataccctctgtctcggtatttcagttaaaggtgaacacagctcactacactacactaattgtcgtatgctactgtaaagtaggactaatagctttaatgtcctttagtattttaaatacacagaggaaattttatttccattaattctataattacaggagaccaaaaaatgattaattatatgtacaaactaaaacatcagatggcccattatgaaatggtactatta

SEQ ID NO: 184205 - DNA, 512 bp, Homo sapiens
attgaagtagtgagttaaatcaattaaaattgtcaaaattgtatgtacacgtgtaattggaagggaaggtaataattaagaaactgattttcaaatataatcaattaactattgatggttattgatgatgaattatcaaattctgaaatcatttartaaagtttattgtaaagtcacttcaaaggttttcttagtggactctggattttaatagcagatgctaaatagaaaccccacctcgttgcagtttcattgaaatttgtattaagcatttgctagagatcttagacaactaactactacagtctccagtcctaaattcaaacaccatgtatcagcaaaagacattgctttttgccaagagccattataaaatacttgcacaaagcaaacagtagaaacaacacagttttggaaatgttataagcaaaattgaccaaacagaacacatatgagtctaaaaacaggaagcttatcagagttgttctcatagaagaaaataacgtactaat

SEQ ID NO: 184206 - DNA, 311 bp, Homo sapiens
ggtttaccagaagcagttgcaaggactagactctcaaggatagaaatgtggaattagttgtcagatctcattggattggaagacagggattgtctggataccatgaaaaatgagacatctgtagtccatawgtttgcaagatggttgcttaaattatatcacctgtggttccttaggatgaagtgcctattgccagcatggctttaccagattatctagcaattaaagtggaaatggggaatacaacaaccatcctaaagagcttagaaagaagacaacaagctaaggtttttcattttcattttaaaaca

SEQ ID NO: 184207 - DNA, 561 bp, Homo sapiens
gcttatgattaaattaaggatcttgagatgggagataatcgttgcttattctggtgggccttaaatttaattattatgagaagaatccttataagaaagaggcagagagcracttgaagaggaaaaatgtgaagtgataagaagagcagggggaaaaaaggcaatgtgatgtgaggaaggggtcatccagaaggaatgcaggtggcatccagaagctaaaaaagacaaggaaacaggttccccctagagcctcagaaggaactaaccctgccaacaccttgatgagttagactcatttttaatttccagagatgcaagagaatacatttgtattgttttaagcattatgtttgtggtcatttgttacagtagccacagaacactaagatagactcaaactccattccagttagactacatctgaatttacaaattctattcggttgttgcatatcaagaagaatgtgagtattttggaggtccatcctagttataaggaaacttcaaaccgtatcatgagagaaatgttgaaaataactgtttctactgaagaaacagtaa

SEQ ID NO: 184208 - DNA, 499 bp, Homo sapiens
ttcttaccaagagtatcagtgttcccttttctccacatcttcaccaatatctgttattttttgactttttaataatagcccttctgactggtgtgagatgatatctcattgtagttttgatttgcatttctctgacaattagtgatgttttcatatagcatttcagagagcatttttttcatgtttattggccacttgtatgtcttcttttgagaaatgtctattcatgtcatttgctcacattttaatgttttttttttttcttgttgacttgtttgagtttcttatagattctggatattagtcctttgtcagattcatagtttgcaaatatttctctcrttctgtaggttatctgtttactcggttgattgtttcttttgctgtgcagaagctctttagtttagggcccatttgtctagttttggtttgttgcatttgcttttgaggtcttaatcataaatcatttgcctaggccaatgttcaaaagagtttatcc

SEQ ID NO: 184209 - DNA, 208 bp, Homo sapiens
gttatggagatcacatttcaytctgatgtgtccatttgggttgtactaacttttcaatagtttttaattgttgctttaaagtatttactgaattgtattgattcatgtattcattccgcaatccttagtgaccattactgccacgtattatatatacaatattttgggggtctcagaataatacatactgtccttggcctcaagaact

SEQ ID NO: 184210 - DNA, 565 bp, Homo sapiens
gtctaggactgagtatgtggtggtgctgatgaccccaagggacagcactttccattcaatccagaatttgcttcaaacacaaaaaggaagcattggtattctaagaagcagacaatcaaggaaccctatcaatattctttcttagttttgttgcaccacaaataatgatataggaagggagagtttcttttcctttcaatcattccatactcattagatagcattgatagaytgaatatatatatataaagaaatgaactaaaacagttgagttggttttgtgcagcatttgtactattctgttgagaatatacacatgtaagtgtgagctacaaaatccaaactgtaattttgatgattccacacaagttaaatgcacgtatacttacatttagatctggcaatatacaacatagagataaatgacaaaaacttatgctaaaagtttacaatttaaacttttcttaggacaatattaagtagcaaatgcaccatagtaagtcaagagagcgaatgtggaaaggaatcactttatattgtaatacactttcctgctttttgaagc

SEQ ID NO: 184211 - DNA, 442 bp, Homo sapiens
gacccacccccataattcaatcatctcccaccagattcctcccacaacacttgggaattgcgagagttacaattcaagatgagatttgggcggggacacagccaaaccatatcartatgtaatccataaggttattgtatggattaaatgaaggactttgctctcaaaaatattacttttttttacatttttttttcctgtcttcctatgtgggactccagctccctaaagaattccactacctgccacaaacaagtgaagtgaattggccgtggagctgctctgaagtagccctggcttcttccttctgttccagttccttgacaacttactcattcacttcacagtgttctccagacaccacagtctcccaaaagacatcagtgctgctacggtagctcccagccattgccacccattgcttggggaagtgtggaaggaa

SEQ ID NO: 184212 - DNA, 467 bp, Homo sapiens
tcctggctcttaacgtcttacagaatttctcataaaatagtcttttaggtttcactggtgatacactgccatcacagttccatgcaatggatcctacttagtccatagacttttgaggcagatgtaattgaactaaatcattcaaggtcacttgacagaaagtgtaggatccaggattacaactcgagcaatctgattccagatccctctctttcagtcattccttcatgtatactctcatatttgtgagagctggagaaactaaggttaaatactctttaggtacagtttgtttkctctgggctgacagctggggaaccagcaacacaaagtgcccagaattacccctcccttctgcctttctaggtcatgctagaggtaccaagaggtacactcattcccaggagattcttgagtcactcaacaaagtgggcatctggggcctaattttctggacattctttaca

SEQ ID NO: 184213 - DNA, 532 bp, Homo sapiens
ctttgcaagccatgtggcctctgttgtgactactaaactctgccattgcagtacaaaagcagccatgaccaagggctggcaaactatggcctgcaggccaaaccctgcttactatcttcttttctaaataaaactctgttggaacacactcacaatcaattggttccctattgcctgtggctaaytttgtgctttacaagcagagttgaatagttgtgacagagatggtatgccctgtaaagcctaaactatttactttcttactctttacagaaaaaaagtttgctgatccttcccatagtaagtacatgaacaaagaattgtgactgttttccaatacaactttaattatagatactgaaatctgaattttatacaatgttcatgtgtcagaaatattcattttgatttttctcaattatttaaaaatgtaaaaactattcttagctcataggacaaactaaaacatggatgagctagatttggcttgtgcatcatagtttgccaattcctgttctaaagtatgttaaca

SEQ ID NO: 184214 - DNA, 600 bp, Homo sapiens
ctatattatactgaacatgagttcatactgatgtctccaactctaatccattgccacacagatcatcctaaccacctttacttgcttttctgtaaattccaactccaatagtgaaatacttggctcccaccatccatttacttagccgttcaatctcagaatacatgtatagcagtatcagaattgttaaaccttactyctatggtaaacagctttatcaactaaagcacactgcttctgtgtactttcttttgctttcagtattacagacttcattaatctctaaagttacttaggtcggcacctttttccccaaccccctcagggaagttgtttcatacatttataatatgattagattgctttgtcacattctgcattccatactgggattcccagatggaatcctgcgaaataattttttaagttgaaaactaaggttcgatttttatgttattattctacaggttttgacaaatgtataatttcacacatccaatgttataatattatacagaatagtttactcccctaaaaaaaaaaatcccatgtgcttcacctatcaatccttctcctttcccctaaatccctggcaactcc

SEQ ID NO: 184215 - DNA, 588 bp, Homo sapiens
aggtgaggtctgtttcttcttcctttgaatttggaatggccttggtgacttgcttaaccaagagacatggcagatatgacactctgaaacttctgcaactaagtcttatgaagttccagaatgtcacttccaagactaagtcrtaagaaactgcaaggcttcatatgacctagtattggaagtatcagaatgtccaaagttccaaagccacatgggtttttggaatgtgtgctcttggtgttctccctttcagaatccagccactctgctatagaaaggccaagaaacttggaaagcccaagtgtgaatgctgcaataaacagctccagttgagcaaccagtcaacagatggcatcagtgccagccatgtgagtagccatcttggacatccagctcagtcaaaccttcccatgagtttagtcccagttgacatctaacatcactcaagattctaagtgggaaccacccaactgagcccagtcagcccacaaaactgtaagagaaaataataaattgttcttcaagccactgagttttgggatggtttcttatacacaacgccccttttaccaataatttgcttatggt

SEQ ID NO: 184216 - DNA, 536 bp, Homo sapiens
aagtacttactgataatgctacaatatggatgaaccttgaaaatattatactgagtgaaagaactcagttacaaggaccacatattatatgattccgttaatttgaaagtccagaatggggaaatctatacagacaggaagcagatgaatctgcttagggctgggggaaacagggaatagaayagagatagctaaagggtgtgggatttccttttgaggtgatgaaaatgttctaaaattggtgatggttgcattatctgtgaatatatgaaaaccattgcattgtacattttaaatgggtgaattgtatggtatgtgaattataggctcaataaagctattaacaaatttaaaaaagtattcagtaatttatgtaaatagaatcatatatgcttcttttacttaacagtatgtttgtgagaatcttcatgttgtgtgtagtaaaagctcatgcgtattccttgctgtgtagtactaccattatgtagtataccacaattcatccatttaccgatggtgggcatgtgtattgttct

SEQ ID NO: 184217 - DNA, 547 bp, Homo sapiens
ctgtgctaagcatttagggtggattagctcatctaatcctcatggcaataaccctatgatgtagacggtaattactatcaggattcctgttacccagacaaggaaactaaggcagagtatggttggggtgataatccaagatcattaagttaataaatgggatttgaaccctgacactcaagttttgaatcttggaatcttaccaaccatgtggggattgcataccagtgtgatgtattcacacagctatgggatgcattgtaagagatacattttgcggattgcagtgagacttattaaagaaattcagaagmtttaccatcttacttggggaatgattttatcttcaggattgtcttttctattagattttgaattttaaggaaattaaggaattacaaaatccttcaactatgaagcctctatagaaaatagtcccataggagtgtttaagcatgatcactgttatcatatatatatatgtgtgtgtatatatatacgtgtgtgtgtatatatatatcactcactgctaaaatcataaaatgct

SEQ ID NO: 184218 - DNA, 547 bp, Homo sapiens
ctgtgctaagcatttagggtggattagctcatctaatcctcatggcaataaccctatgatgtagacggtaattactatcaggattcctgttacccagacaaggaaactaaggcagagtatggttggggtgataatccaagatcattaagttaataaatgggatttgaaccctgacactcaagttttgaatcttggaatcttaccaaccatgtggggattgcataccagtgtgatgtattcacacagctatgggatgcattgtaagagatacattttgcggattgcagtgagacttattaaagaaattcagaagctttaccatcttacttggggaatgattttatcttcaggattgtcttttctattagattttgaattttaaggaaattaaggaattacaaaatccttcaactatgaagcctctatagaaaatagtcccataggagtgtttaagcatgatcactgttatcatatatatatatrtgtgtgtatatatatacgtgtgtgtgtatatatatatcactcactgctaaaatcataaaatgct

SEQ ID NO: 184219 - DNA, 536 bp, Homo sapiens
agatcttccaagctcatcctgctgcagaggtggattcagctgtttctccagagagttctggttccttttactggggaatatttaaagacygcacaatatggattctaggagataggagtgttaaacaacagattctgtgtgaacaacattgcagtcttgcaaatgtggtagacatgtaggtgtaatctgtttgtcttcttttgtaatatactaacttccgcttcattcttctgggaacagcatttcatcttttgggacattgctttttttctcactttagtcatttgtttttagtcatcacactctgcctctccaggtctaagcataagcatgtcaccaaagtcctctgccagaatcttttgaactggaacaggagaaagaattaagttaccaacaaaattttgagaggtgctggagctgtccatcagccataatatctactgtgtgtaggaggctggtttgatatcccatatggtttggctctgtgtccccacacaaatctcatgttgaattgtaattctcaatgttgggggagg

SEQ ID NO: 184220 - DNA, 549 bp, Homo sapiens
tcatcctgctgcagaggtggattcagctgtttctccagagagttctggttccttttactggggaatatttaaagactgcacaatatggattctaggagataggagygttaaacaacagattctgtgtgaacaacattgcagtcttgcaaatgtggtagacatgtaggtgtaatctgtttgtcttcttttgtaatatactaacttccgcttcattcttctgggaacagcatttcatcttttgggacattgctttttttctcactttagtcatttgtttttagtcatcacactctgcctctccaggtctaagcataagcatgtcaccaaagtcctctgccagaatcttttgaactggaacaggagaaagaattaagttaccaacaaaattttgagaggtgctggagctgtccatcagccataatatctactgtgtgtaggaggctggtttgatatcccatatggtttggctctgtgtccccacacaaatctcatgttgaattgtaattctcaatgttgggggagggacctggtgaaaggtgattggatcat

SEQ ID NO: 184221 - DNA, 366 bp, Homo sapiens
caagagagccaaggactgagctctggaacattctgttacttaaaagtcaatatttaaagattcaaaggtgaatcccaycaaggtggaagcctgattcgatttgtcatgaggatatgggctgagaccgtggagacattaaggttggctgtaaagggtggtcaataaatcggtagctataggggatataaaagcgaacgagggttctattctcccttgatcaatattacagcacattacagcagagagaagagagatatagtgattatgcaagacagaacagagataattatgtcagcaaattcttgagaaggtgaaaagagatggaatccagtgcacaagtaaagggattgtttttaacatggggac

SEQ ID NO: 184222 - DNA, 366 bp, Homo sapiens
caagagagccaaggactgagctctggaacattctgttacttaaaagtcaatatttaaagattcaaaggtgaatcccaccaaggtggaagcctgattcgatttgtcatgaggatatgggctgagaccgtggagacattaaggttggctgtaaagggtggtcaataaatcggtagctataggggayataaaagcgaacgagggttctattctcccttgatcaatattacagcacattacagcagagagaagagagatatagtgattatgcaagacagaacagagataattatgtcagcaaattcttgagaaggtgaaaagagatggaatccagtgcacaagtaaagggattgtttttaacatggggac

SEQ ID NO: 184223 - DNA, 366 bp, Homo sapiens
caagagagccaaggactgagctctggaacattctgttacttaaaagtcaatatttaaagattcaaaggtgaatcccaccaaggtggaagcctgattcgatttgtcatgaggatatgggctgagaccgtggagacattaaggttggctgtaaagggtggtcaataaatcggtagctataggggatataaaagcgaacgagggttctattctcccttgatcaatattacagcacattacagcagrgagaagagagatatagtgattatgcaagacagaacagagataattatgtcagcaaattcttgagaaggtgaaaagagatggaatccagtgcacaagtaaagggattgtttttaacatggggac

SEQ ID NO: 184224 - DNA, 541 bp, Homo sapiens
gggacatgtagattttaatgtgtatctctgcacctatttggtactagggaagtgagacaaaactgaaacttaaaaataaataaataaataattatcttactctttaatcatcactaaacaaataactgcacaaattattcatgcttttatttttgtcatttttatttagtttcatatttgttttaggaccaacaattaagaagaaacagtttctttttaggcccttcattttctgcaggcataggcacactgacgtcaactttaatataaatgtagaataaattcgtttgatacagctttgctgccaaatgtartggatacaagcctttccttcttggttcactgcttacgtgtaatgcaaatgctatgatagctcagcaaaatatcataaggcacaaatgccagattgattcaattggtaatatttgtaatgttgtatttttttgacatttgaaaacatacatgatgggatgttcaaaccatggccaagtcaagcaataacctccagtagaaatggttcaaggatctagaaccagaaata

SEQ ID NO: 184225 - DNA, 541 bp, Homo sapiens
gggacatgtagattttaatgtgtatctctgcacctatttggtactagggaagtgagacaaaactgaaacttaaaaataaataaataaataattatcttactctttaatcatcactaaacaaataactgcacaaattattcatgcttttatttttgtcatttttatttagtttcatatttgttttaggaccaacaattaagaagaaacagtttctttttaggcccttcattttctgcaggcataggcacactgacgtcaactttaatataaatgtagaataaattcgtttgatacagctttgctgccaaatgtagtggatacaagcctttccttcttggttcactgcttacgtgtaatgcaaatgctatgatagctcagcaaaatatcataaggcacaaatgccagattgattcaattggtaatatttgtaatgttgtatttttttgacatttgaaaacatacatgatgggatgttcaaaccatggccaagtcaagcamtaacctccagtagaaatggttcaaggatctagaaccagaaata

SEQ ID NO: 184226 - DNA, 223 bp, Homo sapiens
agtctccagaaaatggtagctttatcatcttaaaaaaagatcagaagatatgttctcatttataagtgtgagctaagctatgtgggtgcaaagacatacagagtggtatgatrgactttgggaactgacggagaggtgaagaggggggttgaagaagaaaaggctacatattgggcacagtgtacactgcttggatgacaggtgcgctaaaatctcagaattc

SEQ ID NO: 184227 - DNA, 419 bp, Homo sapiens
agaattctgcattaacatctcaaagcacaaacactgttacaaaaattagagtaaggacattttattgtttaagtttgaaatacgaaaactggggccaattttctgccttatcccccttcaaattttgtacacggctatgtggatgaaaaaaaaaatctctgtgtcatacaggtgtatccgaaaatattcataattgtagacccttctcctttggacactggagagtctccagaaaatggtagctttatcatcttaaaaaaagatcagaagatatgttctcatttataagtgtgagctaagctatgtgggtgcaaagacatacagagtggtatgatggactttgggaactgayggagaggtgaagaggggggttgaagaagaaaaggctacatattgggcacagtgtacactgcttggat

SEQ ID NO: 184228 - DNA, 543 bp, Homo sapiens
aattttccattcttcgcagcttttttatttttattcttgcctctgttatgaatattttatagctaaatgataaactyaagtgaaagaaagactatttcacacctacactgctgaaaattaaacaggcattctttgcacacattttaacatctttagtgtgtggccttgcacctttagtttcctatgaaaatctccttttatgaactataagtagttatgattacataaactaaagtcagaacattttaaatggctcaaagcaacagcagggcaaaccaatttacattttgaaatatgtatattatatatatgtacatgcatacaaatatacattcacatgtatacacttaaattataatggtatttaaaaacatgatggtttaagtgaaaggataatgtctattctttatgaattaaatataattatgtatgatagcagaaatgtgaaaatgtctataatagaagttgttgacatttacataatgaacgtatacaaaaatggatttgaaagccatagaaataaaatagtcataaaattatttt

SEQ ID NO: 184229 - DNA, 361 bp, Homo sapiens
aagcttgcatgtcccatggtgaaaacaggagcaagaaagagtgagtccgggaagaggtgccacacacactttcaaattaccagaagtcccgagaactcactattatgaagacagcaccaagccatgaggaatctgcccccatgattcaaacacctcccaccagaccccacctccagaactgtgggttacaattcaacatcagacttgggcaggaacaaatatcctagctatatcagtagatatgaagtcgtttgtgagaacgaaggagraagataacaactccgtcttcagaactgaggtagcctgcaagtagcactaatgtttacaaccagaccttgagggataggtaggattttagttg

SEQ ID NO: 184230 - DNA, 596 bp, Homo sapiens
taagcttaacatcatagctttaagtgcctttaataaagtacccatggtgtcaggcatggagaaaaagtgaactatttataaagtagaggcattgtctggacaatttaattcattcctcaagatacttgacttgaaaaatatttaaagagcctctttcatttattttatttacaaaaaatgctctctttatagacagctagacagatgttgatatagatatataaaatgtatagtcatctctaaccagggaattggttacagractcctatggataacaaaatttatgaatgttcaagtttttacgtaaaccttaaatcatctctagattacttgtagcactaaatacaatgtaaatgctatgtaaatttattttaaaacatttggttttttatattttttattgttgtttgatatttcattttttataaatatttttcatctgtggttaaatttgtgagtgtaaaacctgcaaatacagaaagcagactgtgtacataaatggatgattacaatggcaaactcactgtttattgatataatgatataatgaaatatatcaattataatgaaataaacaacagataaggagataatt

SEQ ID NO: 184231 - DNA, 596 bp, Homo sapiens
taagcttaacatcatagctttaagtgcctttaataaagtacccatggtgtcaggcatggagaaaaagtgaactatttataaagtagaggcattgtctggacaatttaattcattcctcaagatacttgacttgaaaaatatttaaagagcctctttcatttattttatttacaaaaaatgctctctttatagacagctagacagatgttgatatagatatataaaatgtatagtcatctctaaccagggaattggttacaggactcctatggataacaaaatttatgaatgttcaagtttttacgtaaaccttaaatcatctctagattacttgtagcactaaatacaatgtaaatgctatgtaaatttattttaaaacrtttggttttttatattttttattgttgtttgatatttcattttttataaatatttttcatctgtggttaaatttgtgagtgtaaaacctgcaaatacagaaagcagactgtgtacataaatggatgattacaatggcaaactcactgtttattgatataatgatataatgaaatatatcaattataatgaaataaacaacagataaggagataatt

SEQ ID NO: 184232 - DNA, 616 bp, Homo sapiens
cctgacaacttaaacataattgattttcaatttatctccctttcttggttgtaaggatgggaatgacaatgtccaagttcttcatctgtcagagctgaagctggacattatctttaagtccaggttttctttcagtttcttgggctttgaaataacatgtaaccaaatgcattttatattcattaagacttcctacttgttcaatgtcaaaaagttctgatactatatagrtgatcatgttactaaagttagaccccgccattatttaatgtgtagctcatttgtccacagtagagtgtgatcctcttctttcccagcaggggaccctgcatttttattgaagaagaagctagtccaccttgccttcatactttcatttcatctgtaagttagtaataaaaaatcatctacttctttttaagacgaatgtctgtgtataaagggtattgttggagctctaattcaacttataaaaaaaactgaatgtgactcttgaattctgcttttttgaaaaaaataaatatttaatttatccacaccttgaattaattgctagtgattttgtatggaaacagaaagtttaaaatttaaaacatggcatctaaatttaaaaact

SEQ ID NO: 184233 - DNA, 553 bp, Homo sapiens
tatttactaacaatggcccaaagagtcatcctgtccccctgagcctaggaaaagcctatttaagtgacttctcaggaggttccctgaagatgttcaggcactcagcaccaagcaccaccctctggatgcttccacttagagatctagggagaaatcgggctttgtccatcaaaactgtgtggaragttctagttagtgaagaagaatgatcagcataatgtcacctgtctgcatatagatcattagcctggacatttttgtttctgggtttgaagcaatcaccatacatgaatcatgttactttcaagactatgataattctggcagattataaaacagcaaaataaataaataagaagaaagactgtgataactgtgtagaacagaaaactcttcaaaagcttctttggcaagaatagtattcattcatttaactaaaaacttacctacaaagtgagagacagcaaactagccaataaagatgagcatagacaggttcctgtcctggagggacttacaatctaaggagtaagaagaggtcaaaggaaggggg

SEQ ID NO: 184234 - DNA, 463 bp, Homo sapiens
ttcagattcctggtggaacaygatccaactccaatgagtccaaagactttaaagcaaagaatacttccagaggcatggaaagtgctaaggtaatatacaaagaacttgagatgcttggagaccaccaagagcagaaagccattgctacccttaagggtaaagggttaaggggaagaaatagcattattggaaccctctgagtactcaagccatggcaaagggccacacagcaggtgcagtaatcaagaagagatggtggccactgcaacaaaacagctgaacaggaagtcaggaagatgtttctcagcctccctctcttaccctcctccgttctactgctagggcatcccactggtcaaatccaactggaacccaggtggcatgagagtatggataattatcttagtctgttcagctactataacacaattccatagactgggtaatttataaacaacagaaa

SEQ ID NO: 184235 - DNA, 463 bp, Homo sapiens
ttcagattcctggtggaacacgatccaactccaatgagtccaaagactttaaagcaaagaatacttccagaggcatggaaagtgctaaggtaatatacaaagaacttgagatgcttggagaccaccaagagcagaaagccattgctacccttaagggtaaagggttaaggggaagaartagcattattggaaccctctgagtactcaagccatggcaaagggccacacagcaggtgcagtaatcaagaagagatggtggccactgcaacaaaacagctgaacaggaagtcaggaagatgtttctcagcctccctctcttaccctcctccgttctactgctagggcatcccactggtcaaatccaactggaacccaggtggcatgagagtatggataattatcttagtctgttcagctactataacacaattccatagactgggtaatttataaacaacagaaa

SEQ ID NO: 184236 - DNA, 440 bp, Homo sapiens
tgtgcaacccttcagattcctggtggaacacgatccaactccaatgagtccaaagactttaaagcaaagaatacttccagaggcatggaaagtgctaaggtaatatacaaagaacttgagatgcttggagaccaccaagagcagaaagccattgctacccttaagggtaaagggttaaggggaagaaatagcattattggaaccctctgagtactcaagccatggcaaagggccacacagcaggtgcagtaatcaagaagagatggtggccactgcaacaaaacagctgaacaggaagtcaggaagatgtttctcagcctccctctcttaccctcctccgttctactgctagggcatcccactggtcaaatccaaytggaacccaggtggcatgagagtatggataattatcttagtctgttcagctactataacacaat

SEQ ID NO: 184237 - DNA, 596 bp, Homo sapiens
aaacatctgtgtgcaggtttttctatggacgtaagttttcaattcatttgggtaaataccaaggagcayaactgttgaatcacatggtaagaatatgtttaattttaaaagaaactgccaaacagttctccaaattacctgcaccatttttgtattcccaccagcaatgaaagaacttctgttgttccatactctccagcatttagtgttagtgatttggattttggccattctaatggctttgcagtggcatcttttgtcttaatttgcatttttcatgatgacatgtgatatagaacctattttcatacgtttatttgccatctgtatatcttcggtgatgtgtccattcagatcttcggcccatttttaatggatttgatttcttattgttgaaattaaagagttctttgtatattttggataacagtcctttatcagatgtgtcttttgcaaatatttttcctagtcagtgacttgtcttctcattctctagacagtgtctttcacagagaagaagtttaattttaatgaaatccagcttatcaatgatttctttcataaatcatgctttggtggttcaaattgcttcatta

SEQ ID NO: 184238 - DNA, 548 bp, Homo sapiens
ctcatctgaaaattaagccttttataattcagtatgggaaatagtaaatgcagttttatggagcaaaactttgatcacattttattaaatataaggtgtatttttaaaaagcattttaacatctcaaatcaatttgcattttttaaaatcaataatgtttgttgatcattgttggtatagactgagatcattttaagtgaaaatttcttcatgagattgtggaccacattggtggtttgaattcagaatacaaatctgctggtggttcaaaatcttttttaacctctccctactttgtgctaaatttgagacatgtaagtttccctgctgttttccacatggcagttacatttacttctatccttacactaagagtgtagtcttatkgtgtcccatgttgggcatttttgcttttagagagttacacaaaataatgatacatttggcaatggaaaatttcttaaattctctctaaagcagacatttgtattagaagtctttgaccaggcacagtggctcatgcctgtaatcccagcaatttgggagcc

SEQ ID NO: 184239 - DNA, 590 bp, Homo sapiens
catctgctagatatgtattataaaattttaaactgatatactttacgtgaacttggaaattatgcctcaaaaggtaatattcagaataaaatatacatgcaaggaaatggacatgtttatataaatcattgattaaatcatatcccagcaagtttactatataagcttccacactttacctactttgctgcaagacttgtgcagtccagtttattaggtcctgattaaaatgatttcagttacataatacctacatagtaagggctccatctgagtcagtaatatttgacggatttcacaagtcaaggggaactataaaatagaaaatgagcagcagctagccagagaaacttctgttcctgatggaagacagaattgaaacaaatagcgagctggaaactagttggaacattaatacgtgacagaaaccctggcaaagcaaaatagattcctttagctaaatcaaatctgtgcataacctattggtctacgtctgttaacagtcactctattcctgagaatgttggtggcagcaaatttatacacttctgcagcaacctcgatgcttgyctcctcaaaggaaagaattc

SEQ ID NO: 184240 - DNA, 412 bp, Homo sapiens
tcagctaatctcttcaggatcagaaaaacacctggaaagggaagaggtttctctgcagaatatgaatttcctctacaagagaaagctttgaggggccatttcaaaatatgtcaaagagttacgttttggggtgagatatttcatttctttcaggatctgctgtcatgtgatgctatactacagttacattggaatttggtatctcactgccacaaagagtctgttttgtcagtcttaagatttctgttttaatgtgaatgttggccagttgcgcatgaattcaaaagggagaaaagtataatgaggcatgtctgaccctctcttcccatcgtggcctaaaatagtttttcaggtttactttggaatccccttggccaasagatggggtccattcagtcccttgggcttagaa

SEQ ID NO: 184241 - DNA, 464 bp, Homo sapiens
tccttcctgctgacccagttgacatgtagagactttcagccaccaccagaggcagagagataactttccccagctccttcaccaattcctacaattgtgtatagtctaatcmgtacaatgaattcttatatcccatattacttatagtgttcctgtttaccggattgaattctcaactgatacaggtgccttttattttttctcatagaccttatggaactagtcctgagagtaggtagttatttttttctttttttttctcctgtgggttccaaattattctctccattcttctccaacttgccccaactcttgccatcagactccatcacccactacttttcatggttactatcatcctgatgctttaatttctggttcactgtgcctcttgttaatgccaagccccactagcctctctctctctttctatgttttactctctatccttctgcctctctctt

SEQ ID NO: 184242 - DNA, 464 bp, Homo sapiens
tccttcctgctgacccagttgacatgtagagactttcagccaccaccagaggcagagagataactttccccagctccttcaccaattcctacaattgtgtatagtctaatcagtacaatgaattcttatatcccatattacttatagtgttcctgtttaccggattgaattctcaactgatayaggtgccttttattttttctcatagaccttatggaactagtcctgagagtaggtagttatttttttctttttttttctcctgtgggttccaaattattctctccattcttctccaacttgccccaactcttgccatcagactccatcacccactacttttcatggttactatcatcctgatgctttaatttctggttcactgtgcctcttgttaatgccaagccccactagcctctctctctctttctatgttttactctctatccttctgcctctctctt

SEQ ID NO: 184243 - DNA, 464 bp, Homo sapiens
tccttcctgctgacccagttgacatgtagagactttcagccaccaccagaggcagagagataactttccccagctccttcaccaattcctacaattgtgtatagtctaatcagtacaatgaattcttatatcccatattacttatagtgttcctgtttaccggattgaattctcaactgatacaggtgccttttattttttctcatagaccttatggaactagtcctgagagtaggtagttatttttttctttttttttctcytgtgggttccaaattattctctccattcttctccaacttgccccaactcttgccatcagactccatcacccactacttttcatggttactatcatcctgatgctttaatttctggttcactgtgcctcttgttaatgccaagccccactagcctctctctctctttctatgttttactctctatccttctgcctctctctt

SEQ ID NO: 184244 - DNA, 568 bp, Homo sapiens
actcttgtgccaatcacagagttttgtccaatcacaggcagctaactgttccaaccgagttaaaataagacaaatggtgtgctgtaaccaacccagctgtttctgtaccttacttctattttctgtatatgactttcctttttctgtctgtaactattatctgaccatgtggcagccctggagttgccctgaacctattttggttctaggggctggtgtatttgtgaattgttctttgatcaattaaatgctgttaaatttaatttgtcctaaatttttcatttaacaaaactgttaaacaagatagaaaaaccaggcagataacacttctctaaatctttggtacggcaatgttaagtaactggcctttcccagtcaatcattcatgctgttaatgccctattacctggtaaatacsttaactattttcctgaatactacaagaaactggaatataacacattactttctgtgacggtattcaaccaccagccaagagataaagtgaattttatttgaagagcgactctgaaaacttctccattatctgtcttaaaatactgtattg

SEQ ID NO: 184245 - DNA, 568 bp, Homo sapiens
actcttgtgccaatcacagagttttgtccaatcacaggcagctaactgttccaaccgagttaaaataagacaaatggtgtgctgtaaccaacccagctgtttctgtaccttacttctattttctgtatatgactttcctttttctgtctgtaactattatctgaccatgtggcagccctggagttgccctgaacctattttggttctaggggctggtgtatttgtgaattgttctttgatcaattaaatgctgttaaatttaatttgtcctaaatttttcatttaacaaaactgttaaacaagatagaaaaaccaggcagataacacttctctaaatctttggtacggcaatgttaagtaactggcctttcccagtcaatcattcatgctgttaatgccctattacctggtaaatacgtkaactattttcctgaatactacaagaaactggaatataacacattactttctgtgacggtattcaaccaccagccaagagataaagtgaattttatttgaagagcgactctgaaaacttctccattatctgtcttaaaatactgtattg

SEQ ID NO: 184246 - DNA, 566 bp, Homo sapiens
aatctgagactcacctctccagggagattatgctgtttgattggtgctggtatctcttaagagttacaaggatgctggtcttggagtgagcaaaagggtgaaaactggaaccgactgctactggaatgatctgtgactgctgggatgatgctgatagagacaggaagcrctaatgggtctctctccctttatctgccttttcatcttcatcctaatggcagagtttaacaactttaaagaaaaagtgtagcttgaagaatttccagcctgagcattgcaaagcagaatacaaatgggtaggtacagagctcagagacaatggcttaataactgacacagggacttagaggaagaatgaaacctcctgttccaataaactgtcagaaataacacagagacttggaaaaatatatgtaacataataacccttatttaaattattcagtacaatatcacctttaatatttgctgtttttaacatagaagtttctacataatgattattttgggactagttttttattctttccacagaatcataatcagtcaattatttcaccatgaaa

SEQ ID NO: 184247 - DNA, 548 bp, Homo sapiens
atgaagcatctcataagtaaatggaaactgcaaaaaaaawtgatgtgttacacttcttatatttcccaattttgtaattacagtgctgaccgtgtagtaagaactcaataaacagtacttgctaatttgttaattgattgatgagactcagccactatcaattaccactgaggaatgaaccaagaagcagaattaaacttcattaagaaagatttcattaggctcataagacttttgtgactttcaatgttcctaactaccagaaaaggatattttattgcctgtctggggaactaaagcctcttatatgttttgcaaagtaaactttcatatgggatgtgtaatgtcttccacagtcatgtcatggattaattattgttcattttttttattctatgttcattctatgctcacatgtcaactacaagttcttatataagacaaaaagggtgccttaaattatgtgctattttggtccataaaatatttaaagaaaaaatttatttcagatatgagagtagtattttatgaaataatatcaaaatgaa

SEQ ID NO: 184248 - DNA, 555 bp, Homo sapiens
acctactatgtaattcatcattaaatgtgtttggggcttttgtgggttggtcagctcctatagtagcctattagtaaaatgcacagtttatctgccctgttataacaataggtggtattcgtaactgcacacaatgagtaacgtaaacaaaaggtcctttttaaaatatrtgttttcccaacatagatgacgcattttttttcaaacaaaatcattttttatctgccagaaactctgaaagttttaggtctttacaagtatttacttcaaacagtatttctcaaactactgctacttgtgaaacgtttattttacaaaactgtcattaatcccacagggctgtcaagaaaaactattaatagctagagagcgaaaaaattagaagttgaaagattttatatcagaaaacaaaagttataaaatcggcagcaaaagacaaggaggaagaatgtgaaataggaggagagtaatcggtcagatgaaattgaagtcaacaaggttaagacgaagagctcaatgctgtttttgtcaatacctaagagttaaaattaagaa

SEQ ID NO: 184249 - DNA, 555 bp, Homo sapiens
acctactatgtaattcatcattaaatgtgtttggggcttttgtgggttggtcagctcctatagtagcctattagtaaaatgcacagtttatctgccctgttataacaataggtggtattcgtaactgcacacaatgagtaacgtaaacaaaaggtcctttttaaaatatatgttttcccaacatagatgacgcattttttttcaawcaaaatcattttttatctgccagaaactctgaaagttttaggtctttacaagtatttacttcaaacagtatttctcaaactactgctacttgtgaaacgtttattttacaaaactgtcattaatcccacagggctgtcaagaaaaactattaatagctagagagcgaaaaaattagaagttgaaagattttatatcagaaaacaaaagttataaaatcggcagcaaaagacaaggaggaagaatgtgaaataggaggagagtaatcggtcagatgaaattgaagtcaacaaggttaagacgaagagctcaatgctgtttttgtcaatacctaagagttaaaattaagaa

SEQ ID NO: 184250 - DNA, 555 bp, Homo sapiens
acctactatgtaattcatcattaaatgtgtttggggcttttgtgggttggtcagctcctatagtagcctattagtaaaatgcacagtttatctgccctgttataacaataggtggtattcgtaactgcacacaatgagtaacgtaaacaaaaggtcctttttaaaatatatgttttcccaacatagatgacgcattttttttcaaacaaaatcattttttatctgccagaaactctgaaagttttaggtctttacaagtatttacttcaaacagtatttctcaaactactgctacttgtgaaacgtttattttacaaaactgtcattaatcccacagggctgtcaagaaaaactattaatagctagagagcgaaaaaattagaagttgaaagattttatatcagaaaacaaaagttataaaatcrgcagcaaaagacaaggaggaagaatgtgaaataggaggagagtaatcggtcagatgaaattgaagtcaacaaggttaagacgaagagctcaatgctgtttttgtcaatacctaagagttaaaattaagaa

SEQ ID NO: 184251 - DNA, 555 bp, Homo sapiens
acctactatgtaattcatcattaaatgtgtttggggcttttgtgggttggtcagctcctatagtagcctattagtaaaatgcacagtttatctgccctgttataacaataggtggtattcgtaactgcacacaatgagtaacgtaaacaaaaggtcctttttaaaatatatgttttcccaacatagatgacgcattttttttcaaacaaaatcattttttatctgccagaaactctgaaagttttaggtctttacaagtatttacttcaaacagtatttctcaaactactgctacttgtgaaacgtttattttacaaaactgtcattaatcccacagggctgtcaagaaaaactattaatagctagagagcgaaaaaattagaagttgaaagattttatatcagaaaacaaaagttataaaatcggcagcaaaagacaaggaggaagaatgtgaaataggaggagagtaatcggtcagatgaaattgaagtcaacaaggttaagacgaagagctcartgctgtttttgtcaatacctaagagttaaaattaagaa

SEQ ID NO: 184252 - DNA, 642 bp, Homo sapiens
tattcatgcatgaatgaaatagagctgaaagagaaagaaaatgaggtctccacgtcatctgagaccctggatcatagacctaatgtggcayatatggtataggatgacacgtgcctagtcatgttgtaaaaaaattcaatttaaactagtctgattttatgttttcttaaaatggaatgtaataattatttgttgaatgcatcttgaattcaattgttttcttttaaaaaatcactgccactgtcttctctaggagccagtgtcttctctgggagcatcataatgtactaattatacttattgttcctttcctttcttgagttccaaactacattgcactttaactgtctctagattcttttctttacccatctttctgatactcttatacccccactctgcccaaaatagctcttttctaaattttgcaaataaattcaaattataatcaatgaaaagtttacagatactatggttttttatgtactgactaaattaatctcatgttactattcttgtgtgagtttatgatatgaagtagtaagtaaacaaatttctcagcacttctgttggtttattctgttttatcctattctattacattatgttccattctgttgtttaacctaataccacatggta

SEQ ID NO: 184253 - DNA, 585 bp, Homo sapiens
ggctataggattcccacagaggtgagaaggatttaaaaaaatgaccctttgagataaagcactgcaaatatcagggtgagtcctatttgacagctcactgctgactactggaattttcctctatcctcacatttcgtttacatctgctgtttcttccttcttttagcttgcttggtgtgtgtgcgtgtgtgtgtgtgattataccatattgaagtaatttgttttaacattttatccatcattacattatcaaaatgaagttcaatgtttacagggatcttcagcatcatttgrtatgttattttaaaaagtcaataatcatagtgtgacttttactatctctagttcttcccattacctaatactgcttaaccacttactctaaaacatagaagctcaaaacaactattttatttttattacaatttgaggaaatcaagaatgggagatggactctatcaggccatttttgcctgatcctcatgagactagttggggtggctggggctggatgttctactggcaaacatgtgtcctcacttgcatgtctcagcattgctccttatggcctttctatctcctcat

SEQ ID NO: 184254 - DNA, 457 bp, Homo sapiens
tttcattttcaaaagtgtctccatttggaggatgaattgtatcagtagttcttaaagtgtggtctagggatctctgggggtatctgagatattttcttgagccagcaagatcaaaattatttttataatatattacaaaactgtttttctttttctcctctaattttcttatgagtggagttttccaaaggctacgtgaagtgtgatgttgcagctaagtgaatgtagagggagatctgagaatccaactgtcttctrttcagccaaatattaaagagattgcatgaacataaagccactactcttagtagtttttttttgttcattttggaaaatatctttatttttcattaaagtatgttgtttatgttatcataagctgggtctattttatttgtattattttaagtaaatttataaataaatatatattttcatgctcagttttaatgtcaaa

SEQ ID NO: 184255 - DNA, 589 bp, Homo sapiens
atttacctataacattctttgcttcacatgcattctgcttctaaaacgacttttaaccctggagacattaggccagtgttgttctgaaaaggcaatgctaaaaacagttactctgttaaactgccgagtaaatccatgctatttattccagaggttccctgagagtcattacaatgcactaagagagtttttattcattgacctaatcaagagcagttgaaagtagaagttatgttttccaaaaggtgcccttatccatgactgaacaatatgagcttgataaattagtgagtagaatttttggttgactgtcataaaagtaacacagaggtcagaatataaaatactctgaaggaatttttgtttctgttgtttttaaacccacrtggtggattccaagattcattctctaacaactaacttcttttccaaagtgtgtcacacacaaacaagtgaggttggatgactgcatagaatgaaagacactggggttatccaatggtgagagaaaattactctctggcctaaacaagcgagagagagaagttaaagaggaaagggcaaatgctgataaaagtaattaggttta

SEQ ID NO: 184256 - DNA, 606 bp, Homo sapiens
agtatgggtcattggatcaggtgttctctggcccagtatcccttatgtgatgtattcagatcgttgttgggctagaaccaatggaggagcaagtcaggagcagttggggaatggctattgtttatctcactaaacagaatctcaaaacttctctctgtagcatctctgcattggttgcttcgggcttcctcacagckcagagtttcagggcagtcagaatgcttacgaagcaatttaagggttcagtgggagtgttccagtgatccaggagtaagtttcatttccttttctgtcctagccacagaacagaaagatgtttcacagagcaactattctgctgattataagctagtcaaaaactgccagatttgaggggaaggaacatcaaccacccttcttgatgagaaaagtgtcaaggtcccattgtagaaaaacacatgggataggaaatattattacagtcacttttggaaactaaaatctgcagtataggttaatgaatatttttcttgctactgaagcatttttatttgcatccaaaatactacaaaagcactcattaataaagaaaaaaatactcacttctttttggccctatgcccttgc

SEQ ID NO: 184257 - DNA, 606 bp, Homo sapiens
agtatgggtcattggatcaggtgttctctggcccagtatcccttatgtgatgtattcagatcgttgttgggctagaaccaatggaggagcaagtcaggagcagttggggaatggctattgtttatctcactaaacagaatctcaaaacttctctctgtagcatctctgcattggttgcttcgggcttcctcacagcgcagagtttcagggcagtcagaatgcttacgaagcaatttaagggttcagtgggagtgttccagtgatccaggagtaagtttcatttccttttctgtcctagccacagaacagaaagatgtttcacrgagcaactattctgctgattataagctagtcaaaaactgccagatttgaggggaaggaacatcaaccacccttcttgatgagaaaagtgtcaaggtcccattgtagaaaaacacatgggataggaaatattattacagtcacttttggaaactaaaatctgcagtataggttaatgaatatttttcttgctactgaagcatttttatttgcatccaaaatactacaaaagcactcattaataaagaaaaaaatactcacttctttttggccctatgcccttgc

SEQ ID NO: 184258 - DNA, 605 bp, Homo sapiens
ctgggttcaagtggttgttctgcctcagtctcccaagtagctgggactacaggcrtgcactaacatgcccagctaatttttgtatttttagtagagatggggtttcagcatgttggccagcatagtctcgatctcttggcctcgtgatctacccgcctcagcctccctaattgctgggattacaggcatgagccaccatgcctggccaagaatagatttttaaaaaatactgtacaccaatttatttgcaaaaatttgagccattctggggctgccacatcacataatttcatgaaattctaatttcaaggcttgttgttttattatgagaagtgattattcatgtcaaactataatcttctggttctctcaccttctatatgacagatgcaattaactgctttggtgtttaatcccaatgaagaattaaatacctgtttgtccatgcttcctgttatttcaaaacaaagaaacaataatttgagctattggatttaagagaagtagatagtcttgcacagtgatagttttgttagtccatctttgtgataagtccatatacagtgaatgtaattcagtggtatggtatagcattcctgatcagg

SEQ ID NO: 184259 - DNA, 605 bp, Homo sapiens
ctgggttcaagtggttgttctgcctcagtctcccaagtagctgggactacaggcatgcactaacatgcccagctaatttttgtatttttagtagagatggggtttcagcatgttggccagcatagtytcgatctcttggcctcgtgatctacccgcctcagcctccctaattgctgggattacaggcatgagccaccatgcctggccaagaatagatttttaaaaaatactgtacaccaatttatttgcaaaaatttgagccattctggggctgccacatcacataatttcatgaaattctaatttcaaggcttgttgttttattatgagaagtgattattcatgtcaaactataatcttctggttctctcaccttctatatgacagatgcaattaactgctttggtgtttaatcccaatgaagaattaaatacctgtttgtccatgcttcctgttatttcaaaacaaagaaacaataatttgagctattggatttaagagaagtagatagtcttgcacagtgatagttttgttagtccatctttgtgataagtccatatacagtgaatgtaattcagtggtatggtatagcattcctgatcagg

SEQ ID NO: 184260 - DNA, 536 bp, Homo sapiens
aaattaacaaattaagagacatgtcccaagagctaattctttgaacacatcaataaaacagactgatagtgttcattagtaagagagagagaaaaagaggtagagaatgagggtataagagattggctttggaattaaaatattggaaaagatattacagcatatatcataaaatacagactctcaggaaattaacataaaatttttaagtaaaaataatgtaagaagctttatcacatgatacatcaaatttaaataataaataaagcaaatgtataaaataatttattatattagtgagaaaactgagtttaagtattagtgatattkagaatatcaaaaaatagaatggtaggttctcgtatgacattttattcctaaataaatttaaaatgggttaaatatttaaataaagaaccataaatgtatcagaatgagaaatgacttttaaatacttatttcgaggtaaaaaatacagaacatttgatattttagactacataaaaattgaaaatatttgtaaagcaaaaactatc

SEQ ID NO: 184261 - DNA, 536 bp, Homo sapiens
aaattaacaaattaagagacatgtcccaagagctaattctttgaacacatcaataaaacagactgatagtgttcattagtaagagagagagaaaaagaggtagagaatgagggtataagagattggctttggaattaaaatattggaaaagatattacagcatatatcataaaatacagactctcaggaaattaacataaaatttttaagtaaaaataatgtaagaagctttatcacatgatacatcaaatttaaataataaataaagcaaatgtataaaataatttattatattagtgagaaaactgagtttaagtattagtgatattgagaatatcaaaaaatagaatggtaggttctcgtatgacattttattcctaaataaatttaaaatgggttamatatttaaataaagaaccataaatgtatcagaatgagaaatgacttttaaatacttatttcgaggtaaaaaatacagaacatttgatattttagactacataaaaattgaaaatatttgtaaagcaaaaactatc

SEQ ID NO: 184262 - DNA, 536 bp, Homo sapiens
aaattaacaaattaagagacatgtcccaagagctaattctttgaacacatcaataaaacagactgatagtgttcattagtaagagagagagaaaaagaggtagagaatgagggtataagagattggctttggaattaaaatattggaaaagatattacagcatatatcataaaatacagactctcaggaaattaacataaaatttttaagtaaaaataatgtaagaagctttatcacatgatacatcaaatttaaataataaataaagcaaatgtataaaataatttattatattagtgagaaaactgagtttaagtattagtgatattgagaatatcaaaaaatagaatggtaggttctcgtatgacattttattcctaaataaatttaaaatgggttaaatatttaaataaagaaccataaatgtatcagaatgagaaatgacttttaaatacttatttcraggtaaaaaatacagaacatttgatattttagactacataaaaattgaaaatatttgtaaagcaaaaactatc

SEQ ID NO: 184263 - DNA, 458 bp, Homo sapiens
acgatgaatatttgtacaatcactgtggaaaacaatatggtattatttgtgaaaggtgaaaatacatacaatgtataaccaacaattctactcstagcagtatatcttattaaagcactaacttgaatacccttgagaaactatgacacatagacactaaaacagaaacatataaaaaagcatttaaaacaagccaaaacttaaaacagtgcaaaggccatcaatagaacatgggatatataaattgttttatatttaatcaatgaataatacagtgcagcaaaaatgaatgatcataatgaacttaacaatataagagagaaaaatttaaaaatatttcccgtagactatatactttacaatttccatcatataaaggtcaaaagtagacaaaacgaagcaaggctaataaagaacacaaatatatgcggcaaaaatatcaaaagaatagcaagtct

SEQ ID NO: 184264 - DNA, 520 bp, Homo sapiens
gcatgatggttttgcagtctctgtaggcattattataggtggaaccttttgcaaagcctgcattttaaaagattctgaaatacttttgtgggtgtcctgtttcagatgctagaaagatgctaatggacccttctgactttctttttggtgcttctcttaggcagcattttcaaaagatcactaactcatacatgggctttacctctctagatgaagttgcacgatgtcaaggtaagcaaatgacccttgcttcttttcagggtgagagatgacatgcattgatttccaaagaagttcccagatgatggctgaaacgcagactttgaattgtttttgcaattattaaaataagaaaaaccaataatatatgaagtctttatttttttttwaaatagtttctctggtatctttagtaagttggttctgacctacacaaatgtcatttgttcgtaagggctgtatatgaattacttcatttaatccttctaaggattttatgaggtaagtcttaatattatct

SEQ ID NO: 184265 - DNA, 443 bp, Homo sapiens
ctattctcctaacttttgtgaggagataaagtagtaaaagcatgacatcacaaatgagatgggagaatcagcttgtatccacggctctcatcaaatccaaaggtagaactgtgtcaggggagattctcacagatgcatctttgttataatcacaaatatatatactgcacrtacacatatatacaacatatatacacacatactatatacatacatatttatcctctctaaatccttgtaacactactaattctcaatactgtcctaactagaatgaacaaattggcttcaattcacaattgagaggcagagaagcaaaacgactcgaccaaggtcacaatgacaggaagagaaataaggtctgcataacctcattctcaggatcaagactttaatatcagaactctacccacctctggtaaatactctgcaaaatactttca

SEQ ID NO: 184266 - DNA, 552 bp, Homo sapiens
cccccttctctcttcctcctgctccagctatgtaagacatgccagcttcccttttgccttccgccatgattgtaagtttcctgtggcttccccagaagcagaagcctgtacagcctgcagaaacaagagccaattaaacctcttttctttctaaattatccagtctcaggtaattctctacagtgatgtgagaacagactaatacaataactgactgttctgaaaaacaagaataacactgaaggccaaatctcactgaccaaccattaaacagacatgtgaaaaatggagaaaatcaaaggctagaaatcctcttaaggcttcaactaagtaagatagttaattatcaacttaaagctcctgaaacctatttacagcaatttgctcataagtgagttttctaaatggtggcatcacatttgggggtactgaactaacaagtaccatgactgatatctgaagaaactgagccagagactaactcaggrtcacaagagcaggccaaatatgtctactgctattctctttttcctacagctgcttttaagatct

SEQ ID NO: 184267 - DNA, 624 bp, Homo sapiens
ggggttggctgtggaatgagctttggctggagagctcggtaccgtgtcctggctgtgtctgcgcagtgacgtgcttcagggcctggacaccaagcttcctctctctcaaaccttttccctcargtgctctgccatgctcaggagcgaggaaactcctcgctgctttctctaaattgaattcgtttacaggtcccggtcgagattttcaaagggtggtggaaaacgcgcgctgagctctagtaaagccaggcagagctggttgctaatccgtggtctgtggttgtgccatcttgggcaagtcacttctctctgtgcctccgtttcttcacctgtgaaatggacgtgattatttctatctcctaggaaagctgtgaggatcagagatcacgtgggtagatgctcccttaacttcagttcttattctcacttgggatggttgcaggttttgcagagcttggaggaagatgcaattctagaagccaccctgacctcctgtccagtcgaattcaaatgaagtagtggctagatttccccagatcctcttccaatggggggccggggccacatgacctgctctttgatggtccctcggctcccaagtgtggccaatccagtcctttcagg

SEQ ID NO: 184268 - DNA, 624 bp, Homo sapiens
ggggttggctgtggaatgagctttggctggagagctcggtaccgtgtcctggctgtgtctgcgcagtgacgtgcttcagggcctggacaccaagcttcctctctctcaaaccttttccctcaggtgctctgccatgctcaggagcgaggaaactcctcgctgctttctctaaattgaattcgtttacaggtcccggtcgagattttcaaagggtggtggaaaacgcgcgctgagctctagtaaagccaggcagagctggttgctaatccgtggtctgtggttgtgccatcttgggcaagtcacttctctctgtgcctccgtttcttcacctgtgaaatggacgtgattatttctatctcctargaaagctgtgaggatcagagatcacgtgggtagatgctcccttaacttcagttcttattctcacttgggatggttgcaggttttgcagagcttggaggaagatgcaattctagaagccaccctgacctcctgtccagtcgaattcaaatgaagtagtggctagatttccccagatcctcttccaatggggggccggggccacatgacctgctctttgatggtccctcggctcccaagtgtggccaatccagtcctttcagg

SEQ ID NO: 184269 - DNA, 368 bp, Homo sapiens
tgtaatcccagcactttgggttaccaaggctggtggatcacctgaggtcaggagttcaagaccaggctgaccaacatggtgaaaccccgtctctacttaaaaaaaaaaaaaaaamaaaaaaaaaaacatacaaagttagctgggtgtggtggcgcatgcctgtaatctcagctacttgggaggctgaggcaggagaatcacttgaatctgggaggtggagtttgcagtgagctgagaatcgtcccattgcactccagcctgggcaacaagagtgaaactccatctcaaaagaaaaaaatgcagtagggagatttaatttagatataattattattaaacactggagtgagtaactaagggagatatgg

SEQ ID NO: 184270 - DNA, 496 bp, Homo sapiens
tggcagctcctccaatcacaggcctggaggcctatgagggaaaaatggttttgtgggctaggcccagggtcctgatgctctgtgcagcctcaggatatggcgccctgtgtttcagcctcttcagatctagccgtggctaaaaagggccaaggtacagcttgggccattgcttcagaggttgcatccccaaaccttattggcttccacatggtgttgagcctgtrggtgtgcagaaggcaagagttgaggtttgtgagcctctgcctagattccagaggatgtatggaaatgtgtaaatgtcccggcaaaagtctgctgcagagccggagccctcatggaaaatctctactagagcagtgtggaggggaaatgtgggattggagtccccacacagaatccccactggggcaccacctagtggagctgagagaagagggccactattctccagacaccagaatagtagatccagtgacagcttgcactatgtgctgaa

SEQ ID NO: 184271 - DNA, 508 bp, Homo sapiens
aggatattaaggagtgcatttttattttagtattctacagaaatgtacataataaaaataacttaggagaaaatacacaaaccartagtttcactagtaagatttgaagttagatactccctcaactttcagttctgttaataaccaatgggtcttaagcatgtgaaaaactcatgaaatcagttttcttatttgtgaaatgtagtaagttccagcagtttccttggattgttgtggacatccaattagatactatatggaaagcatccaagtgtggtctggtgcaaagttgatctcaataaatctttgtttctaccccaaccccaactctctttgtctttcaatgactacagcaatgaaatataactaaattccttttgtaataggttttgtaataggattaagtgcctttctataaaatttaggtacacagaagaaaggaagtagagcataggatttaaccaacatagttgttgaagagaaatagaaatggagttgagttttgtct

SEQ ID NO: 184272 - DNA, 508 bp, Homo sapiens
aggatattaaggagtgcatttttattttagtattctacagaaatgtacataataaaaataacttaggagaaaatacacaaaccagtagtttcactagtaagatttgaagttagatactccctcaactttcagttctgttaataaccaatgggtcttaagcatgtgaaaaactcatgaaatcagttttcttatttgtgaaatgtagtaagttccagcagtttccttggattgttgtggacatccaattagatactayatggaaagcatccaagtgtggtctggtgcaaagttgatctcaataaatctttgtttctaccccaaccccaactctctttgtctttcaatgactacagcaatgaaatataactaaattccttttgtaataggttttgtaataggattaagtgcctttctataaaatttaggtacacagaagaaaggaagtagagcataggatttaaccaacatagttgttgaagagaaatagaaatggagttgagttttgtct

SEQ ID NO: 184273 - DNA, 439 bp, Homo sapiens
tttgctgactcttagactatgaattcaacgaaaaaaggttgtaaacatgtgggattttgagtagttttctctatgtaatattgcaaaaggcctataaagaattgtgwattttttatgcaacaaatcaaaatcaggtcattagcaacagatgactagattgcagattggaaaatacgtgtgattcctttaccattaaaagtgtatcctaatgacaatgtatttctatatttactggcattaagagatgattacagtttgtttttgaattaaaaaataggtcttaaatacacaaacacacatacatggattttctcagtttgttctattagttattaatttatttacttattccttcattcacttcttatcatctattcacttattcatacattatttatgtatatgcataggcttagaaacatggaatgttaacaaagta

SEQ ID NO: 184274 - DNA, 624 bp, Homo sapiens
tcaatttaacaatattttatgtaaaaatattctaatatttgaaaagaatttaatcaaatattgaaggaaaaaagtgaaacaagttttggtggctgttactggactatttctaaataaatctggaaggatttactgttgaataatctactcctatagttttcatctgtatttccagatgaaaggacttgatgtagttaaataaccagtaagttttgcaatccttatccttagcaactgattgaggttattcccaaaatgccatttataatgccataattaaaaatctagatgaagagaaaaacttcactataaatatcctcatttctctctgtatgcctcagcttgcaatatttccattagatgatgtagaggatttgagctagagggcataaaagccacattacttttaaattactgtaagtattayaactggtaactataattacaaggcaaattcaaggtaataaaaatgtaaacataggacattttctgcttttaaattagaatttgagttatactgtaattgcttttggattgatttcctaaaactgtattagccaagtattctgagaaaatattattattctgtctggtgtgtaccccacagccacaaactattgcctt

SEQ ID NO: 184275 - DNA, 464 bp, Homo sapiens
agatgttttgatttttgatatataaatagaatagtaaaaccaatgaaagcagattaatagttgaaatataacataaaatcacaactaaaataggtacacaaggctgcatctttgraatcagaaaatgttaatagatttccaatgacaaaaaaaaagcagagatttgagggtgtatttttggcttggtttaatattttatctgttttattcatttcatttgttcactaaaaatatttctatgtatatagtgaataaaataaaaccattagtgcttctgaattttttttaagtcttagttctttatacaataatgtagtttaactcaagtgaaaaataaaacaaaaaatattctaggaactcaagtcatccttattttcaaaagtcatataaaagaaaattcacttgtgaataatactttcagttcattttatttctattaagttttcaaaaacaatttggttttt

SEQ ID NO: 184276 - DNA, 479 bp, Homo sapiens
tgtaagaattcttaatatgtctggatactagacctttattagatgtttgatttataaatgctttcycccattcagtgggttgtttttcattttcttaatagtcctttgatgtataagaatctcaaaatttaggacagcagagtaaaatggaagatacaaaataactgaattttatatagatgagaacaaattctgtgtatggtcttatactatatatataagaagcagatgattattttttcttacctcttgaacattgaaccttaggatctccttcatataagtaggcaataatgtcaataaagtataaaaagtccagttgtaagaaaagtgtgcaactacgatagcccaaagtggcagggattttaaaatgggtacccacggcactgacttctgtgaagaaagctgaagaaaacaggaataattaggataaactacggctatgttaatgcttacatctgtaccgtatcagctaaaac

SEQ ID NO: 184277 - DNA, 518 bp, Homo sapiens
atgtccctttcatttactcttctccctcatggtatatttctcttttccttcatagtaccatcacaactcaaaagtagctaattttatttattgaatctctatctcccccactaactataaactcaaaggtcaataaccatgtccattttgttcatagctctatccccartgcctagaacggtgcctagaacatagtaagcacaatattttataaacaaattacttcactgacctgcaaaatatcagtttaacactcaggtagtctatttgtcttcctcaaaaaagttgatctcttaattactaaatggttcaaccactttggaaacaactcggcagtttcttaaaaagcatacgctttgccactcagcccagtaatcactttcctagctatttacacaagtaaaataaaaacattattacatacaaaactatatgtggacatttatagcagctttattaataattgccccaaactggaaacaactaaatgcccctcagctgggaatgaatacacaaac

SEQ ID NO: 184278 - DNA, 518 bp, Homo sapiens
atgtccctttcatttactcttctccctcatggtatatttctcttttccttcatagtaccatcacaactcaaaagtagctaattttatttattgaatctctatctcccccactaactataaactcaaaggtcaataaccatgtccattttgttcatagctctatccccaatgcctagaacggtgcctagaacatagtaagcacaatattttataaacaaattacttcactgacctgcaaaatatcagtttaacactcaggtagtctatttgtcttcctcaaaaaagttgatctcttaattactaaatggttcaaccactttggaaacarctcggcagtttcttaaaaagcatacgctttgccactcagcccagtaatcactttcctagctatttacacaagtaaaataaaaacattattacatacaaaactatatgtggacatttatagcagctttattaataattgccccaaactggaaacaactaaatgcccctcagctgggaatgaatacacaaac

SEQ ID NO: 184279 - DNA, 590 bp, Homo sapiens
agtgagattttgccattgcattctagcctgggcaacaagaactccatcttaaaaaaaawttttaaaaaccatcacacaaacagaaagcatgtcctttaattttacctatccttcaaacttaagcaaaaattttccttttataaccaaaaaaaaacctttagacacttttacatatgggaggtcaggcacagtggctcatgcctgtaatcccagcaggaagatcgcgaaaagcatttttcaaatgcacaaatgcttaaagattcaggagtaagtgggctattacacctgttaagcctattaccatgtagtttcattcctagtgaccaagtagacaaactgctaattatcaaagcataaaaggtattagactctgcaggagaaaagcaatgtagattagtctaattttatagctacttcaaattgccatctttttctattagaaccttgttcctattctgaatagcactcaatagaacttgtgaaaccatcaaactggcataaagcttactccactgacttcaaaatggacccttccactcatagggtgtacactagccactacacttatttcttatgtcatggcaaatagt

SEQ ID NO: 184280 - DNA, 599 bp, Homo sapiens
agctcttcatcagagcaggactagctcttcactggttccttgactccaggactgtgaaaccaggaaatgaactttccttcttatatttctgcttctgcctaagggccaatttcataagtggaggtctgcaacaaaatagatgtacttaagcaagatgaagctccattgctttatcttgcttaagacgggtttaataggaatttcttctggctgtttcccgtgccccccccccccacttttttttttttttttttttttttaagatattagagtctcatgaggcccagactggactctaattcctaggcacaagtgatcctcccacctcagcctccgtagtagctgggactataggcacaggccaccatggctggttttacwttttttttggttcatggtacatttgaaaccaaaacatacccaatatctagtcatattaaaattacttttatctctctctctcttaatttggagaaaatagtattttgtgggaaaatttatagtatataggctggcatttgctttactctcacaatcctataggattataaaattagaattttatgaaatatcctatacttggtgtaattccttatttt

SEQ ID NO: 184281 - DNA, 396 bp, Homo sapiens
tgggtttaagtgccaggcaccaataaaaggaaccagagttccttggaaaaactgaattggggactgggactgggactggggaagtacaggatgaaagtggcaaaatgttcaaaaaatgatgggagcatgtcaaaagaatgtatgagccaactctaaggagctctcagtggccaaattagggacactttgagcactataataatgggccataacccataaaataaaaagtrgtatccagatataattaagtaaattcaaacgggagaaaggaacacactttcttgccatggaattccaattagtaaatgaagagtcattgatataggaaattaccatttgaaaagaaacactacagtaataattgttttaggtgagaacagttagtggacaatgtaa

SEQ ID NO: 184282 - DNA, 612 bp, Homo sapiens
tcccttttagttctctttttaaagtaagaaggtccacatctctcctaatcatcacttcactctatattcctattttaaaagttgatttttctagatgattgctattttaagccaataaaaaagtcactaacaaatatgctatttaaataatgtatgactataaataatatgctattgcaaacatataaattttaaaaccactaattaacccaatggtcagtggtatactgttaggcttatttggctgtatggatagaaacccactcatgaaggatactggatttgggccaggcttagaaaccaagaacgtgcagaactctaaaaacaggctattttttattgtctctttcaagagccacagagtttctctgtatttcatgatatctctgcttatctgagcatgtctgatccatcttctcttcaaactacctggcttctgtcttctgatggtttccattccatacaactttgattgaatcatcagccactatgggctttaccttactaatagcatctctgaatttaccacttggtttgaatcttagcatattcccagtkcggttcaaattagtggaggaagagggagatttaaatatctgatcagcccagtcc

SEQ ID NO: 184283 - DNA, 612 bp, Homo sapiens
tcccttttagttctctttttaaagtaagaaggtccacatctctcctaatcatcacttcactctatattcctattttaaaagttgatttttctagatgattgctattttaagccaataaaaaagtcactaacaaatatgctatttaaataatgtatgactataaataatatgctattgcaaacatataaattttaaaaccactaattaacccaatggtcagtggtatactgttaggcttatttggctgtatggatagaaacccactcatgaaggatactggatttgggccaggcttagaaaccaagaacgtgcagaactctaaaaacaggctattttttattgtctctttcaagagccacagagtttctctgtatttcatgatatctctgcttatctgagcatgtctgatccatcttctcttcaaactacctggcttctgtcttctgatggtttccattccatacaactttgattgaatcatcagccactatgggctttaccttactaatagcatctctgaatttaccacttggtttgaatcttagcatattcccagttcrgttcaaattagtggaggaagagggagatttaaatatctgatcagcccagtcc

SEQ ID NO: 184284 - DNA, 436 bp, Homo sapiens
acaaaatttctaagtttctcttgaataygcagatatttagaatatctgcataaccctttgaaccaattcttttcaaatgactaattattgatgttacaaaattatgcatgggttaaagaacccctcaaaatacaagataggccaatttattttaatgcagcagagtattaaaatgtttactgatatggtttcatattctacattgcaactaagcctcaaaaaattaaaacatgttgagttttgatgtagtatcaaatagaatatccacagttatctgaaacagctattaaataatactttcttttccaactgtacatctgtgtgaagctaactttcctttatgtgctttacaggaagcacattgcagcagactgcatgcagaagcagacatcagaatccagctgttaagccatgcctcagagagatttgtaaaatg

SEQ ID NO: 184285 - DNA, 516 bp, Homo sapiens
cttaactaattatatctgcaaaagcctatttccaaataaggtcacattctgaggttctgagtgaacatgcatttttgagggactgtattttacccagtctaacagtgagctcattgtattaaaacaattaaaactactttataattacttttttcatgcgatcaccttaagttgagatagcaaatgasttttctattgtttttggttttattttgattcagtcattccaatttcaattaatcagcaggttgtataattcacaatgaatcattatccaaaggatagccaactctctggtttgagattctctgtacatggagtcaaataaaatcggcatagaatattgtagaagagtttagttttatattttgaagtacaaggtatattcataatactttgctgaaagctttacaaaagtgcaattttcttgaagaatgcattgttaagtctatcaaagtacaataacctgaaagggattgttaatgtgtcaattaaaagaatcctgattacattcta

SEQ ID NO: 184286 - DNA, 422 bp, Homo sapiens
ggaggtgcaatttatgggaacactatgaattttattcagggataacatccaggttgttttgacccacagttttgccttgggtttcaggttcattcccatgctttctcattgcctacaggaatctcaattgtggatctccaattgcaatttgttcagatctccctggttgcttttctactatgtttcccamatttagttcaattttacattgcattaagtgcgtggggtggcagctggaatactggtaaaatcatatagtggaggtataatacaatatcacccctcaaattcttcccattactctcagaataaagtaaaaattccttaacaagactcacagggccctgaacagtctggtccctacagatctcacacatcattccctgttcctctcttgactttagtgaacttggccttctttt

SEQ ID NO: 184287 - DNA, 447 bp, Homo sapiens
ttgcattaagtgcgtggggtggcagctggaatactggtaaaatcatatagtggaggtataatacaatrtcacccctcaaattcttcccattactctcagaataaagtaaaaattccttaacaagactcacagggccctgaacagtctggtccctacagatctcacacatcattccctgttcctctcttgactttagtgaacttggccttcttttagttccttgtactccatgcaatctcccctgccacagagcatttgcacatcctgttcctttagcacataaggccacctgctccctgcccccattttcacccacttaacatccattcttccttcatttttaagttcaaggcttattgctcctgggaagccttccctgatctgccaaaaccctgttgtatgctctcagaataccatttccttttcagtcatgtcacatttcacagc

SEQ ID NO: 184288 - DNA, 611 bp, Homo sapiens
ctggttttaatgtttggtttgcatgacctattcctcacctagccattttctgttaaatctgacttgcactttttcctcttcactttgggcaggtagaaaaattacttcaagaggttttgtctacacttggtgtaataagaatctaaccataaactgcaagtggtacataaggaaataaaatatgttacgccatttaaatgatcaagaaatgcctttcagatcattgataaaaactttagatgaactgacatgtttaatgcatgacaatttgctttatcatgggactgtttttgtagcttatggataaatttagctgttaaactctgtcttagtttatatagttttagtgacagatctgtttataagayagcttaaactataacttttggttgaaaaaaaaatcaacagtagactttctccatgagagcacttaaccctatcctagtgatgtatatactgctatgatgaagcccctggaacatgaagcaatgatgatctataagcatttttaccctgctaggtagacacatccttcaaatgccagaactacaccataatgggtacttaaactaccttgcagggatacctaggagaagcacagttttgagaaa

SEQ ID NO: 184289 - DNA, 611 bp, Homo sapiens
ctggttttaatgtttggtttgcatgacctattcctcacctagccattttctgttaaatctgacttgcactttttcctcttcactttgggcaggtagaaaaattacttcaagaggttttgtctacacttggtgtaataagaatctaaccataaactgcaagtggtacataaggaaataaaatatgttacgccatttaaatgatcaagaaatgcctttcagatcattgataaaaactttagatgaactgacatgtttaatgcatgacaatttgctttatcatgggactgtttttgtagcttatggataaatttagctgttaaactctgtcttagtttatatagttttagtgacagatctgtttataagacagcttaaactataacttttggttgaaaaaaaaatcaacagtagactttctccatgagagcacttaaccctatcctagtgatgtatatactgctatgatgaagcccctggaacatgaagcaatgatgatctataagcatttttaccctgctaggtagacacatccttcaaatgcmagaactacaccataatgggtacttaaactaccttgcagggatacctaggagaagcacagttttgagaaa

SEQ ID NO: 184290 - DNA, 571 bp, Homo sapiens
tcttctccactcttagatagattctgctcttcggaaagatttttacccaactatttttgtcctattcattaattaacaatataaatatatacttttaaattaacaactcctccaaaaacagtgaaccattaataataaaattttataatcatcataaaaccrtccagggcatggaagatggtgtaataattcacacctaattgctttcaacctcgggcccacaaacacactagttagagaaatgaattcagatactgtaattcatgccaggtcatgttttattatttaattcatcctcgatacttggaaaaaaaaagactttgatgttcaaacactccacaaactcaccatgccaccaactccatggggatctagagaaattcctcatttatctatatcatgagccccttggatggaaattcaacctgaatcttggtgttttctatagcacacagattattttacttaataatagaaataacttacataatataaacaattaccttaagtacaagattagaatactgagaaaattctttgttaaagaaaaaaagagcaaaggatgagcagt

SEQ ID NO: 184291 - DNA, 558 bp, Homo sapiens
aacttttttttttcttttctttttctttttttgagacagtcttgctctgttgcccaggctagagtgcagtggtgcaatctcagctcattgcaacctccgcctcccaggttcaagcaatactcgtgtctcagcctcccgagtagctgggattacaggcatgcactaccacacccagctaatttttgtatttttagtagagacagggttccaccatgttggccaggctggtctygaactcctgacctcaggtgatccacccacctcgacctcccaaagtgccaggctttcaggtgtgagccaccacacttggccataaaacttttcttaatgttgtattctcacagacaattagaagacaatgaggattgtttgaagtttatgatatagctgtattgtaaaagcaacattttttgtttgtgagaaaagatgctcaccagaaatatgaggcttaggaaaaactactactaagtgactgaaattatagctgcacaaaacaagaaatgccagggcagaaattagaaccatgaggcattttattaattattgtggagaccagtc

SEQ ID NO: 184292 - DNA, 560 bp, Homo sapiens
taggtgaacttcttatctctggtgaccagaggagatattcattcctcaaaggcatttttctttctcttcctctccctcctgctgacacacaatcaggcccacctgcccaacatcacaaactaaatatcaagggctttaggaaatatcacagtggatctgacttaaaaatttcgtcctgctccagttcytctcaggagacttctggctcatatatagtgcagtgactatgaagtatacgaacacccaactcagaggctgttcaaaaagcaattctggagaaaaaatggatgaacacactctgcctcagggcctttgcacttgttcgctgtgcacagagcactcttcccttaaatacctgtatatctggtgtccctacctcctcaggtctttgagttaggttttctctgatgtagagaaaaccttctatcagcctgtcactttctaacatctttctctattttttcttcagaatacttactagtcagtacttaacacactcatttatttttcattctccttgtctagaatgtcaattccatgaagtcgggggtgttgtctgt

SEQ ID NO: 184293 - DNA, 616 bp, Homo sapiens
taattattctgacctttagaagcaactctagcttgaaagggttagaatataacattatgaaaacccctcagagatttgtggktaagaattttgtctataatgacaagctcctctggtttgtctcaaagagagtaactagaagtagaaaggtatcttcctttatttacctttgaattcttaagtggcaatataacacctcactttgtccttagaaggatccaactgctgaaaagtcttccagatacttccttctcagtggtgcctttagacagtcatggcaggaatattgatcgggaatagcctaatgaaatattagtgccagtgaatgtgttgcagaaagagcaaatcccgtctgtgagagttatattggtgaagaattgggcccattaggggccttgttgagtattcagcagagacaattcttgctttataaaatatgctttggtttgccttatggaaaatttattgttcattcatttgatgtactcctttaagaggtcaactttgacttgcagtgctctcagaatttattcttcactccattgttccttgcaaaccatccttattgaatttctttatgcatttgagttgtcaaatagccagtgcactctctaaa

SEQ ID NO: 184294 - DNA, 616 bp, Homo sapiens
taattattctgacctttagaagcaactctagcttgaaagggttagaatataacattatgaaaacccctcagagatttgtgggtaagaattttgtctataatgacaagctcctctggtttgtctcaaagagagtaactagargtagaaaggtatcttcctttatttacctttgaattcttaagtggcaatataacacctcactttgtccttagaaggatccaactgctgaaaagtcttccagatacttccttctcagtggtgcctttagacagtcatggcaggaatattgatcgggaatagcctaatgaaatattagtgccagtgaatgtgttgcagaaagagcaaatcccgtctgtgagagttatattggtgaagaattgggcccattaggggccttgttgagtattcagcagagacaattcttgctttataaaatatgctttggtttgccttatggaaaatttattgttcattcatttgatgtactcctttaagaggtcaactttgacttgcagtgctctcagaatttattcttcactccattgttccttgcaaaccatccttattgaatttctttatgcatttgagttgtcaaatagccagtgcactctctaaa

SEQ ID NO: 184295 - DNA, 616 bp, Homo sapiens
taattattctgacctttagaagcaactctagcttgaaagggttagaatataacattatgaaaacccctcagagatttgtgggtaagaattttgtctataatgacaagctcctctggtttgtctcaaagagagtaactagaagtagaaaggtatcttcctttatttacctttgaattcttaagtggcaatataacacctcactttgtccttagaaggatccaactgctgaaaagtcttccagatacttccttctcagtggtgcctttagacagtcatggcaggaatattgatcgggaatagcctaatgaaatattagtgccagtgaatgtgttgcagaaagagcaaatcccgtctgtgagagttatattggygaagaattgggcccattaggggccttgttgagtattcagcagagacaattcttgctttataaaatatgctttggtttgccttatggaaaatttattgttcattcatttgatgtactcctttaagaggtcaactttgacttgcagtgctctcagaatttattcttcactccattgttccttgcaaaccatccttattgaatttctttatgcatttgagttgtcaaatagccagtgcactctctaaa

SEQ ID NO: 184296 - DNA, 618 bp, Homo sapiens
ttatttttaaagcagcctagaaaatggctggtcaacagcccaacatgggactggatgataggcatttctctagataaagcatctaccaccactgaccattactaactcaacaaaattgtcccactttgccacatagatatttaaacagcttgtcttgtcaggacctgatgctgagctgtcagacaaaattgagtctctgaattttgccatattttgtagtgaccagaatctcactatgagagacagcaggtttaagtggcagaattagacttctctcttcaatgtatttttctggagaagttgaaattctacttctgaggcttgggacaacctctgtagcctaagccgctcagtctgaggttgcttcagggatggraaagtgatctcaattctagataatcatagagccctgcctgtgctctggcctccaaaaaggccatgggtgaaaagtggggtgacaggggtagttcttctcctttctccattgtccaccgggtccccacatatgaaaaattggttcagagaatggtattcagaatcaagatggagaaccacaaaggaagttaaatgtaagctagacgctgtttttcaatgggcagagatggggctctctgggct

SEQ ID NO: 184297 - DNA, 565 bp, Homo sapiens
tgtcaggtaatttaaccacatcctctcatttaatcctcacaaaaactctatgaggtgaggaaactacatcttttagataaggaacctgcagctatgagcttatgagatttgctctgggtaacacagtatgcaagagtgagagctgtgacagactgtggtctatctgataccaaaacatttttatctcccccttcacattcctgtgttttcatctgtgaaaccctatagtattatgcaaagcatcaccttacctattgtgttttatagactgcctacttctgagaaggaatgagaattagaggaccatatgaacttcagagttasatttggatttcagtcctggccctagtaaatgctagctatgggaccttgggcaagttacatgaccttggtaaacgccttcatctgaatataaggaaaataactgcacccctgtagagttgctatgagcagaaataaagggatacatccaaagttgtcgcaatagaggctggtttgtgttccctctttcccagcctttaggaaggttggaatagttctgtaaatgtggcctgatggattagct

SEQ ID NO: 184298 - DNA, 554 bp, Homo sapiens
caagttgcttctctttttttagtctaacttttccacctacttaaagagcacaacgcatgatgttccctattaggtttcttccctatttaaaggagctatggtatatgaagcatatacgagtcaattagctaaaactagttctcccttcaaggttacccactgtacattttctacttgtatcttttgttctgaagtatgtttatgttacctgaaattcaaaaatgtaataatagaaatgtttgaaaaatttgcaccaagaataaaacagattgcaataagyataaacagtcaaaaatacttttaaaaagattacagctggtcggtatcagacccaagtaagcacagctatgtccccaacttcagtgaaaccaaatccacctctacatgggtaagagcattagcagaggcatgccaaatggcgggtggtgagctctaccagcatgactaatggtagagaaaaagagaaaggcagagggaaagaatctgttggtagaaacacactgatttgttattcactgggaaaaaatgcagtgtcaagaagtacaggttcttgc

SEQ ID NO: 184299 - DNA, 599 bp, Homo sapiens
tgaatcaatgaaggcagaaccacactacatacagaaatttggaagtcattgagagaacatgatatttactaaagccttgagagtgttgacaatttcccagatagagctcattgagcaagaagagaaagtgatcaagacagaatctcaaagaaacaatatccaagaggtaggtcaaaagcaggaggaaagtgaagaatcttgaacaatcttgaggcatagaaagagaaaaaaggacccatggtatcctagaaattaaaaggaagatgataataaagagtgaatggtaagaartgctaatgttgggcattggacctattaatggcaagaaaaaccagacacatccactgccctcatggagtttataatctagtagagagctacacataaatagaatatttgcaaacacacatatgaaattactactatggtaaatgccatgaatttacagtgcaggctgctataagaggctgtaatgaggaagtctgacttcatttgaaatatcagtgcaaacctctccaaggaagtactgtttgaactgaaatctaacgggatgaatttgtcacccacccagatttgtatcttgagtcctagcctgtagt

SEQ ID NO: 184300 - DNA, 558 bp, Homo sapiens
caagatgaaagggacaaagaggaagtgtctacaggctcacaaatacgcaggggctgtgtagggagaaggtgggcttccatgtctgggaagcaatgctttctagctgtgaacttggcaaatcacttaccatctcccatctcagactcctcacaggcaaagtgtgaaatggaaattccaccccatggggctattgtgagatttgaatgaaattgtgtctatgaaaccctagcctggcccagagcattcaattgagtttgagatcctgtcattcaaggcaattggctggaaagaaatctccacaggattcattkgcactgatcacataattcctcatgtcccatcatggatcttggataggtctgcaagctagggcctcctatctgccacattgtgaggtactccctcacaatggtacacaagggagtaccatttcgaaggtactcccttggatgtggagtcttccactgtgctgtcatggtctctcaacctggtcatggctagtctggtttgcttcagcaagtaacttttggcacaaggtgtatattcatgctgtcttag

SEQ ID NO: 184301 - DNA, 558 bp, Homo sapiens
caagatgaaagggacaaagaggaagtgtctacaggctcacaaatacgcaggggctgtgtagggagaaggtgggcttccatgtctgggaagcaatgctttctagctgtgaacttggcaaatcacttaccatctcccatctcagactcctcacaggcaaagtgtgaaatggaaattccaccccatggggctattgtgagatttgaatgaaattgtgtctatgaaaccctagcctggcccagagcattcaattgagtttgagatcctgtcattcaaggcaattggctggaaagaaatctccacaggattcattggcacwgatcacataattcctcatgtcccatcatggatcttggataggtctgcaagctagggcctcctatctgccacattgtgaggtactccctcacaatggtacacaagggagtaccatttcgaaggtactcccttggatgtggagtcttccactgtgctgtcatggtctctcaacctggtcatggctagtctggtttgcttcagcaagtaacttttggcacaaggtgtatattcatgctgtcttag

SEQ ID NO: 184302 - DNA, 558 bp, Homo sapiens
caagatgaaagggacaaagaggaagtgtctacaggctcacaaatacgcaggggctgtgtagggagaaggtgggcttccatgtctgggaagcaatgctttctagctgtgaacttggcaaatcacttaccatctcccatctcagactcctcacaggcaaagtgtgaaatggaaattccaccccatggggctattgtgagatttgaatgaaattgtgtctatgaaaccctagcctggcccagagcattcaattgagtttgagatcctgtcattcaaggcaattggctggaaagaaatctccacaggattcattggcactgatcacataattcctcatgtcccatcatggatcttggataggtctgcaagctagggcctcctatctgccacattgtgaggtactccctcacaatggtacacaagggagtaccatttcgaaggtactcccttggatgtggagtcttccactgtgctgtcatggtctctcaacctggtcatggctagtctggtttgcttcagcaagtaacttttggcacaaggtktatattcatgctgtcttag

SEQ ID NO: 184303 - DNA, 599 bp, Homo sapiens
agtgatcacaagggagagaagggcagattcataaaccaagaaggtgtctgaatatagaaggagtggatgggatgcctttggtgacaaaagcaagtgtaactaggaggggagtgtaacatttagagtttgggtacaaaaggaagaaatgaacaaggagaactgagaaggaggcaagggtcaagggtggcaagagaagcaggcgggtttccaggaaaaaatgatagcgtgtcaagaaagacggattaaccacattaaatactgctggagggttgaggaaaatgagggcacagtatgcctactggatttgattacacgagcactatggtgaactcagcaagagagcagctatctcagaagattccgtgaaaactggaagccgtgggtccattgtttaagcaaggacattttctcctttggttgttaacaaaagttgattttattctggtgtaaagaaatgcatgcatcttgttttagtgtgctcaatgtgtgctcaatgcatttttgaagatcaaagacatgcaaaaggygacaaacaaaaatatttttaagtcaatcaccaagactcctattatctaaaagcaatccctgtaacagtgctg

SEQ ID NO: 184304 - DNA, 414 bp, Homo sapiens
aaggggaaagactgaaaaagttatcaagagcattatatagtgctttcttggtctctgagagtcctcacaaaccctctccaattagaataataatcatggaagtacagacaaaataaaacactttagactaaactcagaatggagttgcatgtgattaactttcagtatcattaatatgtgctatggccataaccgcaatgatgtgtgaatrgaagcagtgcttttttagtggcaaacttttgtggttgtttttgctttgatttcagctcccgctttgttattgttgttattattgttccttttgttattgttgttgttgctttgatttcagttcacctcctggtgagaggtgatgtttgcgcagtgctcagaagctgcttattataatggaagcagtacaggcgttggagccag

SEQ ID NO: 184305 - DNA, 395 bp, Homo sapiens
tctaatttttggagtgtctggcctcttattgcctgtactctgccccactggtgaatttctagttcagtgtgtctcatggaaatctrttattttaaaggcaggatgtggatcaaggtagtttcaagcttgaggaagtcttgaggtgggataaagcacatggagcattgcaaaggttttttgttttgttttgtttgtgtgtgtgtgtgtgtgtgtgtgagagtgtgtgtgtgtgagtggctggctggaaagctgccaaatttctaataataaatgaatttgcctttatttaaagaaggaagtggtactttccctcacaatagagggaggagaaaggctgtctcctcaggattttgttaccagcaccacatctcccctgactggaaggtggcttgagt

SEQ ID NO: 184306 - DNA, 395 bp, Homo sapiens
tctaatttttggagtgtctggcctcttattgcctgtactctgccccactggtgaatttctagttcagtgtgtctcatggaaatctattattttaaaggcaggatgtggatcaaggtagtttcaagcttgaggaagtcttgaggtgggataaagcacatggagcattgcaaaggttttttgttttgttttgtttgtgtgtgtgtgtgtgtgtgtgtgwgagtgtgtgtgtgtgagtggctggctggaaagctgccaaatttctaataataaatgaatttgcctttatttaaagaaggaagtggtactttccctcacaatagagggaggagaaaggctgtctcctcaggattttgttaccagcaccacatctcccctgactggaaggtggcttgagt

SEQ ID NO: 184307 - DNA, 566 bp, Homo sapiens
gtatctgttccctcctttttattcttcccatgaaagcacacagatctaatgtaaatacagcttagaggagataactaaaatgtatagattgttctcaaagttaattttgtaaaataagttttggctttttttttttttgagacagagtcttrctctgtcccaggctggagtgctgtggcgcgatctcatttccctacaaacaagtagggaaaactgggtgtggatccaggcggaggttgcagtgatccacccacctctgcctcccaaagtgctgggattacaggcatgagctactgaacctgcccccgttttccatactgttaacatgtagtcatgtgccaattaatgacagagacacaatctgagaaatgtatcagtaggcgatttcatcattatgtgaacaccatagagtgaacttacagaaacctagatggtagagcctactactcccagactacaaacctgtacagcatgcgaccgtactgaataccgaagataactgcaacgacaagtatctatgtacctaaacatatctaatcatagaaaagaaacagtaaaaatacttt

SEQ ID NO: 184308 - DNA, 201 bp, Homo sapiens
gtgaaccgatgcaatcttcaaggtyaggatggtttttataaaggataattgtgataaagcagtgtgaaaaatggcttagaagagaaaaactaaagcttgtgaatcttaggtagctgcagtagcttcttcagaagagtgggtggatgtcctggaggcatagagggtggacttcacctggacttggtcacagaatgtgtctga

SEQ ID NO: 184309 - DNA, 551 bp, Homo sapiens
ttggtttatgaaaatatcataatcaaagacccacaggaataagtacctgtatttcctgtaggmgcaatggttcagtatccacttattcattcagtgttcatgttgattttacagacaataaccactgtgaataacaagaatcaactgtaatattcagtgcacgagcacaagtgctacaaatgaatttttaataaatttctgagcttgtgattattttctctgtggtggtgaagccaagatcctcatccaatgataacaagatctccttgtgaggatgtctagtgaaaaagtgaagtgattcagctgacattgacatactcagaatcaccccagattcacatgcaggagctggttttgaaatgaagactctagaacaggggtgtccaatcttttggcttttctgtgccacgttgaaagaagagttgtcttagattacacataaaataaactgacactaacaatagctaatgagctaaaaaagaaaaaatcgcaaataaatctcataatgtcagaagcatttgaaccagagcaactccatcgtgaataacagc

SEQ ID NO: 184310 - DNA, 429 bp, Homo sapiens
ccatttctttctccagctgaatcttttctttggtaatttcacagttttcttcatgtaaatattcatgtctttcttgatttttcctgcacaaaaacatgtctgcctcttacagtaggccaggacctgattaaaacagtatcccagaaaagctattagagcttatgcttccaaaccaagacccaaaacatctttgtgtagtgccaaagttgaaaatgttgtgaagtggtatgcttgaaagattttttaacaaaattataccacccaagattggtgagaggacctggaaaaatgtactcccatactctataaattctccaagaaaacattttggcaacgttgaccaatggccttaaaaatgttcatgtctttggacccaatayttcatctaggacttaatcaaggacttagtctttaggaaataatcaaggg

SEQ ID NO: 184311 - DNA, 594 bp, Homo sapiens
tcaggaaccctctagagaatcacactcatctcctccctgagatcaattatcttttctgatcttagagcagttgtatagcaatcccttcatcagacaggagcagctagatagatgtgcttctcctgtccagtttcagatatgtcgaatttggcctccaagaacttcttctctttcatatttgtctagactatatgctaagactttaatcattttcctaaagaaacgtctcccttctccccgttaatcagatgtcttcytttatttttatttcattcttccacttgctcctattttaatagtaagatcaacacataatttaaataaattcagttcctcctaattccctgagcaaacctgattattaaacacaaagtgttatgaagacagacctttatattgtcttcttttattctgatgggcagtaattatttattttcttcatcccaagaaaatgtcccacccctatttaacaaaagctcccaattcaagtttatgatgtttggtaaaacccatgacccttctctgtgggactgtaaggcttaggtctctaaaatctgtattgagatctaacctcatgtaattaacaaaaagcct

SEQ ID NO: 184312 - DNA, 592 bp, Homo sapiens
gccattagctctttcatcatagttaatgcatcttccatcaacctctgtacacacctctgttcttacatctgcttgagggaaaggatgacagagttcaaagagaaactacagtgcactttcyctaacagtgaagtcaaacactgaaaggcccataagaaccaaggaggcaccatgaatgcatgaagttgtccatgtggggactgtgctgaactgaagggctcctgccaccagttgaagggactcagctacagcggcccttgttctgcagaaatgtaggctcagtgttgccagatcttttgatttttcaaaaaaattcagaattccaaattagtatgtgaaatctcttcacctttttgaagtaagcaactaatacaaatctttcaatgaaataatgtggaccaaagaaaacccattatagctttatatttttagacaagacagtatttctgcccatgaaatacaagaccttgctttaagctgagtttagatgagtggtaagcatttggatttagtgttctaaggaaagggattttataatttttccccaagtccaaggcaatgaaataaaatgatggtatttataaggtcaact

SEQ ID NO: 184313 - DNA, 462 bp, Homo sapiens
catgaggcatattggcaggttgaaatgaattaatacacatcaagtatttagaacggtatctgcctcatgggaagtgctcagttacatattaggcattagtatcacatgtgacataactccaccaggtagtagagtacacaacaggatcaaagaactaagctttggttctagggctggcagttaagaaacgcaagaccttgttctctcaagtggtggcagggaaggtaaacaggtttctgtgagcagcctttgaagtttgccatggattgactcatgaggtattaatttttttgarccgtgactcatggttagctcagttggttcactgtacttatatagcctgggctctggtctgatcttcttatgagttttctcccccaccacttctctggggtcacagactgtatccaattcctgataagctactgtgcacatagctatacttagtctaaggaaattgag

SEQ ID NO: 184314 - DNA, 652 bp, Homo sapiens
aagactacacaagcacatgaatacttactccacttatttagggggtgagatacattggagtaacagaccctgtctctgcggggcttagttcaaattccccagacaatcaagttcatcccagtccatccaaccagttgtagccagagaggaagagtcatataagacgaacatggcctcaaaagccattctttcatttagagctatgtggtggagagaacaattcttagaaacaaagaaygttaagtcctgcagttttgttcttaagattgccttcgatatggtattagttttctactgatcctgtaaccatgtaccacaaacttaacagcttaaaacaacacaaatttattgtctcacagttctgttaatcagaggtctagatgggctcaactagttcctctgctttgggtctcacgaggccaaaactataatatcagacagtctgggtatttatttgtagtcccttagggataatctcctttcaagttcattcaggtttttgaatgaattcagttctttgcagctgtaagactgagttctccacttacttactggctgttatctgggagcctctaacagctataagcccacctgcagtccttgtcatgctgccctctctatcttcaaaccaccagcaatggtttgaagatga

SEQ ID NO: 184315 - DNA, 592 bp, Homo sapiens
ctacttgttctatatagcagaaataatcctttattaaaacaatagtttttaaagagagatgctcacttttttcaatattctagtcctcaaaatcttgactgcaattgtcatgatggttcgcctcattctcctatctctttataccagtacctggtgggcatctttatcttggaactyagaagccaattacagaaatattagtttgggaatgactaaagactttgaaatgagaactctaaatatatgggacagagggtcacgaaactccattgcctgcttctcaggaagtctactacgggcagttcttagtgcctagtgttgcctttcctggtcccatgcgactctgctgactcagccacactgcttggacctgtgattggtaacttagacaaaggcttgagattcacctaccctgccttcttttcttctctgcgggcttccctgtaattaacttccattacccgaggctctatctttcacaccaatgaagtctgaaatgagccggagtaacagttaagttcttaacaatttgaagaaaactatgtcatttaaaacatctgcatattaaggccaacacagacatatacaacac

SEQ ID NO: 184316 - DNA, 598 bp, Homo sapiens
aatggatttatgcatgtttttccaagaaatcaataaaattattaaaattcatagtatattamcatatataatatatattatatataacagtaattttcaaatggtagcaatcttccataggacacttggcaatatctcagtggatattggttgtcacaactggggccatgatactggtatccagtggttagagtcctgggggagcttttaaatatcctacaatcaatagaatagctcccatagcaaaggattactggcctgaaatgtcaataatacgaaggttgggaaaccctagtatacatacatagatgttatatatgtatgtatgtatgtgtgtatgtacataccaatttaaaaataaagattataaggtgtagagagcttaaataggaataaactatgctaaggcaactttctaagttgtttttgctctgtctcctcaaactgggtaccagaactctgatgacaactgtcaatctagagtccactgtccaggattatctatacaatgtatttagtatctctatagcaattgttttttaagaccacaaaagaatacctaagaagaccaggcctaggctagggagtaagaactatg

SEQ ID NO: 184317 - DNA, 551 bp, Homo sapiens
gtgtgagaattttatatatattaagatgagtttttaggtcactggtaaatatacttttaaataattttttgataaaatttactaaacatckagataaataaagctgtatatcttcttaaaatcttatgttacaataattttaaaattaaggaaagcatcttatgtataaattaagctataaaattatagaataaaaattaaattgttataacaaaggtgaagtctttctaagaaagatgcaaagtcaagaagccaggaaacaaaaacagaataaaggtactagaattagtgtgtgtgtgtgtgtgtgtgtgtgtgtgtgtgtgtgtgtgtgtgtgtgtgtgtgtatttgacattaccaacttgcaacgatttggtttcttgtttccaaaagtctttcatgtttgaaatgagggctatgaaatgccatcttcctgactgagttctgccatcacctctgggactaatcctataataattcacacctctattcctcttgtccaagcaaggcttacttttggttccatgttgaatttgtttgctggtttcaaaaa

SEQ ID NO: 184318 - DNA, 551 bp, Homo sapiens
gtgtgagaattttatatatattaagatgagtttttaggtcactggtaaatatacttttaaataattttttgataaaatttactaaacatctagataaataaagctgtatatcttcttaaaatcttatgttacaataattttaaaattaaggaaagcatcttatgtataaattaagctataaaattatagaataaaaattaaattgttataacaaaggtgaagtctttctaagaaagatgcaaagtcaagaagccaggaaacaaaaacagaataaaggtactagaattagtgtgtgtgtgtgtgtgtgtgtgtgtgtgtgtgtgtgtgtgtgtgtgtgtgtgtgtatttgacattaccaacttgcaacgatttggtttcttgtttccaaaagtctttcatgtttgaaatgagggctawgaaatgccatcttcctgactgagttctgccatcacctctgggactaatcctataataattcacacctctattcctcttgtccaagcaaggcttacttttggttccatgttgaatttgtttgctggtttcaaaaa

SEQ ID NO: 184319 - DNA, 495 bp, Homo sapiens
tacccactgagctgactttcattaaaatgttttttattccactgtaaaaactaaattgaccaaccaaccaagtagacgttcctcagaaatttatgttaacagaatgtaagaattgtcttttaaaacactaaaatttttaattggctctttttaaaatgattggttaatcaccttaaataataaatgcaactgaaaaaattatttagattgaaatccattcataggactgatatatgtttatggctaaataaaatattaagacaaattaagttattagcagatgctattttagtcccagatggtgatctttgtttgcacacttattaaccaattcattttgcaaggctttgttttctcatcctatacaaacctaaatacaggaacccaggaaaggaccatttctagaaaaccagtrtgccagtgtaatgactttgatgatgaaacactgtatatctttgtactttcatttcctatacatataagcatgggtttccc

SEQ ID NO: 184320 - DNA, 548 bp, Homo sapiens
atacaaaataattctggtagtggcaagaggtagtcttttgcactaattgtgattaatattcaagaataataattgactactgcttaagaatgttctccacctgattctgagcagagcttcctgaaaagcctggcctgattggtcttggtgtccatagccctcatgtgatacttatgcatgcagggccttagtggccgggaaccaatttgactgccttcccagctttctatatcctaaatctctattagctratagcaattttaggaggtctgaatgccagggttgaaaatggatctgccaaagttttatctattaaaaaaatgtatatcatgaggattgttttcccatggaacactcttcagagacagtgcctgaacaaaaagaaaaattcctagagaaactcatttattatcacactctagtgttgataaagatagcccctgggatgagcccagaggcagctgtgcttatgtaaaggtcaaataagggccagcagcatcaccagctattattaattatttagtaattagccattctttacctatctc

SEQ ID NO: 184321 - DNA, 548 bp, Homo sapiens
atacaaaataattctggtagtggcaagaggtagtcttttgcactaattgtgattaatattcaagaataataattgactactgcttaagaatgttctccacctgattctgagcagagcttcctgaaaagcctggcctgattggtcttggtgtccatagccctcatgtgatacttatgcatgcagggccttagtggccgggaaccaatttgactgccttcccagctttctatatcctaaatctctattagctgatagcaattttaggaggtctgaatgccagggttgaaaatggatctgccaaagttttatctattaaaaaaatgtatatcatgaggattgttttcccatggaacactcttcagagacagtgcctgaacaaaaagaaaaattcctagagaaactcatttattatcacactctagtgttgataaagatagcccctgggatgagcccagaggcagctgtgcttatgtaaagktcaaataagggccagcagcatcaccagctattattaattatttagtaattagccattctttacctatctc

SEQ ID NO: 184322 - DNA, 606 bp, Homo sapiens
ggtacatgactgggggctgcatgcactggtaatcagaacgaaacagaacaggatagggatttttacactgtctttccatacaawgtctggaatctatagataacataaccagttatgtcaggggtcgatctttaagtaccaggcttaggtcaggcaggcccaggcctggtttcgggtctggttccttggtttcaggtctggttcctaggtgccgggctacctgcctttaatttcgcttctctttccttttctgagtataaaacaatataaaacaatatgagagggtctgtctctcttctctcaccatactctttagtaatgagctcaaatctgttattattgtcttatttgttgttttataaatccctttccattttgtgaatgtttgatcttttctctggggtcaagacttctggtagaactcacgtttactttctcctcttggactcaagattcctaaggtagcccagccagtggctcaggaaatcagcttaagcggagatatgtttcatgtatttatttaaaaagatacaaaacatttctcccatcatttttctattttgttagccaggagaagaaaacctttaaatttattttttctggtct

SEQ ID NO: 184323 - DNA, 581 bp, Homo sapiens
ggcagagattgctagctgatcaccaaatatgtttccatctcttccggtcatatgactagacaacatttctcagctttctcacagttaagtgaagccatgtgactaaatactagccaattaaatgaaattggaggtaatttttgtcgcttgtaggcttgacccataaaaaactccccaggcagaatcggtatgatccttcttcggtggcttgacaaccttagaagtcatgtgttgaaagtgtcacaacgtggaaagagcctgaggctctcccttaatcactgtgtggtggaagccacacttgtttaggttttatgtgaaccaaaaacaagtgtccattgttaaggctgagattttgaggttttttttttttkttttttttttgttacagctgctaatgttaccttaactaacatgaggttgtaaatcagtgtgtggtgagatcaatttagtgggttaggaccagcatttttagatagaataaaataggaaacctggtttgtgtctgaccacttcatgcagacctggggctccatccagtaaattaaaccccttcccaaataatttatggcacacatagggtg

SEQ ID NO: 184324 - DNA, 424 bp, Homo sapiens
aaagtgcacagcagagcaagagtatatgggctttagaagcagattaatcctgaccaggtctttcaccggctgctgaacactccttgaacactyacaatgcatgtggcagggtgctcagtgtgttccacgatatccccattttccagataaggaaactgaggcacagagaagtaagtaaactgcccaagaccacacagagagttaaatgggaaaactaggatttgaacctgcatatcctaaggcctgagttttgttcctaatcattattatgccaaactgcattgcagttttttttttcaactctgtctgatgattaaaattctctgtaagatcccagccaaatagctgagtcaaaataattataattaaatcctccatttgtatagggctttgcagcttacaaaatcattttatgtacagtatt

SEQ ID NO: 184325 - DNA, 424 bp, Homo sapiens
aaagtgcacagcagagcaagagtatatgggctttagaagcagattaatcctgaccaggtctttcaccggctgctgaacactccttgaacacttacaatgcatgtggcagggtgctcagtgtgttccacgatatccccattttccagataaggaaactgaggcacagagaagtaagtaamctgcccaagaccacacagagagttaaatgggaaaactaggatttgaacctgcatatcctaaggcctgagttttgttcctaatcattattatgccaaactgcattgcagttttttttttcaactctgtctgatgattaaaattctctgtaagatcccagccaaatagctgagtcaaaataattataattaaatcctccatttgtatagggctttgcagcttacaaaatcattttatgtacagtatt

SEQ ID NO: 184326 - DNA, 575 bp, Homo sapiens
gcatgaccttccatttgcaatatattctttcaggaaagggagtaattaggattgcctggaaggggctgctttatttcattgaggagataactttaaacaggcttcctcaccacrtgcaccacactcaacaagcaaactccctacactggactcctatagggcctaattctcacctcagccccagctttacccagattctctaacctgttattattaagctacttagctgccttccacccttcatccctagaccccaaacaccctagtagactgtgaattccttttattctttcatgtattcattcaccatttttttcaacacatgctatgtgctagcaacacaaagataaataaaacaccccccatccccataaagttgatagtctagcagcagtaactgacttattagtagatatttacagctcaatggccgacacatgcatggagcatccaagagaaggaagaggatgtgcctaaccagcgtgaagccaggcaacagggtttggaggacattgcaagaagagtgggtggcaggaataaaggcactaaccatggtgaaaagggacacagagtca

SEQ ID NO: 184327 - DNA, 518 bp, Homo sapiens
aaacattctttacaggggtttgaaaggactcatcttaacaaagaaaacattcataaaagttaaatgggaaactgaactcacagattggatgagtaataaaaagcttattgatacctgatttctgaacaaagccagaaaggagaaggtaaaacaaaaggaaaaaaaatwaaaaaattaaaaaaaaaaaaccttgaaattttgaggttccaaaatttggaggcaaaaaaaaaaaaaagattgaaagatttggaaagcttcaaagagagaaaaggacatcgtacaactgctccacagcagcagagttccaaggggtgggaggacatttggaaagcctggttcttccaagatcctatagccactcacttgttcaatggggagctatatcctaattcccagcccagaatcttgatttagatttaggctgacaaacgcctgcacagctaggatcctgccagtgacagagtagaggctctgctgatactgtgcagaaaaccaccaaaccgcctaccccccgtcat

SEQ ID NO: 184328 - DNA, 452 bp, Homo sapiens
tcttatctctaaaatagggatgataataatgcctacttcaaaatgctgcaaagattacatgaatttttatatgggaagcacttaaaacaacacttacctatcacacaggaaaacaccaaataaatgctagctgctattatgctatggtcctttttaggaaaaaaagaaggtggtttaatacaaaggttcctatcagaaaaacactgcagaaaggccgagaatagtagttaatgctagcattgatttttgtgtcctgtattaaatcatcatgagatgtccacttctgctatttttgcaaagttgaccatttggttaactgaacaagtatcgccatctatgwtacaatacaatacaatacaatacaatacaatacaatacaatacaatacaatacaatacaatacaatacaatacaatacaatacaatacaatggcagtgttgaatgctggaaa

SEQ ID NO: 184329 - DNA, 605 bp, Homo sapiens
tagcttaagaaaagtcccagctggttcaagtgacttaagcccagctattcatgaaatattatctgacagctcccccttctcctcaagtggctggggagtgagtcacaattgccccagaaacctgtgttctcatatgggattttggtattccaggtttgctctactttgcacactggacagcttcatgaaaagccatatttggtgcagacattttcttgtgatgataaaagcatttagtaaatgtactgggaagcttgccgtgatgaatccttttgttaagaaattaaccaacattaattttgaatgtaggactgtcccacgtgcccagcactgtgcttgctgatgtgggggttcagagattatgagayatgtgaaacactagaatggaatctccatgaaggcagcgatttgcctattttgttttctgatgaaactgtggtatatgtaacagtgtctggcacatagtggatgcgaaatagatatttgttgaacaagtgagtatgtctctgcccataacagcttacaacctagtttgcttgcattaattaatcaactaattattaattaatgaatgattttattcctttattctacttgtatgagca

SEQ ID NO: 184330 - DNA, 607 bp, Homo sapiens
aagaggaagaaagagagaaggagagggaaaactactattaatactattactacaactaccactaataataataatattgggaagaacaagtagcagcctctgccacagttcaatatgccaggtacagtgytggagagacatgaataaatttcagtccctcccctcaagaaactcagttattactatgaactgaaaagtgtccacgcatctttgtatctccagagaccagcacagatccctccactctatttaccaaatactgatgccaaccagcagcaacaataaatatccccaccccaggaccaatatgcacctggtactgaacagtaacttgagaaacaaccatgcgtagggcatcatccctgccttcaggagtgcccagtctacacaaggagacaagatggggcttacacatggaaagatgatataacaaaatattgcaaagacctatgccaagtgagggaaatcgctctaaagcctgggacagccagaaatggctctggatgaggaagaatgacattacttggctcatgtcagcaggacacatcttagatgagatgctggggtatgtgaaggcagggcaatgaaaagactgatgctagcacaa

SEQ ID NO: 184331 - DNA, 364 bp, Homo sapiens
cattcacccacatgcatttacatatcatctgtgactgcttccatgctaccatgtcagagttgagtggttgtaacagagaccatgtgggctgcaaaggtgaaaatatttactagctagccctttacagaagaattttgctaactaacctgtcctagatcataaactctaggagggctggggacattgaaggtaktcagtaagttttgactgaatgaatgaatgaatgaatggatgaatgaatgaatggtcaggaaattggaatttgttggatatgtaatttgacagcagacttttaatgacacacttcaggttccattttccctttaaataaaataagaacagtgctacctatgaaacaggcagt

SEQ ID NO: 184332 - DNA, 211 bp, Homo sapiens
cgcaccctctgcggctgacaccatagaaatgaactcatctttaaatctgccgtgctkctttttgctttcttctgccagctggtccttggcaaagctacttgataaatccaaacacatcagtttcactggccactgaagggcctgtgcttttgggaaacaggcttgccataaagctagtctttgtgacggcagcttctggtctctcctgtca

SEQ ID NO: 184333 - DNA, 513 bp, Homo sapiens
gcctccactgtgctaccccagtcaaagccaccacaatctcttgctagatttgtgcaatggtttcctagacttttctcagcaccacagccagaacaatctgttaaaaagtaggtcagggaggtataaattaattcacttccctttaagtgtgggctagatttagtgacccaaatccaaagaatagagaaggtaaagagacaaatagtaaccttacagtagagaaatcaggcaaataccaccgtaaccaaatgatcaaggttcacataaccagtgacacatcrtctggatattatgtatcttgtgatatgttgtgatgaaaagagcagcttacctctgtgacattcttctccaaaatcataaacccagactaatcatgagaaaacattagacaaacccaaattgaggtatattctacatcataaccagtactcttcaaaaatctcagtcttgaagtaaaagaaaatattgaagaaagacccaaaaagactaaggagacacgataaatacacgcag

SEQ ID NO: 184334 - DNA, 656 bp, Homo sapiens
caggcagctccagcccacattcgctcccacatgtgaatactgatttcatgctggttgattttattcttatgggcctaaagagaggacaagaatgaagaagaaaccatataactagaacaacagaaatcataattactggtgcattccacacaatattatacaccctaagaatggcagagagaagacagaactattcctcattggtttcatttttctctatcaaggttagtttttaaaaatacataaagtatgggaacagaaaacaagactgagaaggaattacagcctgatatggtttggctgtgtccccacccaaagctcatcttgaattgtagctcccagaattcccatgtcttgtgagagggacctgatgggagataattgaatcacgggtgcagtttcccccatactgttctcgtggtagtgaataagtctcacaagatctcatggttttataaggggtttcccattttgcttctcmttctctctcgtctaccaccatgtaagatgtgcctttcgactcccaccatgattgtgaggcctccccagccacatggaactgtgaatccattaaacctctttttccttataaattacctagtcttgggtatgtctttatcggcagcgtgaaaatgggctaatacatacccctagct

SEQ ID NO: 184335 - DNA, 583 bp, Homo sapiens
ttttataaggggtttcccattttgcttctccttctctctcgtctaccaccatgtaagatgtgcctttcgactcccaccatgattgtgaggcctccccagccacatggaactgtgartccattaaacctctttttccttataaattacctagtcttgggtatgtctttatcggcagcgtgaaaatgggctaatacatacccctagctagaataaagcctcataacataatgtaaactgatctccaatcccagaggaaactcctaggtttagatgaggtcacaggaacatttttggttaaccttgttgacagtgaactctggcatctctccaaagttgcatacttattcagacaaattttgtcccaaatcttaatatacaaatatagaatctaaaaatattactttataatgtcatttccagaaataatgggagatgtattaatgaacaagtgtgggaacagagggaccctatactgcttttcaataattattacactttttcagaaacttctatccaagtccggtcattcccttttgtgtggctgtgatggagccagcgagaggaatgctgtgtgtggacacca

SEQ ID NO: 184336 - DNA, 539 bp, Homo sapiens
catgtaagatgtgcctttcgactcccaccatgattgtgaggcctccccagccacatggaactgtgaatccattaaacctctttttccttataaattacctagtcttgggtatgtctttatcggcagcgtgaaaatgggctaatacatacccctagctagaataaagcctcataacataatgtaaactgatctccaatcccagaggaaactcctaggtttagatgaggtcacaggaacatttttggttaaccttgttgacagtgaactctggcatctctccaaagttgcatacttattcagacaaattttgtcccaaatcttaatatacaaatatagaatctaaaaatattactttataatgtcatttccagaaataatgggagatgtattaatgaacaagtgtgggaacagagggaccctatactgcttttcaataattattacactttttcagaaacttctatccaagtccggtcattcccttttgtgtggctgtgatggagccagygagaggaatgctgtgtgtggacaccatcaaa

SEQ ID NO: 184337 - DNA, 560 bp, Homo sapiens
gttctgtaacaacaaagacagaacagccactgagagaaagaaacagagctgagttcctcctggtccctcccactccaggtgcaatgagacagctctgggctacccaggccttcctgtctcccattgtttctggccgcctgcatgattttaccttcctgacacactctttgactttttatgaaatgatgaggaattagcttaagtctcagtcagatgtaaaaacaatatctgtcactaagtctctctgctatgtctgaataggaagaaatacctaatattttcagacagggaaaagggaaaaatagatgaacaggatggacaaataaactttgtagtttaagtaaattcaaatccacttgacatttctcatatgctctgcaaaggacagggcttgtstaataaacctgttaccagccaccttcctgccactgctttacaggagtttgttctctaatgatattgtaagtgttgaaatggcagttgcatgcaatattttacaaagtaaatagttctaagctcttgaataaagggagaagttgataactggaaaaaactattca

SEQ ID NO: 184338 - DNA, 560 bp, Homo sapiens
gttctgtaacaacaaagacagaacagccactgagagaaagaaacagagctgagttcctcctggtccctcccactccaggtgcaatgagacagctctgggctacccaggccttcctgtctcccattgtttctggccgcctgcatgattttaccttcctgacacactctttgactttttatgaaatgatgaggaattagcttaagtctcagtcagatgtaaaaacaatatctgtcactaagtctctctgctatgtctgaataggaagaaatacctaatattttcagacagggaaaagggaaaaatagatgaacaggatggacaaataaactttgtagtttaagtaaattcaaatccacttgacatttctcatatgctctgcaaaggacagggcttgtgtaataaacctgttaccagccaccttyctgccactgctttacaggagtttgttctctaatgatattgtaagtgttgaaatggcagttgcatgcaatattttacaaagtaaatagttctaagctcttgaataaagggagaagttgataactggaaaaaactattca

SEQ ID NO: 184339 - DNA, 575 bp, Homo sapiens
tattacatctaaaggtagtatggaggattggcatgatcacagagtttcaaagtagaacttggtacttgcttttgtagttttatttcctcatttatcaaataagggggttagactgaataatccctggttacataacattctaaaagctaaatcttatcagcatcatagttgtgtattgatctaaagctattaatgatgatctgtaataaggataacaaatgtactgtgaattgacaatatttctcttttctgattttctgtaagttcttcatatgtcttaaaccatggacttttctggtttttaggtcagatacatttcttgctgataatggataatctatttccttacartaagcagcagttggaaaacagcatattcagaaagcatgttaatggatgtttggataggcatttcaatgatgattgctttagtaaagcaataataatggggcaatgtaatgaagagaggtacaaagacaaagcaataaaaagaaaggcaaggataaagatagagaatgagaaaaaataaaacaggctcaatgtgacatctgtttggctctggaaaggcttaatga

SEQ ID NO: 184340 - DNA, 575 bp, Homo sapiens
tattacatctaaaggtagtatggaggattggcatgatcacagagtttcaaagtagaacttggtacttgcttttgtagttttatttcctcatttatcaaataagggggttagactgaataatccctggttacataacattctaaaagctaaatcttatcagcatcatagttgtgtattgatctaaagctattaatgatgatctgtaataaggataacaaatgtactgtgaattgacaatatttctcttttctgattttctgtaagttcttcatatgtcttaaaccatggacttttctggtttttaggtcagatacatttcttgctgataatggataatctatttccttacagtaagcagcagttggaaaacagcrtattcagaaagcatgttaatggatgtttggataggcatttcaatgatgattgctttagtaaagcaataataatggggcaatgtaatgaagagaggtacaaagacaaagcaataaaaagaaaggcaaggataaagatagagaatgagaaaaaataaaacaggctcaatgtgacatctgtttggctctggaaaggcttaatga

SEQ ID NO: 184341 - DNA, 582 bp, Homo sapiens
gtattgccctgaatgaaaagtaaaatcattttctaagtaatttctggttttgttaaaccaatgacaaaattctaatttcaccatcatgacattctgaactaacacagaacctccaacatgaaaaacatttatatatccatgttttaatcagcatgttcatagtagctcataaatttctgaacatttaaccattaactcttgccagcctatacaagctggcttcagcacacattactgcaattctgaggtaccagaaataatttatacccagattaataagagatatcaagttggacctgaaggcatgcaaatagatataggtcttagcgaatagtggctgagattttaatgtccactcagagtaagatatatggctatggaggrgggggatatagaggagagtgggcactgctgtgaggctgcttgctgaaaccagacaccagcaaaaagctgagaccctgtaagagctgcccagtttgtcaaagaggtaagaaaacaccgtaaatactaagaattaacaaggaagcatgtctttcctttatgctttgggaaaaaaaaatccaattaagaactgaaactgaa

SEQ ID NO: 184342 - DNA, 503 bp, Homo sapiens
agcaaccttatccatactcttgcctctagaacactgaggacttcaagtacatatttcaaacttctacctttcttctgagctttagatgcttatttccatcttccaaccctaactcaaaagtcattccatctcaggaagcttttctaaatcttcccctctgcacttgaccaaagttacatgctctatgtgtttcaatatcactgtttcatacttttatttataatgttcacctcattgcaatgcaactgttgatctacgtatcctttttaccactggaccagaatctagttaagaacagggaccttatagtctccagrttgtgaaagagcttgggccctacagtcatgttttttcagtatgtgctgaaataatgcaaggtaaaaatacatagagaattcaatttttttaattaatttatttttttgcttataaacaacagatttttgtttttcatagtcctagagctgggaagtccaagatcatagtgcaaacaaatttagtgt

SEQ ID NO: 184343 - DNA, 503 bp, Homo sapiens
agcaaccttatccatactcttgcctctagaacactgaggacttcaagtacatatttcaaacttctacctttcttctgagctttagatgcttatttccatcttccaaccctaactcaaaagtcattccatctcaggaagcttttctaaatcttcccctctgcacttgaccaaagttacatgctctatgtgtttcaatatcactgtttcatacttttatttataatgttcacctcattgcaatgcaactgttgatctacgtatcctttttaccactggaccagaatctagttaagaacagggaccttatagtctccaggttgtgaaagagcttgggccctacagtcatgttttttcagtatgtgctgaaataatgyaaggtaaaaatacatagagaattcaatttttttaattaatttatttttttgcttataaacaacagatttttgtttttcatagtcctagagctgggaagtccaagatcatagtgcaaacaaatttagtgt

SEQ ID NO: 184344 - DNA, 578 bp, Homo sapiens
gctttccaaaagggagtgcaaaaaaggtgaaaagggaagggagccccttggcccagcactaccgtggctactttagcttcctccatcaggatctgtgtttgtgtacctagcagttcacttcttctcaaacatatcattatcctgtgcttatccatttccatttattggaaataatgtttgtttaaagggaatattaaaatttgttactgggtgcattgacttaatttgatatttattgaatgcccactatcygcctattgctgttattaaaaagaaagacaggtttttgcttttgtatagcttacattcatgtgagagtgtgtgtgtgtgtttgtgtgtgagtgtgagtgtaagagagagacagaccagtgccattagtgacatgaaatatgaaaaaagagatggagaccaactaggggctgaggacaaaaatggttttagacagggtcatcaaagaaagatcaaattaaatttgatctgagtcctgagttgtaagaaaaattacagaagggcaaggagcaggtgctggaagcagagggaacagcaaatgccctagaatattcaagcaaaagaaagaa

SEQ ID NO: 184345 - DNA, 621 bp, Homo sapiens
aaaacatgacttattttctctgtcaggaattacaaaatgtgcattttttagcagatgctaattgtaccaatgggatttgtccaaaccactctcatctgggatgtgtttaattcttactacatcagcacatctattcttcctctgaggcttaactagaaatgtacataataaaccttatttttaccattacatgaagtgcagtgaatacatggagctgttagttccttcagtatctatcagggacatactctgttacattgcactgttataaagggtgtgggcaggtgtcacgtggttgagaaaataatctgaactstcatgaagtgatttcagggtaaggcaacatacgatgatagaatgccatttggggtagtaaataatgacaattagggaccaggaaatcactccataagttgccaactatacagtaaatataaaacatttaaagcgagttagagaatggagagactccaaatgaatatcaggtttaatgttcaagggcaagaaactgttaagaaaacccaaggatacatcttgctcacaaactcctgtgtatttatctgggaccatgtacccttcaagaatattaatgacagcatagatttacattatactttacac

SEQ ID NO: 184346 - DNA, 503 bp, Homo sapiens
tctttggcctaagcaggtgccctcctgtgggttgtgtggatagagagccccgccatgtatacaatgaaagaaaagctgaaaacaacaaaggtcaattagggagttaataacttgtttgtatttacagtgaagatatgaaaagccagttcccacagagggaatggttcaactgcacagagaataaactgtactgtcgacagacttcacaaagtagtcacatacacacygattactccctctaggtctgacttctgttaaaactgtaaaataatttttatttatcctctttgtcagacaaagccagccaaactcatagggggaaaaattgctttttaaatgaataaaatctctatttcaagaaagacaagcatttttaaaaattagtcaatttaaaatttttaaaatttagtcactttagtctctgggcatcttctctcctcaaaattgtcttgtttacccctctttttgccttctatttgctatgaaaaagagtaaatccataa

SEQ ID NO: 184347 - DNA, 532 bp, Homo sapiens
attgaacatcttaaacttccctaagccttgaccaccataacaccactttatcctgattctcattctacaccctgactattctttcttggtatgctgcattgatacttctacctctacttcctcttgtttccttggactacttccattatcattctagacctcccttctggtcattcacagggcctcagttgccatctatatgtgaatgactctcaaacctcactttcaccagccagtttctctgtgagctctagatgtatacacgcattcaactgtctgcaggacttcrcctccgtgttccatgggtacttcagggtcaatattgagaaaaccttttctcttccttgggttgcctgtctcatattctattaccaagatgcaccatgtttcacaatttaaaaaattggaaatatcttaggttacttgcctagcagatagaggacaagtacccagatctcttgcctccaaacccaggactctgactcagtgcaccatattcagcagtgtacaacatgtgctttcaactaataat

SEQ ID NO: 184348 - DNA, 542 bp, Homo sapiens
ctatttgttgaaaagagtgtcctttccccactttatgtttttgtttgctttgtcaaagatcagttgactgtaagtatttgggtttatttctgtgttctctattcattccattggtctatgcacctctttttgtaccagtacaatgctgttttgctgactatgggcttatagtgtagtttgaaatcrggtagtgcgatgcctccagatttattctttttgcttaatcttgctttggctatgcgggttctcttttgatgttatatgaattttagaattgttttttctaattctgtgaaaaatgatggtgatattttgatggggattgcagtgaatttgtagattgctttttgctgcatggtcattttcacaatattgattctacccatccatgagcatgggatgtgtttccatttgttcatgtcatctatgatttctttcagcagtgttttgtagtttcccttgtagaggtcttttgactcctcggtttattgctaagtattttattttattttttgcagctattgtaaaaggggttgggttct

SEQ ID NO: 184349 - DNA, 559 bp, Homo sapiens
tagtcagtttcttctgaatgatacatcatgaggcaaatttatatttgtattacctaaccttaaaatccagatactggggcaatatcggaaggagtgtgtgtgtgtgtgtgcgcgtgtgcacgtgtgtgtatgtgtgtaacctcccagcaaaaatgtttgcccagggctctgtagtgttctgaaatcatttttagtgttgctagtgttttagaattctgaatccatttgtattaccctttaagacctccaatcctttcttcaattcctttttacatacagaggatctgggtgttactcccactggaattctgggaattaaaatatacagacaattttaatcaygtgatggtgattcatttcctaagatatttcacatgtaataaatatgagtgaaatcaaaggataattttcaagatcagagagctgtttgtaattgtgcatcatgccaaaagtacactcacctgtttcctcaccaaattatgctcaatgagaaatgtttattctttgttcctgactagaactttttgtagggaatatgcccatttatatctcaggcaaa

SEQ ID NO: 184350 - DNA, 622 bp, Homo sapiens
acgtgaagaatacaaaatggggttatcagagggggcaggaggggtgatgaaactgattccaactcttaagtcttctgaaatatggaggatgggcttcccgaacccctcatatctttcttcctgtttcatagagtataagatgacaagcccccaggtcacccatattgtgctctctgtcatttcctcagaggcctgatggrtgattctgtagtaagaccactgcagagacttctctaatcccaaggcagaaagtaaataattaaatgcatgtttctatcattcttctttatttatatgaggttgtgaatagtgaattaatagctccaaagatcccactcataatgaagtaaaactggataacaattgatttgtatctactgctattgtgcttaaatcactatgtttctctatttgcttttcagtctcagacaggagtagtccaggaaacataaaaataaaaaattttaaaatgagaaggatttttccccccagtgtctttgtttacagtacattttcacattgatacatcattgtgaacagattttgatgggttttcagagcctccttcacaatcagtcctctgtccccccaaacaaagaaaaatgtcacaaaccaataatac

SEQ ID NO: 184351 - DNA, 522 bp, Homo sapiens
ctagtatttctgaatgggccagaaatcagtgaaaatggcctctctctcaccatgttttggcatttggactataagaaaaagaaaaagacacagatttattggcacttttcccaccatccttcatcaagtgcacttggctcagcacctgatcacatgggggctctggggctctgccttcacacttgtgaaccaatagcaagctaagggaactgggctttattttcccygagttcttacagcaacagtggacagtggaggtaaatattccctcctaagaataggtggacaggagagttactgtgtctcttctaagatttttcatcccttgagaatcttactggaatcactttcatgaaaagaataagtgaccgtggttaagttgctcattggtatttactctcaaaagtgcagactagagagatggagtaggagggagaatgttttcatagcacatctatggactccttcctcatccgtaccataaggcatgtgggaaaatgttttagtgtgggtcacttgtct

SEQ ID NO: 184352 - DNA, 491 bp, Homo sapiens
gtctgtagtcctttattacagattatttttgacttctgatggttggttctgttcttctctttaatattatttttttctgtagattatacattcacatggtacaaaatgaaaaaggtacaaaaggaagagtagaatgtaaaaatgatctctcccaatcctaaactccagactcccaatttctccattctggatcaacaaattttatcactgtagtttacattgttacagaggtatttcatgcatatgtaattaaccctgaatatatatggatctacatatatttactcttttttatctcatattacgcaaatattagggtaccaatgcacctgtttgcactttttaaacaattaatatgggagcctttccatttaagaccatgaatagcttgcctcattccttyatatattgttgcatagtgctccattgtaggatattctgatttaatcattccccattaacggatatttagattgtttccaaaattttgc

SEQ ID NO: 184353 - DNA, 501 bp, Homo sapiens
ctgtaaataagcagttggactaggagaacttgatgatgctttagaagatttaatgacaagatcaacataatgatgatctattaaataccatctttgaaatactttttttataaaataaaattattagggacctgatcagaagatgttaaaaatatgatttaataaatataacctacaatttaaggaaaaaattagaatattatccattttaacttttaagtaagtaatataactcaacagtattttggcaatgattcaaattataaagacagaatatataatgatatgaatttaagayacatatatatgatgactatagagtatatcttctttatatcacatttgattataagtttttgatacactcataactgttatttatgttgaaagcatttaaattgaaaacttgatattgttacaggtatttatataaaagcatttagccaaaccaacaaactgaggtgttcaagttttggtctgtatagtgaaggtagtatgaat

SEQ ID NO: 184354 - DNA, 420 bp, Homo sapiens
tattcactgccagaattgggacagtcattcaaagaatggataagttttagaagataacggttagagagaaaagcatgaaaggcctcattttctattagcaaaattacaagaacatttttgaaaactgagaaataaaatttgaatccaaaggaaatattatgatagctcaatttcagtcttactggctactgtaattgtgtggcttaaataactacgtgttgggttaacagtgtctaatgtacagaacaaagtctcttaatataaaatgatagtggcagtgaactgaggacctgctgtataccagagactctgctcrgtgcttcacgtacattatcttattctctcaatactgctgctatggagatattatccagagagtgatatgtaactgacccaaggtcactacattataatttttga

SEQ ID NO: 184355 - DNA, 461 bp, Homo sapiens
aaattatcccaggggatgtggtcactttttcttgagtcacatgagggagagatgcttgctgaacaagactgggttctgcaaggaagagcgagacagagagagtaagagagagagaaagacattgaaatggataaagcaaaatacagtatatctatccaatgggatattattagacaataaaaaggaatgaaagcattgatgcatgctaaaacatagatgaactgtgaaaccatcatggtaaattaaaaactccagtcacaaaagactgcatattatatgattttatttaattgaaatttacagattaggcaaatctrtaaggaaaaggtagtgactactaatgggtacaaggtttctttttgaggtggtgaaaatgttctaaaattagattatggtgatggttgtacaactttggaaatatattaaaatcatttaactgtatacttgaaatgtttaaatga

SEQ ID NO: 184356 - DNA, 491 bp, Homo sapiens
cactaaaggaagcattcttttcactttgtatttcagtctctctggggtcattggtggaaaatggcaaagcagtctgtgaagcagaaagtgcgtgtatttgttgagcagtgtcttgtgggtagaacactgaaatgctgaggggtgaaaaggaaaactggctttcagggagagagggaaaaatggactgctcgtcactcttttctgatcttcttaatgaatgacccctctcctctacttgttatttgataatgactactcaaaatttcattgttcccttctttttagctagaatgggtactaggaaaaaagttcatgcatttgtccgtgtcaaacccaccgatgactttgctcatgaaatgatcagatacggagatgacaaaagagtaagtgcgatgtgtttgccttcamctgactgggcctctctgtcccaccttgctatagtgtgaccgtatttccaagcaacctttgaaggaccaagacagaattggaca

SEQ ID NO: 184357 - DNA, 190 bp, Homo sapiens
tgtctaatatagtagccattagccacatgtgactatttaactttaaaattaaattgattaaaattaaacaaaatttaaaattcagttcttcagtcccactagtcgtatttcragtgctcaatagccatctgtgtctagtggctaccattttgggcaatacaaatagaaagaacatttgcatcactgcaga

SEQ ID NO: 184358 - DNA, 560 bp, Homo sapiens
agtacacagtctgtactcaatcgacctctccaatcccaccttccaccttgctcctctatgtcttacttatttaagaaacactgtaggtgtactttcatgcctgggcctctgaacactctcccctggcctggaatgcctctttccactgtgcctgtctgtcaaagtcctattcatcttgcaatgtaccaactaaataccatcctttccatgmaacagtcacaaaccctcagaactgtaaatatcagctactcctttgatgttcccttaggcctctggtgatgcctatgcagttacagaatttatcagactctgccttttctcataattattaataattgatgcataatctatcttccccactcatctataaatgccaaagacagaggctgactcccattcacagcagggtgtctcatgcacctacaagcaccaagcacaggtaaatgcacttatatagtatgttgactgaagaagcatctcaaacataaggtcaggggttagttaaggtaattcagtaaatacttttaagtgcttgaaacatgctaagaactatactaggt

SEQ ID NO: 184359 - DNA, 622 bp, Homo sapiens
ggccaggcaagactgcagccccatgctctttccacctcactacctcactgtctctttcttcttccaaaggaaaagccaggagttgagagcagtggcatgagaarctccaggttatgtctctaggagcaaaattcagaccactcactgtatactgttcaaaggacgacttcattcctgctcccctgtagacagaaagaccttctccctgggaagcaatagcagtaattctcagggtcgggtcattctgaactctctgagcctcagtttcctaatctgtaaagtcaggatatatcacagcccagcaggactccgaatgtgaccagagtgtatgtgtggaggcctctgagccacagctatcattaggattgcagcaaggagaaaggctggcctctctgagccaccttctgctcacttctcctctgaacagctcaggacaaaaagagctggagggagtaattatgtttgtgctgctggagtgggctcctgtgcagggtggggggggcatcacattttgccagcactccccataggtgggagaatgtaccctgtgacttagaaaccttaagagaaaataagcatcgtctcaccctcagaaggatgtgatgtgaagcagagggcatgt

SEQ ID NO: 184360 - DNA, 622 bp, Homo sapiens
ggccaggcaagactgcagccccatgctctttccacctcactacctcactgtctctttcttcttccaaaggaaaagccaggagttgagagcagtggcatgagaaactccaggttatgtctctaggagcaaaattcagaccactcactgtatactgttcaaaggacgacttcattcctgctcccctgtagacagaaagaccttctccctgggaagcaatagcagtaattctcagggtcgggtcattctgaactctctgagcctcagtttcctaatctgtaaagtcaggatatatcacagcccagcaggactccgaatgtgaccagagtgtatgtgtggaggcctctgagccacrgctatcattaggattgcagcaaggagaaaggctggcctctctgagccaccttctgctcacttctcctctgaacagctcaggacaaaaagagctggagggagtaattatgtttgtgctgctggagtgggctcctgtgcagggtggggggggcatcacattttgccagcactccccataggtgggagaatgtaccctgtgacttagaaaccttaagagaaaataagcatcgtctcaccctcagaaggatgtgatgtgaagcagagggcatgt

SEQ ID NO: 184361 - DNA, 622 bp, Homo sapiens
ggccaggcaagactgcagccccatgctctttccacctcactacctcactgtctctttcttcttccaaaggaaaagccaggagttgagagcagtggcatgagaaactccaggttatgtctctaggagcaaaattcagaccactcactgtatactgttcaaaggacgacttcattcctgctcccctgtagacagaaagaccttctccctgggaagcaatagcagtaattctcagggtcgggtcattctgaactctctgagcctcagtttcctaatctgtaaagtcaggatatatcacagcccagcaggactccgaatgtgaccagagtgtatgtgtggaggcctctgagccacagctatcattaggattgcagcaaggagaaaggctggcctctctgagccaccttctgctcacttctcctctgaacagctcaggacaaaaagagctggagggagtaattatgtttgtgctgctggagtgggctcctgtgcagggtggggggggcatcacattttgccagcactccccatagrtgggagaatgtaccctgtgacttagaaaccttaagagaaaataagcatcgtctcaccctcagaaggatgtgatgtgaagcagagggcatgt

SEQ ID NO: 184362 - DNA, 384 bp, Homo sapiens
gctctgccctccaggccaactgcagctgtgggtctatcttctggacacactggagtggaggctccaccaccaaagctttgccatgcaggggattgagttccatggctctgmgtggccctgcacccatggctccactgggcatcattctagtggtgcccccaccctctctacttcagccctaagactcttcaagacatcctttcaaatctagtgtattagtctgttctcatgctgctgataaagacatacccgagattatttacaaagaaaaaggtttaatggactcacacttccacatggctgaggaggccttataatcatggtggaggcaaaaggcacttcttacatattggcaggcaagagagaatgagagacaagctgaag

SEQ ID NO: 184363 - DNA, 582 bp, Homo sapiens
tttcttgcctttcacctgcaggaaattaggaccattcataacttaagaaatcaggctgttaccgccccactcccaaaacacctccctgagtcctgtgcaggctcaatgaggtctttgagagagagggcactgaaaatgcagtgagtcaacttcagaagaaaaatggagagctcaccagagatgcattttcatgagaaggaatattcaaggaagaaagacttctggaatccgtagaaccatgcccgaggtctactagaaagctctgtgaatcacaaacacagtcaaatagttttatgactgatctaatgcttttgacaggttgctccacagagctgctggactcaygagctattgataactgtacttccagaagctaaattcaccagttacacacatttgatagggaacatacttttctctttcttgcttttatattctttttctctcctcccctgcctaaattttgtgtgctcgagagacacagatgcaaacatcacagagaattaacagcattttgggaggtgacttgtgtatccagccttatgaatggccccaaagcaatcttgctttcttgattcctgt

SEQ ID NO: 184364 - DNA, 531 bp, Homo sapiens
aagtgtgaaagcaaaaatgttacagttaagtacaattaagttcattctttgctcaaattgaaccagcccctttgtcccatacwactaatgtttatggtttcttttgaataaacatagaaattgaccctccctatcttaaaacttgagaaacttacatttgtcctaactgagttctattctcaggaaaccaaccatcaggcttcccagatactatcaagtaaccgtaactcaccagatcactacatctggacagtgagaagacagaccccctcacccatcatagttgccaaagggattacaggcttcctgttgaccaactcctctttcttatcccttcttcattcctgttttcctgcatgtagttatatctcttccctgctatataaactcctgattttagtctgtcagggagatggatttaaagctgatcttccatctccttggctgcagcacctgattaaagccttcttccctggcaatacttattgtctcagtgattggctttctgtgcagtgagcagcagaatgtaga

SEQ ID NO: 184365 - DNA, 531 bp, Homo sapiens
aagtgtgaaagcaaaaatgttacagttaagtacaattaagttcattctttgctcaaattgaaccagcccctttgtcccatacaactaatgtttatggtttcttttgaataaacatagaaattgaccctccctatcttaaaacttgagaaacttacatttgtcctaactgagttctattctcaggaaaccaaccatcaggcttcccagatactatcaagtaaccgtaactcaccagatcactacatctggacagtgagaagacagaccccctcacccatcatagttgccaaagggattacaggcttcctgttgaccaactcctctttcttatcccttcttcattcctgttttcctgcatgtagttatatytcttccctgctatataaactcctgattttagtctgtcagggagatggatttaaagctgatcttccatctccttggctgcagcacctgattaaagccttcttccctggcaatacttattgtctcagtgattggctttctgtgcagtgagcagcagaatgtaga

SEQ ID NO: 184366 - DNA, 463 bp, Homo sapiens
tttgttttagagggactatcttggcacgactcagaccattagagactgaggcactgctgatgtggtagacctccagagtttggcagggctttccttccaccttctagagtacatacatcttaccgagaacaaaatgcacttgctactgatagctcattcagttcaagttagcgtgatgccagtgatatttggggctgatgtggtgttttgcagaaaatacagatggtccaagtccctttgggctatattatgtcagggcaggagatacaacaggcctgagatgagacmaaaatgtttactgtggtccacccacgggaatgcaaactgcttcttctctttcctcctgatgaggggcgaaaagaccacactcagcagatggatgacacaccccatccacctggggctgtgctattcttctctagtaaaggtaccaacccctgcacagcagctgcaattaggtcca

SEQ ID NO: 184367 - DNA, 619 bp, Homo sapiens
tgaaaactgtgctttctttaaccagtgcttacttttaatgcacctgaagggatgtttgaagaagctttctgtctttatactaattttgaaagctctacattgtgaaagtcttaaaaatgggcaggcataataacataggtatcagatgcaattataaatcaaaagaaaaactgtggtttaaatgggcaccaagagctaatatttccttctctttasaggattgcaaagagaattgggcaatttttaaaactctttatttgaaaataacttcaaaattacagaaaacttgcaagaataaaatatttaccctttacctagatttcacctactgttaacattctgccacatttgctttagaaggtggtcacccacttgttttatatattatacatacattttttggaactatttgaaattaagatggatacttgtggtcttttacccataaacatttcagtgtgtatttcctaagaataagtatgttctgtcatgtaaccacaatagagtcattcttcagaaagtttcaactcaggaaatttaatattaataaatacatttatctactctcccacctatattccaattatttcaattgacccagtaatgttcaatagagatc

SEQ ID NO: 184368 - DNA, 573 bp, Homo sapiens
ttttacctagtgtcttttctctgtttcagaatcccacctgagatgccacattacatttactcatcatatctccttaggctcctttcggctgtgacagtttctcagacttgacttgtttaatgaactggacagttttgagtattaattgggtattttacaaaatgtccctccgttgggatttgtctgatattttcttcactactagactggggtcatggttttttggcagaaagactatagaggtaaagtggttctcattacattgtatcaaaagtacattcaatccatatgatttatccctggtgatgtttccctttatcacatgtatgacgtagtgtttgtcagctttctacactgtaaagtccttctgccyctgccctttccatactgtgctcttggataaaagtcacaggtaagaagtagtagggagtgatgctccactttctttcttattttgagacagagtctcactctgtcgccaggctggggagcagcagtgccatctcggctcactgcaacctctgcctcccaggttcaagtgattctcctggctcagcctcctgagtagctggg

SEQ ID NO: 184369 - DNA, 573 bp, Homo sapiens
ttttacctagtgtcttttctctgtttcagaatcccacctgagatgccacattacatttactcatcatatctccttaggctcctttcggctgtgacagtttctcagacttgacttgtttaatgaactggacagttttgagtattaattgggtattttacaaaatgtccctccgttgggatttgtctgatattttcttcactactagactggggtcatggttttttggcagaaagactatagaggtaaagtggttctcattacattgtatcaaaagtacattcaatccatatgatttatccctggtgatgtttccctttatcacatgtatgacgtagtgtttgtcagctttctacactgtaaagtccttctgcccctgccctttccatactgtgctcttggataaaagtcacaggtaagaagtagtagggagtgatgctccactttctttcttattttgagacagagtctcactctgtcgccaggctggrgagcagcagtgccatctcggctcactgcaacctctgcctcccaggttcaagtgattctcctggctcagcctcctgagtagctggg

SEQ ID NO: 184370 - DNA, 491 bp, Homo sapiens
gctaatagtgcatgcctgtagtcccaggaacttgggagtctgagcggggaggatcacttgagctcaggagccatgatcaagccactgcactcaaacctggatgacagggggacctgtctcaaaacaaaacaacaaaacaaaaagaatatgaggtgatattatctacttgagtaccacatcaggagacatataatgtcaggtttatggaactgataatagtgatgttatgtataataacttgtttaagttggtaaccagcaaatctcttcattgtaattaactattaattgtagtagtactttgagtctgtgtgatgatcttgttccatagcaactttccacccagtgtgtttatatctacttatgatttgatgattctcctttgggttcatatactaggggatgcaaaatgatgatttcctaattctttcctgaaatacatgacagctgaactktttctgtaaaaaagagctttcccttttattctattcc

SEQ ID NO: 184371 - DNA, 605 bp, Homo sapiens
tcatagtctgggtcttggacttcacctacacagacagagaagtgaaaaacacaactcatttccattgagtggagacacgttaattgctacaaaaatatgttcgtgtgtagcttattttaaagtaaatcatagagcaattatgaagcccaaaaccgtcctcgaggatatatgtggtttctactttttaatctccttctattaattgaatagattkaatcagcttgattgggtacaaagagaaccaggttggaccatatgccatgcagctcattttgaagtcaagctcattgattttatttattaaagaagccagctctgcttctgggaaaatggaattgggtatgtaaatgaacaggttctttttctctttctatctgtgctactaaacactttttaaaaaagtttaaaatcttttactacattcataaacattaaggagaaacagaattgagtgtcttaattatgctaaaaatgtcttggagctctcttcagcaccagaccgggcataattcttatacagagcagggcaataacagtccgtggcattcttacatagaagagagccgaaactataagtgttgttttttaatttccttcttcccata

SEQ ID NO: 184372 - DNA, 529 bp, Homo sapiens
accaagcctggctaatttttgtatgtttagtagagacagagtttcaccgtgttcccccaggctggtctcgaactcctggcctcaagtgatccacctgcctcagcctcccaaagtgctgrgattacaggcatgagccactgcacctggccaattttctatacacttaagtgcattcctatgaccttggattatatctgaggaaacccagagaaagggtgtgtgaacagagagggagagagaaagttacctctctccccactagggttgggagtcacccaaaatcatcccaagtgctgacatgcaagccaggaaggcaattcaagtctccaggacatccagggtgcagcccctcctcccatgttcgggtgctgggcaagggcccaggagcaggcttaccttgtccacactctaacttctggcatgtgtggttggtgggcgctatgaagtagcccttcatgcatcttgtgcagacatgcacgctgtggcaaagctcacagttgtctgggcagggcaggcaggtgttcccctc

SEQ ID NO: 184373 - DNA, 529 bp, Homo sapiens
accaagcctggctaatttttgtatgtttagtagagacagagtttcaccgtgttcccccaggctggtctcgaactcctggcctcaagtgatccacctgcctcagcctcccaaagtgctgggattacaggcatgagccactgcacctggccaattttctatacacttmagtgcattcctatgaccttggattatatctgaggaaacccagagaaagggtgtgtgaacagagagggagagagaaagttacctctctccccactagggttgggagtcacccaaaatcatcccaagtgctgacatgcaagccaggaaggcaattcaagtctccaggacatccagggtgcagcccctcctcccatgttcgggtgctgggcaagggcccaggagcaggcttaccttgtccacactctaacttctggcatgtgtggttggtgggcgctatgaagtagcccttcatgcatcttgtgcagacatgcacgctgtggcaaagctcacagttgtctgggcagggcaggcaggtgttcccctc

SEQ ID NO: 184374 - DNA, 329 bp, Homo sapiens
tgaattcattgaaatagatcaaatacaatgtttgagcatgggtcagaacagaggtaactttgaaatatttttaattagttcactgactctctaactccttcaggactgggcagggaaattaggttgggcaatgaggatcctgrcatcacagagctttgcatgttaaatacagtggcaaagaggtcacttgctttctccaggtttttaattgtctttaaggagctaaacccagtggtttataaaattgtaaaagaagggtggtagctgccttattaaacaaatgttaaaatattcccctagttcaaaagacgtccaaacatgcattggca

SEQ ID NO: 184375 - DNA, 557 bp, Homo sapiens
agctgggctgtgcccagaccaaggagaatatctgtggagtgggaaagagtttgcttctttttcactgcaggcccatgaggtgctgctaagatggtgagcacctcctctctccaccctgcaatccatgagctcacaccaccgggagatcctgagaagccacttaccttgtcatggggcaggtagtgcagtcttcctgggttggtccctggcacttggcacatgaggcctcacaggtctggcagtggccatgctcatcaacatattctcctggggaacaaaatctagttgtttatttcatttctacayggcaagcctgcctgggctgtcagtctgagagcagccagatctctgtggctgcctgaaagcaatgcagacaacacagagaggagaggccctgaatggcttcagctgctagtcccaaatcctgaccttatcataacaactgctcctctcccgggggctccagaagttggaacctcaaaaagttatgaggcaatgacatatttctgaatctagtcaacatgtgttacagattttataagtagggaaggccaagc

SEQ ID NO: 184376 - DNA, 551 bp, Homo sapiens
agatctttctgtttgtgtcttataatttaacatatttatggatactatgtcttcatttatttatgagcatcttaaacataccaattttaaatactttgtcaaatgtttctatgaaatcagtattatctgatttaaattcatgttctaattattgatcatgtttgtcatcctttttttaaactttattttataattaatagagacgatgtctcgccatgttgcccaggctgatcttgaactcctgggctcaagcaatcctcccatcttggccacccaaagtgctggggttacaggcgtgagccactgcactggcctgtcatctttcttagcattcattttatctatatactttggaatgctggtcttaagctcactgtaaatgaaatattttggttttggttctttactccctctctctcttatctttacttctcacagtctagaaatttttccattaactctawccctgtcttcaacctgaaactcagtccagaaaaagatgttccagtattcctggaagtgatattgatgacagcatagatcccatcagc

SEQ ID NO: 184377 - DNA, 533 bp, Homo sapiens
cttataatttaacatatttatggatactatgtcttcatttatttatgagcatcttaaacataccaattttaaatactttgtcaaatgtttctatgaaatcagtattatctgatttaaattcatgttctaattattgatcatgtttgtcatcctttttttaaactttattttataattaatagagacgatgtctcgccatgttgcccaggctgatcttgaactcctgggctcaagcaatcctcccatcttggccacccaaagtgctggggttacaggcgtgagccactgcactggcctgtcatctttcttagcattcattttatctatatactttggaatgctggtcttaagctcactgtaaatgaaatattttggttttggttctttactccctctctctcttatctttacttctcacagtctagaaatttttccattaactctaaccctgtcttcaacctgaaactcagtccagaamaagatgttccagtattcctggaagtgatattgatgacagcatagatcccatcagc

SEQ ID NO: 184378 - DNA, 409 bp, Homo sapiens
aattattggagcttcacagctggttgtggtcagggaaagcagcaaaaaaagccctgccaaaaaaatggtcatttcaaggtgactaagctgcagtttcctgaggagcatcatcccaggttaaacatagccatggtaggcagtggggtgggtgggggtgggaggtaarggggaagagataatagaccagttcagccagtcactaaacaaatagacaaacatgcagcaataacaagccaaccctctcagtggggtgaggggattccaagtgttggtgcaatataatatctaaaaagcctactttccaacacaaaattatgagacatgcaataaaaccagaaaatataatcatacacttagaaaaagcaggaaatagaagctgttgatgagagcaaccagatgtgggatttaa

SEQ ID NO: 184379 - DNA, 509 bp, Homo sapiens
ttgttgcattcttttgagtttctgattaccctttcactgaaaacacaatttacatatgaggaagatagaggaatagtcacttatgccttagtctggcttagtgaatctgcattcttaaataaacaagaggacagaggaagcaaacaggcatatattatttgtctgggtgagcagagggatgactttgagttctgtcctttgtcctgcacctgtgaagataakctatcaaattacattgccaaggtgaaattcaacagatctgttttagggcaaagatttttgaggcccccaaagaatttccttcttcacaaattgtgaaggaggtatggtagctttttaatttttatagctgtctcatttagaaataaaatgggaggcagatttgcctgatgcaggtccctttggcttagtgattttagggtcttgagatttgttttcctttcacaatgactaagttggatttatctgagaaatgcaaggttggcttatctagcaatcgagtaatgtaa

SEQ ID NO: 184380 - DNA, 427 bp, Homo sapiens
ttttctccttttctcactatacatctaatttttgttgtcagccttaccaacagtcaccatcaacagcattgcttcttcagttagagttacttattttcaaggtttagcttatttctgtcatcactgggtcctccaccaatgtcagtgtggtcaaccttgctggcaatgctttcctatcaattgttcacacactaytactaaatattaataacactgataccttataagctcaagtttccaaggagaagataaagtactagcatttttgctttttttaactaatttagtaaaaccttcacagctatatgaaagagagctaaggtaatagagggctttgcaagttagacatgaaaagaaagcaaaattctagggtgctgaagggaagttaaaaataaactccatgagaaaatctcccaaatgttttccc

SEQ ID NO: 184381 - DNA, 388 bp, Homo sapiens
ttgcaaatattcaccaagctgaatgattataatgtgttcacttttgtgtatgtattttataayaaatgtttaaaagaggattttcttaaaagaaaatggtaaggaaagtatggatgaaaggtctaataaagatacctagcacactacagcagtgagagatcttctctaacttctggctttgcctagcgctacgtggaaataatgctcaccagtatggtaagcaacttctgatttggacatcagaggtcattatgcagaagataaaaatgtaaggatttcatatccttagaattgggaaaccttccatttggctgtaattacatcacaaaccatctgttttattaatatctttgtgcctcattttcctcatttgtaaactgatgaaatt

SEQ ID NO: 184382 - DNA, 490 bp, Homo sapiens
tggcacagccacaatcagaactttaattctcgatgccctatcttttgtactttccatttacacaatgcttcctctgaaataagatttaaatagggttgaaatgagatcatgtttaaatctaaagtgccacagaagtgatttttaaagttacatccaattttgctaaaacatatttcttatgtaaaatttcccctatggcctattatgatgtttggttttattgttttcatataattcagttataattccatgacttaaaatttctgataaaaaagaacacacatgctgaactcctagcaatgttaagcaataaaacrggaaatacatttagactcagaaaagtcttcttacggcatttcagctagtaaattcctccgctctattttcccttttattgttttaaatgaacactggtattgtgctttaagtcttatgccataaacacataaacacaattacaaatgtttttcaagtaataaataatatattg

SEQ ID NO: 184383 - DNA, 503 bp, Homo sapiens
tacaaataattaggcaacttggcaatagatatcaaatgtattaaaattatgaaaggtatgaatacttctccaacatttggctattataaacaataatttgttgtatacaatagcagctattttcattccaatattttaggcaaaatattactcattatcctattaatttttaccatctttataagcagtagttataatttttcatgtatttatggctacatgtgttattattttgtgaaatgcttatctaccttgatttcacagctgcctgtgtttccatttaatgggcaaaactattaataacaagtaaactgtttttaacctaagtttctcccccatttgctctggaaacaagacgagaaaagagctatccatgtgcttctccaaaayaatcttttgttcagcaactattaatgagcacccccgtatattaggtacagtgttaggcactagggtaaagtaatgaactataaataaaacacgcaaacaaagaaaaaaaattc

SEQ ID NO: 184384 - DNA, 503 bp, Homo sapiens
tacaaataattaggcaacttggcaatagatatcaaatgtattaaaattatgaaaggtatgaatacttctccaacatttggctattataaacaataatttgttgtatacaatagcagctattttcattccaatattttaggcaaaatattactcattatcctattaatttttaccatctttataagcagtagttataatttttcatgtatttatggctacatgtgttattattttgtgaaatgcttatctaccttgatttcacagctgcctgtgtttccatttaatgggcaaaactattaataacaagtaaactgtttttaacctaagtttctcccccatttgctctggaaacaagacgagaaaagagctatccatgtgcttctccaaaataatcttttgttcagcaactattaatgagcacccccrtatattaggtacagtgttaggcactagggtaaagtaatgaactataaataaaacacgcaaacaaagaaaaaaaattc

SEQ ID NO: 184385 - DNA, 570 bp, Homo sapiens
tcagatttgagatttttttggattttgcaatattttattacacttacctgttaagcatcccaatcaaaaaatgtgaaatccaaaatgctccaatgatcatttcttttgagcatcatgtcagtgctcaaaaagtttcagagtttgaatcttttttttttatactcagaattctggctgtacttgctgtctgtaccacttattcaacatctattatatactatctggtatcattacatgtgttagttcttcccaactagatagattaggattgtatatgtgtatgtgtgtgtgtatacaygtgtgtatatacagcgacagaaagtgagagaaagtacacacctagcagtgggcttaataaagattttctgttgataatgagcattttgttggtggtattggttgaggcaatataattggactgattacttcaggaaacaaatagcatggttgctctcaaattttaaataggtcttactctaaaagggaaagtggggagatgaaagctttgagttcaataataataatagcccaattctagctcccatggtaaaagagaaaagaatcaaatgc

SEQ ID NO: 184386 - DNA, 576 bp, Homo sapiens
agtctgagacttgtacacaaagggggccttaagaaagtcatgtagaagaatgtaagttggtcttayattgtaatattccaggaaaagatttccctttcttgtatggaaaaagaaagcgatgttgatgaaaagagtcaaactctgtaaaataattaaagaggtttattctgagtcaaatatgagggatatatagcctgagggatagcctcaagaggttttgagaacatgccaaaggtggttgggttatagcttggttttatacattttaaaagaacagaagttacagacagacatcaatcaatgcatgtaaggtgtacatttgatggcagcagcagcccatctagagtggctgctgccatgacgccaggctgcagtgcaggaggtgtagccagggctgcacactccacggagctagtggaggccaggagcaggcaggagctccactctcctggacacaactgcaaccacctaagctgcagctgcagacccaggcatctctgcactctcagtggcctggaaagactcccctgcccctgcaggcttggaggtgtctgctcccactgcctggcctttccc

SEQ ID NO: 184387 - DNA, 576 bp, Homo sapiens
agtctgagacttgtacacaaagggggccttaagaaagtcatgtagaagaatgtaagttggtcttatattgtaatattccaggaaaagatttccctttcttgtatggaaaaagaaagcgatgttgatgaaaagagtcaaactctgtaaaataattaaagaggtttattctgagtcaaatatgagggatatatagcctgagggatagcctcaagaggttttgagaacatgccaaaggtggttgggttatagcttggttttatacattttaaaagaacagaagttacagacagacatcaatcaatgcatgtaaggtgtacatttgatggcagcagcagcccrtctagagtggctgctgccatgacgccaggctgcagtgcaggaggtgtagccagggctgcacactccacggagctagtggaggccaggagcaggcaggagctccactctcctggacacaactgcaaccacctaagctgcagctgcagacccaggcatctctgcactctcagtggcctggaaagactcccctgcccctgcaggcttggaggtgtctgctcccactgcctggcctttccc

SEQ ID NO: 184388 - DNA, 576 bp, Homo sapiens
agtctgagacttgtacacaaagggggccttaagaaagtcatgtagaagaatgtaagttggtcttatattgtaatattccaggaaaagatttccctttcttgtatggaaaaagaaagcgatgttgatgaaaagagtcaaactctgtaaaataattaaagaggtttattctgagtcaaatatgagggatatatagcctgagggatagcctcaagaggttttgagaacatgccaaaggtggttgggttatagcttggttttatacattttaaaagaacagaagttacagacagacatcaatcaatgcatgtaaggtgtacatttgatggcagcagcagcccatctagagtggctgctgccatgacgccaggctgcagtgcaggaggtgtagccagggctgcacactccacggagctagtggaggccaggagcaggcaggagctccactctcctggacacaactgcaacyacctaagctgcagctgcagacccaggcatctctgcactctcagtggcctggaaagactcccctgcccctgcaggcttggaggtgtctgctcccactgcctggcctttccc

SEQ ID NO: 184389 - DNA, 591 bp, Homo sapiens
gcctgtttgtaatttataaaatgtctccatgttatgtcctaaataatactgtcattctgagcaccactaattgaatcagaaattaacacctgaaccaaagaaagccattcctcattttcccaatggccaatagagtagattggggaaaaacagtattgaatagtgtttaaattctattttgcttcattatttactagccacgtgaccttggcactttatttaacttcctcgcaatttacttttattacctctaaaataagaaaaatattataaatgtctaataatttttttattaagcaataattgagatgccatctctaaaaatttagaaycagtaatagcatataataaaacattccgtattgcttagtgactaacagactttttcttattgaggaaatagatgcaaaaggagttgcaaagtgcagtggaaattagcaatatagcaatgcagacagcaacacacaaacacacacacttacacattcacaaaaaatgatcaagataatagcaactgtgaggtagcaataatgataccctaaagattattcatttggaagaacttaaggtactaaaaatagaggccatatc

SEQ ID NO: 184390 - DNA, 524 bp, Homo sapiens
tgtttcttaatctcctcatctataaaattggataggaatttcacctcacttgtgagaaataaataagttgaatcataaaaaaaaattgaaagagtgacacatagcagcatacaataaatgtactttgtcattactattattaaatactattgttgatacaaatgtcagtgcctgttcactcctttacaatctcttattaaattagcattaaggaatgtaagaaaaaccaaaaagttattggaattaacaacaatgttgactcagaaatcttgcaaatcacatagacaaagacagagattacattatttctccttcttgcactaaatgttgtttatgagaaaaaagaacatttaacaaatctcagtcatagagtaggttcttaaacaatacaaatggtattgaagttaattaagtagaataaaattctgttagatatagtttygattttgtttcttctaaacatctaaacaaatacttataaagggcatttattgaaaatcatgtacagacacacacacatgcgt

SEQ ID NO: 184391 - DNA, 463 bp, Homo sapiens
gaattctccctcacccacatttctgttccaacctcctaggttaaataccctcaaaatttagttccatgcatactctcggtgctcatgataacccatgctagcyaggttttgcagcggttttgtaatacttctttcccaaaccctcattgagttcagtatgtccccagttgcataaagctgcaacttctccctcgttacaagcctaatgaccaagagtggggatagggtcagttccttagagggacatatattgtctcacagtagagaagacattcttcagtttacttaggaaaagaggtttttgagtcttaagtggagagttgagccacttttctagggactgaagatacatgagaaattacaattttgagggacaactcagatagcaccatgccatatgtttgagtccctttattttccaagcagactttgtacattggcataagaaaaataactttttttg

SEQ ID NO: 184392 - DNA, 463 bp, Homo sapiens
gaattctccctcacccacatttctgttccaacctcctaggttaaataccctcaaaatttagttccatgcatactctcggtgctcatgataacccatgctagctaggttttgcagcggttttgtaatacttctttcccaaaccctcatygagttcagtatgtccccagttgcataaagctgcaacttctccctcgttacaagcctaatgaccaagagtggggatagggtcagttccttagagggacatatattgtctcacagtagagaagacattcttcagtttacttaggaaaagaggtttttgagtcttaagtggagagttgagccacttttctagggactgaagatacatgagaaattacaattttgagggacaactcagatagcaccatgccatatgtttgagtccctttattttccaagcagactttgtacattggcataagaaaaataactttttttg

SEQ ID NO: 184393 - DNA, 547 bp, Homo sapiens
gctatgggagactggagtctatttcacctctgcagtctcgaccataagagacgaccacgcccaggggtgccagttcagagacccacccccaggtgcgcattctctttctcagggatgttccatgctgagaaaaagaattcagtgatatttctcccatttgcttttgaaagaagagaaatatggctctgttccaccggcttactggcagtcagagtttaaggttatctctcttattccctgaacaattgctgttatcctgttcttttttcaaggtgcccacatttcatattgctcaaacacacatgctgtacaatttgtgcagttaatgcaattattacagggtcctgaggcaacatacatcctcctcaactgagaggattaagagattaaagtaaagacaggcataggaaatcacgagggyattgattggggaagtgataagtgtccatgaaatctttacattttatgtttagagattgcagaaaagacaggcataagaaattataaaagtattaatttggggaactaataaatgtccatgaaatct

SEQ ID NO: 184394 - DNA, 586 bp, Homo sapiens
ttactatattggttatttatttttctgtgagaagctttttagtttaagtaaggctcatttgtctatgtattttaatgttcacttttgaggacctagtcataaattctttgtgtagaccaatgtccagaagactttttcctaggtttcttttaggatgtttagggttttaggtcttaaatataagtctttaatccatcttgagttaatttttgtttagggtgagagatatgggtctagtttcatgcttctgcttatggctattcaaatttttccagcaccatttattgaatagggtgtctttttgctagtatatccaasagcatattaaaaagacaacacaccatgatcaagttggttttattccagcaattcatggatggttcagcatatgtaaatcaacacatgtgattaaccacataaaacaaaaaccatttgatcatctcaatagatacagaaaaacatttgataataaaatctagcatcctttcttagtaaaaaccctcaacaaaatagtcatcaaagaacatatctcaaaataataaaagtcatatataacaaacccacaatcaatatcatattgaacagt

SEQ ID NO: 184395 - DNA, 593 bp, Homo sapiens
agccttcagacttggtgtaagtccttctccaaacatgttcccgtgccatgttcccactgtcatatcacttatgacattatattaatataccttggktactcataagtttcctaatcttgacatcaaatatgagaagtatagactccatgggaatctctcttggaaatatcttgtgcctagtatgagttttgtcacatagtaggtgttaagtaactttttaatttaatggctgaattaatgtacattttattgcttgaataaacaaatttggaggaactgatttttctaaactattacctggatagtgcaaagaatgattttatattatcatttatcacctcccacacactatgcagtcatatccaatataattcaaaaacacgttattttttgaacaaggaacaagggagagatagaaacacatactataaacaactattttatataaggggttttacacagttcgagaagaaaactcagtaagtttctgattacaatgaacaatgtaaagtatttaatttaaacttagaaataattttaaaataatatggaatatagtattttcctcaatcttatacaaatttataatacca

SEQ ID NO: 184396 - DNA, 571 bp, Homo sapiens
ataaacccactaaacatgaacaaaaatctgagcagacggttctctaaaaaagagacacaaatgaccaaaaagcacaggaacatacgytcaacgtcattagccgtaagggaaatgcaaaccactccatctatgagatgggtgcagaaaaaaagacgcatcatcacaagtgctgatgaggatgtggtgacactggaaccctcagacatggctggtgagaccgtgaagggtgggtccacagcctggcagtttctcagaaatgtaaacatagagctgccatatgactcagccactccacagctagataagctccctagaaaggtaaaaacatacgtccacatacaacttgcacgtgaatatccacagcagcgttattcacaacagcaaaaaacctgggaacaacctaaatgtccatcggttgataaatgagcaaacacaatgtgggcaattcattacagtggaatgttatctggtgataaaaatcatgacatattaatacatgttataaaatggatgaaccttgaaaacatgctaagtcaaagaagccagatacaaaaagaccctattattactg

SEQ ID NO: 184397 - DNA, 571 bp, Homo sapiens
ataaacccactaaacatgaacaaaaatctgagcagacggttctctaaaaaagagacacaaatgaccaaaaagcacaggaacatacgttcaacgtcattagccgtaagggaaatgcaaaccactccatctatgagatgggtgcagaaaaaaagacgcatcatcacaagtgctgatgaggatgtggtgacactggaaccctcagacatggctggtgagaccgtgaagggtgggtccacagcctggcagtttctcagaaatgtaaacatagagctgccatatgactcagccactccacagctagataagctccctagaaaggtaaaaacatacgtccacatacaacttgcacgtgaatatccacagcagcgttattcacaacagcaaaaaacctgggaacaacctaaatgtccatcggttgataaatgarcaaacacaatgtgggcaattcattacagtggaatgttatctggtgataaaaatcatgacatattaatacatgttataaaatggatgaaccttgaaaacatgctaagtcaaagaagccagatacaaaaagaccctattattactg

SEQ ID NO: 184398 - DNA, 422 bp, Homo sapiens
aggcagaattccttgaacctgggaggcagaggttgcggtaagctgagatcgcaccattgcactccaccctgagtgacagagtgagactcatgtctcaaataaataagtaaataaataaataaataatgaatgaatgaatgaatgaatggttgtgagggtcttagattatcaaagtcatgatacataaagttgtctaagcctctgaaacaaatctaacttcttgttcttggctaacggcatcatattcctgcaaatgagaaacagaaccgtgtataagactgttaatgagctcagtcataaatggttactttgataggacagcaataaggtttcttttctttctatagaaattgggctttatcragaggaacacaaattgggatttctgtttgtttgtttaagttggaaaaaaacagcagaag

SEQ ID NO: 184399 - DNA, 477 bp, Homo sapiens
cattataccttgtaatgtaccttgtaaatagctataaaatgtgtacagcgaaaacggaaagaaactgacacatccataatcatcatggaaaccagcattccttctcagaaacagatcaggtagacaaaaagtaagaaagactccagaacttctgaatgaacttgatagaacacacaggtgatagaggctgatgcctaaaggtatcrggcaggcagggtaaatggctgaagcagccaggtctgtgaaggccacccggggacgggtagactgccctttgagttaggagcaatcgtagccgactgttgccattaaggaatgagggcccagcacagccagagcttctaagctttcatagaaagccccaaatccatatttttacataaaatactgtgatttgtaaatgtttactcaagttttcaaaaatacacttgtgtgagtcaaacaaaacatgtctgcaggccaaaggcagcttatggg

SEQ ID NO: 184400 - DNA, 492 bp, Homo sapiens
ccctgtggacagagccatgtgctaagtacttggagaaaggcaaagggagtatcccaaggagtctccagtctgagggggagacacagcccttagcctcagaaagcctcagtgtgctgggggaacatcgcctccagctctcctcctcctctcagagagctcccaggcagatcagggacagaaagcccctgccttggagtggctcctgtataatagagaggcacagcrtaactccagggtcttcactctgatagaagagacaggatgacatacttctcttgtacaggacagtaggacatatgaggagaggggctcctaaatctctatagataaagttgtaactaccccaccctcctgtgagcccctgaggtacaaacatgtctctttctcctgctttatcctgcccctgagcaggaagacagcttgaatgtatgttctcagtttatccagctgtccctaggaaaccccgatccttcatattccctcaacattgag

SEQ ID NO: 184401 - DNA, 652 bp, Homo sapiens
gcttgggccacggggcgcgttgcatgttgggattggtagttgcgctgagggggggggcccaaggacagctgagatcccgcgagatattckaggccgggagagccgatgcctttgcagtaattcccaccgtggaggtttgtggaaagaccgctttccatggagagtaaaggccggctggaaagtccccaagcggtgagcgcagttttgtggacctcagccggtgttcagcagtcatggactatcatccagatggctttctaaaacatttgttgggccgggtgcagtggctcacgcctgtaatcccagcactttgggaggccgaggcgggcggatcacctgaggtcaggagttcgagatcagcctgaccagcatggtgaaaccccgtctctactaagaatacaaaaattagccgggcatggtggtggcgcgtgcctgtaatcccagctacttgggaggctgaggcaggagaatcgcttgaacccgggaggccgaggttgcagggagccgagatcgcgccactgcactccagcctgggcaactgagcaggattccgtctcgggggaaaaaacaaacaaaaaaattgtttattttgtaaaaacaacactgaaagaatgaaataatatccctatagaaaaacgagcaaaggatagga

SEQ ID NO: 184402 - DNA, 652 bp, Homo sapiens
gcttgggccacggggcgcgttgcatgttgggattggtagttgcgctgagggggggggcccaaggacagctgagatcccgcgagatattctaggccgggagagccgatgcctttgcagtaattcccaccgtggaggtttgtggaaagaccgctttccatggagagtaaaggccggctggaaagtccccaagcggtgagcgcagttttgtggacctcagccggtgttcagcagtcatggactatcatccagatggctttctaaaacatttgttgggccgggtgcagtggctcacgcctgtaatcccagcactttgggaggccgaggcgggcggatcacctgaggtcaggagttcgagatcagcctgaccagcatggtgaaaccccgtctctactaagaatacaaaaattagccgggcatggtggtggcgcgtgyctgtaatcccagctacttgggaggctgaggcaggagaatcgcttgaacccgggaggccgaggttgcagggagccgagatcgcgccactgcactccagcctgggcaactgagcaggattccgtctcgggggaaaaaacaaacaaaaaaattgtttattttgtaaaaacaacactgaaagaatgaaataatatccctatagaaaaacgagcaaaggatagga

SEQ ID NO: 184403 - DNA, 624 bp, Homo sapiens
aaaaaaaggcttatgtgtgtatagtcagaagctgcaaaggctgcaagaatacaagagaggagacaacaggggtgagatacagatctttttagcccccaaatcagttttgccttagtgacctggctattttaggctggggttgggggaactaaatcacattgattggtgtttcatctctcccttytgaatgagcccagcactcacattaagggttatttcttatctagactgacattcctaggttagggataaaaatgggcagacttgaggtaccataacttttcatctttcttttctttgtttttgttaacattaaagattactatcaaatattgtatttattttcaattttttttctacattgcttctttgggacagataaatctttagtgcagagttacacttgtgtaagagttaaaaatatagctacaggattaaatggttttttctttaataattatcctttataatacatatcgtatataatatatattgtatattctacatagtaatattaatactgttatacctcttcctcttcttgttctcctcctcttcctcctcttctttattttttcctggagaacagtttggtctagttatggaatttaattatctgaattc

SEQ ID NO: 184404 - DNA, 586 bp, Homo sapiens
aaagcctagggtaaaaaaatgaatagatcttcagtgactggttggaaaattaccagcagtctaatgtatgtgtaattgaagatataatacaaaaaaaaaaaamacacaaagagggaagagaaaaaatacatatgaagaaataatggccaaatcacattttctagatgtgatgaaaacaataaactcatagatcaaaaaagttcactgaaaaccaaacaggataaaacgcacaccaaccatgttaggtacatcataattaaacaattgaattgttgaaatcagtgataaagaaaacactcctctaagagtccctgcctggccatgcctgcaagcagtgcagcccccactgccccaccagagcacttttgctgacagcctcctgccagaatttgtttgcctgtgacctcgctgccaccccttcagaaaacttcccacctgctgaatccctgccaccctattagaatgcccccctcctgtggtgcccctcaccagagctatccacccaagacaacccaactaccaataccagagggcttcccaccagagtgcacccccatcccatatggctccctgcctgcagtgcccc

SEQ ID NO: 184405 - DNA, 549 bp, Homo sapiens
aattgccatgtcttgtcactttagattcagatttaaaatcagcacattcatttcatcctctgttccttgccgatgattccrtcatatttccagttccttatgaatataggagctaagtgcatgcgttttggagtcagaatattctggagtcctgtttctacattttaccaattttaacagaaaattacgcatcaacaagatgccattaaacatatgagatcaaaacttcctcatacttcaagagaagtggagagtggcagaaatagtctgtaaagaaatagagctaacatattttttaaccttgaatttcattactttattgaccactctaaaggaaagtgttaacattagttgaaaaaaggtgaataataaagcgtatatattttttcttttacatagtttctcatgaagtgttagttctaaaattaattcaaaatagttagataagagtcctttcagtgtgctgaaaagtggctttgtactaaagaccagggataagtgacagtggttgagctcttcaggagatctgaagaggggactgcatgttag

SEQ ID NO: 184406 - DNA, 549 bp, Homo sapiens
aattgccatgtcttgtcactttagattcagatttaaaatcagcacattcatttcatcctctgttccttgccgatgattccgtcatrtttccagttccttatgaatataggagctaagtgcatgcgttttggagtcagaatattctggagtcctgtttctacattttaccaattttaacagaaaattacgcatcaacaagatgccattaaacatatgagatcaaaacttcctcatacttcaagagaagtggagagtggcagaaatagtctgtaaagaaatagagctaacatattttttaaccttgaatttcattactttattgaccactctaaaggaaagtgttaacattagttgaaaaaaggtgaataataaagcgtatatattttttcttttacatagtttctcatgaagtgttagttctaaaattaattcaaaatagttagataagagtcctttcagtgtgctgaaaagtggctttgtactaaagaccagggataagtgacagtggttgagctcttcaggagatctgaagaggggactgcatgttag

SEQ ID NO: 184407 - DNA, 372 bp, Homo sapiens
actgtgtatgtggttaatacatctagtcttagtgtcaaggaacacttgggtgacactagagagtgttttgacatgattttttgttgtagacttgtcccactggttgcagtgtagaggatagatcagtggagagctggggaggccagttataaggctcttggaatggtccagggagaaaataatgaggttgagtaakggagagaagggaatccctcagaaggacacttaggaaatgaacatggtaggtttcatgactgattagatgggggagtagtgccaggggaaggataataggatgacttccaggcttaaagaggtagtggggccatgcaacaaaaagcaaaaataaaaacaggaggagaaaaaagattt

SEQ ID NO: 184408 - DNA, 443 bp, Homo sapiens
ttccctatttcactgggcgtattctggctctttcrtatgtatttgtgaataacagaagatacaatgacatggtgatggtaacacatgttggccttgggctgtgggttcccaaactggctcccccattgctcgctgtgtggtcttccacatgacctttctgtatctgtttctttagctgcaaaatgtggataatttttgcatctccctcccagggttcctgcaaggatcccatttagattgctttgtgtgatgcctatcacagagtaagcattctgtaagtactaagcgagctactattacttttattgttggagatatttgcaattgcttcatgacaggctctgtgaccttctatcagtgacccgatgagtggagttcacacatgttttctggcatctctttctcccagccaagactggggttgcccacccaacactgtcctc

SEQ ID NO: 184409 - DNA, 415 bp, Homo sapiens
gctctttcatatgtatttgtgaataacagaagayacaatgacatggtgatggtaacacatgttggccttgggctgtgggttcccaaactggctcccccattgctcgctgtgtggtcttccacatgacctttctgtatctgtttctttagctgcaaaatgtggataatttttgcatctccctcccagggttcctgcaaggatcccatttagattgctttgtgtgatgcctatcacagagtaagcattctgtaagtactaagcgagctactattacttttattgttggagatatttgcaattgcttcatgacaggctctgtgaccttctatcagtgacccgatgagtggagttcacacatgttttctggcatctctttctcccagccaagactggggttgcccacccaacactgtcc

SEQ ID NO: 184410 - DNA, 556 bp, Homo sapiens
actagcttatcacagtgtctgagcaactcctggtggccgccttcttgcacaggctcatactgtcttctctctgcctcccacccataggcgggtggcctaggcctattggatggaacctgttgtagcaggcatcagaacttcactacacactccatattgtgagaagataagcttgttgctggaatattcttacttcccacctttttcttttcaccaaaatgaaataaattacaggccaaagcagtgagaatcatgactaacaagtggacaagtgagagggcacagatttaaaagaataacaattcttaaagtacaggtgatatctttgcagaagtttaaaactggaagacatcataaatgtgttctagtctcgtttcctcatgaaaggtaaggaatagaggttgagggagtgtaggtgtctgtcaaasagtttcccaggtagttacagggaaactgattatcatctgcttccactggctgctactagttaacagaatgaacagctgggttaaaattgaatggttaacaaaagacttctaaggaatgaggcagtcca

SEQ ID NO: 184411 - DNA, 506 bp, Homo sapiens
tagctttttgaggtgggcatttagtgctataaacttccctcttaatactactttagctgcatcccagagattctggtacattgtctctttgttcttactggtttcaaagaacttcttgatttctgccttaatttcattatttacccaggagtcattcaggagcaggttgttcacttcccatgtagttgtgtgattttgagcgagtttcttgagttctaatttgattttgctgtggtctgagactgttatgatttcaattcttttgcatttgctgagaagtgttttacttgcaattatgtgactgattttagagtaagtgtcatgtggcactgagaagaatgtatattctgttgtttttgcgtggagagttatgtagacatttatcaggtccacttgatccagaactgatactgaggtcctgaatatctttgttaattttytgtctcaatgatctaatattgacagtggggagttaaagtctcccactattattgtgtgggagtcta

SEQ ID NO: 184412 - DNA, 599 bp, Homo sapiens
tcatcggggcccaaagactcaaaaagttctgaaagcaatcaggctgtgaggtgatcattccaattttgtattaaaaatgccaagtgcatgcaatggggaaggaataatgggggactgtaagcttattataggcagggaggcacatcagtgtgtattcaactcctagcagtgcctggcacattgtaagttctcagttagtgtttgcaaatgactacctgggatattattagacacaaaaatagtggggaagagaatgccrtgagtacatgagatgaaggctcggcagtatgaaactcaatttgatagaacttcccacttctgaattcagtgaaggaatgaatacattttcctcaatattttggtccagttccagggcttacgttttgctttttgttttaaaaacactttcattttactagaaacaccgagggtggtcaagaataattctttacatgataggaaaagatgacagcaagaggtttatagacatttttgtagctcgctgaggcagcaaatgcaccacacagggagttggaaatctcaggtctcagccttgccactgccattatcagtgtgatatttgggttgccgctaagcct

SEQ ID NO: 184413 - DNA, 601 bp, Homo sapiens
aagcttcattgatatctaaaattattacaagaaaaaataaaacaagggatgtttaataggtcatcagaaagaaatgtttcaaagagaaaaagcaagtacttagaaatagaggagcacagaatatttcagtcagctaaaatggccctccacatatattccagctgaactagtgctttcttattatcttttcagcctgttactttcatattattttgccctctcgtgtgtttgtgtgttctcatccctgaattttcatagcatataaataagcaggtgctgaagactctctctgatccttatcctagagacataatgaacaacaaggtgttttaccagcatcccaacctcatgagagtcctgggcatgcacgagacggtgatggaggtgatggtgaacgtgttgggtacagagaaatctcaggtaatgctaaaaggagaacctagccagaacttgtcccttgaggcaggagcacgaggtgacttgttcagagccacgtggctggtgtcccttgcctcartttctcttccagggagaggaagggataggcacagtgccaagaaggagccaagcgatgggataatgctgctggacggaatcccat

SEQ ID NO: 184414 - DNA, 574 bp, Homo sapiens
gtaccttcattccattatttatcgtattattttgtatttaaatgtccatttcccagcagactatgggcttcttaagagcaygagttgggtcttctgtctttgatccccagtcccaggtgtagtatctggcacataggagagcctcattactgcctgtggaagagtgggagggaatgcaatatggctttgtcaattacccaaattaattagagggagctacctaatcttttttattaattaaaaagagcacagtgattttaccatttaaaaattcaccacttagtttagaatctgttataggttgagtatcccttattcgaagttcttaggaccaaaagtgtttcaggttttagattttttgggtttgggaatatttgcatatgcataataagataccttggaaatgggactcaactctaaacacaaaattcctttatgtttcataaatacaaagcctgaaggtaattttttacaaaatttttaataattttgtgcatgaaacaaaattttgacttttttgatggtgacccatcacatgaggttgagtatgaagttccccacttgtgccatcatg

SEQ ID NO: 184415 - DNA, 604 bp, Homo sapiens
tctggaagttgggagctagaatttaaatggaacagaagctaaattagcgtggcaagttgccaggggaaagatctctgtcactttcaacattatcaacagcatcccacacacatctggtggtgaggaggagccctcccaagggctgtaggttgcagaataggattctgaattgacatcaactcccactttcatagttgaagttatgaagaatgatagcaagaaggtcctggtgctgactgtcactatcagaggatgagtttggacaagagcaggtggagagtaacattttctccatcaaggatgttagctttcagtccaatggcaagtctggatgttagggcactagtacacactcaacacagagtgcccggactaggccctgtattatttctttgaggacaaaggggtggaaacgcttttgtggatgggttggtggagctcagcacagttccggagcaccaggaggacgttacttttcttgaaaatctcaaaagttttgtcaaggaccagcagagtagacagacactgaaagccctagttttmtggcaggctttggccagcgaacaaatcctaccatgaagccaggcactatcatcctaatatc

SEQ ID NO: 184416 - DNA, 576 bp, Homo sapiens
ggtctctccatcataaacaatgtaaagatttaatttctgtgctttagatatgcatatacctaaacatctcagggccttacagatctgtattgctgcccacgtgtcccacctcaagccctaaggtggttttcccctatctctgtagatggaacatacaattgggttttataccgagagattccattgcccaaggaaggtcaggagacagatgccttcctcttgtctcaactgcaaagaggcattccttcctcttatagtaatcctcctcagcacagacccagtagggtgttgggctgggggatggtcaggtctttcccttcctacgaggccatatttcagactgtcacatggggataaaccttggacaatacctggctttcttaagcaaakgtccctgtggccttccagtgtttgtgtccctggatagttgagattagggagtggtgatgactcttaaagaggatgctgccttcaagcatctgttaaacaaagcacatcttgtagagcccttgatcaatttaaccctgagttgccacagcactcatttcagggagcacatggttttcggggtaaggt

SEQ ID NO: 184417 - DNA, 601 bp, Homo sapiens
gaattctaaatagaaagaacagcaagtgaagggccctgaggtaggagtttgggatctcagaacagagggccctgagtgtggagaataatggacctaagatctagaggtgatggagtagggaataatgttaatataatttattgtagagattttggcttttagtctgagtcagaggggaagccttcactcagccttcacaagtgaagggccttgattagagacggacaagataggacttactttttaacaagatgatcctggtgacaatgcaggaaatagattacrtggtagataggaagcaaggcgagactagttgcaataatccaaaaatggtgatgtcttgcatcagggtaatggagatgatgaaagtggttaaaatattatcagaatattctgactatgaaactgcattgaagttgttgaaatgaatgtaggatgtgagagggaagactcaacatattccaagtttcagatccaaatactggctaaattgaatttgtcttttgctgagatgggaagaaattcagagaaactagtttaaaggacacaatcaagtgttcattttagaattatcgaattgacattgctaatggtgaaaata

SEQ ID NO: 184418 - DNA, 601 bp, Homo sapiens
gaattctaaatagaaagaacagcaagtgaagggccctgaggtaggagtttgggatctcagaacagagggccctgagtgtggagaataatggacctaagatctagaggtgatggagtagggaataatgttaatataatttattgtagagattttggcttttagtctgagtcagaggggaagccttcactcagccttcacaagtgaagggccttgattagagacggacaagataggacttactttttaacaagatgatcctggtgacaatgcaggaaatagattacatggtagataggaagcaaggcgagactagttgcaataatccaaaaatggtgatgtcttgcatcagggtaatggagatgatgaaagtggttaaaatattatcagaatattctgactatgaaactgcattgaagttgttgaaatgaatgtaggatgtgagagggaagactcaacatattccaagtttcagatccaaatactggctaaattgratttgtcttttgctgagatgggaagaaattcagagaaactagtttaaaggacacaatcaagtgttcattttagaattatcgaattgacattgctaatggtgaaaata

SEQ ID NO: 184419 - DNA, 453 bp, Homo sapiens
ttggtttgagaattccattcctagtgcttataaataaaaaaagaattgcatgtaatgtaatagtcagtctattccccaaaatagaggagaaaagtcctctctaatctaatctgatggtgacatttaccctcagctaaactcaaagtatcttgatccaagacattaagcctttaaaaccactactarattattaatgattaaagttttagtaataataatgcattattgttactaatgataattttcattataccatctataatactgttcgacaagtgctcatttatgtgtcaggtacatagttaaacatgttttacatttattatctaatttaatacttggagaacctctgtaaccaactgtcttttagtaagaattacccccttttcaaagataagtaaccaaagctcaggaggataaaggaacttgcagtaagtcactcagctactactg

SEQ ID NO: 184420 - DNA, 550 bp, Homo sapiens
acctctgtaaccaactgtcttttagtaagaattacccccttttcaaagataagtaaccaaagctcaggaggataaaggaacttgcagtaagtcactcagctactactgacaaatctgtgaaatgaatgtatgtctctgcaattttaacatctgagctcattgtattagacaaaagtctgtgcattttgctgaaattaatgtraccttttgtaaaatagatataatccagattaattttaaaatcataggttacacgctttcttaaatgacatttgcttttcatgatatgctgaggtgatatttcaaataatgttttctcatcttttagataaaacatcagaagtagtttcaggatagaagtgttcatatccagccaagctaagcttcataagtgaaggagaaataaaatcctttacagacaagcaaatgctgagagattttgtcaccgccgggcctgccttataagagctcctgaaggaagcactaaacatggaaaggaacaactggtaccagccactgcaaaaacataccaaattgttaagactattga

SEQ ID NO: 184421 - DNA, 550 bp, Homo sapiens
acctctgtaaccaactgtcttttagtaagaattacccccttttcaaagataagtaaccaaagctcaggaggataaaggaacttgcagtaagtcactcagctactactgacaaatctgtgaaatgaatgtatgtctctgcaattttaacatctgagctcattgtattagacaaaagtctgtgcattttgctgaaattaatgtaaccttttgtaaaatagatataatccagattaattttaaaatcataggttacacgctttcttaaatgacatttgcttttcatratatgctgaggtgatatttcaaataatgttttctcatcttttagataaaacatcagaagtagtttcaggatagaagtgttcatatccagccaagctaagcttcataagtgaaggagaaataaaatcctttacagacaagcaaatgctgagagattttgtcaccgccgggcctgccttataagagctcctgaaggaagcactaaacatggaaaggaacaactggtaccagccactgcaaaaacataccaaattgttaagactattga

SEQ ID NO: 184422 - DNA, 588 bp, Homo sapiens
aatcaaaacagttaagaagtatcagctttgaacagaattgcaaggttattaaaataccaccatttcatttactaactattgcttggcaaatgaattcattagtacacaaaccagttagtgactgaataagtgtgtcagtaagtaatttcaacatttggatattgaaggtcattaagtattattcatrgaatggagaacagaagattaatgtctacaggttggagactagcaaacctgcagataggctggctacactatttcatgctgattgtttgaaatggagcaagaaagcaatagaccgcagagatctcaatcagctggaaacaagcatctccaaagaaagtccctgccacagcaaccatctctgactaaattgcttgttatctttacaaagcgcccctcctggtgccattaatttatatgcttcctattaccccaagtgcaattctcaatgttatatttgttcttggggaatcatttttcctaaacagaaatcaagtgctttctccagttttacattgtcacagctccgtatccagcacccacaagtgaaaagtgctctggtcatatctgctgttccaccttcgt

SEQ ID NO: 184423 - DNA, 451 bp, Homo sapiens
ccagcacccacaagtgaaaagtgctctggtcatatctgctgttccaccttcgtaatctgtcacatcaacgaactgtctgataatattagcctacttcatctaaagctcttccaaacctcacatctgaaaayaaaacttaaaacaaaaatgcacaatttaaaaaggaagatgagattgaatgtcaccaagagttttacaatctacacagaaatttggcagacatcaaaactaccagggtttcccaagaaaataatgatggtgcctctatcagtgaacacgaaagtgacaatgatgggcatctcacttatctagaaaaaaaatacaccttagatataaatggtaaaatggtagcaaagttaaccataggatgaagatgaaggtaaaggaaactttttaaaaaacataataatgaccctgagtttcatcctccaaatcaaggactggccccagc

SEQ ID NO: 184424 - DNA, 605 bp, Homo sapiens
ataaattaatgctttgtttctgatggactttaagtcagtggcccccaaaccacttgtgtaaattttgacctaccttcaaagcttgactcacgttcaatcatctttatgaaacatcygaaatattccagctctcatcaattagtttctcctttgagcacccaaaatacttgtcaatatatgttatttagcaccttgcttcaattaaattgcaacattaagtgaggctagtgacttttactacagtgcttgggcaatgtattaatttcataagttattccaagaatctgcaaccaacatgtttggaaatttttgatgtttatagcaataagcttctgtgtaagagtggctgcttcccatgatttttctgtttttgttcaccatttattggtataccaaaatctcaaatttcaacatatgttgaataatgtgtgtatatgattttatatatagtatgtagtagtgtacccactaaattataagttattgaggttcttgattctgccgaatacttcagtgtctcccaaaacaataataaagttgcaatcatgtttcagtgaattaataaaatttgcaaaacaaaatgtagagaacaaaccaaatctgcc

SEQ ID NO: 184425 - DNA, 566 bp, Homo sapiens
atctaatgctaatcaaaatactactttttcaaccaaaacaagaagtgactgtagttagtgaatgagattaatactgttgttcactcatataaattaggttgatgtgttttgaagttacttttattaaagcaatgtaaaaaatttaatcacttgaaaagtaatactggtaaaataatcatttctattgagaataaagattaattaagakattatcgttttttaagggatcagatgtgtaaaattaagtattcctgtcttttcatcctaaattctcaacatttaagtgcttgtaagactacaataaatggtggatgaatgtaagaatactcaatatggcaaataagttaatagtaagtttttatttactgagtcactatagaattattttgttaatttttcagaaatagtcaaaagttatctatttgtgtataaattgcattgaaaaataaggatgctttatatagttttctatctagtaatgtttagattcaatagttttaaacttcactgtttcatggcaggcatatataagtaatgatttctggtagagcaaaaactacccaagt

SEQ ID NO: 184426 - DNA, 408 bp, Homo sapiens
gtaatttgtccaaggtctttgagtagttaaataatggaactggaactaacaccagggagtctggagctagtgtccatgcccttcaccacygtgcatattgactttcacagttaaattattataccatttcttttgttgcaatgacctaggatatttccgatgcagttgtaatatatggtgaacttcatataatctcaatagttgatattgatagaaaaatccctgtactaccttgacaactttttaaaatctctttgcatttgtaatataagatagtaatattttacatatatatatatatatatatatatatatatataaaatggatttgtgttgaggacttaagagcagtttaatacagtgtcagagaaatgttagaagttcaataaatgtgaccttaaagtttat

SEQ ID NO: 184427 - DNA, 408 bp, Homo sapiens
gtaatttgtccaaggtctttgagtagttaaataatggaactggaactaacaccagggagtctggagctagtgtccatgcccttcaccactgtgcatattgactttcacagttaaattattataccatttcttttgttgcaatgacctaggatatttccgatgcagttgtaatatatggtgaacttcatataatctcaatagttgatattgatagaaaaatccctgtactaccttgacaactttttwaaatctctttgcatttgtaatataagatagtaatattttacatatatatatatatatatatatatatatatataaaatggatttgtgttgaggacttaagagcagtttaatacagtgtcagagaaatgttagaagttcaataaatgtgaccttaaagtttat

SEQ ID NO: 184428 - DNA, 515 bp, Homo sapiens
ttaaacatacaatccaattatttctcctagctaccctattatgaggtaatttttgtgtttccacgtgtggaactgaggtttaaagatgttaagtagcatgcccacagttacatacttctgtaagggatgaggcccacctacaaacttgaagtatctgaactcccctttgcttaatgccaaccctgtgtaatttttataagaagaacrggcacaatgcaatatgttttatctgtcccctaattctactgaaaaaaatgctaactccataaagtggctgaatgattttgagagtttttattctactttttaactttttttctcctcgaataatccagccaaactcatggccaagatttaaacagcaacaacaaaagtagttctcagtttcttgcctgtaattagtaagaagaaaaaaaaatgcttatattgactcatggactttatttttataggaaatgacagtagtcactacaaagaaatattgccttttttcttttcttttttattaaaagctt

SEQ ID NO: 184429 - DNA, 498 bp, Homo sapiens
agaacaagacccaatactacagaaattctgatatttctccttaagtwcaattggattttccagctggggagacatgtcagaaataagggcacaaggctgggagtgggggctcatgcttgcaatcccggcacttcgggaggctgaagtggggggatctcttgacagtaggagttgagaccagcctgggtaacatagtgagaccttgtcgctacaaaaaaaattttttaaaaagttatccaggtatcatggcgcctgcctgtagtcccagctacttggaaggctgaggcaggaggactgcttgagcccaggagactgaggctgcagcgagttacagttgcaccactgcactctagctggggtggcagagtaagaccttgtcttggggaaaaataaataaatatatgagggaaaaggaaaggccacctcactaaaacttatgtggcatacctaacaatttggtcatttttaatataatgaaaaaattcaaaattattataa

SEQ ID NO: 184430 - DNA, 498 bp, Homo sapiens
agaacaagacccaatactacagaaattctgatatttctccttaagttcaattggattttccagctggggagacatgtcagaaataagggcamaaggctgggagtgggggctcatgcttgcaatcccggcacttcgggaggctgaagtggggggatctcttgacagtaggagttgagaccagcctgggtaacatagtgagaccttgtcgctacaaaaaaaattttttaaaaagttatccaggtatcatggcgcctgcctgtagtcccagctacttggaaggctgaggcaggaggactgcttgagcccaggagactgaggctgcagcgagttacagttgcaccactgcactctagctggggtggcagagtaagaccttgtcttggggaaaaataaataaatatatgagggaaaaggaaaggccacctcactaaaacttatgtggcatacctaacaatttggtcatttttaatataatgaaaaaattcaaaattattataa

SEQ ID NO: 184431 - DNA, 563 bp, Homo sapiens
tcatgaagaagacatacaaatgcccagtggatacatgaaaaaatcctcaacattgctaatcatcagagaaacacaaattaagaccacaatgaaataccatatttcacctgttagaatggcttttatcaaaaatgcaaaaggtagtaagttttggtgagggtgtggagaaaagggaatcttatacactgttggtgtaaatgtaaattagcacagccattctggaaaatgatacagaggtccctcaaaaaactaacaatatagatgtgtaataactgtttttattaatatatgggaatatttatgtgactattcatgtagaagaaagattcctaagttgttcccaaaataagtcaaccagatagaaactgggagcagtaagactctctcattggaggaaatatttaagtcctttatcactagggacttargcattcgttgaatgaatgatctcttgtcaggaatatggtagaactgccaagtacttgtggtggctgaactttaaatttcctttaaatgttatcatcctatagttctgtaagaaaaatggagaaggtgagaaaaca

SEQ ID NO: 184432 - DNA, 558 bp, Homo sapiens
agcaagcaataagaaaaagaaacctgctgaaaaggaacatagttaatatttaatagcaatttataaaattaatacacacatattgagtctgcatatattgagacaataactagtaaaaagatatattgaaagagaatacttcatttacaagagcaataaaaacatcaaataccgaggccttaacaaagttttctaaaatccacatgaagaaaacctaatcatcgaaaggcacaaaagttaacttgaataaatggaaaggcataccatgttctaagatatgaagatttagtagtataaaatgacaaagctctaagttaacttgtaagactgacattattttaataaaaaaatccaatatggtttttctagagctatattacttaattcaaaaatccatatgaaaaaatattaataagcaagtaagactaattaaaaaaagaaaaagaaatrtcagggaggcccagtcctataatattaaaataatgagcctttataactaaacacagtgaggtgttggctcaagaatatataactgtactgttgcaacagaacagatga

SEQ ID NO: 184433 - DNA, 492 bp, Homo sapiens
gaattcaggaattaaaaaggactcatcgcttgaagccgggaggcggaggttgcatgagccgattgtgccactgcactccagcctgggtgacagagcaagaccctgtctcaaaaaaaaagattcaggctgatactgatcaacgctctggtcctcattcaaaagtcagacccctctcccgtctccctgcaggcagcgacctgtggtcaggagctgggtgttgtctttttctccctaatcaccagctgcaggaaggagaggacaggggcagggaaagttgtyacttgactagcactgttggaagctggctttgcgtgctgtgggcctggctgatgtttagttatcttccctcgctggctccctctggatgtaactcctgtgtcgtgggcaggggcctgtcctttggctgacagccccctcctcccagttatttaccccttacatcacctcctccttccatctctttctgttgagggattcagatcgtggaggact

SEQ ID NO: 184434 - DNA, 578 bp, Homo sapiens
ttctctgtttgcaaaactggaacccacttaatttatggcgattccaaagtagtttcaggatgtttccatattgttaatccgcataagttattcttgcttttccagtaactcctacataaaatagaagaaaaagatataattaggattatttaatggtcaataaatgctggtagattttaacacctagagctcacactaaaaaaaaattaaaaaacacacacacacattgaccatttttattttttgtatgatagaaagtaatgggaaaaatattttctcttttaaaaactatatcaaatgttatggtcattttgtaaatacagttacacctagtagtagatctccaggtgactggtaaaggctaaataaaatttattgattagagactcaatataatagttttaattaaaatttgcttgttacttcatgcggtaagaaggtggaaaggaatttaacatctgagatgttaccatgggyctgggctatgtgaattgcttttacatgtattattttattcagtcagcacagtaatatttcttgagatcttgctatccacactgtctagcagatgcttttgt

SEQ ID NO: 184435 - DNA, 364 bp, Homo sapiens
ttggtgcactgatttcctatatggatgaagaaaacaaggaagacagcagactgtctaagaggatgttttgatttataatagagagatgaaaaggatagctgaaagaagagataaaaccaaaaagaaagatgtgagaattataacctcagtttactagattaaatttggtggtatatgcactctccagccctcacctgctcatcagaaaaaaacaagcytgtaggcctgtagagcacaggaaatgaaaatttccttctagacgctgcattctctgaaagacagctgtgaattgaggataaatattattgctccatatcctcatacatttacagtgcaaagattcagatattattgtactttccct

SEQ ID NO: 184436 - DNA, 569 bp, Homo sapiens
caagttggacctatgggaagagacttgggataataagaaagaatgcaattataagaattgcaatttgaagtaagggactaggctcagaaatgtgcccaaacccatttaattcaatttaattcaacctaggcaataatttacactacagctagaagcaatgttgatttgatggtaagttccttgactaggaaaatagagtaaatttgarcaaatttcagatcttagcacagccaggaaacaatgaggactttagggatatggaattctttagacctaaacctcctttatacaagtgttttgtaaaccttccttctttgctatcttaagataaaatgcatgctatttacatcacacatacaataataattagaaataaatatagctatctaagtgtaataaaaggagaaataaaaggaaagtgatttctaaaactgcatattgatatgtaaatggataaactcttctgcagtagaaaacataatagagcactcagatgtcttcacctagatgtgggtgagacaactgcaaatgaagcccatggtaatggggacttaaaaatgagtgaagtg

SEQ ID NO: 184437 - DNA, 569 bp, Homo sapiens
caagttggacctatgggaagagacttgggataataagaaagaatgcaattataagaattgcaatttgaagtaagggactaggctcagaaatgtgcccaaacccatttaattcaatttaattcaacctaggcaataatttacactacagctagaagcaatgttgatttgatggtaagttccttgactaggaaaatagagtaaatttgaacaaatttcagatcttagsacagccaggaaacaatgaggactttagggatatggaattctttagacctaaacctcctttatacaagtgttttgtaaaccttccttctttgctatcttaagataaaatgcatgctatttacatcacacatacaataataattagaaataaatatagctatctaagtgtaataaaaggagaaataaaaggaaagtgatttctaaaactgcatattgatatgtaaatggataaactcttctgcagtagaaaacataatagagcactcagatgtcttcacctagatgtgggtgagacaactgcaaatgaagcccatggtaatggggacttaaaaatgagtgaagtg

SEQ ID NO: 184438 - DNA, 463 bp, Homo sapiens
gaacttgatggctgaagctttagctactatccgtgaactgacatgcgaagttggaagatcaaagattcttgattccttgtgtgtgaattttctattgttaaacttattttaatgagaraaaaataaaatctgtttaagtcactggaatttgaggcttctgtaatttgcagtttaacttaatcctaaaaattacaacatttataaagaattttcctcttcagactcttgtggttatacaagaaacattttcatgggcaatcaaggtagaccaactaatgctcttcaaatgatatccatgtcttaataccagaaatatgtcagcattcaaacagactttgtatggcacaaaggactatgcaaatgtgattgaatcaatacttttgaaatggagagactatcctggatcacctgggtgggccttaactagaatcataggtattgtgaagagtagagagaaaaaaat

SEQ ID NO: 184439 - DNA, 418 bp, Homo sapiens
ccaagtttttgtctgcacaccttatatgtactgttgctgggaattaaactcacttgaatattagttcaaaagccaacccagtcataagatatgactgaagcacaggaagcaagtcttggcagtaagtggttcttttcttgcctgctttggcaggtgctcagaaacccacttcaactcacacatcaatcttgaaatgctaattcctttggtaatcatcaaaagccattgctggtataatttttggagaaagaattatgcctcagtggyttgatgttaccataattacacatttggtgttcaaatgactgtatctgcattgtgagtaattgtcctcaggctcattccctccccctcctatttcctcgccttgtgcctgtgtgccattccctttagtcagagtgacttttgtgactcaggt

SEQ ID NO: 184440 - DNA, 570 bp, Homo sapiens
gaattcttgttttagccatttaaccatagmtcttgtaatgcaagttctaaaatcagataacacatttggattttaatatgaaccttaatgctttaacaagggtagaaatgaatatagggattcaaaggctgagatagattgaaggggaagaaaacctgactgggaagaggtgttaggatctctttaatcttcccctgcgtgggagttgactgaccattcagaagccagggcagaagtgaaggcttatttcttcttgctttcttgagaaaaacataattgatggaatccatcaaccaatactctacaacatgggagtgatatacctctttgtaaacagatatccattgagcaaatttttcccaacttcaatcaggagcaggttaggcttctcttaggtatttttttttttccacccaaaatttagaggttccctcagctatgacctgtgtttatgaataaacccatggtggtccttctgctgataaatgaagggcaacaccaatgagcctctgcctgaataccattctgtgtgtcaccactgggtcataatataccataaataacacttgc

SEQ ID NO: 184441 - DNA, 405 bp, Homo sapiens
gtctcattgaagttataccttacacaatgtatttgttagtttgtaatatttgtaaaataagtgtagaaagtttggatctgtgttgccaaatgcaccattaaaatttgtcctctaaacacactttcaaaaataaaagagttgaaaaaggtgtttaatggtctgtgttccagttagtatctctaccacaaatagaatagtatttctagtcttttcyattttctaggtatttatctgtggagggagtcagtgtgtgttatgtgtgtatgagagagagagagaaagagacaggtatatgtgtaggaatgcttgggtagaaaaaagagaggtaagtcatcttatgacctaaaaattattatcagtagtattatctcttacacaaagcattttcaactagattaacaataa

SEQ ID NO: 184442 - DNA, 492 bp, Homo sapiens
ctcctagctggatgtgagattttagggagctactctgtatcccatgaactcttgttttccatctattaaatgaagacattgggttgtgtgatcctgctatctcttccaattctttagtgctgttacattttttaaacactactttctctgagcctcatttttcttrtctatagaaatgggaagaatgtctacctcataaggtgacttgaagaattagaagataataatcaagtatctcttcctatacaagtctatttccttcctgaatttagttagcaagagttcacagagcaagttgagataaagagtataacactgtttgaatctatttgagttcaatattttatatagcaagtgaatttggggtagtaagtattcattaaatgtttttagatcctagatatctatgaaaagcagcttacatgcaaggcaaccctcactaaagatttattcttgtttccttgaccctgaggcttaagacaaccttgttca

SEQ ID NO: 184443 - DNA, 585 bp, Homo sapiens
actaggctctttctaccataccatatctcattctagtatctgcgaatgtagtgatttaagcccattgatgagcatatttatttcaattatatatccagaaactgaggaaataactaatgaatctatctgcggagacatataagcaaagctccatctattacaattatcataagttcctgygttggtgaatacaatggcatttggggtgtttcaggttatccctcagaaacagaatagagctcccactcaaaatttgttgttttatattgagactgatggcaccgcacacacatcaagagggtgtggaaaggtttattactcacataatgaagctttctggggaaaacaatgtagccctcccaacctgggctgaaaatggcttgagagaacaagaaaaagagactggctccctcccccaacacagttagcatttatttgtggggagaaaacttaaaatctactctcttagcaattttctagtatataacatatctttattaactatagccaccatgttgtacaatggatctcttgaacttgttcctcctatctaactgaaatttacatcttttgatcaacatctcc

SEQ ID NO: 184444 - DNA, 607 bp, Homo sapiens
aaataattggaaagaacctgattcttatccaaaatatttgtatatataatttaaacattatgaatgtataytgaatttgtaacgttataactggattgaaatatatgtatagtctttatttcaagtatttaaatctaaaatcaatagattgatttttgtagtcctcctgaaaatgtggacggtctctatttgtactcaggcctaagtaaatttgcccctgatttaaaaaaaatcattttgttcttttaatatttatgatctttaaactattctgttcctttctgaaagcaaagataatttgtttaagcatgtatctatgccaaattttaaacaactatgctatatcataaaattatttttaagcatgtgtaatttctttcagaggaaattatatctctgtaaatcatacaaattacttcattgaatattgttgtcaaacacagagcattaaatcatgtttgatttctttctctcagagtttaatacaaggacatgttttttagtcagggtgaatggagaagagagggtaaaataacatgaaggccctgcaaacccttacttgcaaacccaaaggggaaaacccattgaatcgactattatttggtca

SEQ ID NO: 184445 - DNA, 552 bp, Homo sapiens
agtcatggtctttttgttgatagagggtcttgcctcaatgttgatggctgctggctgataagggtggtagttgttgaaggttggggtgcctgcggcaattttttaagacaacaataaagtttgctgcatcacttgactcttcctttcatgagagatttctctgtagcttacaatgtttgatagcattttacccacagtagaacttctttcaagattagagtcagtcctctcaaaccctgccactgttttatcaactaagtttacgtagtattctaaatcctatgtttacagaatcttcaccagaagaagttcccctctcaagaaactactttccttgctcatctgtaagaaacaactcttcatagkttagtgttattataagcttgcagcaattcagtcatatcttcgggcccatttttaattctagttctcattctatctccaccacatctgcaattactctttccgctgaaaccttaaactcctcaaagtcatccatgaacattagaatcaacttcttccaaacttctattaatgttaatatttgacctc

SEQ ID NO: 184446 - DNA, 596 bp, Homo sapiens
tgtggagtgggtgagagcaacagtcaggggcaacacaacgataaaccataaaacatttttctagtgcaggacctatttcatattattgtcattttccagtgtgttattacttattatttcaatgtttaaataagaaccatctggaaatttccactgtggcgtaattcaagctactaacatgatgtccctgaaagtggaattgggaagaaatgagtactataggctcttgaaagacagggcaagctgcctcgagcacactgtgactgagctctgtggcttagaactcatctttccaatatcaactggacattgttgggacctcctgagcattagggcaggctagtttgttatatacacactagactttacatgtctatatatgtgctcgacctcagactataattcagctgttacattttgtagggctgagaatttatttaaaataagcattctttwggtagaaatttggctataggctattctaggaatcagagccttttttaaattttattttcttgtttggatgtttggaataaatccacaatttacacatatccctttaagttgaatacttacagactgctgacaactattga

SEQ ID NO: 184447 - DNA, 552 bp, Homo sapiens
caagggtacaaggcgtctaggtcaaaggcccagctttgtctatagcaggtcaaatatctaggcctaatcttagccagagggaccagrgccctcagcaaggaacaaatacagcctatactggcttatccttgccctaagacattaaaacagttgtggtcattccttggaatcacggcttttgctgactatggatccctggatacagcgagatagccaggcccctttatactctaatcaaggagacccagagggcaaatactcatctagtagaatgggaaccacaagcagaaacagccttcaaaaccttaaagcaggccctagtacaagctccagctttaagccttcccacaggacaaaacttctctttatatgtcacagagacagcagggatagctcttggagttgttagactcgtgggacgaccccacaaccagtggcatacctaagtaagtaaattgatgtagtagcaaaaggctggcctcactgtttaagggtagttgtggtggccatcttagtgtcacaggctatcaaaataatacaaggaaaagatct

SEQ ID NO: 184448 - DNA, 552 bp, Homo sapiens
caagggtacaaggcgtctaggtcaaaggcccagctttgtctatagcaggtcaaatatctaggcctaatcttagccagagggaccagggccctcagcaaggaacaaatacagcctatactggcttatccttgccctaagacattaaaacagttgtggtcattccttggaatcacggcttttgctgactatggatccctggatacagcgagatagccaggcccctttatactctaatcaaggagacccagagggcaaatactcatctagtagaatgggaaccacaagcagaaacagccttcaaaaccttaaagcaggccctagtacaagctccagctttaagccttcccacaggacaaaacttctctttatatgtcacagagacagcagggatagctcttggagttgttagactcgtgggacgaccccacaaccagtggcatacctaagtaagtaaattgatgtagtagcaaaaggctggcctcactgtttaagggtagttgtggtggycatcttagtgtcacaggctatcaaaataatacaaggaaaagatct

SEQ ID NO: 184449 - DNA, 552 bp, Homo sapiens
caagggtacaaggcgtctaggtcaaaggcccagctttgtctatagcaggtcaaatatctaggcctaatcttagccagagggaccagggccctcagcaaggaacaaatacagcctatactggcttatccttgccctaagacattaaaacagttgtggtcattccttggaatcacggcttttgctgactatggatccctggatacagcgagatagccaggcccctttatactctaatcaaggagacccagagggcaaatactcatctagtagaatgggaaccacaagcagaaacagccttcaaaaccttaaagcaggccctagtacaagctccagctttaagccttcccacaggacaaaacttctctttatatgtcacagagacagcagggatagctcttggagttgttagactcgtgggacgaccccacaaccagtggcatacctaagtaagtaaattgatgtagtagcaaaaggctggcctcactgtttaagggtagttgtggtggccatcttagtgtcasaggctatcaaaataatacaaggaaaagatct

SEQ ID NO: 184450 - DNA, 524 bp, Homo sapiens
aacagctatattgaggcagcagagttacagctctatgacttctcctgcaaagcagcactaccccataggcagcgtgttgagaatagcaactcaagggcagttctacagtcatatttatacccactttcaattacatgcaaattaaggggagagttattcagaaatttctagaaaagggatggtaacttccttggaaaggaaggaaggggcagtaagtttcgggtactgccatagcaatggtaaactgttatggtgctggtaggtgtgtcttatggaaaagtgctttcagtgtatcttcctgtttcaaccagtcttcaatctggtccasagttgagtcccacctcctacctcagtttggcagtttcttacaaagctaaacatttggtaacattactacataatccagcaactgcactcctagatatttaccaaactaatttgaaaacatgtcccaagaaaatatgcatataaatgcttataacaatttaattcatagctatcaaaaactagaaacaaccaagatg

SEQ ID NO: 184451 - DNA, 562 bp, Homo sapiens
tttcactcagttttttaagttttctacggtatgagcatattgacttatgaaatatgtatttatatttctaaattgcttaacaaatgtattaataaatgttgtaataaaagatcaagttttggaaatgtatgccttttttctaccaatctcagaaaaagtttaggagattctagttgatgttaggtattataatacatgcacaatatcttaagcaaagcatctgggttggtatctaagtcgtcaatgagaagagggctgcataatgttgggtaagtacagtagtacccacttatctgcaggggatacatttcaagcccctcagtggatgcctgaaaccacagataataccaaatcctacatatactatgtttttccctatacataaataactataataaagtttaacttataaattaggcacagtaagagattaacaaaaataataataaaatagaacaatttttaacagtrtgctgtaataagtcatgtgaatatggtttctccctctctctttcaaaatagcttcatattttcgatcatggttgaccaggtgaagtgaaac

SEQ ID NO: 184452 - DNA, 596 bp, Homo sapiens
tagtctaggttgcttgcccaatgggtaaaccaggccttcatcccttaggagtctaagcctctaaacatatacctttaccttttttttttttttttttttgagatggcagagtcttgccttgttgcccagtgcagtgcaatggcatgatcttggctctctgcaacctccgcctcctggattcaaacgattctcctgcctcagcctcccatgtagctgggattacaggctcctgccaccatgcctagctaagctaatttttgtatttttagtagagayggggtttcaccatgttagccaggctggtctcgaactcctgacctcgtgatctgcctgcctcggcctcccaccggccgtgagccaccaagcccagcccaaacatataccttcttgagtcctttatgaggtatcaatgtagttttttcataataatcaggatcaattacactgcctgtatagtacaatgtatgtcagctggtcttctagcattggagactaaaatggccaggtgatatcctgagctttatatttactaaaatccatacttcacctcctggaagaaacatttctattctgggaactagatcttctaatgtagt

SEQ ID NO: 184453 - DNA, 449 bp, Homo sapiens
gctccctcccaaagggacccggcagttccaaaagccactgggacttggagagggacttccttcccctccagggaggcccggcggcgggacggtcccgctggaaagtggcccccgccgccctgcgtcggacctgtccaccgcgagcgccgatccccctcttcgcggagacagtcaygggccgggaggctccagcagtagaaagtcagccaaacggggctttccgccacctcccccttgccttgtccttgtcagtaaactcaacgtgattaacttccctagttaacgcatattctctcgtccgatttccagcttctgggaatccacaacttcttattcttaaagagcaaaattcatctagactaaataaatgacgttacgaaaacgccccattcccaaagtgtttcgctcttcccctccaccagggcacagcacgcgatgctgagggggaa

SEQ ID NO: 184454 - DNA, 626 bp, Homo sapiens
tggtgatgttaaactgaagccaatgctcgtttaccattctgaaatcctagggttcttaagagttatgctaaatctactctgtctgtgctctatcaatagaactacaaagcctggatgatagcacatctgtttatagcatggttcactgaatattttaaacccactgttgagatctgctgctcagaaaaatagattcctttcaaaatattattgtttcttgacaatgcatgtagccatgtaagagctctkacagggaagtacaagggaattaatggattgatgtgggatgcaatatacaacagaaagcatgtggttctactagctttcatacatgtaaacaacaccggaatgagtataccaaatagttctatcaccccaaaaaactccctgattttatccctctgtcacaccttcctttatatgtaagctctggtaatcactgatctgttttctggccttatagttttatcatttcaagaatgtcatataaatagaatcatatagtgtgtgtaatgttttgaggctaacttatttaattcagcataatgctcttgacatccattaaatttgttatgcctattaacggctctttcctttttattgctgagtgttaattcattgaatag

SEQ ID NO: 184455 - DNA, 595 bp, Homo sapiens
caatatatttaggtataaacatttttaaggcttgagatataaatatacacagacacttttatactattttccagcaagatataccagtttataaccccactaacaacacgactgatcagtacatttgcattagcagtaatgaaaaaacgctgccaatttaagaggcaaatacctgctattttatcgttttaatttacatttttgcttttatgtttaaacagcccycgaattaaagacaaaacaagtatttaccatcaatgttttcacttaaatgtttatagaatcattttttacatttaattctttaatctagttggatgttttctggatgtctgctatgaaatgcagctctcattttatttttaaacaaatttatctaggctttctttcaaaaatagaaattcatacactaaatttatttaccataatactcagcaaaatgaattaaaaacagtaaatcaaacaaaccaagtgcctctcaaaatactggcaacaacttcagaaaggagacagaccacatgtatcataaagttcaaaactgaaggccaaaaaagatgatgattctggcgaggcaggctgcctgaggtagctccta

SEQ ID NO: 184456 - DNA, 595 bp, Homo sapiens
caatatatttaggtataaacatttttaaggcttgagatataaatatacacagacacttttatactattttccagcaagatataccagtttataaccccactaacaacacgactgatcagtacatttgcattagcagtaatgaaaaaacgctgccaatttaagaggcaaatacctgctattttatcgttttaatttacatttttgcttttatgtttaaacagcccccsaattaaagacaaaacaagtatttaccatcaatgttttcacttaaatgtttatagaatcattttttacatttaattctttaatctagttggatgttttctggatgtctgctatgaaatgcagctctcattttatttttaaacaaatttatctaggctttctttcaaaaatagaaattcatacactaaatttatttaccataatactcagcaaaatgaattaaaaacagtaaatcaaacaaaccaagtgcctctcaaaatactggcaacaacttcagaaaggagacagaccacatgtatcataaagttcaaaactgaaggccaaaaaagatgatgattctggcgaggcaggctgcctgaggtagctccta

SEQ ID NO: 184457 - DNA, 595 bp, Homo sapiens
caatatatttaggtataaacatttttaaggcttgagatataaatatacacagacacttttatactattttccagcaagatataccagtttataaccccactaacaacacgactgatcagtacatttgcattagcagtaatgaaaaaacgctgccaatttaagaggcaaatacctgctattttatcgttttaatttacatttttgcttttatgtttaaacagcccccgaattaaagayaaaacaagtatttaccatcaatgttttcacttaaatgtttatagaatcattttttacatttaattctttaatctagttggatgttttctggatgtctgctatgaaatgcagctctcattttatttttaaacaaatttatctaggctttctttcaaaaatagaaattcatacactaaatttatttaccataatactcagcaaaatgaattaaaaacagtaaatcaaacaaaccaagtgcctctcaaaatactggcaacaacttcagaaaggagacagaccacatgtatcataaagttcaaaactgaaggccaaaaaagatgatgattctggcgaggcaggctgcctgaggtagctccta

SEQ ID NO: 184458 - DNA, 620 bp, Homo sapiens
acattgtaatcacagggtccttagaagtggaagaggagccgggtgcagtggctcatccctgtaatcccagtgctctgggaggctgaagctggggggatcgcttgagaccaggagttcaagaccagcatgagcaacaaagagctctcccccatctcccgccccttgttcctcccacctcaccatccccctcccccaggctctacaaatgttaaaaaaaattagccaggcatggtagtgcacctgtggtcctagctacttaagaggctgaggtgggaggattccttgagcccgggaggacaaggctgcagtgagctataatcacactactgcactcagcctgggtgacagagcaagaccctgtctcaaaaatataaataaataacaatgaaagtggaagaggagacacaaaagaagtmagagggactccttttgtgacaacaggaaagagacccagagagttggtagcataaggacgctgcttgacattgccagctctgaagactcatggagggagccaagagttagggaaggaactctagaagctggaaaaggcaaagaaacagattctcctcttgagtcctcagaaagggatgcaccctgttggcaccttgatctcagcc

SEQ ID NO: 184459 - DNA, 618 bp, Homo sapiens
actgggtactctggaatcacccattctactggttttcagtcacatcaacttcattcttattgttcaggcccaaagttacataaaccattatatttataattatataatgtttttatgagttatattactcctcatgaatatattccagamctcctttacttttcaaaatataattacgtctttcaggtacagcaggtgtttatctttgctgagttaggtgcctcttgcttattcaaaaatggagaaagaatgttcccaacttcaactattgagaaaaatatgtttacaagccaaagaacaatttggtaggaaaacttgtataccatttttaagcacagaaaacagatgtttatttattcttattaaaatgtaaaatgaggcatcctttacaaaaacttatttgaaatatgacttacgcataactatatttcattcctctgcttcagattcttcaaggacttcctggcaatataaagaccaaaatgtctaaagtgaccacttgaatccttcaaggtttggcctcaacccatctccctagtttcatctcagaacaatcctccttcatccacactggtctttttgattgaacccacgttcagtgcaggaactttgtatgca

SEQ ID NO: 184460 - DNA, 618 bp, Homo sapiens
actgggtactctggaatcacccattctactggttttcagtcacatcaacttcattcttattgttcaggcccaaagttacataaaccattatatttataattatataatgtttttatgagttatattactcctcatgaatatattccagacctcctttacttttcaaaatataattacgtctttcaggtacagcaggtgtttatctttgctgagttaggtgcctcttgcttattcaaaaatggagaaagaatgttcccaacttcaactattgagaaaaatatgtttacaagccaaagaacaatttggtaggaaaacttgtataccatttttaagcacagaaaacagatgtttatttattcttattaaaatgtaaaatgaggcatcctttacaaaaacttatttgaaatatgacttacgcataactatatttcattcctctgcttcagattcttcaaggacttcctggcaatataaagaccaaaatgtctaaagtgaccacttgaatcctkcaaggtttggcctcaacccatctccctagtttcatctcagaacaatcctccttcatccacactggtctttttgattgaacccacgttcagtgcaggaactttgtatgca

SEQ ID NO: 184461 - DNA, 533 bp, Homo sapiens
taataacaaaattaatgacttcattgtgagcctggcagatactgccctccaacaccaaaaaaagagtccagcgtaatactgtattcaagattcagaaaaatccgatgaactctccaaaatcaattgtatgattttgcagattgtacttttcacaaatgcatccagccaagagggtaaatggaaggctggtttgttagccttgggttgtttatcagtttaaaagagtgttttgttttttagattttcattgtttatttacccaaagagatgccttttgtaattcatctgcccagagagtgtttggttttttttktttgtttgttgtttttttgttttttgtttttttttttcaatccttctgctggaggcaactttttacaattcaaacaaatgtgacattgatgatctagtaatttttactaaattaatctctagttcctaaaatattaagagctctgaatgaactgttctctcctacagtgttagaaacacaaagtcttaaattctacatttcttcggtttatgtggataaa

SEQ ID NO: 184462 - DNA, 594 bp, Homo sapiens
aaattgcgaaatctgttgtgcaygctcaaatgaaaacgcctttcggctttgggcttttatttttttggaactgcgagtggcttaggtctagcctcattttgtttttgtttggttggttttatactatattaacttttattacggtgatccttttgtgccatgttcaaaagaagttcattcctgtctaaagtgggaaagttgcatttaatgttaggggtatttaatgtatttttgtaaatagtttaacactttctttttttacgtaaacctgaaatatattttaaatgtggaatgatgtatataaaatgtgcgaggatcctggtattgtaatattaaaaagaagtttctatatgaacaaagttggtcctaatttgatggaactggaaaaatatgtttggaggcatgtgtacaaaaataaagaggagccatattttaatttagacaccacacaagcccatttatttgggtgtttccttacatgccaattgaaaggaaatttggctttccttagtctgaattaaactggatactgttctctctctcgtagacctcacacttgtcattggaagtgaatagtgcccagaagaaaaatgt

SEQ ID NO: 184463 - DNA, 594 bp, Homo sapiens
aaattgcgaaatctgttgtgcatgctcaaatgaaaacgcctttcggctttgggcttttatttttttggaactgcgagtggcttaggtctagcctcattttgtttttgtttggttggttttatactatattaacttttattacggtgatccttttgtgccatgttcaaaagaagttcattcctgtctaaagtgggaaagttgcatttaatgttaggggtatttaatgtatttttgtaaatagtttarcactttctttttttacgtaaacctgaaatatattttaaatgtggaatgatgtatataaaatgtgcgaggatcctggtattgtaatattaaaaagaagtttctatatgaacaaagttggtcctaatttgatggaactggaaaaatatgtttggaggcatgtgtacaaaaataaagaggagccatattttaatttagacaccacacaagcccatttatttgggtgtttccttacatgccaattgaaaggaaatttggctttccttagtctgaattaaactggatactgttctctctctcgtagacctcacacttgtcattggaagtgaatagtgcccagaagaaaaatgt

SEQ ID NO: 184464 - DNA, 578 bp, Homo sapiens
aagactcacaaactccttatgtgggactctttggaactatcttgattctcaaaatatcttccagctttagtagctatgggctcaagtggttccttttattactcctcatgtctcctatatatgaaatagcttgagtggatctgcaactaaaagaatcacattaaaacatcttccaaatgctcatctgcaggtttctctacagagggccattcatatttttaaatggccaactaaacatttcccccttggtgtcaatctcaatatggacagaactgaattcttcttcttattctacacattttatttcatygcgtggcatcatttgatgaaagttttggaattattttagattcctccctttcctcaaagcaattagtttagtttgctgggaacgtaaggcaaaagggaattgtaaaggtaatagtagtagtagcaatagaaacaaaactgtatttcttcaggaagcatgatttttcacactgtaacatttgtaaaatcagcctgggttttatggtttttgcctacatttaatgaaataggacttcttttttaggcaaaaagttgtttcaagttgaacc

SEQ ID NO: 184465 - DNA, 601 bp, Homo sapiens
agaatagattaattacaatactttgagatattcatttttttgaattttattttaaatgtgtttttatttcttgcaagacggttcaactaaactgacctcggtcaacaacaaaaaattgctatgagttttattttatgttaccagactctattctcttcatttcccactacctcagtttgtttaagcaatgctttgaaaagtacaaactcctgaaccctaaagctttaaagagtatttttaatctagtaattccccataatctaaagtgctaacaagactcaattcaattcgttttattatctaaggttgaaattaatcagaaaatatagtgtagatcccataaaacacaattcttgcacctactgaaatactgaatactattatctgatcgaatttcatttagatgatcacacttatayaaccagaacaaaaattatgatgaaattcctacactaacattccctatttcagttattcactgaaatgttattattcataacattagaatcagaaacttgggaattattttgaaatctttcttttcttcctctcatccaatagtcaatcaatcacacagtctttccaataaatctcttggtct

SEQ ID NO: 184466 - DNA, 586 bp, Homo sapiens
tcggttgttaagtcaagcaagctaacatacaccgcatatcttaaactcccggatggtccactcaggcaggacggactctgagagcatctgcaggatgaggtccccatagtagagggaatcctggtccgctggccagtaatgrtcacactttacctagaacaggacagacagaaaaaacatgagtccggaaaagtgactccttggtgaacctggggtttccctcctctaaatgtcttccaaagttaggaatctgggatcagctgctaaagcaatttgaccatctactttatattaaccttctcatggccagtgctgaagctgaggtgctgctccaagtgaaggggagagcctgtacaaggagcacccctgactccaacctttgggttcactcattttttaggcccagtaatatatggcttgagttttttttttttttttttttttttttcccctcagcatttcagttccactagcaggtaaactgtggttcacaacgtattgttctttctaaagaaagaaatatctagttgggtagaggaaggcactgtcttcctggcccttcttcgttcatatttttatgtcactg

SEQ ID NO: 184467 - DNA, 541 bp, Homo sapiens
aaaacctacgatttttccctgtcatgtccatttacataattctgatactaccctagatgttgccagagtacgtgagtgttatttactattacagatgcataggttttttttatggttttaactcctggtttgtgcaattaattgctctctctcctagatccagaggtttgctattaaagtagcattagcactttccagtgtgtggcctgtggaaggtgaccactgtcctagactggctcagttatcccattcccttgatgaggctgtcttttaagctyaattgaaggtagtaacaacaatcctaactttatgaggattctctttatgtgagtagaaatgtgtagattctggaacagtgcctagcaggttgcagatacttactagaagttttctgagtgaatgaaaagtcgaaaatgaatgtatccttccaagcattaatgtgctttgcatcaagcaacattagtgtaaaattctgctttttctcttttttcttttcaatgtaggaaaggtgatttctaatggatgccacacgttgtagatc

SEQ ID NO: 184468 - DNA, 541 bp, Homo sapiens
gaaggtaaggggagaggtctatcctacagtatggagtacagaagtgggacttagagatagccaagagagtttgaaatattcaaagaatatatacaatakaatctgtagccttttttaaaaaaaaaattagaatttccatctctctgaatgtattccagttgtaaaaaaaaaatgtattgagtgtcccatcatatggaagtttttaaaattgtaggaaataaaatattcagaaggctacacaaggtattaaaaaaggggacagggatataatagcttactagcttattagaatgaatttggttccttatgagggataatctagagaaaagaggcatagaataagatctttggaaccaaacagtctgagtttgaatcctggctctcccttttggcatctgtgtgatcttgggcaagctacctaatttctattacagctttgttatctcaactgtaaaatgaggctgatattgatatatcattggagaggactaaatgagaccatgcaaaatgtgtacttggcacagtgcctgatccacaaata

SEQ ID NO: 184469 - DNA, 541 bp, Homo sapiens
gaaggtaaggggagaggtctatcctacagtatggagtacagaagtgggacttagagatagccaagagagtttgaaatattcaaagaatatatacaatagaatctgtagccttttttaaaaaaaaaattagaatttccatctctctgaatgtattccagttgtaaaaaaaaaatgtattgagtktcccatcatatggaagtttttaaaattgtaggaaataaaatattcagaaggctacacaaggtattaaaaaaggggacagggatataatagcttactagcttattagaatgaatttggttccttatgagggataatctagagaaaagaggcatagaataagatctttggaaccaaacagtctgagtttgaatcctggctctcccttttggcatctgtgtgatcttgggcaagctacctaatttctattacagctttgttatctcaactgtaaaatgaggctgatattgatatatcattggagaggactaaatgagaccatgcaaaatgtgtacttggcacagtgcctgatccacaaata

SEQ ID NO: 184470 - DNA, 541 bp, Homo sapiens
gaaggtaaggggagaggtctatcctacagtatggagtacagaagtgggacttagagatagccaagagagtttgaaatattcaaagaatatatacaatagaatctgtagccttttttaaaaaaaaaattagaatttccatctctctgaatgtattccagttgtaaaaaaaaaatgtattgagtgtcccatcatatggaagtttttaaaattgtaggaaataaaatattcagaaggctacacaaggtattaaaaaaggggacagggrtataatagcttactagcttattagaatgaatttggttccttatgagggataatctagagaaaagaggcatagaataagatctttggaaccaaacagtctgagtttgaatcctggctctcccttttggcatctgtgtgatcttgggcaagctacctaatttctattacagctttgttatctcaactgtaaaatgaggctgatattgatatatcattggagaggactaaatgagaccatgcaaaatgtgtacttggcacagtgcctgatccacaaata

SEQ ID NO: 184471 - DNA, 571 bp, Homo sapiens
gagatctaaatgagtaatactacacaccgcataagaggaatcactaattatatttatgtcttggtgaggaaaagtttgtaaggccagcattagggcacctaactttgcctgttgcatagttttgaaatgttcctggattttgtgctgccagttttgcatggcatcttgcacactatacctgccttttttgtttttcctgaatcatctgtaaagacagtagtggcgtgaggcaagggctcagaaacaacaatagatrcgaatttttaacaggtacagtttgtaaaaagttcaggagcttagaggctggtaaatggaaactgatattaccaacaaagtcggccattgcaacttgccaatcaagatcacaagctaacagagtatgaaattgttccttgcttaaaggtaagaaaagagtagcagggtcatatcctgacaattggatggcatccctttatgagaagagaagctattaaatctgtggtcttttgtatgggtttagaggggttatgaggcaggtaaagccactccaaaggagacacatctgttccaacttgcccaagcatccttgtag

SEQ ID NO: 184472 - DNA, 558 bp, Homo sapiens
gtaatactacacaccgcataagaggaatcactaattatatttatgtcttggtgaggaaaagtttgtaaggccagcattagggcacctaactttgcctgttgcatagttttgaaatgttcctggattttgtgctgccagttttgcatggcatcttgcacactatacctgccttttttgtttttcctgaatcatctgtaaagacagtagtggcgtgaggcaagggctcagaaacaacaatagatacgaatttttaacaggtacagtttgtaaaaagttcaggagcttagaggctggtaaatggaaactgatattaccaacaaagtcggccattgcaacttgccaatcragatcacaagctaacagagtatgaaattgttccttgcttaaaggtaagaaaagagtagcagggtcatatcctgacaattggatggcatccctttatgagaagagaagctattaaatctgtggtcttttgtatgggtttagaggggttatgaggcaggtaaagccactccaaaggagacacatctgttccaacttgcccaagcatccttgtag

SEQ ID NO: 184473 - DNA, 559 bp, Homo sapiens
agtaatactacacaccgcataagaggaatcactaattatatttatgtcttggtgaggaaaagtttgtaaggccagcattagggcacctaactttgcctgttgcatagttttgaaatgttcctggattttgtgctgccagttttgcatggcatcttgcacactatacctgccttttttgtttttcctgaatcatctgtaaagacagtagtggcgtgaggcaagggctcagaaacaacaatagatacgaatttttaacaggtacagtttgtaaaaagttcaggagcttagaggctggtaaatggaaactgatattaccaacaaagtcggccattgcaacttgccaatcaagatcacaagctaacagagtatgaaattgttccttgcttaaaggtaagaaaagagtagcagggtcatatcctgacaattggatggcatccctttatgagaagagaagctattaaatctgtggtcttttgtatgkgtttagaggggttatgaggcaggtaaagccactccaaaggagacacatctgttccaacttgcccaagcatccttgtag

SEQ ID NO: 184474 - DNA, 515 bp, Homo sapiens
cgtttggtccctctatttgcttcctttcctgttggcatgattttgcttagaaaaatgtgaaactttagcctttgagaaagcttaaaatctccccaaattggttcctttaaaacttgatcttccatttctttttctttttcgttttyttttttccccctgagtcttgctctatcacaaggctggagtgcagtggcatgatcttggctcactgcatcctctgcctcccgggttcaagtgattctcctgcctcagcctcctgagtagctgggactacaggtgcatgccaccatgcccagctaatttttgtatttttagtagagacagggtttcactatgttggccaggatgatctcgatctcttgacctcgtgatccacctgccttggcctcccaaagatcttccatttcttcccacttggcttctccttttccttgccatcttcagtactacataggaggtttctagcaacctcaagaccccttgaggaacacacaaaaaaagcatcattcataacc

SEQ ID NO: 184475 - DNA, 515 bp, Homo sapiens
cgtttggtccctctatttgcttcctttcctgttggcatgattttgcttagaaaaatgtgaaactttagcctttgagaaagcttaaaatctccccaaattggttcctttaaaacttgatcttccatttctttttctttttcgtttttttttttccccctgagtcttgctctatcacaaggctggagtgcagtggcatgatcttggctcactgcatcctctgcctcccgggttcaagtgattctcctgcctcagcctcctgagtagctgggactacaggtgcatgccaccatgcccagctaatttttgtatttttagtagagacagggtttcactatgttggccaggatgatctcgatctcttgacctcgtgatccacctgccttggcctcccaaagatcttccatttcttyccacttggcttctccttttccttgccatcttcagtactacataggaggtttctagcaacctcaagaccccttgaggaacacacaaaaaaagcatcattcataacc

SEQ ID NO: 184476 - DNA, 613 bp, Homo sapiens
tagctatattgtgtactgtaaggtacacaaattcaatgtgtgtatgtatggatatatatacaatgaaatattacaaccatcatttctgcatgaaggggatcaacaagccctgtctattgtaagtcctctagaaccagtatggtgatgataaaaaaaactggtgcttcctatttgtagcagaatatgttttctaaagagagctgcattaatatacatcccatttcacatactcttacaatgtgatgttggcactcctcaattgagaggtggrggtctagcttctcttccttagcacataaatgagccattgattacagcaatgattcagtgtgacttcaaggttagatcagaaaaggtgataaagcacctgcttgcatctctctcgagaatgctcatccttggtctccagacagtattctacaaggaaacccaaactggcccataatgagagatcacatgaaaggcctatgtggagaggacctcagactatattcttctctgtgtcctttataaatttctgacccacagaatttgtgaacataggccaggcgcagtggctcacacctgtaatcctagagccttcggaggccaaggcagggggactgcttgaacc

SEQ ID NO: 184477 - DNA, 599 bp, Homo sapiens
tacatacctgaaagtataaaaacacttgaggtttgatgaaatgaagtctatgagtcactgtgatgtaaggtaggactcctcagccaatcccaggcccaaagctccttagaggaagggtgagggggctggtttatacttaaagcccttgtggtagaacctcaagtcctacctactgaaaatctagcctttcccagcagaacatgccgacatgtagcagagtagtatagagcagaaagggcagayattcagaatagtattgaacactggctctacgctaatgctaatccctggggactctaagtacacctgtgcttagaatgagagctcatgggggtcaggggaaaatgaagttttggtccaagttagtgtcacaataggcccagggagtccatgaactctcttcacgattgttcctacagatcctgaaagtatagcgtcttcacattttggaggaaacatatactgacatttgggattgcttctctgatcaatatactgagtaacccagaacctgccagctttcagtagcaatcagagcaggaaaacctgctcaaggctacagagcaggaagctgtctcaattcatctctatggctcagt

SEQ ID NO: 184478 - DNA, 546 bp, Homo sapiens
cactggctctacgctaatgctaatccctggggactctaagtacacctgtgcttagaatgagagctcatgggggtcaggggaaaatgaagttttggtccaagttagtgtcacaataggcccagggagtccatgaactctcttcacgattgttcctacagatcctgaaagtatagcgtcttcayattttggaggaaacatatactgacatttgggattgcttctctgatcaatatactgagtaacccagaacctgccagctttcagtagcaatcagagcaggaaaacctgctcaaggctacagagcaggaagctgtctcaattcatctctatggctcagtggcttcaataacaaacaagagtctatgacagatcagcggatatatggagcccagagagagccctgatggtataaagcaaacccatgctttctttggcaagtgactattctccttttgagaaacaagtggtttgttactgggtcccagtagggtctgaatgcctgaacatgcaacatcaatttaccattttacccactgtatgctgggc

SEQ ID NO: 184479 - DNA, 502 bp, Homo sapiens
atcaagttggggtcaactcggctgccagagacctaagttgccacaagggtcaccgacgacctaagcagcaagtttccttcgtccagcctcctgcccccacgcacattgcctccacagcaaactccacctgactcagcttgtttaactccaatcctgcagccctcccggcckcagcagggtcagggggcgcgggtctgcgccaagacggttaggaggcccaagtcctgggactggacggttactgcgctcccttgggcgcagccgctggcggcgtgggcgcggctgggtcacgcctccggcaccaccgcgcgccagcccgcccgtggcatgggaacctgcgattcagtcgtccccggggacctcccagcgcacaccgctagcctggggctttcacctcgatccgcccggcctgggcggctcgtgtcctcccacaccgccacccgtgcccgcttcccggggtgcgcccggagcctggccgctctccctgcaggtgaccagtact

SEQ ID NO: 184480 - DNA, 399 bp, Homo sapiens
agatcttggcaacagttgttttgaaaaagtacctgaacaaaatacattttataaagtaaagtattcaggaactgacagaactggagaagaatatatttatgttacagaagtcatggacaacatcctattcattttagtcaaggttttctcagccaaaccaatttatatctctttatccagattataattatgttgtatcatttatagactgtaagtttgttctttagcatcacctttctatttttgaccaataaatkctcaatttggaaattcttataggcagtgtgatggaaaaattcaatgtaataaaaatattatgccagagtcatgtacataagcagagtgtttccacagtgtccctgcaattaggcaatacccattgtccattcctgttggctc

SEQ ID NO: 184481 - DNA, 530 bp, Homo sapiens
acaggcatgagccactgtacccagccatgttttgtatattttttcaaaacaatttcataataaaacattcaaaatatggtagaatcattgttataatgaaagtactcccagcccaggacaatagtggtggcagaggttcctgcctgcaggaggcaatgatgccattgttttgtcaaatgtgagttctgcagaatatttttaatttttattttcatttctctggttcaaytgttactggcttgaatgcaggatattaatatgtgctgcacaagaaaagaattcaggggtcaaggtggttttgggattagtgggttcaataaagctcaaagggggccttggctgcaggaagctctctttttatggagcattgctgtctgtgcattgtccttgggtactgtggctctaagaggggacacagaagcatgtagaactttttacttttccaaccatggatttttttttttaatacagaggattttgcttagttacttggagaaaaacttgtgaaacacgagggtaagagaatttga

SEQ ID NO: 184482 - DNA, 639 bp, Homo sapiens
tctttatggttttatatcctttttttcctacaagtgctcaatagccctggaataggacagagagagtagagagctagatttatcaagactcagaatttgccaractttgtaaaaatgaggtcaggaagtgacacagattggcaaaaaacttctctaagtggaagaccatgtaatttaacctggaaaggaaagaacgtgaagactggagtaggcatacagaaaaagagaaaataaaatggtcagggaactgaagtttgaaaaataaatatagaagaagtatcagaatgaaagagttggaaggataggtgatatgtggtgaggatgtgggtgttttcagaattggagtaactctaagaaatgaccacggccacagattgaccatgggagttggggtgaaagttatgataaggtcaatttctactttcacccgaacttccatggttccctagaacccagacttctgggtaagtcatggtcatgatccatgaagttgtccagcagcttaaaacaaaaaagaagaccaccactcaggagtaagtcttccatgaaggaaaggagtcgctgggagcccagcaggtgaaacaatgaggaggggtagacagatgacccaagactcctccgaggaggaggtattagtga

SEQ ID NO: 184483 - DNA, 594 bp, Homo sapiens
attatatgaaatgggcagttaaggacagaacctgatttagatgtaaagtatgtggtatagaccaagtgttgtgggagttcggcaaaacctagacttgggactattgagctagatcctgaagattgactaggatttgggtaagcaagaaggaaagcatgcgtaagtgaagtcagagaggcagacatgaacatagcacattcacagcaggctgagaagatggtccccaccaagttggggagtatccattaaggagcaggaaacaagattagcttgggatgcagagtcttcaaccacactttcaggataaagacaagaaattcaagtgaggtggctcacaaaaatacaaaaattagccagacgtggtggcctgcacctgaagtcccagctactcaggaggctgaagtgagaggatctcttgagcctgggaggtcaaggttgcagtgagccatgatagcactactgcactcaagcctgggcaacagagcgagagcttgtctcaggaaaaaaaaaaaaaaaaaaaaaagggaaggcaagaaagagccgctagaattacactaaccccacgaagacgggkgctatgctgctgctaagctt

SEQ ID NO: 184484 - DNA, 476 bp, Homo sapiens
cctaacactcggcaggaaacaggtggttaaccagttgtctgtgtactgaacgaaggagaagcaagctctaggattacctgcctacagcacccccaaaattccccaggttcatcctcctcaaaggagagacaacttcaaccatttcacattcacaaattggtgactttggacacacagtgattatgacaaagcttgatgaaggagcaagagctaaccccagatactgtttcagagaaaaccccaatcctgatgaaatccctaccaaccccagagacaatggcagcaatccaaagggtctatgagaaacaaggagcagatagttcccccttgtggcayaggcctgtggactatgtgactttattgtgaggacagggtggacccatgttcaaactactcaaggcatacacaaacacatctgtaccagatggaaggctgagcatagccttctacctccctttccactgaatatttcatga

SEQ ID NO: 184485 - DNA, 640 bp, Homo sapiens
tctcaaggattcctttaaagactcaaaaagagagggaagacctgttttcaaggttttctgctcctccatcccagtctgaaggtggcagaaagatttaaaggttgggggaatctgggagatagggaagctaccattcctttgatttcaggaactccctggcagggtgtagttatatagatgtgcaggcttctttcctactgagcatctcacctggccttctagycccatgcatccccaacctctttcgccttcctctgggcaaaggtggcaaatgcaacctcaaatgtggaatcctctgtcttttttcaaaccacctcctgaggctcctggacaagcagagtgatatttggattctaagagacttcagtgattttctaaaataggatgtggtataactgatgataccctcaggcctagggacttgggataaatgtccgaagggaattccccaatgttcatagaacccacctatggcagcccctgggcttcccacactcaccatgtctcagaactgcaattgctccatccacttccagtttgaccattgggaaaaaatgataaggaggaagttcctctcctttcttttgacctcagtggcccacatccttcataatattgccctcctctagtcccacctatc

SEQ ID NO: 184486 - DNA, 640 bp, Homo sapiens
tctcaaggattcctttaaagactcaaaaagagagggaagacctgttttcaaggttttctgctcctccatcccagtctgaaggtggcagaaagatttaaaggttgggggaatctgggagatagggaagctaccattcctttgatttcaggaactccctggcagggtgtagttatatagatgtgcaggcttctttcctactgagcatctcacctggccttctagtcccatgcatccccaacctctttcgccttcctctgggcaaaggtggcaaatgcaacctcaaatgtggaatcctctgtcttttttcaaaccacctcctgaggctcctggacaagcagagtgatatttggattctaagagacttcagtgattttctaaaataggatgtggtataactgatgataccctcaggcctagggacttgggataaatgtcmgaagggaattccccaatgttcatagaacccacctatggcagcccctgggcttcccacactcaccatgtctcagaactgcaattgctccatccacttccagtttgaccattgggaaaaaatgataaggaggaagttcctctcctttcttttgacctcagtggcccacatccttcataatattgccctcctctagtcccacctatc

SEQ ID NO: 184487 - DNA, 420 bp, Homo sapiens
tagaattcagttcagctgcatggaatagaaactccaaaataagcagcgtaaagacataagcttctccccagcccctaagtaaaagaagactagagaaaggcagcctaggactcctggtaggaggccccgctgtcctcaggaatccagccacctcttttctttctgccctatcattctcaaggacctaaggacacaacttctartctcaaggccatatggcagttgtgatggctccagccaacctgtccaatttccaaacagcgggaagaaagaagggaaatgggcacaaaaacacgtgtctgccgagtcagctccttttaagaaatctttgctcatatttcacacagtatttccatttacattcaatcaagtggccactactaaccgcaaatgtggctaggaatgttatcttttaactag

SEQ ID NO: 184488 - DNA, 420 bp, Homo sapiens
tagaattcagttcagctgcatggaatagaaactccaaaataagcagcgtaaagacataagcttctccccagcccctaagtaaaagaagactagagaaaggcagcctaggactcctggtaggaggccccgctgtcctcaggaatccagccacctcttttctttctgccctatcattctcaaggacctaaggacacaacttctagtctcaaggccatatggcagttgtgatggctccagccaacctgtccaatttccaaacagcgggaagaaagaagggaaatgggcacaaaaacacgtgtctgcygagtcagctccttttaagaaatctttgctcatatttcacacagtatttccatttacattcaatcaagtggccactactaaccgcaaatgtggctaggaatgttatcttttaactag

SEQ ID NO: 184489 - DNA, 550 bp, Homo sapiens
gattttgagggatgctgccatcctagagacaagctacatgtttgttttcagcagggaaggtcacggagagttgaggacatttcatgagttgccataacaatcccactggtggctcaagatgacaatgaaccaacaatactttcagagagccagaagtcagtggttggcagagcctccaaccagttggagttttattatgtaatataaataatacactgacaataaagaaaagtctggacctaacattgtgcattcttaatagtatttttcacatacamtctaacttattctcaatactttcccaggagcaattattactatcctcatttggcagctagaaaagtaaggtgtagatttcagccccaagagtctctttcttgacatagaacatggagattttctgggtcatccaattctcaatctctaggcttttttccttgtcttgctgctagcagaaaaggcaaacagctaaacaggtagaaagaactttcccataaaatgctttgattctgttaagttttggaaacacctcacatcccaattctatctg

SEQ ID NO: 184490 - DNA, 560 bp, Homo sapiens
cccaaacgttcaggaactcttctactgtcttgtttccacctaatcagagcaaggtgaacagctcttgtctccaagtaaaagatgagcaaaccagacaagaatgggatggctaggagaggagagatttcctgaccatccactagactcacatagcaatgaatcataattgagtagaatctaagttgcagcactcaggtcacagttggaggacaaaatgaagtcagaggatgcagaagctattaaaggaatgtgccgcattggggaactttctgggagtatgtaagaataaatgatgtaaaggcttctactgtggacactgcactgaaattcactcaacacttactgaacatctgcaactgcaatgatgccaagaataattatgtgccasgctaagtgtttggccagcattctcctgctgaatcctcactcctgagatggctattcttggggccctcttttacagatgaggaaactaagcccataactattcagctagtgagtagaagaacagaactcaaacccagatgtctgactccagagtcctacagcagtgtcatgaa

SEQ ID NO: 184491 - DNA, 541 bp, Homo sapiens
ggtctgtttttgcaagaatctcagctaaaaccctaatcatagttgaataattaacaagcctgcacttaatttttgcacaggactaacacacctgtgactcctaggctcttttccatggatacttcttgagagttctcatcacttagcgtgacagaactctcaccttccttagggaagtaacacctgcctagcactaattcagtttcggccaaacattcatattgagactcagactgaatcaggattccttgagtctcatttcctatawctaaaaaatgggcaagagagggaagaatgtcttcagcataaaccaaacaccatagatagacagacagatgctgatctactgctcctattgcatattttgtgcagtttttcttttcttttttcctgctaaagtcaggggagggaaattatgttgctaagttgctttctgtggccaggcgcagtggctcatgcctgaaatctcagcactttgggaggcagaggcagccgggtggcttgagctcgggagttagaaaccagcttgggcaacatagtg

SEQ ID NO: 184492 - DNA, 403 bp, Homo sapiens
ccaccttaggaacctggggaatcccctgaagggttatggacagtgactgtagccagaagcagcatctcccctgttctactgtcagccagtacagcccatgaggaaggattatttataaagaaagagttctatgtgctctgctcataatgttaggatcctaaccgacattgtgagatggagcctcctgttaacataaaaaataataaccaatgcctgcttggcccttgctgtgtgaacaacactgtgttggcrtcatctcattaagtcagtctgacatcaaccctgcgatgcaggcaggggtggggattgtatttaaaatctttaatagctgctatgacagatgcagaaacccatgagaaccaagagtgacacagttgcacatgccctgaatatttgccttggt

SEQ ID NO: 184493 - DNA, 483 bp, Homo sapiens
ctcaaaaaaaaacattgctttctgctgccaccttaggaacctggggaatcccctgaagggttatggacagtgactgtagccagaagcagcatctcccctgttctactgtcagccagtacagcccatgaggaaggattatttataaagaaagagttctatgtgctctgctcataatgttaggatcctaaccgacattgtgagatggagcctcctgttaacataaaaaataataaccaatgcctgcttggcccttgctgtgtgaacaacactgtgttggcatcatctcattaagtcagtctgacatcaaccctgcgatgcaggcaggggtggggattgtatttaaaatctttaatagctgctatgacagatgcagaaacccatgagaaccaagagtgacacagttgcacatgccctgaatatttgccttggtwgaagcttcttattactcccactttacagatgaagaagatgaggcttagggat

SEQ ID NO: 184494 - DNA, 524 bp, Homo sapiens
tggcaaactgtcaggagaacaatcgtttgactggagaatgaggcctctcctttcccagaactatcctttgcattctctgagtttgagaataaatataataacaaccaaacaaccataaaagttagacccaagccttgacttcagatggctcaaggtgaggataataatctacaaatcaatccacagatcgtgcagaagggaggaaagatgttgtgctggttccctgatccctatctggggtcccagagttccatggaacattccagaagtaatttggctttgtgctcagtgcacagggactaatgtttttcaacaaaatttcataaggagatgtcgggataattttgggtcctgctctcaacagaagctgaaaattaggtgtggctaagaagacaggatcaggcttttttatgtgaccgctgttctgacaaagyacccaagcagtgaaaaattgtctgccttatcaccacagagaatttatgatggatttgtccaagaggagtcctgctcataaaagcctgcaa

SEQ ID NO: 184495 - DNA, 582 bp, Homo sapiens
ctggcctggcctggaggccagatgtacttcttctcctaggcacaggcaacccccagtgcaggccaagagttggggaatggctactcttgtctacctgcatgcctcttgacagcaaggaaggtcaagacttgtactctgacggcgtgttgttgagactgccataaagtcacggagggtattttgtcatcagccctactcccacactacttaaaaatctcgtcaggtgtgacaggcaaattctggcatgagttctcttttgtggccccaacggaagcagcagtgtttcctaaaaaggcaagccaagcaccttgagactccatggaggctggagctaggggatgtggagagtgagctcactagggtagccttaaacaggccagtccatagtagtgaygaggggagccctccctgttctgaggctgcagagctagtgtattctgcttcctaactgcacagaagttctgcctcagaatacaccactcttagcagatcctgcacaggagtcctacagtctattccacccattcccactctgacaactcacttccttgcctccttgctcactctacgccagccatattg

SEQ ID NO: 184496 - DNA, 542 bp, Homo sapiens
ggtgatttttcctgctctttggtgggtggggtgaggaaggatatcagacctaaatcacgaaggagcccatcctcttccttcactgcatccttctccacaacagccctttggacactgccttagcacatacaggagctgaactctgcgtagctgrggtttcccaaatgtaccccatgacaccaaaaaccaagctcgtcgtaaagaataaaggcttcgtgcaggttcccaggaacaaactgaaggactatgctcaatccttactggaatcaagaagtgaattttcatgatgctgggaaagaaaaaaggtagccttaaaaattccttactgggaaaagtagatggggacatgaggagcaaagtatctaagagaaagaaaggaaaaattatccattctgcctggtaagaaggcttctggcagcctttgctctgcagctccaccaagctaattctgcaagagctgaccctatcaggtggccaaagtctggaaccattggtatatacacaataaatgaaatgacactgcaaatcatgatctaatgcta

SEQ ID NO: 184497 - DNA, 619 bp, Homo sapiens
tctgcaaaggagaaggaaacacagggtggcatgtctgtgtgtgctgcaggtgatggtggtagccaggcaaagggcaggtttctgcgaggggcaggaaggtctgatcccttctgggagaggggctaaacagattcccatctgttyatcaaagctgttgattcaatgttaatcaaagctgttctcccttgttgtgcctgccacagagctggacagcaattcaagacaacctagaggagacattttgggagggtgaaggaaactgatggcttttaaggcatcctcaaagatgctcaaagatgcaattcttcatgtaaatgtctaaattactttgtgaagtctggattttaggtctgccatcttgtggccattgcaataaatattgcccttttcaatttttttctgtagttacatctctaataatctatattcagaaaaggtaccagaaagaatgcttatttaaaaaaataaacattacacatgggagagagatccatgattcagggggagctaggacatttcatattcaaatccccattctgctgacatttttcattctttgactaaagtctagtttcaaataattagctatcaaattatcatttaatacaggattgggact

SEQ ID NO: 184498 - DNA, 619 bp, Homo sapiens
tctgcaaaggagaaggaaacacagggtggcatgtctgtgtgtgctgcaggtgatggtggtagccaggcaaagggcaggtttctgcgaggggcaggaaggtctgatcccttctgggagaggggctaaacagattcccatctgtttwtcaaagctgttgattcaatgttaatcaaagctgttctcccttgttgtgcctgccacagagctggacagcaattcaagacaacctagaggagacattttgggagggtgaaggaaactgatggcttttaaggcatcctcaaagatgctcaaagatgcaattcttcatgtaaatgtctaaattactttgtgaagtctggattttaggtctgccatcttgtggccattgcaataaatattgcccttttcaatttttttctgtagttacatctctaataatctatattcagaaaaggtaccagaaagaatgcttatttaaaaaaataaacattacacatgggagagagatccatgattcagggggagctaggacatttcatattcaaatccccattctgctgacatttttcattctttgactaaagtctagtttcaaataattagctatcaaattatcatttaatacaggattgggact

SEQ ID NO: 184499 - DNA, 575 bp, Homo sapiens
atttataatagttctgtgttgggaagaaatggttaaaacgccactatgaaaacacactaagcctatctaatgcacactcattaatcatgatcttgttgattgtgtcaacagaacagaaagcaaatacatgtggccattgcctttgcaaagtttcaccaatgcatcacagccttcaaatgaagaggaggcacaagagcatactcaatgaccacaaattaatttcagagcccaagttacagaagtatagaactatgcgtctacatacatacacctgaagccttgcactgctaagcaacggttcaaaagacaggccaaacaaagagctgcaagactcagcttatgtattcctaaattataaaaagttatatttgttagttacctgaaakttctggactcatgaatacaatttgtgggatgctactggagtgctccttcccagagtttgaaggaacctgaaaccagacagcagctgcagaaggaaagggtctggtaaactacctggaggagctccacatctggaaagaatcgcaagggagccagcccaagaaacaatggtatagaaagcagtctcagat

SEQ ID NO: 184500 - DNA, 363 bp, Homo sapiens
tagtaaaaattagttacatattccagttgctgtttaatgcattattaaagaattttcacatatacattggtgagaaagatggstgaactataatgtacaattaatatgttgctttgccaagagatgactggatcacaacagtagagaaagtcagaagatcaccctgaggacatcccaactaaatgctcacttatcactgaatctggctttccacggggtgtctctgctagtctgcatggaggtggttcagtgcacgtgaacacgccatgtacaaataacgctcagataaaataatccagaaataatatactttttgacacatataataagcatatggagtcagttaaccaagaaatgaaatac

SEQ ID NO: 184501 - DNA, 432 bp, Homo sapiens
aaaaactttcctgctgctgccatttaaaaatattattatccataaggtaaattcagagagattgatggtatggtcttgatgtgcctatcatttgggcttactgaggctggagaatgcccatccttgagaatatagaaaaaaaaatagtcaactgccttgggtgacaaagtctcatcacttgccccaacaggtgataacgtgaggatcaccaaacacccatccccaaggcaaggtcccaacactgaaagccaaaggtggctttaaaaggacgggacaataaccaagaaaccagggttagctgtcgaatatctaaaatggtattggcttccatgacatctctctatctttcacccctaactactctacaggttaccagattaatgyttttaaatataaaatttctaaaaagtaatttcagatgactaagatatt

SEQ ID NO: 184502 - DNA, 388 bp, Homo sapiens
tctaagctgctgctcaacttctgcagggatctgctctgatttctgcggaatggtgacttgcagagaactttgttttctttctattcctttgctgggtaaagaaatgaaagattagatcagaagcaagatggaggagtccaaattttaaaaataggaaragttttgcacaggttcaggtccctcccgtgccctcagccggcacaccctccacgtcacaatgtctcaggctgtgttgtgtgggcagggtgtcacctctgtcccctccagaggggagaccatgtctgacctactccctgcttgtccccattgcaaaggacagcgcctggcatatacttggcactcaggaaataaccactgaccgacaggctctgactgtgggcctgaattc

SEQ ID NO: 184503 - DNA, 429 bp, Homo sapiens
cagtggctcatgcctgtaatcccagcactttgggtggctgaggcggatggatcgcctgaggtcaggacttcaagaccagcctggccaacatggtgaaaccctgtctctactaaaaataaaaaaaattagccaggtgtggtggtgggtgcctgtaattccagctacttgggaggctgagccaggagaatcgcttgaacctggragaccacgccactgcactccagcctggacaataagagcaaaactccatctcaaaaaaaaaaaaaaagactgcccaaaagggacttcctcctgacttctccatacagaagtgacctccttttccttaatgtctactgtgtaccatattcagacttccaacatggtacttacaattcatgtcgcctataatagttaaaatcaaagtctatctccctccattagccttag

SEQ ID NO: 184504 - DNA, 476 bp, Homo sapiens
aacatgtaagattagaagttctcatctcagtctgacttggcgatatgtctaagttccccagcccttcccctgctgtgctcttgaaagaagaacttaacaattttagggtaaaaagagaccaacagaccggcacagtggctcaaacctgttgtcctagcactttgggaggctgaggcgggyggatcacctgaggtcaggagtttgagaccggcctggacaatatggcgaaatcccatctccactaaaaatacaaaaattagccggccatggtggcatgcgcctgtaatcccagccactcgggtggctgaggcaggagaattgcctgaacccaggaggcagaggttgcagtgagctaaggtcacgccagtgcatatgcctgggcgacagagcaagactctgtctcaaaaaaaaagaaaaaaaaaaaagaccagcaaccttcccttttcttccgctttccctacagaagacacagaaaa

SEQ ID NO: 184505 - DNA, 610 bp, Homo sapiens
acaatttttatttgttaaatacacttcaataaagctgaaataaaatctaaggccgctctattttatgtgactttacttatgttttaaatattcatacaagtgttctgaaacttctcaggatctgccttgatgtgggtacatttttatctgttgttctgggcaatcagtgtatgctttcaatgtaggaattgttcttggatttgttctttaatgctttccttttctccattttctctatttattctttctgaaacttctactatttgaatattggacacctttgattctctaattttcttttcttttttttttcttttctcttttcttttctttctccctctatcactctcttttgtgtgtgtgtgtgtgtgtgtgtgtgaaacagggtttcattctgtgatctcactctgtggcccaggctggtgctggtgcacttcagctttgacctcctgggctcacgcaatcctccttcctcagcctcctgagtagacgtagctggggctacaggcatgcatcaccatgcstggataatttttttttttaattttgtagaaacagggtcttactatgttgctcaggctggtcttgaactcttaggcttgagtgatgc

SEQ ID NO: 184506 - DNA, 496 bp, Homo sapiens
gaatattctgtgaccatcagagaaagactctccttgccatccacactgcaacaaaactttggaaccttgtacgttggattcataaccaaacaactgagaagggtccctccatactcttggaattgtacacccattggaacccttaaggtaaaatgaaccaagaaagtttctccccagaggaagatggaatacttgatgtgaacagcttttcccaagatcacgaatcaagacttctactatcatgagactcttatctttgaatattttttacttgwttatgcttctatgaataatagaaatggaaaggaggtctattatgtgcacttagagggtatatttttatttgtgaaggattttgcacccagccttatacatgaataaccttatactttgatagataaaagatgaaggccccatgtaggtgagaaactttagtggtacatacattgcctcataatcagtcaaaactcctcttaacccacatcatgggttaaag

SEQ ID NO: 184507 - DNA, 380 bp, Homo sapiens
aaatgaagcatacatatatagcccttgtatttcagtttgcagttccattaaatacacatttggagaaaaagaaaaagtatataaaagaaagccaatggatcgcagagtactgaatatcagggcatgtgccattatgtccaaagcctgattctcctcctgaagacagtgtgatcaggaaaaagtttcataaaatcagttgaagaaaagaaggtaaagagagcagtttactcagtgagggttaacatgacaagcataagctggcctgtgtgtggacacccttctccaggaagtcctagcacctggaggaacacacaggaaacaaacggataactgtcggtgaatgacactcagctagttaaayagtagcttaggttgaattc

SEQ ID NO: 184508 - DNA, 605 bp, Homo sapiens
ttacttagttgaatatttttctcatttggtaatgaattatgagtgtgatattcattaggtcccaaatagtgctcttcttatccactaaaagagctacataaaaaatacaaaagttgtagcactattcacaatagccaagatatggaatcagcctaagtgctcattaacagataaacagataaagaaaatgtggtatatatacacaatggaatattatttcaccataaaaagaatgaaatacagtcatttgcaacaacattaatggaactggaagacattaygttaagtgaaataagccaaagacacaaaggcaaatggcatatgttcttactcatatgtgggagccaaaaaataggctgggaagaatagtggagaggaagggataaagagaggttgcttaatgggtacaaaaatacagttagaaagaaggaatatgatctagtatttggtagcacaaacacttagggcgactttagctgacaatagttcattgtatatttcaaaataactagaagagtagaattggaatgttcccaacacaaagtaatgataagtgtttgaggtgatgggtatcccgactacccatatttgatgattatacattg

SEQ ID NO: 184509 - DNA, 400 bp, Homo sapiens
aaaaacagtcatctctagagaagctctctctgtttagacatttgctcacagcaattaaaaggggcctctggctgaccaggaagaatccaacttgggaaaattacaaaccacatattaactacagtggtgtcagtgcattttggcatccttgtttcaaaagcaaaaaccaaaaagccactctttttgtttttttgtttttgtttttccttgaaaagcttgcattaattcaggagggtaacttaatatccatgacatcctaacagtgagagaaaacagtagagaatcttttyctaaagtccgaacagaaatcagattgtgaatatgtgcttatgtgcaaaggacttcatctggaaagtaatgagagggagcacagctgctgtaagcaagtgagtgcatagat

SEQ ID NO: 184510 - DNA, 332 bp, Homo sapiens
ttgttgaattgtaaccagtttgaaacatagtgtagtgaagtcaattattaaaacgatggcagcaagaggtcagggaatggggtgctttatcccttccatcttggggagtatgtaccttggccagataatgtcatgattagtaacatctrtaagattcatcactatagtttatatactaaagccaggggagacaaatattaatagatacttcttgcctctgccttgactgctgtcccagagtaactgatttatgctaatgacaatctaactattatgttgatgggtcatgccaaaaaaggaaaaaaaatgatccgggtaaagttcttttcctt

SEQ ID NO: 184511 - DNA, 586 bp, Homo sapiens
tttctaggaaaagaatttagcaatatcttccctacttgcatgtccgtttataggctctctgcaagaagaaaaatatggctctttttgctcgaccccacaggcagtcagaccttatggttgtcttcccttgttccctaaaatcactgttattttgttcttttgcaaggtgcactgatttcatattgttcaaacgcacatgttttacaatcaatttatacagttaacacaattatcacagggtcctgaggtgacgtacatcctcagcttacgaagataacaggattaagagattaaagtaagacaggtgtaagaaattataagagtattatttaggaagtgataaatgtccatgaaatcttcacaatttatgttccgctgccgcggctccagccrgtccctctgtttggggtccctgacttcctgcaacaatatggggctgaagattttttaaaaaccatgattgcagagtctgctaaaagttgaagattttaatttactctgctggtttacagcatcagaaaatccaatatcgcatgaggcttagtagatcagaactacatcaggccatgcttgtaaagggaatgca

SEQ ID NO: 184512 - DNA, 472 bp, Homo sapiens
aatggcatagtggtagacatagtaagttttttctttttaagataaaaataaccctgataaatattaagggattttgaaaatatgttgttttttccggcagcagtgacttcaagcctgttatcccagcattttcagaggctgaggccggtggattgcttgagcccgggagttcaagacaagcctgrgcaatatggcaaaaccatgtctttacaaaacacaacaaaaattagccaggcatggtggcacatgcctgcagtctcagctacttgggaggattaggtgggaggatcacttgagcccaggaagtcaaggctgcagtgagccaagattgcgcctctgcactccagcttcagcgctggagggagaccctgtctcaaagaaaaaaaaaaaaaaagaaagaaagaaaaaaagaaaataccttgttttaaaaatgaaaatttacaatattattatctaaaatctcaaccagaaa

SEQ ID NO: 184513 - DNA, 398 bp, Homo sapiens
atttaaaccagatgatcataacctttttatggaagcaktacgtatatttagcccccagggacctgagatccccagtgctccagaggagacgctctgcagaagaatgtgtgtgttccagaaaagggagtaggtcctctggtggcagctgctactgtgcagtttatatggggccagttagatagaggctgattggccagctaaaaaagctgattaaaacacaaaaaaaactcaagagagcttttgcagtgctcttttgtcccattggaacctctaatttcccaagagagatgagttagataagattggaactgtcaatatacaaaatcttttcatatataatgttctttctgtttatttataatgtgtccagtgttttcccttaaattccatgttaatcc

SEQ ID NO: 184514 - DNA, 586 bp, Homo sapiens
tttaaaatgttgctttggctttgtaaatttaaatatgtaagtgctatataagtcaggagcagctgtctttttaaaatgtctcggctagctagaccacagatatcttctagacatattgaacacatttaagatttgagggatataagggaaaatgatatgaatgtgtatttttactcaaaataaaagtaactgtttacgttggtgcttttctatgtctgatcattgtattcaggtgstacagtgcttaaaatgttcttctggagccacccagtggaataatcatctctaaggtgacagggccatagatagttaagacagtggatctggggcttttcagaaacgacactcttttatatgatgtatcaaccattggtgataagactgaatcaagtctaatgttaaaataattgacaatgatccaggtaaaagagtcaccatctcttttctatttatgtcaaagctactaatagtatgtctctcttttgctgcatatctattgtatgaacaaaaaggtctgagtgcccagcacccagccattgcttctctggtacccatctggatcttcctctcagacacaacagttgta

SEQ ID NO: 184515 - DNA, 595 bp, Homo sapiens
atcaaggtggtacctctatgagtatgtaacaactacagtgttattgggcctagggggtctcctaaagcagatamagattgaatcacaacaccaagtcctttagagtatctggaaagccttcccaagaagaatgagtacaaacaagcccagactacaaagactataataaatacctaactcttcaatgcccatatatagacaaacatctacaagtatcaagacaatccaggaaaacaggaccttaccaaataaactaaataaggcaccaaggaccaatcctggtgaaacagaaatatgtgacctttcaggcagaaaattcaaaattgctgctttgagcaaatccaaagaaattcaaggtaacacagagaaggaattcagaagtctatccagtaagtttaagaaagagatcaaaataattaagaagaatcaagcagaaattctggagctgaaaaatacaattggcatactgaagaatgcatcagagtttcttaatagtagaattggtcaagcagaagaaagaatttgggagtttgaagacagtatttgaaaacacacagtcagaggagacaaaagaaaaaagaataaaaaacaccga

SEQ ID NO: 184516 - DNA, 390 bp, Homo sapiens
gaatctagaaaatagcctcaaaggggcaaatctgagtttgttggccttaaagaggaggtagacagaaagagaccagggtagaaaattaattcaaagggatgacatcagagaagtaaccaatagagaaagatatcaacatttgagtacaagaagrttatagaccatcaagcagatttaacccaaagaagtctacctcaaggcatttaataaactctgaaaggtcaaggataaagaaaggattctaaaagcagcaagatacaagaaacaaataatgtgcaatagacctcatatgtctggcagcatacttttcagtagaaacattacaggccaggaaagaatggcatgacatatttaaaatgctgaataataataataataaacctttatacc

SEQ ID NO: 184517 - DNA, 600 bp, Homo sapiens
taaatgtaagacctgaaactgtaaaacactaagaataaaacataaggataaagcttcttgtcattgttctgagcaatgatgctttgtatgtgacagcaaaagcacaggcaaaaaaaaaaagcaaaaacagacaaatgaaactgcatcagactgaaaagtttctgcacagaaaaggaaaaaaatcaacctatggaaygggagaaaatatttccaaactgtacacctaatgaaggattaatatccaaagtacatgaggaactcaaataactcaagagcaaaaaatacataatctaattaaaaagtgggctgggcatagcagctcaggcctgtaatcccagcactttgggaggccaaggtgggaggatcgcttgagtccaggagttcaagaccagcctgggcaacataacaagatcttttctattaaaaaaaaaaaaattagccaggtgtggtgtggtggcacgtacttgtaatcccagctacatgggaggctgaggcaggaggatcccttgagccaggagtttgaggctgcagtaagctatgatcacaccactgcactccagcctgggaaatagagtgagaccttgtctcaaaaaaaaacta

SEQ ID NO: 184518 - DNA, 399 bp, Homo sapiens
attcttggcagcttggcatgagctattggccacacggggctctccacaggacggcttgagtggcctcacagcatggtcactggcttatcctggagcaagtggttcagagaccaaagcaggagctgcaatgccttttatcacttagcctcagaattcacacatcacctctgccatattcagagccaccctcgactgaatttgagcaggagactagtgaagcacctgaatgctaggaagcaagcatccctggaggttatcctagaggctggcttccacaggtgatgacattttcagcatagagaattatttgtcttctaaaaatatgtaaggatggaagccttractgctccttcagtaatattttattactcaagaaactgtttcttaatttctggcaaa

SEQ ID NO: 184519 - DNA, 610 bp, Homo sapiens
agaatcaagttatccagaaygtgcagagtcagaaatggaggacatcttgtctctagttcattttatatttttaggcagtggttaatcagtgaaattttgtcatgggttggggagatctcaccatttctcttatcattttcttctagccatgcttcactctggggtttaggggagattcatagtggagggaataaggactaggacctaactgtattctgagaaaaagtatgtaatttgaagaggtcatcaggaaatcatttcccaagcagggcacttgtctttgaaatcctttctcactccagatctaacaaagccctagttcattgtacctcaaaggatgatcttaagcagctggtttgggctggccagctttgatggctggagcatttgaactgcagaggttgggggtgtcgggggtagggggtggttaaaatggtttatttccgtttaattgtttgtattatctgtccaggattcctcttaaggaagaatgggcttcatcctgtgggaaatgaacatctctctgtgaatattatgggggcttagacaaaataaaatcacttttaagagcccaatttgatgttctggtaaattagttcatttaatcact

SEQ ID NO: 184520 - DNA, 592 bp, Homo sapiens
aaacctgtgatattctaatctacctgaagtaagtcaagttgaatttcccagattaatagattgactggagattaaagataaggcctgagaaacatgtcgaattcaaggagcccttctgttcatctcaaaagtagtcctgactcccttccttcctgtccacacataccttcttaaacacgagggaagccttcggaagttttattcttctcttcttatggtagctgctcaccacttggtgtttttgcaccctgcagattgagaggctaggggtggcatgaatcaagtragccttttcagtgaactcagtgggtgaaaatcccatctgccttttatccttgcctgaaagagtccccaagtgactgacctttccagaggggccacatcactctcccgaaacccacgtcattgttctctagcttacggcacattctgtgtccattctgcctccttcctcatcaattcctccaatctttctccacttactgcaccactggtggtctggggtgtgcagcccagatgttttccccaagtgaccagaggattacttttcaagtggcttcacagagcagatgttccctttcacctcccccct

SEQ ID NO: 184521 - DNA, 567 bp, Homo sapiens
tacgataccaccatctttcattagctcattaatctaaatatatatgtttctaktacaacattgcttacataacagagagccaatttcaaaagaagtatgttcaccccatttaactattcatgctgaagcactgagttttgcaaatagaaaagccctaaagctacaacaagatgatgacaatgatgacagcaacagtaacagagacaatacaacacttagacaggcatttgttcccagtactgggtctgaggaggacaggtgagaaatagaaatgtaactgactacaagtgagtgactggaccagggattccagagcaattccgcttgcctttgtatttcaaggttcttgaccctcctcttcaggagtatattatgggttattatttttttttttttcattttatcttgtggcaaaagtataaatgtggtctctgaagagaggtcattattttaaaaggtctgagaagctttaaaaaagctgtgatcccacccaaatctcaacttgaattgtatctcccagaattcccacgtgttgtgggagggacccagggaaatgtaattgaatca

SEQ ID NO: 184522 - DNA, 581 bp, Homo sapiens
cttggaatgtgattcgagggtccttttcatctttctgagtccctcgctctgcattttttaaagccttgctgagaaggcaagctctggggaagcaggagcctggcctgttctgttcattcctgtgtgtgcacatcacatacatgcctgagtaaatattgttgaataaakggatgaaggaaaccagaaatgctgctatttgcagatgaatttctgtgggtcatcagagctttaaggcaaatatctctgagaaataggtcacagtttccactttctcaactcatgatgctgcggattttcaaaatttgtttcatctttttgaacaagggaaactttaaaaaaaattctttattttaggttcaggaatacatgtgcaggtttgttaaatggataaattgcgtgtcacaggggtttggtgtacagattatttcatcacccaggaaatgagcatatgtattagtctgttctcacactgctatgaggaaatacccgagactgggtaatttataagaaaagtggtttaataggctcacagttctgcatggctgggtaggactcaggaaacttacaatcatggtggaagg

SEQ ID NO: 184523 - DNA, 581 bp, Homo sapiens
cttggaatgtgattcgagggtccttttcatctttctgagtccctcgctctgcattttttaaagccttgctgagaaggcaagctctggggaagcaggagcctggcctgttctgttcattcctgtgtgtgcacatcacatacatgcctgagtaaatattgttgaataaagggatgaaggaaaccagaaatgctgctatttgcagatgaatttctgtgggtcatcagagctttaaggcaaatatctctgagaaataggtcacagtttccactttctcaactcatgatgctgyggattttcaaaatttgtttcatctttttgaacaagggaaactttaaaaaaaattctttattttaggttcaggaatacatgtgcaggtttgttaaatggataaattgcgtgtcacaggggtttggtgtacagattatttcatcacccaggaaatgagcatatgtattagtctgttctcacactgctatgaggaaatacccgagactgggtaatttataagaaaagtggtttaataggctcacagttctgcatggctgggtaggactcaggaaacttacaatcatggtggaagg

SEQ ID NO: 184524 - DNA, 581 bp, Homo sapiens
cttggaatgtgattcgagggtccttttcatctttctgagtccctcgctctgcattttttaaagccttgctgagaaggcaagctctggggaagcaggagcctggcctgttctgttcattcctgtgtgtgcacatcacatacatgcctgagtaaatattgttgaataaagggatgaaggaaaccagaaatgctgctatttgcagatgaatttctgtgggtcatcagagctttaaggcaaatatctctgagaaataggtcacagtttccactttctcaactcatgatgctgcggattttcaaaatttgtttcatctttttgaacaagggaaactttaaaaaaaattctttattttaggttcaggaatacatgtgcaggtttgttaaatggataaattgcgtgtcacaggggtttggtgtacagattatttcatcacccaggaaatgagcatatgtattagtctgttctcacactgctatgaggaaatacccgagactgggtaatttataagaaaagtggtttaatagrctcacagttctgcatggctgggtaggactcaggaaacttacaatcatggtggaagg

SEQ ID NO: 184525 - DNA, 382 bp, Homo sapiens
tctctttcataagaaccctggggcatcgctggatgacatactattgcccccaccaccgtagcaccaacactgggtatcgagaaggctcagaggagcaaaasgtcaccatggatttggaattcttcccaaggggacctgccttcaatggggctgtgaagctttgtttacattttagaagagggtgagatgcagcaagagcctcctgattgaaaggaaccatgggaacaaaggcataggaaggcaaattcaggggcagtattgtgtgctgggggagagggagcgtgagcagacaagcctaactggattgatcattcacagtgaagagtgctggaaaaacgctgttgataaggctgtctggagccggcctgtggaaggccttgga

SEQ ID NO: 184526 - DNA, 370 bp, Homo sapiens
attctgaaactacagtttttcttactttttctgtctcctctcacatcactactgaaaactcaagtgcctattatagtacctggaccatgtaggcctggacacatattatttattgaagttaatttatccatttaccccacctrtctggcccctgtatttgaatatctgacccctagtctttactcactgccactacctcctcacctcccatgtgttccttaactcacctcacttttgtttctagccccacaatttgagctcttgctaaggtcatccataacctccaacttgccgcatctctcagtcttttttttaaatttggactttttggtgcaacttgaccctctcttggtttgttttacttcctttt

SEQ ID NO: 184527 - DNA, 625 bp, Homo sapiens
tcagtgagtcctcactctattagttcccaggagagctggttgttaaagagaacctggcttgccccagcccttcttgcttcctctctcaccatgtaatctctgcacatgccagctcaccacagcattgcatcatgagtggaagcagctagaggccgtcaccagctgcagatacccawtcttgaactttccaatcatcagagtcatctgccaaataaacatcttttcttcgtaaattatccagcctcagatattcctttacagcaacactaagtggacaaagacacctgtcaattctctttcctaacatacctcaaaactatccttctatttaaaccattactaccttagatcagaactttatcttgtcttttcagagctattgattagtctctaactggctttcctgtcttgctttctttcagttcatccacaaccagactaatcttgttaaacagaagagttgatattccatttgtctatttaaatacttaattcaatttctatctcctagatgaaagacactagccagatgtggctatataaatttaaattgattaaaattaaaggaaataaacaattcagtgcctaagttagagtagccacacttcaagtactcagtagccac

SEQ ID NO: 184528 - DNA, 583 bp, Homo sapiens
tgaataatctatgcagatcccattctttaatgaggagcaaagagccaggagcatatggaacaataaatgttctggtaatattaaagacaataacaagcagaagtaaagacagttttttcctgccctgttttcctgggctaatttgtcagagcatcgtagtctgaacaaaagctgtgccaataggaatctgtactaagaaagcaatattttcatcctttttaatgtcagtctgcaagcaaaagtgacaastggtatcattcaatgaaaggtcagggggacaaaagcatgcagctgaatttgtttagggcttaccttatctttctttgataaacaaaacaattgacctaagtctcataacctgaagctcttcacatcttactaaactgcaatcatgaagttgaagatgattataatgattattttttcttcatacccttctctctgaagtagctgcagagttttcaaagacaagcatgatttccaaaagaggatcagtttccttttcattagaaaatgcatagttttgcctttttgcagaaattgaaaaagattaataataggggtggttcagaaataagaatta

SEQ ID NO: 184529 - DNA, 628 bp, Homo sapiens
aagagccaggagcatatggaacaataaatgttctggtaatattaaagacaataacaagcagaagtaaagacagttttttcctgccctgttttcctgggctaatttgtcagagcatcgtagtctgaacaaaagctgtgccaataggaatctgtactaagaaagcaatattttcatcctttttaatgtcagtctgcaagcaaaagtgacaagtggtatcattcaatgaaaggtcagggggacaaaagcatgcagctgaatttgtttagggcttaccttatctttcttwgataaacaaaacaattgacctaagtctcataacctgaagctcttcacatcttactaaactgcaatcatgaagttgaagatgattataatgattattttttcttcatacccttctctctgaagtagctgcagagttttcaaagacaagcatgatttccaaaagaggatcagtttccttttcattagaaaatgcatagttttgcctttttgcagaaattgaaaaagattaataataggggtggttcagaaataagaattaccaccttggaaggaaaaagagacaaaggaatccatagtagggaagggagatttgacatgactgtgatgtccaagctacccacag

SEQ ID NO: 184530 - DNA, 608 bp, Homo sapiens
ctcatgttgtagcatgtggcagcatttccttttataaggttgaataatatgccattgtaagtataccatattttcttcactcattcattcactgatggacatttaggttgtttctcgctattggctattgtgaataatgctgcaatgaacatgggagtgtaaatagctcttcaagatcctgatttcaattcttttggatagatacctagaagtgaggtttctggataagatagtgattctgcttttaattttttgaagggcctayatagtgttttctaaagtggccatactgttttacgtcttcacaaggattcaaatttttttcacatcctcaccaactcttgttattttctgttttttgataatgacattctaactggtgtgaggtgatacttcattgtggttttgagtttcattttcctgatgattagtgatgttgaatgtctttttattgattattgagaaatatgtattgaagtcctttgcccatttgtaactgggttatttatttgtttttcgctattgggttgtaggagttccttatgtactttaggtattaaaccccttatcagatatatatggtttgtaaatattttctcatgttccat

SEQ ID NO: 184531 - DNA, 454 bp, Homo sapiens
actaaatccattcactaaggggtgaattaatagctataatgtgacataratgaccactgaagttgttttcaccaatattctttagtcttttttaattttcacttgcctctggtttttggtcatatgggtgtctgcagttgttgacggtatagaaaagagtaagtttttttaaaaaaagagaggaaagagaaagattaggagtgttagtactcttataatttttgaagggtagttgtatgttaaatgttaccaaacctcataaataaaacaggtaaacctgagttaaatgatacatttagtacattgtggttctggttaattgaattttacagcttactgaagtggtattctgaaaatccttcatcttcttaagatctttccttactatagcatctgtttaactttcataatagatatcacatatgaaagaaaatatttttcctcataaatttgc

SEQ ID NO: 184532 - DNA, 454 bp, Homo sapiens
actaaatccattcactaaggggtgaattaatagctataatgtgacatagatgaccactgaagttgttttcaccaatattctttagtcttttttaattttcacttgcctctggtttttggtcatatgggtgtctgcagttgttgacggtatagaaaagagtaagtttttttaaaaaaagagaggaaagagaaagattaggagtgttagtactcttataatttttgaagggtagttgtatgttaaatgttaccaaacctcataaataaaacaggtaaacctgagttaaatgatacatttagtacattgtggttctggttaattgaattttacagcttactgaagtggtattctgaaartccttcatcttcttaagatctttccttactatagcatctgtttaactttcataatagatatcacatatgaaagaaaatatttttcctcataaatttgc

SEQ ID NO: 184533 - DNA, 454 bp, Homo sapiens
actaaatccattcactaaggggtgaattaatagctataatgtgacatagatgaccactgaagttgttttcaccaatattctttagtcttttttaattttcacttgcctctggtttttggtcatatgggtgtctgcagttgttgacggtatagaaaagagtaagtttttttaaaaaaagagaggaaagagaaagattaggagtgttagtactcttataatttttgaagggtagttgtatgttaaatgttaccaaacctcataaataaaacaggtaaacctgagttaaatgatacatttagtacattgtggttctggttaattgaattttacagcttactgaagtggtattctgaaaatccttcrtcttcttaagatctttccttactatagcatctgtttaactttcataatagatatcacatatgaaagaaaatatttttcctcataaatttgc

SEQ ID NO: 184534 - DNA, 405 bp, Homo sapiens
ttcttactagtggggatgcaagctggagacttgacccagggtttcctagaggcacatgtcccagaggggagaagaggagaaggagaccttcaggcagacagtgctgcttgaggctcttctttcttagaatggttggagagaatggaatggtggatacagagcctcttagctcaaataagagagttagacataaattttgacacctaccagggaaggggraaagcatttcctccttagcttttaaaaagtctagaattttttttttaaagttcttgtttcctgatcacctttcaagcaagtgtcatatgacgttacgtctgaaaaaatagttgtgtccctaggaaaatggagtttaaaaatattgaagaaagatgactcttttggcccatctttctcaggcatagg

SEQ ID NO: 184535 - DNA, 644 bp, Homo sapiens
caaaaaggaaaacttaagcatgcaggtcagtcaagaggctttgaattggtgtatacattagagggtaggaatttacttccccctgcttctataaggggaaagataatcaattactccttgtgtatatttatgaaatcagaatgctggttaccagccaaggtttttctttttcaaaaactgcagagaaggtttgcgatgaaagccaaaaccttttgaaaagaggcattgcatatgtctccttctatgaataagaataaaagaagatttccccctaagcctgcatgactaaagataacatatctcattccaataatagtctctccctttttttggtactataaaaacaacaacaacaaataatttggaggagcttaacttcaaatacaattaacaccttgagcaagttgattttgggaacaatgctgagctcaagggtggcttcctagaggaaatcttgaycagtttcagacctgagtggtgaatgggagtcaactagtccaaggcaggtgaagcacagtgcctggagagaagccagtcaaggcagaaggtaagggcttagcagtgagtacagctcctcttgcacaatgtcttccacgtattaagaattcagtagacattgaaatgactgggtcctttcaaaaagt

SEQ ID NO: 184536 - DNA, 516 bp, Homo sapiens
gaattcttggaatccccacttcctttgccttctttccgccaggcatagcaggaatgactgaataattgtttgtaagacttaaaaatacagttgtatttttcttacctacttagggaagaaatcacctttatatgcattatccaccagtgagataattttcacttaaatttgcatccagtacttcaccagccaccttttcaatattcttcacaaaatgcacacacatattggttatttttaataatgaaaatatttctatactcgtgaattttcagtatcaccaatttgcacagttgaatcattttttcaatgagtacagsgtaagaatggagaaggaaatttgttggatttattccagtttgggaatttggtagatatttgctttagaacaggttgttggggatattggcaagaaagtggatgagtgggagaccatggagtctaagttgaatatggaaggttgtacacacatttattaccttacaatttctgtggatcaggagttggacatggctt

SEQ ID NO: 184537 - DNA, 590 bp, Homo sapiens
gtgacaagaaggccagtgtggttagagcattgggaaaaagaaaagagactagtaggagatggggttggagagaaaagttggggccagagcacacagggctttgaagaagtttgggttttatgtcaatgaaattgaagtcattggaggggttttgatttgatctaatttagtttaaacactttggctgctgttgtagataatgcactgagaggatggggtggaggcaatggaggcttttgtagaagttggaactgaaaatttcaactactgcaaaacagggaatttagacttgtgtggccacagcgggcatgatgaaaagtggatgaatttgggatattgttggaggcaagggtccttaataaatatttattgaattaatgagtatataataagcattaaacaattagcacagttattggtccacagcaagtacccactaagtggtggttactcttactrtcatcatcattgtctcttctacctcctgagaggtgaaattacagtattaacactcataaatcatcagcttcccactctgcacgttatcctccatcccttcagctctgtgtcttactctacagaggctactc

SEQ ID NO: 184538 - DNA, 408 bp, Homo sapiens
agactaacaaattagctacaagattggaaactacggtttaggggccaggcagcaagggtctgaacctccccagattgctcctggggataacatcactattgtaaaacctaagatcastgcttgagatattttgcagaccctgtgctcagtggatcagctgacaccacccaaactgataatctggctcaaccaattctgtgatcccacccaggaacagaagacagcaagaaaaactcacttcaaccccactataattccatttgccacctaaccaatcagcactccccacttccggagcccctacctgccaaattatccttaaaaactctgatcctcaatgcttggggagactgactgcagtaatgataaaactctgatctcccatacacagctggctttgcatgaatt

SEQ ID NO: 184539 - DNA, 592 bp, Homo sapiens
aaaacagctgcttttcttacagatggcccaaatcatcaaaacatcatggtggatgagctctttcctagaaaagtcaaggaaaaacatcaacactctctgatgagccaatcataaagatggtaaagagtctatttgtgcccagatggctggcagcattctttaacccttacctttgattcagctgttgtgcccatgctaaatagatcagctcaattaatgtagtatcccctgggatcaragccacaggtgtcatctctattcagagaagtgagctgtgctcagagaaaaactgtgctatagccacaggaggttgctctgtggtggtcatccagctcacaaattaatgtcattggttacagaatctgggtcaagatccccaattcttgagggtgggagagagaatatctaaatttcttttaaaaatgtatccatggactccagtgaatgagtttctacccagcctagaggacaacccagatggctgagttccaatttgccctaagatttaaatatgctgtaggaaatgaaaaatgagagtctctgagaaaatacagagaatgcaaggtccattctagaagagcagcaaggcctt

SEQ ID NO: 184540 - DNA, 592 bp, Homo sapiens
aaaacagctgcttttcttacagatggcccaaatcatcaaaacatcatggtggatgagctctttcctagaaaagtcaaggaaaaacatcaacactctctgatgagccaatcataaagatggtaaagagtctatttgtgcccagatggctggcagcattctttaacccttacctttgattcagctgttgtgcccatgctaaatagatcagctcaattaatgtagtatcccctgggatcagagccacaggtgtcatctctattcagagaagtgagctgtgctcagagaaaaactgtgctatagccacaggaggttgctctgtggtggtcatccagctcacaaattaatgtcattggttacagaatctgggtcaagatccccaattcttgagggtgggagagagaatatctaaatttcttttaaaaatgtatccatggactccagtgaatgagtttctacccagcctagaggacaacccagatggctgagttccaatttgccctaagatttaaatatgytgtaggaaatgaaaaatgagagtctctgagaaaatacagagaatgcaaggtccattctagaagagcagcaaggcctt

SEQ ID NO: 184541 - DNA, 516 bp, Homo sapiens
ccaggtccatgggacccatgggagtgattgctaagcatttctgaagttgcctgtcctctctgtgaggagcctccttgtacaaagtaatgtcctgggctttggatggcagcctgatgcttcctttctgtgaccccgactaaacatgtttgtctctaatcttttgactactctctttgccttcctggggggagtggctaatcaatcagtctcttaggcatacagttttctttttttttttttgkctttttattttttaattttatttcatatatatttttaattttaatttaattttatttttccataagttattggggtacaggtggtgtttggttatgtaagttctttagtggtgatttgtgagattttggtgcacccatcacccaagcaggatacattccatcatatttgtagtcttttatccctcatctgcctcccactcttccctacaagtccccaaagcccattgtatcatttttatgcttttgtgtcctcatagcttagctcccacatatc

SEQ ID NO: 184542 - DNA, 516 bp, Homo sapiens
ccaggtccatgggacccatgggagtgattgctaagcatttctgaagttgcctgtcctctctgtgaggagcctccttgtacaaagtaatgtcctgggctttggatggcagcctgatgcttcctttctgtgaccccgactaaacatgtttgtctctaatcttttgactactctctttgccttcctggggggagtggctaatcaatcagtctcttaggcatacagttttctttttttttttttgtctttttattttttaattttatttcatatatatttttaattttaatttaattttatttttccrtaagttattggggtacaggtggtgtttggttatgtaagttctttagtggtgatttgtgagattttggtgcacccatcacccaagcaggatacattccatcatatttgtagtcttttatccctcatctgcctcccactcttccctacaagtccccaaagcccattgtatcatttttatgcttttgtgtcctcatagcttagctcccacatatc

SEQ ID NO: 184543 - DNA, 516 bp, Homo sapiens
ccaggtccatgggacccatgggagtgattgctaagcatttctgaagttgcctgtcctctctgtgaggagcctccttgtacaaagtaatgtcctgggctttggatggcagcctgatgcttcctttctgtgaccccgactaaacatgtttgtctctaatcttttgactactctctttgccttcctggggggagtggctaatcaatcagtctcttaggcatacagttttctttttttttttttgtctttttattttttaattttatttcatatatatttttaattttaatttaattttatttttccataagttattggggtacaggtggtgtttggttatgtaagttctttagtggtgatttgtgagattttggtgcacccatcacccaagcaggatacattccatcatatttgtagtcttttatccctcatctgcctcccactcttccctacaagtycccaaagcccattgtatcatttttatgcttttgtgtcctcatagcttagctcccacatatc

SEQ ID NO: 184544 - DNA, 497 bp, Homo sapiens
tgtatatataaagaggagtttatgaaggagcactggctcacactatcacaaggtgaggtcctgcaatatgccatctgcaagctgaggagccaggaagccagtctgaatcccaaaacttaaaagtagggaagccaacagccttcaatctgtggtcgaagttccaagagtccaaaagctgaagaacttgaactccaatgttcaagagcaggaagcatccagcacaggagaaagatggaagccagaagactaagccagtctagtcttctcatgttcttctgcrtgcttttattctggctgtgctggcagccaattagattgtgcccacccagattgagggtgagtctgcctttcccagtccactgaatcaaatgttaatctcctttggcaataccctcacagacacgcccaggaacaatactttgcatccttcaatccaatcaagttgacactcagtattaaccatcgtaatgtgtaaatacttggggtacatataggca

SEQ ID NO: 184545 - DNA, 486 bp, Homo sapiens
ctatccttgatacaacatgattagttgacagtcaaaacccaagacaaggatgaagcaagcaagttacctagggcacaatatttaaggaggcactgcaagtgcagcatccacctgaatccttcactaatgacactcacttgcaggagcctgagagtgaacgcctccttaaattttgcactataagmacctcacttgcctcaccctagtcctggccctaatatgtataaggatttgagtgcttcaacagagcctatacattgatgagcagtactctaaatatttactgttttattcaagcctagaggtgacaacctctagttctgatacctgctcccacaataaaatcatgcctaccctcatctagcccaatcagaggagttcacattagggaaatgggacaaaaaaaaataaacttttaaacatccatgaccccagtcatttgatatgcaatgtcttataatcatccattatgttctttatacctta

SEQ ID NO: 184546 - DNA, 555 bp, Homo sapiens
ctcattttcaccttaaacattctatatctatgtttataaatcctctgctttgtttgattaataataaatctgtgtcaaaaataaaatcaaatgaggaaatgctatatcctaaattctatatcctaattctaaaaaatgaatacattcatgaagtcccagagtcaactaatttttccaagcatttaagataaaataacaccaatcttcatgaatttttcagatcataagaaatgaaaatacttcccaactcatattttgaatttagaagaactctgacaccaaaacccaacaagaatatacaagaaagcaaggtagaagttatattctcttgtcagccaaaatgtaaaaatcctaaaacaaaatgttagcaaarcgagtctagcaataaataaaaatgataatacatcattacccagttggacttactctaagagtgaaatgctgagttttatattaggcaaccaatcagtgtaattcaacagaataacagaatataggagaaaaatcatgtgattattatcttcacatatgcagagaaagcatttcacaaaattt

SEQ ID NO: 184547 - DNA, 480 bp, Homo sapiens
aattgtgacaaatgactagatactttaggaatgtcttcttggttaccactcgcaagggtattcctaactctctggcaaagaggcaagtatcagaaaaatattgctgttactgagagatgagtgtgcctagaagtagaaactacagcattctggcagggaaagcagatgtgacaatttaatacatagaaggagtgcagagagatggaggtgttatrtatggtctaggagaggaaatttaaagaagggagcaatgaacattgaagaaaattattttattactgaaagaagagtctcaattaagaaagtctaggtggcactggctggtttggattcctccaggattgagtgagcccaaatcaatggctattacaggaatgctcaggcatgcagcctgtatctccttcaaggaggccattcagagtcatgttccatctctggagagtagggcttaggtccagccatgggttgacccactgttag

SEQ ID NO: 184548 - DNA, 548 bp, Homo sapiens
taaacaatttggaagtctcattaaaaaaatgaaaacaatataaccctattatacttaggttagtactttggatatagaggtactcaataaagcttgttgtattcaactctgaagttgaggcaaatcataaatgtgattggatattgaatatagaagattgaatggattttcaacatttaaaataccatctgatcttttttggcatctggcacaactttccataagtcttcatttctttttgttggttctactctgcttcctcaccacaactctagaccgttagcccttcctcagtctctgggaaggcctgaaacataccctgcatggatcctggtggggctgttgtgctggcagctgcctggctcacctcaycagccctggaggggcccacacaccctccccagagtggctcctgggaagcctgcacattctcctgccttttagtgctattgggctttttcttttaagatgattcttctatgtctattctcctaatcaatgtactctagaacacaggagtcaaggtagtataacagtttaaagtgtgg

SEQ ID NO: 184549 - DNA, 396 bp, Homo sapiens
atgcatctgcccgaggagacatctttgtatggccagttgtctgtggctctcaaactcctcccaacaccgtctaaggccccttgagcccaaacttaactaaaagtcttgagtgcatcttgatctgaattctgggccattgccggttgtgagcttttttgtttctctgtcactgaaggcttgatgtttgacctgggggccagattagcagggagggatcttgagaaatgagtaatagattaatagtagtagtaataatkataataataattaaaaaaacaaaaagctattgagtttactatgtgcagttgtatcaaatgagtgtgcaggtacccatttgatacaattctatgaggtagtagtattattatctccattttatagatgtagaaaccatag

SEQ ID NO: 184550 - DNA, 591 bp, Homo sapiens
gacattcatctttattctaagtcaggatactctaaatgaagaaagcttttttactggagraattttggcttgaaaagatggggaaatcttatgtctaagctctttattcctcccaattcttttctagcctttgcaaatgcttgtgcaattttatttattaatgaacttggatttaaggctataagcatcctttaataacatggaaataaactatcacattccatgctgatattatttccccaattttttctttcctttaatgaaactttccaagctatctatttcatacactaatatttgcagataactgctttacgttgcaatgtattgagtcattttgttccatgcctctcattctattatcttgattttagtcccagcattctctttctgcagagatccagtttattgatcacaacttctgccaaggtcatttactcctagaagttcaaatgggcaccagcaccagactgaagacttttatcttgactcctgaactaacacaccatatattttttcccattacatctacagcaagcatgtgctgcctttttaaaaaatattttgttttgctctttatcttattgctgg

SEQ ID NO: 184551 - DNA, 591 bp, Homo sapiens
gacattcatctttattctaagtcaggatactctaaatgaagaaagcttttttactggaggaattttggcttgaaaagatggggaaatcttatgtctaagctctttattcctcccaattcttttctagcctttgcaaatgcttgtgcaattttatttattaatgaacttggatttaaggctataagcatcctttaataacatggaaataaactatcacattccatgctgatattatttccccaattttttctttcctttaatgaaactttccaagctatctatttcatacactaatatttgcagataactgctttacrttgcaatgtattgagtcattttgttccatgcctctcattctattatcttgattttagtcccagcattctctttctgcagagatccagtttattgatcacaacttctgccaaggtcatttactcctagaagttcaaatgggcaccagcaccagactgaagacttttatcttgactcctgaactaacacaccatatattttttcccattacatctacagcaagcatgtgctgcctttttaaaaaatattttgttttgctctttatcttattgctgg

SEQ ID NO: 184552 - DNA, 563 bp, Homo sapiens
ttaacaaatggtactactaaatggtactactggactggctctttgaaagtacagagtttttattgcattttatttattttcccaaaatgcttaatactcagttacctcaagaaactcaaggtcagtgagggagaaaagcaggtaagcagacaattacaatgccgtgccattctctacattgtcctctcaacaaaggaactctgtccctccccscaggatggagaagtcctgctttggttggtcaggtctgggggacaatgtttcctaagcaacagagctttaagatataggtagagccccatgaattctttatcttcttcttctgcccaagcaagcagacacaacagtaaactaggaaattgaccaagggcagatcaacccattatttctttctttggacactgtcttttccccatgtgctgccaggctgcagacattaatcagtcttggactcagctcagcatggaactttggaggcaaatttgctatctttttatgtgccttgttccttggcactggtgggtgggtgttgaacagacacttcctttcccactagtgttcac

SEQ ID NO: 184553 - DNA, 563 bp, Homo sapiens
ttaacaaatggtactactaaatggtactactggactggctctttgaaagtacagagtttttattgcattttatttattttcccaaaatgcttaatactcagttacctcaagaaactcaaggtcagtgagggagaaaagcaggtaagcagacaattacaatgccgtgccattctctacattgtcctctcaacaaaggaactctgtccctccccgcaggatggagaagtcctgctttggttggtcaggtctgggggacaatgtttcctaagcaayagagctttaagatataggtagagccccatgaattctttatcttcttcttctgcccaagcaagcagacacaacagtaaactaggaaattgaccaagggcagatcaacccattatttctttctttggacactgtcttttccccatgtgctgccaggctgcagacattaatcagtcttggactcagctcagcatggaactttggaggcaaatttgctatctttttatgtgccttgttccttggcactggtgggtgggtgttgaacagacacttcctttcccactagtgttcac

SEQ ID NO: 184554 - DNA, 563 bp, Homo sapiens
ttaacaaatggtactactaaatggtactactggactggctctttgaaagtacagagtttttattgcattttatttattttcccaaaatgcttaatactcagttacctcaagaaactcaaggtcagtgagggagaaaagcaggtaagcagacaattacaatgccgtgccattctctacattgtcctctcaacaaaggaactctgtccctccccgcaggatggagaagtcctgctttggttggtcaggtctgggggacaatgtttcctaagcaacagagctttaagatataggtagagccccatgaattctttatcttcttcttctgcccaagcaagcagacacaacagtaaactaggaaattgaccaagggcagatcaacccattatttctttctttggacactgtcttttccccatgtgctgccaggctgcagacattaatcagkcttggactcagctcagcatggaactttggaggcaaatttgctatctttttatgtgccttgttccttggcactggtgggtgggtgttgaacagacacttcctttcccactagtgttcac

SEQ ID NO: 184555 - DNA, 529 bp, Homo sapiens
tatccgtgaaaatttcccaacaacttttgattttcttctctttgtggcagaaatcccaaatgtgaaccccttacctaaaacataatgggaggaatscttcctgtcctgttattgatatttctgttctccgactcaactacagaattgtggctatccattcattcaaaaacatccatttattcagctcctgccatgtggggacactgtccttggttttcaaaatacaactgagaacaaaaccaagtccctgcccttgaagagcttacactctaataaagggatttagaagcaaacatactctgtgtcagatgatgatatgcactatgaagaaaaaataaaagagggtaaggaagctaggtggggtgcagggagtgctgttttaaaaggctggtcaagaaagtcttcacagataatgtgaccttcgagcagaggtctgaagggaggagagagaaccttccacatagaagctttggggcaaaagcatgcccggtgagttaggggaaaagcagggagaccagtgaagccaagg

SEQ ID NO: 184556 - DNA, 529 bp, Homo sapiens
tatccgtgaaaatttcccaacaacttttgattttcttctctttgtggcagaaatcccaaatgtgaaccccttacctaaaacataatgggaggaatgcttcctgtcctgttattgatatttctgttctccgactcaactacagaattgtggctatccattcattcaawaacatccatttattcagctcctgccatgtggggacactgtccttggttttcaaaatacaactgagaacaaaaccaagtccctgcccttgaagagcttacactctaataaagggatttagaagcaaacatactctgtgtcagatgatgatatgcactatgaagaaaaaataaaagagggtaaggaagctaggtggggtgcagggagtgctgttttaaaaggctggtcaagaaagtcttcacagataatgtgaccttcgagcagaggtctgaagggaggagagagaaccttccacatagaagctttggggcaaaagcatgcccggtgagttaggggaaaagcagggagaccagtgaagccaagg

SEQ ID NO: 184557 - DNA, 586 bp, Homo sapiens
aaaacaatattggtcatttgtcaatcgccttactcttcagaaagcaaatttatattcatcaattcatttgattttcacagctactcacatgaagtaaacaggaaaagcaatattaccaatatgtttggcatagagatgaaattccagacaacttaatatcttgcctaacacatagccagtaaacagaagggctaaagcttgaaaacttcagaagccaaatccaactttcttgctactaaatcacagcatctttccagcagatctcttgggagagttcttggttattttccatggcatcaataggagtaccaggtaacatttgttgaacatttgtgtgccaggcacagcactaagcactttgtgtatctgactcatctatccccacaactgttccacgagagtgggcattgctttattcctgwcttgcaatctgagtaaagttcacaccactagaaaatgacagagccttcattttaatgcgtgcagtctgggttagtgcctgctttttgtttaagtattgttgcaataactcaaaacatgtctaacatgttctatactcactatgaagctgatattcaagaattat

SEQ ID NO: 184558 - DNA, 586 bp, Homo sapiens
aaaacaatattggtcatttgtcaatcgccttactcttcagaaagcaaatttatattcatcaattcatttgattttcacagctactcacatgaagtaaacaggaaaagcaatattaccaatatgtttggcatagagatgaaattccagacaacttaatatcttgcctaacacatagccagtaaacagaagggctaaagcttgaaaacttcagaagccaaatccaactttcttgctactaaatcacagcatctttccagcagatctcttgggagagttcttggttattttccatggcatcaataggagtaccaggtaacatttgttgaacatttgtgtgccaggcacagcactaagcactttgtgtatctgactcatctatccccacaactgttccacgagagtgggcattgctttattcctgtcttgcaatctgagtaaarttcacaccactagaaaatgacagagccttcattttaatgcgtgcagtctgggttagtgcctgctttttgtttaagtattgttgcaataactcaaaacatgtctaacatgttctatactcactatgaagctgatattcaagaattat

SEQ ID NO: 184559 - DNA, 623 bp, Homo sapiens
acaagttctgcataccacttaaatgatatgtttgtatcattgcctaaaaactttattgctttatcttttatacttagatctacaactcatatggaatggtatggtgtgcagtaagaggtcaagagtcaagttttccttgtatggattcaaggttttctcgtacaattgacatactaacatttatttaaatacctatcctttctccactgatatgcattactacatattttttataaatattcatatgtatgttggtctgttccttggctctttattctgttctgtgtagctttctacagacagtatgacacggtcttcttgtagytttattatagctctttgttttttttgtttttttttttgagatggagtttcgctcttgttgcccatgctggagtgaaatggtgtgatctaggctcattgcaacctctgcctcccggtttcaagcacttctcctgcctcagcctcccaagtagctgagattacagggccatgccaccacacctggctaatttttagtagggatggggtttcaccatgttggtcaggctggtctcgatcttctgacctcaggtgattcacttgccttggcctcccaaagtgccaggattacaggtgtgagc

SEQ ID NO: 184560 - DNA, 623 bp, Homo sapiens
acaagttctgcataccacttaaatgatatgtttgtatcattgcctaaaaactttattgctttatcttttatacttagatctacaactcatatggaatggtatggtgtgcagtaagaggtcaagagtcaagttttccttgtatggattcaaggttttctcgtacaattgacatactaacatttatttaaatacctatcctttctccactgatatgcattactacatattttttataaatattcatatgtatgttggtctgttccttggctctttattctgttctgtgtagctttctacagacagtatgacacggtcttcttgtagctttattatagctctttgttttttttgtttttttttttgagatggagtttcgctcttgttgcccatgctggagtgaaatggtgtgatctaggctcattgcaacctctgcctcccggtttcaagcacttctcctgcctcagcctcccaagtagctgagattacagggccatgccaccacacctggctaatttttagtagggatggggtttcaccatgttggtcaggctggtctcgatcttctgacctcaggtgattcacttgccttrgcctcccaaagtgccaggattacaggtgtgagc

SEQ ID NO: 184561 - DNA, 598 bp, Homo sapiens
atttttatttctacatttcaaaaaattgtattatttcagagctggaagaacctttacaggtaattttgtggtacagagaaaaaaatactgcttagaaacggggataaggattctagtcccagatttgcagcaaactagccatgtgtctcctggtgtccaccctacctactccattaagttgttattcctttggcaggatgaatcaaggctcccatggggaagcacgaggggaataggtggttattatattgaccaactgttagttttgtttggtttaatgtttttagatctgctcattttttttaatagtgagggcagatttgagtgtgagagatgaggaggtaagtctggagaagccaaggggtttgaggaagaaagatagtgtattatgggggccatgtgatataaccacttcccttggtcttctcaagaaacttcaatgaagctacataccctaygataattttggaaattgatttgtttacttttagatgtcaggataggtaaagttggcttccaggatagtttccagtaaattcagggctgttcctaggaaatgatatagtaagcaggtaactggaatggcaaattaaatagt

SEQ ID NO: 184562 - DNA, 542 bp, Homo sapiens
ttgtgtccatattctaaaataatcatctcatgattttttctacagtttgcaagattcctgtaggtatttttttttttgtgcagttggctttcattagtataggtcattgacaagataaacattcaatgcaggtcctyttgactcatagatctcctgccatattcatatgcgctcacttagatttcatcctctcattttctattctcctctttcttcttccaaaggtccctccatcatctcccctctcctagtttatcaccatctttattgagtctgcaaggttgtgatggctagaagagagaaaggaagagggagaaattcatggaggaacacgtatttttcctccatacattgcagttcttgagccctcctctccaacccagtctgtgatttttagcagatttttataagcactgggtctatttgaacaagctatcaccaagaaatatagttgtagacacaaacaatgtctaatttgtctaggggctattaccttttctctgaattaatactaaatcaatactctagtaagttgtcagggg

SEQ ID NO: 184563 - DNA, 433 bp, Homo sapiens
atttcatggtgttttactcagtgtgggatgtactttagaagcagtatatcaaaaccttgacctttatttcatttttttctttattgttgatttagaagattaaaggcattccaaaatctttttctaaatgtcttctcatatatgcaacaaaaaggattcagaaaggatttgacacacaatgtagaagcataaatcagccaaggggaggatatttgcaaattgctctccccgttataatttcatctcattagggaagaagggacaggtgggtgtgctagcagttacagatcaggaattgcattttctttctagattggtgagggatcgtayggtatgaaacccccttctgagaaagctatgcaggttttttattacacataaaaatcctcctctggtggatttttgcagtttacagaaaatgtgtaaaccgaaa

SEQ ID NO: 184564 - DNA, 603 bp, Homo sapiens
atgtggtaattggttatggtagccccgaagaagtaacatacagatgaagaatctgtgcttctgatggtcttgctgaagctccttgtgcaggggacgtggtgagctggctacacacacagccttccacctcggcagggaaactgcacagtgaggagcacaggggcagtcacagccagttcctgggctcataatcgacgacattggtcttgtccatttggacagatccacaggattctagagagaggttaagaatgaaagtgtaatggtgatcataaaccgcaggaacaaaatgtatatacctatttatttttattctcacttcatcctaaaaaggatttaaagttcctttcatagatgaaaataataggacaaaataaaataaatttaaacataagaaagatgaaacaaagggaagaaaaacaatggtgraatgcagcagtaataaacctacatgacgtcacagcccttccttcacctccccagccccagctaagaagatggaccctcatggtatgggcaagaaatttcaggatgagataatgccaagtctgatttttctccaatttgtgtaaattcaacggaaatttcaggctgctgcttcga

SEQ ID NO: 184565 - DNA, 554 bp, Homo sapiens
ctgctaatacaaatgaaaagatttatagtattaaactgaagcaaacaagcatgcaaaactatggagagggtgacattgggtggttttagaaaggttacacagtatctttaaaatgtaaactcatttagactctgccagtaatcagctatatgtactttyagcaattggacctctctgagctccaattgctaaatgatattcccctttatttgtgaaatgaggagactggtctgcatttgattctgcattctaaattcatgaatgctaagtgaattggcagtgtccctaacaatgacctttttgtcctgttcctcacttctaacttcaagctagaaaccagcacattactctgcaacttgccactgacttaatggacaacttcaagcaagtgtcacttccccaacaagcttcagtttctccttcgctaagagcctcctccgctaattctgaggaagatgaacagggccacctggcaaaaattttttacagaatacaagtagcgttacctggatgttttgcatcaaaaactaaaacaagtacaggctgaaacccaa

SEQ ID NO: 184566 - DNA, 458 bp, Homo sapiens
actgccttatgaaaatgtgcaatatgaatgtttacygttgtcatggaaccttcacatgagttcaaaataacacacacccatcactgtggcatttccaaacaggactgaatggttggaaacggaggtgctagctaatgttatttattaaaacaaataaaaacgtctcttttattttagatatctgtgatgttcatggaggacttggcaatatgtgcatggttgggcataatctgataataaatccatcagtcctttattttgctactggttaactaaaatgccagacataaaggcaactgtacttctttaacaaatgtgtcttcttctaagtgggcagtgtcagcacttgttccctagacgggttcacagctagtacaacacacagagtcccccattcaaaacttcagcacctcttctccagcccctattctctccactcaatgtcttaaccatgggca

SEQ ID NO: 184567 - DNA, 458 bp, Homo sapiens
actgccttatgaaaatgtgcaatatgaatgtttaccgttgtcatggaaccttcacatgagttcaaaataacacacacccatcactgtggcatttccaaacaggactgaatggttggaaacggaggtgctagctaatgttatttattaaaacaaataaaaacgtctcttttattttagatatctgtgatgttcatggaggacttggcaatatgtgcatggttgkgcataatctgataataaatccatcagtcctttattttgctactggttaactaaaatgccagacataaaggcaactgtacttctttaacaaatgtgtcttcttctaagtgggcagtgtcagcacttgttccctagacgggttcacagctagtacaacacacagagtcccccattcaaaacttcagcacctcttctccagcccctattctctccactcaatgtcttaaccatgggca

SEQ ID NO: 184568 - DNA, 514 bp, Homo sapiens
agatgtgtgcctgcctggcsctgcccacctccatcagggctgtcatttctacagcagctgtctgaacaaccccacagatgagtatcaacttcagctgccacacctgctgacggaagataaagcacaatatgaaaatagggatggttgatgccacgacctcccagagataggagagttcctggaattcttccagcaacattctccactgcccacacacctggaaagtcagatgaccattatatctgtccagctcacacaagggaaccataaccagtagatgccttcgtcctctgcttctataaaatatgccacgaccccacccagctgcttacccaaccatgggggccaacgtcctgatgcttggtaacagtgagcatcttctctaaggtataaacactaaatacgaatgcaaagcgcgaagtaactcaaatttgccattttctttctttacatttttctttttaaaatcacaggagtggtttcagtcagcatttaaatctatgttggtctgttt

SEQ ID NO: 184569 - DNA, 514 bp, Homo sapiens
agatgtgtgcctgcctggcgctgcccacctccatcagggctgtcatttctacagcagctgtctgaacaaccccacagatgagtatcaacttcagctgccacacctgctgacggaagataaagcacaatatgaaaatagggatggttgatgccacgacctcccagagataggagagttcctggaattcttccagcaacattctccactgcccacacacctggaaagtcagatgaccattatatctgtccagctcacacaagggaaccataaccagtagatgccttygtcctctgcttctataaaatatgccacgaccccacccagctgcttacccaaccatgggggccaacgtcctgatgcttggtaacagtgagcatcttctctaaggtataaacactaaatacgaatgcaaagcgcgaagtaactcaaatttgccattttctttctttacatttttctttttaaaatcacaggagtggtttcagtcagcatttaaatctatgttggtctgttt

SEQ ID NO: 184570 - DNA, 514 bp, Homo sapiens
agatgtgtgcctgcctggcgctgcccacctccatcagggctgtcatttctacagcagctgtctgaacaaccccacagatgagtatcaacttcagctgccacacctgctgacggaagataaagcacaatatgaaaatagggatggttgatgccacgacctcccagagataggagagttcctggaattcttccagcaacattctccactgcccacacacctggaaagtcagatgaccattatatctgtccagctcacacaagggaaccataaccagtagatgccttcgtcctctgcttctataaaatatgccacgaccccacccagctgcttacccaaccatgggggccaacgtcctgatgcttggtaacagtgagcatcttctctaaggtataaacactaaatacgaatgcaaagcgygaagtaactcaaatttgccattttctttctttacatttttctttttaaaatcacaggagtggtttcagtcagcatttaaatctatgttggtctgttt

SEQ ID NO: 184571 - DNA, 539 bp, Homo sapiens
ccaggaggctgaggcaggagaattgctggaatctgggaggcggaggctgcagagagccaagatcatgccactgcactccagcctgagtgacagatcaagattctgtctcaaaaaaaaaaagaacaaaatttaaaagttaaaagttcggatggaaaacagaatagtacctgcacacagagccttcccaaacagatactgacacaatacaagatatctgacagcattcattgagtatacttacatgtgctaggcagtagttgctaatggctccatttgatcatctgaacwtttgattgtttcatcttcgcaaatgcctatctaccttgatcaggaaatggatagatttttttttaagttccggagtacatgtgcaggatgtacaggtttgttatatataaacacgtacgtggtggtttgctgcatggaataggttttttaaaactaaatacagtagtggtttgtttcacagaaatagattcatttaaaaaattattatacaaattatatagcaactgccgcttttcaaagaccaaagatat

SEQ ID NO: 184572 - DNA, 580 bp, Homo sapiens
ctctcattgtgttaccttttgtattcctacttaatgtttttccatcaatgcacctcttactaagccacaagcacasaacatttcattagaggaaaccagattcttctcctatctcatgtttcaaggggtctgacatcagactaatttatggaacaacaataaaactgcccctatttcctccccagaagccacattcagttacaaaaacttttactctaagctcagtcacaacaaaagttaggcatggaaaggcaatctctgaaaggtttttcatttgggatgtgatgaatgggtgaaggatgagcttttacagacacagggcccggtcatctttaagacacctcgagtttataagccactggagcattttcatagcaacatagtataaaagaaaccggatcaccaaatgataaactcaacttgaaaagtcttcctctgccgtttttttagtgaacagtctactgtcaaaacaaagatgttatgtttagtcggttctaggcagcccagaaactttaaatagaatgccaaaacacattgtgtttgagtgacaagggaactaactctcacacatcattcactc

SEQ ID NO: 184573 - DNA, 580 bp, Homo sapiens
ctctcattgtgttaccttttgtattcctacttaatgtttttccatcaatgcacctcttactaagccacaagcacagaacatttcattagaggaaaccagattcttctcctatctcatgtttcaaggggtctgacatcagactaatttatggaacaacaataaaactgcccctatttcctccccagaagccacattcagttacaaaaacttttactctaagctcagtcacaacaaaagttaggcatggaaaggcaatctctgaaaggtttttcatttgggatgtgatgaatgggtgaaggatgagcttttacagacacagggcccggtcatctttaagacacctcgagtttataagccactggagcattttcatagcaacatagtataaamgaaaccggatcaccaaatgataaactcaacttgaaaagtcttcctctgccgtttttttagtgaacagtctactgtcaaaacaaagatgttatgtttagtcggttctaggcagcccagaaactttaaatagaatgccaaaacacattgtgtttgagtgacaagggaactaactctcacacatcattcactc

SEQ ID NO: 184574 - DNA, 414 bp, Homo sapiens
cctctgttcagagtcaaacagcattttgaatctgcgctctacccgtcaacatttggtgtgttgtgtcacgtctttgagatttgttttcctcctctgtgaaatgggaatattcatacttagcccaaaggttgatgtaaggattgctgagagcatttagtttggggtctcacacatgttgagtatttactgtgcagtggtgatcactgtcatccatcctcagtttgcaggatcatttgaggttttgcctcaaggtaaacctcactggcaaggtggctgtgataacagttagtttcttaaaggtaactggaacctaggccasaggagaggctgtggtaggaaagcactggagcgtctttctttctctacctgaaacagggccaactttccagaacagcatatggaccctaagaattc

SEQ ID NO: 184575 - DNA, 616 bp, Homo sapiens
tctgtctcaatttaattcaacaaatacttactgaggctccatttgccaagcaccataccaggtgctggagacctgataataaacatggtaagtttcctggtctgatggaacagcatctagatttacagctgaataaagggctgagtgttaaagagagtaagcacagcgtgcagtcagaacaaataggggggtccaacccagacgtgggagaaaggaaagacttcccagaagatgcagcccaaacagtgaatccacgttagccacagaagatgcagaggggcagagggtaaggagttgagagcactgctggcccaagaaatgmcttgtacaacagcgcagcaatggacaaaacactgcatgaaggaggaacccaacgtttaataactcaaggggaaggcagggagttcaagatgaggccagagaataagcaggaagtagtcactgaagaactcatacatcttactgaggagtttcaacttttattctgagagcacgagggcaccagatttgagttttataggacaattgttacagcagccttgcacagagaagactggagcgtgcaggaagccagaatgcagaagactcctagaacactagctcccagaaagtagtt

SEQ ID NO: 184576 - DNA, 616 bp, Homo sapiens
tctgtctcaatttaattcaacaaatacttactgaggctccatttgccaagcaccataccaggtgctggagacctgataataaacatggtaagtttcctggtctgatggaacagcatctagatttacagctgaataaagggctgagtgttaaagagagtaagcacagcgtgcagtcagaacaaataggggggtccaacccagacgtgggagaaaggaaagacttcccagaagatgcagcccaaacagtgaatccacgttagccacagaagatgcagaggggcagagggtaaggagttgagagcactgctggcccaagaaatgccttgtacaacagcgcagcaatggacaaaacactgcatgaaggaggaacccaacgtttaataactcaaggggaaggcagggagttcaagatgaggccagagaataagcaggaagtagtcactgaagaactcatacatcttaytgaggagtttcaacttttattctgagagcacgagggcaccagatttgagttttataggacaattgttacagcagccttgcacagagaagactggagcgtgcaggaagccagaatgcagaagactcctagaacactagctcccagaaagtagtt

SEQ ID NO: 184577 - DNA, 580 bp, Homo sapiens
aattacttagccatatctgtctgtccaacaccacacatataaatactcaccatttgactaggttttgatgaacttgaaattggcgtgaagagggagttagtaagaggccccacaaagaaacacaaaaaggcaactgtggtgaacaccaccaggttaccagatgaataccctgtctccccagtcttctagccattttyttacccctataggttacaaaagacatactttcagccatcattttcgcatagaacgccattacgctggccacaggtgcagacatctgacctattatgaaccattgagaatccttctccctggtatttacaatcagaactaagagattccagcttcagtctggatgaacccttgagaggaagaagtatatgctaggagtgtggacagccaggctctgggaagcagatcagtctattttgagagaacagaagaatgaagtaagagcgcattcagcaggaaatgaaaaatacctacagaaaaacctgataaggttcaaagtcttagtcccggggtgtttccaaaactggcctacactggataacccttaccttgggtatgcttcaga

SEQ ID NO: 184578 - DNA, 580 bp, Homo sapiens
aattacttagccatatctgtctgtccaacaccacacatataaatactcaccatttgactaggttttgatgaacttgaaattggcgtgaagagggagttagtaagaggccccacaaagaaacacaaaaaggcaactgtggtgaacaccaccaggttaccagatgaataccctgtctccccagtcttctagccattttcttacccctataggttacaaaagacatactttcagccatcattttcgcatagaacgccattacgctggccacaggtgcagacatctgacctattatgaaccattgagaatccttctcccyggtatttacaatcagaactaagagattccagcttcagtctggatgaacccttgagaggaagaagtatatgctaggagtgtggacagccaggctctgggaagcagatcagtctattttgagagaacagaagaatgaagtaagagcgcattcagcaggaaatgaaaaatacctacagaaaaacctgataaggttcaaagtcttagtcccggggtgtttccaaaactggcctacactggataacccttaccttgggtatgcttcaga

SEQ ID NO: 184579 - DNA, 544 bp, Homo sapiens
ccatttgcctgacttggcctcatacttgcgtctcaactyaaaatgtcccctgtcacgtgttaccccggctccatcactctctgtggaatccctctgtttcactttctctctagtgcttatgattatctgaaattcttacgattcatggagcatgcaaataccacacgaacacaactaaaaaagaatcaaagttaacacaagaaatacaccaaacgccactcataaacaaacatgccctgaaggaaaagttcttataaatgaatccaaaataacagaagacatcaaatattgaatattttgctagctcacatacaccacacaataagaaacattcaaaggtagtatacgcagaaaatgtctacgaaacaacaaaacaccaacctctttttcctggtgttgaacactcttctctctgccaatactgtccacaataatccttaatttttttttttttaatcgagacagagtcttacactgtcacccaggctggagcacagtggtgcaatctcagctcactgcaacctccacctcccgggttcaagca

SEQ ID NO: 184580 - DNA, 280 bp, Homo sapiens
gctctccccggccaccccacacccataggacatgctgaaatacaccctttccttcctccagctgggacagggtggatcccggccccaaaatagagcccatcagagggaggctgcagctacaatggggcctttcaggctgaagaagccgcccgaygatgccaggtctcctcagacacacctggaggccggcaccgcaccaacaaatcctcgtctccacttggcagctttgaggggcaaagggctcagctgcggagaggccaccttctaatcctgtaattac

SEQ ID NO: 184581 - DNA, 456 bp, Homo sapiens
gaattcttattattgttttaagcccctaaattttggggtaatttactaagcagcaacagacaactagctcaagctgcctgttatgggaccacagccgtcgccttgcttccttagctcccaggtgagtgtagtcaagatggaggcagatgccttcttgggggcctgctctcttggctgtaagggccttttctttccagtggcttgtggtgagatggtctaacctggagctggggccagggactccctcttctgtckggtgaaatgggtgttgcagctgcagccaggagcatagggaggcagagctgggacagagcctgagcttgtcccctgggtcttcaggttctttctttggtagtgagagttgaggctggagtctcagctgtgccctcccgtggccttcacttatggttagctacatgtgggaaacagatgttgcctattcacatgaggggtcta

SEQ ID NO: 184582 - DNA, 435 bp, Homo sapiens
gcccctaaattttggggtaatttactaagcagcaacagacaactagctcaagctgcctgttatgggaccacagccgtcgccttgcttccttagctcccaggtgagtgtagtcaagatggaggcagatgccttcttgggggcctgctctcttggctgtaagggccttttctttccagtggcttgtggtgagatggtctaacctggagctggggccagggactccctcttctgtctggtgaaatgggtgttgcagctgcagccaggagcatagggaggcagagctgggacagagcctgagcttgtcccctgggtcttcaggttctttmtttggtagtgagagttgaggctggagtctcagctgtgccctcccgtggccttcacttatggttagctacatgtgggaaacagatgttgcctattcacatgaggggtcta

SEQ ID NO: 184583 - DNA, 372 bp, Homo sapiens
gcaaggcatgagccagggaagggcagagaggacggagaggagggtaggcctgggagaggtcaagggctttgtgactgacagttgttgggaaggaagaactggagcctgaatctcaggtcagaacatccgagcattctacggaggcacagacagagccaaggggtgggggcgggatggcatcacctctgagggttagagttctggccgcagaggctcagcatcggtgggtaccatgccagacccagcagcttcccagcgccagaggagggatgcactctggccctgcccgcctttctgcccctcagccccaamccccagggcaggcctaaagaagagtttctccagctggctttggcggccaagacgcaatgt

SEQ ID NO: 184584 - DNA, 561 bp, Homo sapiens
tcaaggtgaatagacaacatcctatttggaaggatgccactttgattgaagaagataacaacagaccagcctgatgggctgaattgcatgctgaaggatggaacagtggtaaaagctcctgtgtttgggtttgttagctcatgggcattggctgggccacatagtcaggcaggrcaacaatggaacccttgtctattaaaagaatgcccatgtgggtcatggtcctatggaaatttgaggagtgcattgaagcaggacccattgatgaccgttagaagagctaatggttccaggtttagaaggtgactagaattgacagcacatatccctgtgggcttccttgaggtggacacctgagttcatgaaatgagtagatatgttttataataataaaaacagaacagaagatattgcatggatttggatgaccaaaaatcatttattcagaccaaagaacatactgtacataatgcccaaggatggcagagatatcctcctcagagtagtggtttgatagagaagtgaaataggcaattaatgcattggttgtcaacacacacc

SEQ ID NO: 184585 - DNA, 561 bp, Homo sapiens
tcaaggtgaatagacaacatcctatttggaaggatgccactttgattgaagaagataacaacagaccagcctgatgggctgaattgcatgctgaaggatggaacagtggtaaaagctcctgtgtttgggtttgttagctcatgggcattggctgggccacatagtcaggcagggcaacaatggaacccttgtctattaaaagaatgcccatgtgggtcatggtcctatggaaatttgaggagtgcattgaagcaggacccattgatgaccgttagaagagctaatggttccaggtttagaaggtgactagaattgacagcacatatccctgtgggcttccttgaggtggacacctgagttcatgaaatgagtagatatgttttataataataaaaacagaacagaagatattgcatggatttggatgaccaaaaatcatttattcagaccaaagaacatactgtacataatgcccaagratggcagagatatcctcctcagagtagtggtttgatagagaagtgaaataggcaattaatgcattggttgtcaacacacacc

SEQ ID NO: 184586 - DNA, 468 bp, Homo sapiens
ctagagatagggagaaggggttgccaataggaragtggaattcctgagcacctcgtcacaggcagccgacagaacatgagccgcagggcccaggctatttatacctcgcctgtcactatcagggtccccacagctccccccacctccagccacacacagcaggtccttttgctctttctggtcccttctctactcctccccctccctacctaaggaccaggcaatttcattcatagacccctgtcatcataagcattgcccccacagaaccctgacactttttcctcagctccgtaacagggggtgccctcattggcccttgggggaaagagcccccaaagatgctcactatcccttcttttacaccaggtctaggggtagaagaggaattagatataatgattcatctaaaagggcccagaaccttccctggcttaaagaaacttctcaggctcagatatggcctcc

SEQ ID NO: 184587 - DNA, 393 bp, Homo sapiens
aataggagagtggaattcctgagcacctcgtcacaggcagccgacagaacatgagccgcagggcccaggctatttatacctcgcctgtcactatcagggtccccacagctccccccacctccagccacrcacagcaggtccttttgctctttctggtcccttctctactcctccccctccctacctaaggaccaggcaatttcattcatagacccctgtcatcataagcattgcccccacagaaccctgacactttttcctcagctccgtaacagggggtgccctcattggcccttgggggaaagagcccccaaagatgctcactatcccttcttttacaccaggtctaggggtagaagaggaattagatataatgattcatctaaaagggcc

SEQ ID NO: 184588 - DNA, 388 bp, Homo sapiens
cattgtctgcctaattgttcaagagaaacccaggaatctacctggcctccttaccctctccatgcactcacatctaacctatcacctgataattctgatcattctgtttcctaaagatctcatatctggctgcttctctccatcctgatcgtgaccccactatcctggtctcaacatcatctctcacttgtgcttttgttgtgtccttataawtggtcttccttcatccttttactttcccctcccacccattctccacagtgtagacagagtgacatttaaaaatatgaacctgcttatgccactctcctgccttatcagtggcttcccattgatcttaagatagagtttaaaattcttatctgacatggcttacaaaaccctgtgt

SEQ ID NO: 184589 - DNA, 485 bp, Homo sapiens
acttttaaagtcaactttctggatgtattaaagaactgttccaatttcacctctcttggtgtttcaatgagaaaacacactctgaaaggccgaaaatacccttttcgtccctcctggaagcctgttctgattattaaccaacacygtgtctcagagggcatgaagtctatttccatattgacatttcttggcccattgattctgtgtgacaggcttgacaaatgttcactcaatggccattactgtctaacttgctccccaactgagatccaccaagatgtctgatgtgaccaaagactaccacatgctcaaattcttttgattaagtctttcaacagaaaaaaaaaattagttcagttgaaattagaagcagtacctgggattgctatatgaccagaatggcactcttacagagggatctcccctgaccaggttacagaatgtattcattctgacatgcaccaaatcatatctgcagcataata

SEQ ID NO: 184590 - DNA, 497 bp, Homo sapiens
tttaaagtcaactttctggatgtattaaagaactgttccaatttcacctctcttggtgtttcaatgagaaaacacactctgaaaggccgaaaatacccttttcgtccctcctggaagcctgttctgattattaaccaacactgtgtctcagagggcatgaagtctatttccatattgacatttcttggcccattgattctgtgtgacargcttgacaaatgttcactcaatggccattactgtctaacttgctccccaactgagatccaccaagatgtctgatgtgaccaaagactaccacatgctcaaattcttttgattaagtctttcaacagaaaaaaaaaattagttcagttgaaattagaagcagtacctgggattgctatatgaccagaatggcactcttacagagggatctcccctgaccaggttacagaatgtattcattctgacatgcaccaaatcatatctgcagcataatataattccaggcagaa

SEQ ID NO: 184591 - DNA, 501 bp, Homo sapiens
ttgactagtcaactcaacacattcattaattcagcaaacatttaatgataaactctttgccagctgtcctgctaggaagcagraataccatacaaagaagacatggtttatgccctcatgtagctcacagttcattaagcttgtggaagtgggtttcgtgaaattgaattttaagtcacataacagaatggtgaagacgtgcctttggctccactaattttagtgttcaaagttatccatcccattttttgtgttttaagccttccaaattgaccacaataagtgaggacaccatgaataggttggatttgtttatcctctcaaggatctcattttttctagaaagctggctagtcaaacaatgcatgctttcttttggtggaaatatgcttcttacctaccacagaaaaagtaagaagactactcacaaagaactgggaatagatatggcctgggacaatctaatagccttctgtccttggaagaaacatgaatttttat

SEQ ID NO: 184592 - DNA, 625 bp, Homo sapiens
caagggtattactttcacaaaagatacagataagtagttctatctgttctctcttccaaaattagtgaatcatgtcgttaccgagtttaaggaccagtgttttttaaaagtggcaaattgataagcagatatccttggttattttccctctgatcattgttcttttactgcctttgttcttaactggatgagaaagtagaacaagagtttgctttacagataaaccaaggaaatttcatgcccaataatgtaaacgaagcaccatttttcctaccaaagcaccccacttacaaaactaaaatacagaaaagttgagaatttgtctagaatccagagcaccatttttaaagtgcccattgrcacagtagcaatttatgaaagttttgcaatttgtgaagcagatgtttttcatcagcgtggatgccttgattcatgaaacattccagtttgacttcaccatcaactatcttttaacccatatgcatgtttaaccgagggtcaattgatcaaataatagctgactggccaaaaaggtcattcttgggtttggctgattgaaaatgagctgttgcattttttttctcttgtgtgttaagtgcagcacaaattattcatgacactgcta

SEQ ID NO: 184593 - DNA, 223 bp, Homo sapiens
gatcttattttcttcctgaagggcaggcccagttctgcctaaaagaggcaagttttaaataaaaattttgaggctaagtgagaatccactgtgaatagtgaaaaactggcataggmagccgtgtggtcagagtcgaagggaagctccaggaagactgcttttgtatttggatggatgcaagtccataaagtcagacgcagagctgagagagtggccagcacaa

SEQ ID NO: 184594 - DNA, 223 bp, Homo sapiens
gatcttattttcttcctgaagggcaggcccagttctgcctaaaagaggcaagttttaaataaaaattttgaggctaagtgagaatccactgtgaatagtgaaaaactggcataggaagccgtgtggtcagagtcgaagggaagctccaggaagactgcttttgtatttggatggatgcaagtccrtaaagtcagacgcagagctgagagagtggccagcacaa

SEQ ID NO: 184595 - DNA, 582 bp, Homo sapiens
gaattctttggtgtctggagattgaagacttaggtattgtagttttcattgtctgggcttgtttgtacctatcttttttgggaaggtgaatctcatgtcaaattttaatcctcaatattggaggaggggcctggtgggagatgactgaatcatgggggcagatttctcccttgctgttctagtgatagtgagcgagttctcatgagatctggttgtttaaacatgtrtggcacattccccctctctctcttcctatttctctggccatataagatgtgtctgattcccctttgccttctgccatgattgaaagtttcctgagatcttctcagccatgcttcatgtataaccagtggaactgtgagtcaattaaaccctttttctttatgaattacccagtttcaggtagttctttatagcaatgagagaacatgcgaatacagaaggctttccttccagatatttgaaaagacctgggtgttgtgatccaagctgtatttgctgtagggggcaccccaagcccagtaatactgtggttcttgcagacttgtagaggtactgccttgatggtcttatggtctt

SEQ ID NO: 184596 - DNA, 609 bp, Homo sapiens
gcacttcagtttctcaatacattacctaactcaatccttacaacaacaccctatccccattttgtggataaataaactcatgttcagaaggttgaataaattatctaaggttaatagttcctgacctagagctcaaatcttcagtttctatcatattcttgcccttaccctggggtagctaacattcactcactagtattggagctaaaataagggagagaacatataaatgaatacaaaggagacaytcacctgccttctctttctccttacatagagaaggttgattatctgctattgtgaagtttgccttttgaaggatagaaatgagaagactttcttaaattttgcctctacgccaagaaattagagtggtaccaccagtagttccattttcaaactatcactgtagctaaagctatgtggtaagggccaaggaaaagaagtattcttgcacttcaaaatgcactgaaataccagtcagtagcataatataaaggaatttagtggagagaagagttgacctcaatctggctccaacatctcggctcttaacccctaccctacacttgttcttcatggggaagctaattgggccactggaagatt

SEQ ID NO: 184597 - DNA, 387 bp, Homo sapiens
aaatgcattaattaacctttacactcatataaaagtgttttgtgagaacaaatgtacacaaatgttatctttaatcatgactaataaaaatggatattataaacacaagctttactrctgcaaatgtctccttgacaaatgacagggcctgattcctttattaaaagataattaaaaatgtttcacaagggattcaaaaccttcctacagttctctcctgcctgcctgcctgctttgatggtaatatgaagagaatcttgaaataacatctaatagttatattaaatgtgaatgtgtaaatttattttattcaacaaaatgttaaaactaaatatctctggcctatggaagtagttaaggaggcattttgaaatgtgctaaccatga

SEQ ID NO: 184598 - DNA, 387 bp, Homo sapiens
aaatgcattaattaacctttacactcatataaaagtgttttgtgagaacaaatgtacacaaatgttatctttaatcatgactaataaaaatggatattataaacacaagctttactactgcaaatgtctccttgacaaatgacagggcctgattcctttattaaaagataattaaaaatgtttcacaagggattcaaaaccttcctacagttctctcctgcctgcctgcctgctttgrtggtaatatgaagagaatcttgaaataacatctaatagttatattaaatgtgaatgtgtaaatttattttattcaacaaaatgttaaaactaaatatctctggcctatggaagtagttaaggaggcattttgaaatgtgctaaccatga

SEQ ID NO: 184599 - DNA, 618 bp, Homo sapiens
aatgcatcaatgtaggctgattagttatgacaggtttctgacatcggtattagatgttcattataggaggatttggatttgaaagtatggtgattctctgtactatctttgtaatttttctagaaaaccaaaattattccaaaattttaaaaaatatgtttaaaattgatctgaaaatcaaagagggaataactatcatttaattatamaggaaggcactgtaaatagctagaaggaatttttcagcatattagattcaacctgtggattcttcaatgcttacaagctgtggtttagagatgacaaatgggagtacattttgtgccagaaatttggaagcaacttttgccaatatttcattgatgtgtatttaaatttagctcaaaactatttggatcagatatatcttagttttaatgtttgttttacaaataacacgagaactaggctatctgctttctattgatggaaaaccattaatttaaatgctaataacagcctaacaaggttaacacttgtaatccttacagtaactgaacaaatcaaatgcaacaaatacacaatttaaaatgagcttatcctttagtttattttaggatatatatgcatggccaattt

SEQ ID NO: 184600 - DNA, 634 bp, Homo sapiens
gagagagagagcaaaacaataatagcaggagatttcaatatccactgacagcactagacagaactttgagacaaaaagtcaagagagaaacaatggacttacatgacatactagaacgaattgactaaatggatatttacagaacattctacmcaaaatctgcagtgtatacattcttcacatcagcacatgaaacattcttcaagatagatcatatgataggccacaaaacaagtctcataaatttgaaaaaactgaaatcatattaagtatcttctcagagtacagcagaataaaactagaaataaaatccaaaaaggaaccccaaaacactaccaacatatagaaattaataatctgctcctgaatgatatctaggttaacaatgaaatcaagatgaaagttaaaaattatttgaattgagtgataataatgagataaattatgaaaatctctggatacaacaaaagcagtgctaagaggaaagtttctagtaataaatgcctacatcaaaaagtctgaaagagcacagattgacaacctaatgtcactccacaaggaatcagagaaacaagaacaaactaaatccaaagctggaagaagaaaagaaataaagatcaaagcagaactaaat

SEQ ID NO: 184601 - DNA, 603 bp, Homo sapiens
ggtattccattatagcagtgcaaagggactaaggtactactttagccacagaaatttagaaattcagtcatttcattatattcaaagtatactaggatggatgatatgtagtttaaaccycataagaaataattttaaatttacaatatgtgtatatgtaagcaaatgcctatggtcttttgtttattgcagtaattttctagtttagattcctacctaaattcactctgttagatctccctgattataaaaaaaagaacaaaatatattaaatgtttactatgtaaaaatcactgtacaagcatgtaagaaatacagagatatgtatgacacagacctctcccctttaagaatagtaaaaaattatcaatagcatatgcacacaaaaagcaattataagaaataatgtataaagtcatatttatatattaatttataattgtattcatatattaatatatactgatcacctgcttttttacattgtgtaagaatccaactgtcaacaataccactaaagtttttgctcttgtagtctttataaattttggagtaataagacagataagtacaaagtaataagataaatattataacaatgga

SEQ ID NO: 184602 - DNA, 479 bp, Homo sapiens
atacaacaatacatctgaacagtttactgaatatgatttagatgtttttagtaaaaagaaatcaatgcttatatatgatctattcaattattcattgtattatggcattacagtcacagagaaactgaagttaacaatattcagtagacaaagtttgttaagaagtaaggaataatctcagcaaaggatggataagatatagcaataggtcattaaacatttcattttctttgatagaagttaattagggaatgtaaagtcggcacttctaaattgctaaccgccaggttatacaggtatatggggaaaatattttatttttttatgtcatcaagaaaatgttctgaacaacttccagaagttctttattcatgaaataaaataatttttaaaagttatatgctaattcagaggccggaaaaataatattaraagtactcacaatatactattggttaatcaagtatcattccatacta

SEQ ID NO: 184603 - DNA, 601 bp, Homo sapiens
tagggagattttattggtagtggttgataattttagcacattattttgtttttgtggcatatgaaaaatttccagaaacaaccaactaggaacttcacttcacaatagcattctcattgtcaatagagtactggtacccttgtctgaactattggcctttactgctcagacctaaaatccatagaaagtctgttggctgcctctactaagtttttttcaacacactaytgtctcttcttagaagtgtctacgactatgcttgcccagttgccacatgtgatgtgatttctgcttaaatggcttacagcgataaatggtataaaacattatatgaatataaaataatatatagctttgatagtttttcaggaataatgaacacctttttggatattagttacactttaagggtagcacttaattatttagctaatatatgagctaaattaatacagaataattttaaaaatattttatgggcaaataggtttttacattgcaaactgtttgtagactgggttgaattgcaaatgatcagaaaaaatcaagtaccagaacttcaggaatttttcaacacatactaacattgaaaatttattct

SEQ ID NO: 184604 - DNA, 601 bp, Homo sapiens
tagggagattttattggtagtggttgataattttagcacattattttgtttttgtggcatatgaaaaatttccagaaacaaccaactaggaacttcacttcacaatagcattctcattgtcaatagagtactggtacccttgtctgaactattggcctttactgctcagacctaaaatccatagaaagtctgttggctgcctctactaagtttttttcaacacactattgtctcttcttagaagtgtctacgactatgcttgcccagttgccacatgtgatgtgatttctgcttaaatggcttacagcrataaatggtataaaacattatatgaatataaaataatatatagctttgatagtttttcaggaataatgaacacctttttggatattagttacactttaagggtagcacttaattatttagctaatatatgagctaaattaatacagaataattttaaaaatattttatgggcaaataggtttttacattgcaaactgtttgtagactgggttgaattgcaaatgatcagaaaaaatcaagtaccagaacttcaggaatttttcaacacatactaacattgaaaatttattct

SEQ ID NO: 184605 - DNA, 450 bp, Homo sapiens
aaaacattatatgaatataaaataatatatagctttgatagtttttcaggaataatgaacacctttttggatattagttacactttaagggtagcacttaattatttagctaatatatgagctaaattaatacagaataattttaaaaatattttatgggcaaataggtttttacattgcaaactgtttgtagactgggttgaattgcaaatgatcagaaaaaatcaagtaccagaacttcaggaatttttcaacacatactaacattgaaaatttattctgatagaaatgtagtatcctgggtatataatcttttgaaacagtttatccagttgttatgagtaaattaaaatggagactaggcctaaaaaatctctgagcagacaaaactaattaggccttgaaaataagcttaaccstgcttaaattgcaaacctaagtggaacttaa

SEQ ID NO: 184606 - DNA, 464 bp, Homo sapiens
aatcttcccaaaactcaatgaagcagtgcaatgactactagaccttctgtgatatgatagcagctttcctgtcttctctcttgctagatccttcaagctccagataatcacttgtatctctgccagcatcatgttctcttacatccagtcctttccatggtttttttttctctgcctcataggctctcttccaatcctttcctggcaataaatatgacttatctttttgttgtcagtttagtcatgtaaacagcttgaaatgccttccttggtttatttttagaatatactgcatcatatacaacagactatgttcttatgttttaaacattgactagcatagtatggatttccaaagaaagtactcaatgctattgtacgtatgtattggattgtttattttctctcaatctgtactgatagtttagctcatttatggtamagttagttggctttttaggtcc

SEQ ID NO: 184607 - DNA, 406 bp, Homo sapiens
gctggagcgcagtggcatagttttggctcactgcagccttgacctcccaggctcaggtgatcctcccacctcagcctcccaagtagctgggataacaggtgcacgccaccatgcctggctaattttctgtatttttagtagagacagggtttttccatgtttcccaggttggtcgtgaactcctgagctcaagtgatccacctgcctctgactcccaaggttctaggattacaggtgtgggtcattgcrcctggcccagggttctgtatttaggaaagttttggaatggaaagagagggtcctggattatgatggatagatgggattgagcaaagggtagccaaaatgttctacataataaagaaacaggaatgttagctattttcctttgcagcccaagaaactt

SEQ ID NO: 184608 - DNA, 539 bp, Homo sapiens
gaccttataagtaggatgcttcttttttccttcacttctgtcattttctctaaatggtgacaatacatacatgtcccatgaagcttcacttttttttctgaattgatccccaacaaaataaggctctaaaaaataagtggtgtcctagacattgtaagccccctaaaatgacctagttaagtgaagatatagctgagatgcctgtggccagatactatggaattattggagtgatttatgctcgcatcttgggtgtctgttcttttttaargaattcacttactctgatagaccatccaggatgtttgttagtaggcacaccctccaattttgaagtgctggggaggagatatggtcattacaaaagctgcttagagcaaagagtggtaattttgtgtgtgttgaatgtgggtgtcttttgaacactgaaagactacctaatgtcatgaaaagacaagtgacttgttaaaggaatggagctctcttcccctggggtactactagcctgtattaaacctttgtgaacattagggaaaggt

SEQ ID NO: 184609 - DNA, 434 bp, Homo sapiens
atctgtattagtgagggttctccagagggatggaaccaataggatatatgtggatataaaagggactttattagtgtattagttagggtaccctagagggatacaactaataggatatatatatgtgtgggggggggcggggagtttattaagtattaacttacatgatcacaaggtcccacaayaggttgtctgcaagcctgaggagcaaggatagccagttggagtctcagaactgaagaacttggagtctgatgtttaagggcagaaagcatccagcacaggagaaggatgtaggctgggagcctaggccagtctcgccttttcatgtttttctgcctgctttatatttgctggcagctggttagattgtgcccaccagattaagggtggttctgccctccccagcccactgactcaaatgttaatctcct

SEQ ID NO: 184610 - DNA, 481 bp, Homo sapiens
atctgcgggaaagagggattctgtccagggagtgtgatttttatttgcatgaatgaactcatattgcattgcttacacctctactcttttctagtcccaycactccccaataccagaagagctatgttattaagaggaagacatttctgattgttttatggatggagaagctcagaagatgaggaattgagagagtgaatgatgttgaaggattctctgaaaatattgcccactgagaattaggagctagagatttgattttccacctcattttggaaaaattgtgaaaaacagagctggcacgctaaaaggcattaaacctggcaggaaggtaaagagaaagggccagcaagccgccaacaaggaattaaaagagatcatggaatacagcccagagctctgctaggctgttaggggcggtcccggagaagaagcagcagatgacaaatgatcataagctgagacctgatttatttggtgg

SEQ ID NO: 184611 - DNA, 232 bp, Homo sapiens
gcagtctgactttagagcttaggtgctcagccatcacgcagcactgcttccctggcaaagagaaaatgtgctagctgaaaggagatgggcattgcgttcatytggcaatttaagaagacataacttgccaccagaaaatcaaacactataaggcagcatttattgtgttgctgatcatgaatgccagatctgctttctggggattctttggggtctcagtgccctcacatgt

SEQ ID NO: 184612 - DNA, 569 bp, Homo sapiens
caagtggctccattgccacagttccagcgtcaaccacacagttgtggtgtagtgttgtgagcaatgaggcaggctgcgtgtagctcctacaacagactcaaatccagaaaaacagaccgcttccaacttggaaacacgtatcattcaaatatttattatatatttttggaagttggctgcaggaaacctacatttttttattaactcttgttatacaaacaaaccaaaatgccttcaatgcctaccatgtaccaaatggggcactcatcccattgctgaagttaacaatccttaagaagtaaaaattaattccaaaacccagaagaaaagttgttgtatccagtttgttttattatgttctgttktgtgtgtgtgtgtgtgtgtgtgtgtgtgtgtgtgtgtgtgtgtgtttgttttggtttggtttggtttggttttggtttgtcacatttttttcattgagattctggccatgacatatttcagaaaagatttttaatcattctgaaaagctgtaggatcagggtaaggagtttgttttcttttaaagtgtaggatggtaaatacaa

SEQ ID NO: 184613 - DNA, 562 bp, Homo sapiens
acttttctgtctcctggaaaaattctactgattctacgggcagctcaaaagtcttcatcagctgtgctaaattcttcttgtcccctgcaatcacattcctttccctcttcagcacacatactgttccttaattcaaccagtactgctgtgtaagtgtgatgttcctgatgtgtacaaagtaatggaggcataatagtggacatagtccggtccctgacactaggaagctgaaagtctagccagagtctgtttccactgctatcctgtaaactgtctgagcccagggatagtatcattaacttttatcacctcaccagcaagcacattccctggtaaaatctagattacaaaaaaggtatttctgatattttactgagactaccaacactcatacatcttgcaggagatagactcttytgctaatgacaataaatggaagggaactctggcaataaactgctgagaactgcacagcagcacttcccagctatctgccatatgagaattagaacaaaacaatgcaacccaaatgggaaggtggaagtgcacaatgaatacacaa

SEQ ID NO: 184614 - DNA, 540 bp, Homo sapiens
ccctttagggcaggtctactcccagaagagaaaccaagggtaaactaccacagattccctcttgggagagtttctaggccaagaaagagtggaaaaggccactcctacctccatacacaaayattattatcatacatcttttaatcttctgtctgttttcctaaaaatctatttgtctttcctaaataaaccatctgttcttcctatagaagccttttctcccccacccctttcctttagtaacttaggtatataggcctctaaccttagtcacctagctagcttgctagttcatttattagttctcctattcatgggaataagccttttttccccctttaatccatattttgtcagtttagttcacagacctcagagagcaaacttaagagggtaccagaaaagttttcctccctgacacacataaaccattaacataataaaaatttgtatattttatttaaaaatgtatagtataaaaactgtatattgaggaaatgtcctatagagacaatcacatacacatatgtcatcatcatc

SEQ ID NO: 184615 - DNA, 474 bp, Homo sapiens
tcttacagctaaattgggttctcctcagctttaggataatagctgtttctcctagctcaagggctagcatgtgtaacctgtctttcaccttcttgagctagctagcccaagatactttttgcagtcccatcgttagtgctctgtctgttctactctggcaattactggctttgttcttttaagtgccagagcaagaatcttgagctctcttaccacaggaatttcctttttgtttttcctctgcctttgtttttcttctgaagacagggctgcaaagatttccatatgaggaagaggcaattgctggcatggctgaaaatttggtaggattcataatcactgcgttgcatgcagcatcctctgcgggttgtaggctggagtatgtttwttttatttttttaaagaggatagctccttgtctgtcaaaccaaccatgtaatagctatatctttgcagcagctgagatagctgact

SEQ ID NO: 184616 - DNA, 436 bp, Homo sapiens
tttctcacatttctagaggccaggaagtccaagatcaaggtgcaacagattcagtttctggtggggacccatgctctccttccaagagggtgccctgtttctcctctggaggggacaaatgctgtgtccacacatggaggaagaccagagaggcaaaaagggactaaggtgctctgttctgcttcttttatacgagcactaatcccatccatgagggtggagaactcatgacttaatcactctcccaaaggcctcacctcttaatactgccacaccagagattaggttccaaccttagaattttgaagasacacaggcattcaaaccgtagcccatactttccggtagccatgctggatttcttgctgttccttgaatgctccaagcacactcccacctgtggttcttgctctcacagtttcctctgcctgggggg

SEQ ID NO: 184617 - DNA, 436 bp, Homo sapiens
tttctcacatttctagaggccaggaagtccaagatcaaggtgcaacagattcagtttctggtggggacccatgctctccttccaagagggtgccctgtttctcctctggaggggacaaatgctgtgtccacacatggaggaagaccagagaggcaaaaagggactaaggtgctctgttctgcttcttttatacgagcactaatcccatccatgagggtggagaactcatgacttaatcactctcccaaaggcctcacctcttaatactgccacaccagagattaggttccaaccttagaattttgaagacacacaggcattcaaaccgtagcccatactttcyggtagccatgctggatttcttgctgttccttgaatgctccaagcacactcccacctgtggttcttgctctcacagtttcctctgcctgggggg

SEQ ID NO: 184618 - DNA, 498 bp, Homo sapiens
gaattcaaaagtgttctacctaaagagatactggagactgtaaaaaaaagtatataaagcatattactagaaattgtgattaaagttgtagtgttttaaaatagttctgcaaattctttgacggtcttgccttgcacaggtgttgcttgcttcccctcccctggaatgtaggtcagamttaatgatctctttggaaccacagaatgtggcagaattagtattctatgacttgcaaggttatcaacgggatgtagcttctgcctggtttttattcctgcatcactgtctctgggggaagccagctttcatgttgtgaagacattcaagcaacactatggaaaaacccacatagtagaacggaggccgcctgctggaagccagtaccaccttgttagccatgtgagtgaaccatcgagtggatcagccagccacagttaagcctgtaggtggcagaagcttggaccaacaccttgactgcaacctcatcaacaacaccaa

SEQ ID NO: 184619 - DNA, 390 bp, Homo sapiens
aaattctttgacggtcttgccttgcacaggtgttgcttgcttcccctcccctggaatgtaggtcagacttaatgatctctttggaaccacakaatgtggcagaattagtattctatgacttgcaaggttatcaacgggatgtagcttctgcctggtttttattcctgcatcactgtctctgggggaagccagctttcatgttgtgaagacattcaagcaacactatggaaaaacccacatagtagaacggaggccgcctgctggaagccagtaccaccttgttagccatgtgagtgaaccatcgagtggatcagccagccacagttaagcctgtaggtggcagaagcttggaccaacaccttgactgcaacctcatcaacaacaccaagc

SEQ ID NO: 184620 - DNA, 635 bp, Homo sapiens
tctctttattgtctaagaggaaaggtaattccgccttaagaaagagcaaggatacaagaacataatgaaaaatgcaattgcatacaaaccacaaggttctgaaaagttagttaatttctttattgtttctacattatctgctactaaaaagtaatttccycatatttatacgacccattacagactaaaatatagcctttgaaagagacaagtgtgatattttttccttgattgatgaccgttagatcatcaagttcccatggtttgtcccagttctcccaaagttgtatctactcaatcacttgtttgagctagttttgacttggtcagcaaaattattggaaaactaggttccataatttagtggcacttgggacacactcatttgtccaatagacttttgtatctgatattccacagttaaatctgtggcacctggtttgaaatgtttctggttggctccatcagcacctgccccatctaatctctcggtctaagcttcacggccacaatctagtaccttgataagggatatgatggtgatgacaatgacaatgaaaaacaaaatttactattccttatgtggctgaatcctatctagatgttttaaatatgtgaatccttttgctattcgc

SEQ ID NO: 184621 - DNA, 635 bp, Homo sapiens
tctctttattgtctaagaggaaaggtaattccgccttaagaaagagcaaggatacaagaacataatgaaaaatgcaattgcatacaaaccacaaggttctgaaaagttagttaatttctttattgtttctacattatctgctactaaaaagtaatttccccatatttatacgacccattacagactaaaatmtagcctttgaaagagacaagtgtgatattttttccttgattgatgaccgttagatcatcaagttcccatggtttgtcccagttctcccaaagttgtatctactcaatcacttgtttgagctagttttgacttggtcagcaaaattattggaaaactaggttccataatttagtggcacttgggacacactcatttgtccaatagacttttgtatctgatattccacagttaaatctgtggcacctggtttgaaatgtttctggttggctccatcagcacctgccccatctaatctctcggtctaagcttcacggccacaatctagtaccttgataagggatatgatggtgatgacaatgacaatgaaaaacaaaatttactattccttatgtggctgaatcctatctagatgttttaaatatgtgaatccttttgctattcgc

SEQ ID NO: 184622 - DNA, 635 bp, Homo sapiens
tctctttattgtctaagaggaaaggtaattccgccttaagaaagagcaaggatacaagaacataatgaaaaatgcaattgcatacaaaccacaaggttctgaaaagttagttaatttctttattgtttctacattatctgctactaaaaagtaatttccccatatttatacgacccattacagactaaaatatagcctttgaaagagacaagtgtgatattttttccttgattgatgaccgttagatcatcaagttcccatggtttgtcccagttctcccwaagttgtatctactcaatcacttgtttgagctagttttgacttggtcagcaaaattattggaaaactaggttccataatttagtggcacttgggacacactcatttgtccaatagacttttgtatctgatattccacagttaaatctgtggcacctggtttgaaatgtttctggttggctccatcagcacctgccccatctaatctctcggtctaagcttcacggccacaatctagtaccttgataagggatatgatggtgatgacaatgacaatgaaaaacaaaatttactattccttatgtggctgaatcctatctagatgttttaaatatgtgaatccttttgctattcgc

SEQ ID NO: 184623 - DNA, 514 bp, Homo sapiens
gtaaattatgttgtaaatatatagagttaatggtatttggctgcaatttatttcatctcccctttctgccttctccccagggagctcagctatttcaagtaaaaatctcattacctcccaaactatctctatgtgatgtagatgtggccagtgttgtcatccataatttacagtacactttatatggttaagcatcttactcagaatcaaatgacaataccagttggcaaattctctggggcaaattctctggatcaattctgtcctttctgattcactgtgatatgtgagcacacggkaaatgttcaatgtgttcttacaggcacaggcttaacatgctacaagttattccacatcaatctgggaggtagttttaatgctgccttttttgtaccatgggattacatttgtctctactttctaggaatggttcaaaatcttcccattgttccctgtttcatgtttaggatagattatatgaatttacaatcagagtcaacttggatggtttaat

SEQ ID NO: 184624 - DNA, 503 bp, Homo sapiens
gatgtaccaatattaagcctaatgtggtgcctataccatttgagttttgagttatttctcccacagcagatcccctatacaaaaagaattgatacacgtatttccctttctttctgtaaattactcatatattcactacataattatttaaaccttgttgatggtaatcaatcactaaatgagctagaaagcaaggagtgtctttcatgattcattgtagtaattgtctctggaagttctatcaccatttatttgtcttarctggacttggtctataactagctctgtgaaatgatggacagttttcaaggcttgttggcatggaatcagtatgtggcaggagagaccatttgaatcaattatattatccctagcagggttaccatggaagctctagctcttcatagcactttgcttctcctgtccgagtagtatgctctacatatctttaattagaatggatgcaatttatttagtaatggaaagcttacttaagcgagttc

SEQ ID NO: 184625 - DNA, 589 bp, Homo sapiens
ttttctaatttaattccttactgaaaataaagaaaaaaggaaaaaaaatgccttcctatctggaaataagcttcgtttgatcgtaaagaaattatgtttgatattccatctttactcagacacaaaacaagcagtagttcttaaaataacctcttctgctatggatataataatctgtcatatgcatttattaactgattctctggcactgctgtggcatttaacattgcttatcatggttttgtattgggtgcaatccgcaagtctaaacaggaccaattactgagtcccctgtgtgcctggtcttgggatatgaagacccgttattctcaagtcatgaacaaatgagttgtggagaccagcaaaaaggcaaacgtaacactgataataaacttcatgatacaggtctgaagggatgctttaaacagattaagagccagtaatttaacagatgtgggagatggagacatttagaacacacctccttaaaaagcatatacttgtgatgaattttgaagkataggcagtaactagctaacttgaatgactggggaagaatgaatgttcagaaggaagaatactgtaaatg

SEQ ID NO: 184626 - DNA, 609 bp, Homo sapiens
taaagttcttcaagtgggggacagacatgaaagcaacccctcatccagcatgtccatctgtcaaaaacacttgaatacaacctctggaatactcgaacttgaattccttcaaggaacttaccaagtcacagaactcaaacaccaggaggtagggaatcgcttctacgcactgtccaacacactgaagaatatttggatgctgaagaatgctgggaaaaataaaagccataatattgttcatcaggaagcatgataataacattattcaaacaaaagcatactaataaaattattcaaatagtaatccaaattttttcataataatttatataatatttacataaatgacaggctaaaaagatcacraagattatacttaaaaggtgtatactaagttatctagcaagtaattcaaagccaatcaagtgaatattttcacaaattaaaaaagaaatcttaacataagaaactttaaaaattttttttcaagagacagggtctcgttctgtcaccctggctggagtgcagtggtgcaatcatagctcactgcagcctccaactcctgggctcaagtgatcctgccacctcagctggccaaatagctggcat

SEQ ID NO: 184627 - DNA, 545 bp, Homo sapiens
ctaaaattataataaaatagagagcaaaagaagtactttaggtcagcttctctgttacccaggtgtcaaatgataaattcctagattcttctattggacatagatctaaggagtaataggattagttagactgagaataaagaataaatgaaaaaagataaaaccatggctttgagtttagagcactgagagtagtaattttacagcaaataagaggraaagtaaaaaaaaaaaagctttctttttctgaaatattacagagaagctaaatggtaaataatttttttttactataatatgtcatccaaagaaaactactttagaaaaaaaagaaaagataagagctaaggttatacatttgaatgtgatctgcataaagctggatggatcagcttaaaattacaattttaaataaggcatagcagcataagaagaatttctaggttatttaaatttacattttagggttcttttcttctacgatgttggattggaggcttttagagcatctcatccacttggaaatagcaagataatgcatagag

SEQ ID NO: 184628 - DNA, 545 bp, Homo sapiens
ctaaaattataataaaatagagagcaaaagaagtactttaggtcagcttctctgttacccaggtgtcaaatgataaattcctagattcttctattggacatagatctaaggagtaataggattagttagactgagaataaagaataaatgaaaaaagataaaaccatggctttgagtttagagcactgagagtagtaattttacagcaaataagagggaaagtaaaaaaaaaaaagctttctttttctgaaatattacagagaagctaaatggtaaataatttttttttactataatatgtcatccraagaaaactactttagaaaaaaaagaaaagataagagctaaggttatacatttgaatgtgatctgcataaagctggatggatcagcttaaaattacaattttaaataaggcatagcagcataagaagaatttctaggttatttaaatttacattttagggttcttttcttctacgatgttggattggaggcttttagagcatctcatccacttggaaatagcaagataatgcatagag

SEQ ID NO: 184629 - DNA, 480 bp, Homo sapiens
ccaaagtgggatagtccccttccaggaatycagtggaataagaaatacaggaaagcccttcttaatatataaagaaatttcacagaaaacattatttaacatatatattaagtggctgttacataggtctcatagagtcactgagaaattccaagaattgtcattttttaagcttgttgaccttacctgaaaccaagaacaagtcttgcccttctgaaaacatgtgcacaagatttataggtaaatagttctttatttctaagtcccctatactccctagggcgcctgatgcaagctgctgctgatgccttaaggagtctatattaggtgagtaattcattaacacctagacttttataaacttatgaaggaaatatctccttttgaacaaatggagagaatggtattcttttacttcaaatctgttttaaaaatgacatttaaagatcaagctgaggacacaattgagtgttttcacgc

SEQ ID NO: 184630 - DNA, 480 bp, Homo sapiens
ccaaagtgggatagtccccttccaggaatccagtggaataagaaatacaggaaagcccttcttaatatataaagaaatttcacagaaaacattatttaacatatatattaagtggctgttacataggtctcatagagtcactgagaaattccaagaattgtcattttttaagcttgttgaccttacctgaaaccaagaacaagtcttgcccttctgaaaacatgtgcacaagatttataggtaaatagttctttatttctaagtcccctatactccctagggygcctgatgcaagctgctgctgatgccttaaggagtctatattaggtgagtaattcattaacacctagacttttataaacttatgaaggaaatatctccttttgaacaaatggagagaatggtattcttttacttcaaatctgttttaaaaatgacatttaaagatcaagctgaggacacaattgagtgttttcacgc

SEQ ID NO: 184631 - DNA, 227 bp, Homo sapiens
ttcaacacatagagtcaattatgagaatattcactgctaaacatttgaatcaactgtgtayatattataacaaatttaaactttattctataaaaatagaatgaaacaacattgaaaactatgtgccaaggctcgagacaatgagtgcagtaacgtggtagtattatcagttcagttgtgaatcagtaaggcctaaattaagatgatgatattagcaataaaaataa

SEQ ID NO: 184632 - DNA, 411 bp, Homo sapiens
atgcttacaaatatttagtgactttttaaaaaagtattaacgacaaaaactcataccgacaagactattatggaagccattgcattaatatcatgtatccactggaaaattagatgatgttaaaaatcatcagagagattaattagcgtcatccacaattagaaatgaattgtgcacttcagtataatattccagtcatgcctggaacttagatagtgatcttgtacacccccaccccctacaagtgatagaactaagtatgtttttataaacaaatcctttgatatttgttccacttttgctgaaaaygtgaacttgttaagaaaaaccaagagcacatagtagactatcctgtaggtattgcagttttatttatggaatagaaatgcagaattccacagggagtggcat

SEQ ID NO: 184633 - DNA, 550 bp, Homo sapiens
atagcatggaaaggtgttcaatcttgatagtaacctaggaaaatataaattaaaataatgacaaattacattctcctcatgaaattagtcaacactttgcaaagagtgatttcatttaataggatctaggtaagcggtgtgctcatactctcatcaggtaagtgtggtcttcagtgtttatttggaatactttatagctattaaaaagaatgaatcaggactctttgcattttaatggaatgattcctaagatatacttctaagacaaaaaagtcactgagtataatgagtttgctcttatgttaaaataaaaatattaggaaaaaatctagaatcacataggtagaattttaagaattgctctcataatattggccatgtatgtatatatgtacrcatgcatatatacatacatatgtcaaaaatgtctatttactgatattttaatacaaaactaagaatatgatatttgtactattaagaaatatggttttagacattacttcaggcaatatttgcagtaatgcaaacaagatgtatggttcattca

SEQ ID NO: 184634 - DNA, 620 bp, Homo sapiens
agcatagcagatgattttcacaaaatctaatgatttcattatggacttcatttgacaaaagaagaaccatgttctttctttttgttatgtctaacatattgttctttccacctaccctcctgcctgctttggagctacagcaatagtttatgtttgaaataattttcagcttgtggttctaaagttttttatttcattcataatgcaggcaattccttttttaagcagattggaaggttacctgtgatatttgagtttttttcctatgatcccacttatttaaaaatcctctttactagtccgcctcaacatctgcctccagattgaatattttcacataggaaattacacaatccttttagaatcaagccattaaagttcataaactgataggtttgatcagcaaaacattttcgtgcatcaacaatattataatagaaattatatatattcctattatataaatayatgattttatgtatatatatatatatatatatctgtcaatcagctgtcttttttcagactgtgtttttttttcttactttctcttcattccctttttacccaacttcttcccatttgtcagcgttacatgttttgacaagtttttcaaaatc

SEQ ID NO: 184635 - DNA, 576 bp, Homo sapiens
tcccatgatgtggtcataatctttgggtggaaatagcctaagagaagaatatgcatggagttataggtagtggcaaatgacatggctggactggaaggcaaaatataagactatctgggtcagggaaatatgagaaagaagcatatattggactgataggagtgggcatgaagtgtgaagktctctgcaatgcatgttaatgcagaagaggcattcaatagccataaagaaataactcagccagttaacatctgtccttctctggcatcagccaccacaatggtggtacaacaggcatgaatagagtagctagagtggcaaatatggaggcctgtgcatggacccaatgtatgggctcctctgtcccaagaattagttaggtactgcttccctcagatatccaatcttccaggaacagagaccatagccactacacacttaatggtcagcctttcttgcttctcctgccaatagatgtttggccagaataactactcaagggcttatgtagtgttgatccatcaatatgagagctctcataatatctcactggaccaaggaagccactttacaaca

SEQ ID NO: 184636 - DNA, 616 bp, Homo sapiens
cttctctctaaatccatgatttattttatttgtgcaacatacattactctggaaacagtgtaatgtttgaataaactgactgcatttactgggtgttagactctaggaaatcatcttcatgaaatcagttttgttccaaatatcatctggttccaactgaagccctacaaatgtaaggcctagatgcgatggaactaaaattcaaactaacaataagcaaactaaaaccaagatttcaatgtggtgattatactggccaatcattattctataaaaatgattcytagtactttaaacattttagctaaataatctctaaagttctcttttgggcttatcgtgctattcttgtttcataaacaggaaaattgattttccctcattttcagaaaaatgacagagtagaataaattaaaggaaagtcaagttattccttggaatataagttttttgaagaaaggggatttattttgtgtactgatgtaagagtgccccacccatttgaggccatcaataaatattagttaaaagatggaattaatgttctcaaagaataaatctcatttcctgctctaggattttccacttcctccaccaaagattcttttcttgaaat

SEQ ID NO: 184637 - DNA, 545 bp, Homo sapiens
ttacacactgtgtcatccatagagaaatgctggctaactcaaaaatgtcacctgaacttaaccttttgcagkgtgtgattaaaattatcaaccacactaaactatacacccttaactcacacgtctcttcatgcagctctgtgaggagatggaggcagagcacttgtttcttcttttatctgcagaagttaggtgactttctaaaggtagatcactggccagaggtttggagttataagagccactccagagatttcttttagaaaaacagtcaccactggaagcacaactcagtggcacagaatgggtgacaaaacttgcttacttgtgtgacgtattcaacctgctcaacgaattcaagctgtgacgtcaggggcaaatgataactgttccagtcagcagataaagtggaggcattcaaagccaaatgggaattatgagggcaatgagtgagcattgggatttttgacatgtttcaaacattagcagagattttgaaagagactgagccagggtcttctttctcccagttggtacatcatcac

SEQ ID NO: 184638 - DNA, 545 bp, Homo sapiens
ttacacactgtgtcatccatagagaaatgctggctaactcaaaaatgtcacctgaacttaaccttttgcagggtgtgattaaaattatcaaccacactaaactatacacccttaactcacacgtctcttcatgcagctctgtgaggagatggaggcagagcacttgtttcttcttttatctgcagaagttaggtgactttctaaaggtagatcactggccagaggtttggagttataagagccactccagagatttcttttagaaaaacagtcaccactggaagcacaactcagtggcacagaatgggtgacaaaacttgcttacttgtgtgacgtattcaacctgctcaacgaattcaagctgtgacgtcaggggcaaatgataactgttccagtcagcagataaagtggrggcattcaaagccaaatgggaattatgagggcaatgagtgagcattgggatttttgacatgtttcaaacattagcagagattttgaaagagactgagccagggtcttctttctcccagttggtacatcatcac

SEQ ID NO: 184639 - DNA, 552 bp, Homo sapiens
tgtaacaactattaacataaaataagagtttaaaaacattatttcctattcacttattttcctaataatagtattgtttatatttcccctgcccctacaaaatggatgaaggaaccctaatagggttattctaggaccctaacatttatgtaaattacattttagaatttctgagaatttgaaggaatgtcggtattgttttaaggtccttacagaattytgtggtaaatagaaattttttaatattattcaggaaagcaatcaaggtttttattctaggtgcttctgttgtatagaaaagtaatggttctgaatggaattacctagcaaagaacaataggtacaactgggatatagagaaaataaatttgaatactttagtacacatgcaatctgtctgatacgattagagattaagatgcctaaacagatctttctggtaataacattttgatactagcaccatagaaattattttatatgtggtcatgatcattattgctaaactttagtctttaaagaaaaacctgcagtttaactcataaaaataat

SEQ ID NO: 184640 - DNA, 410 bp, Homo sapiens
gtcgtagttttttgaggaacctccatatttttctccatagtgactacactggtttacatttccatgagyggtgtatgagctccccctgtttttgcatccttgccatcatttggtatttttttgtgtttttgatagtagccacgctaactggggtgagataataccttattgcgattttgattggcatttcttgtatgataaattgtattatttgatgaataaattatcacctggagcattctaatattcccaatattaacatgaaataaaatttaaattaacctagaataatgaaaaataacaaaatagcaatgtattaaactattctgtttgattcatgtatttcaatatatttcagaataatcataagagatatttaaaagcattctactgtaaattcatattaagat

SEQ ID NO: 184641 - DNA, 447 bp, Homo sapiens
ctgttcctaagttggtttgcttaggatatggcttctagctccatccatgttgctgcaaagggcatgatctcattcttttttatggctgcataatattccatggtatatatgtacattttctcaattcagtctaccagtgatgagcactcaggttggttccatgyttttgccaccgtgaatattgctgcaatgaatatacatgtgcatgtgtctttatggtagaacgatttatagtcttttggatatgctcaataatgggattgctggatcgaatgttaattctgttttaagctctctgagaaattgccagactgcattctacaatgggtgaactacattacattcccaccagcagtgtataagcattaaattttctctgcaatctcaccagaatctgttattttggactccttaataatagtctttctgactgttgtgagatggtat

SEQ ID NO: 184642 - DNA, 603 bp, Homo sapiens
taatatgtctagtgtacaggagtttttctttccctaggaaagagttattgttggttttgttttactttgtgtgtctgattttgtggtatggaagtattttgtcaagtcttaacagttcctggacaaaatgtccctaatcatatttcataattcttgcttgccatggaatcagcaggtttataatttggtttcctagataccttgaaagcaggaggcggtgacctagataaaggaaacgagtgctctagtcactggctgtcacacatttgatcataagtgaacaattaggattctgtttgagtcatcaatggcttgtgaagtatttggtgagtgaggttttgaggtgtctactcatctgaggctacactgatgacataaagtttctgcacctacaaggatgagggtcagcatgtagtaacagagatttcatgtaaacaaggccccmctgcaatgttttctatgaaatctgtgtgtaggcttagagctacatcttactcttccactggttcaagttgaatctcttattttattgatgttctgcttaattattatctattcatagggacaacattctttccaagtaatcggtgtttagcaactaga

SEQ ID NO: 184643 - DNA, 599 bp, Homo sapiens
cagtatgatgagggactattttaaagaaggagttctgagaagtctccttgagaggttaacatctgaactgaagtatcaattgagtgtgagaatgaaattctcaactccaagtagaaattgcaaatgtaaaggcctgagttagaaacttgctggcacatctgaggactatcagggaggtaaragtaagcacagaccagagagcaagagatagagtgataagaaatgaggccacagactaaaacagggcccagatcatgtagaaacaagatcataaaaaggactttgggttttatttgaaatctaatgggaatgatagagcagttgagaccagagaaatgacatggcttaacattttttaaagtacccactctggctactgtgaaaagaacagtctatagaggataaaagcggaaacaagaatagtcaggaagctgctgggataatccacaggggaggaggtgctgcctgggctagcatggtagtgccggaggcagtgcagtggagggtttggaatacattgtaaaaatgcaacagacaagattgctcctgtactggatattgaatatgagaaaaacaaggaggtcaaccaaggctccaag

SEQ ID NO: 184644 - DNA, 579 bp, Homo sapiens
tatgtgaacttgtcccaaatcttttaaaaatgtatagtctggctgaaagttgtagaatatctcattacacaatagatggtcctataacaaacaaacaaaaacttgcctcacactaaaaagtgtgagatttatgtcaatttttaaaataacagatgcactcagtaattccataaaataatcttctcattgttatacgttatcactgtgcatatgatgaactaggatactgggaatagaagaatgaataagacatagccaggtcctgtaaggtagaggaagcagacatgtaaaaaagttggtgatatgaagtgttyaaagtcctgtaacagaagtaaggcttacttgttggggaagcgaagtcaggaagtgcttccacagagaaggcaagttttgtttgcttgtctgtcttaggaccatcttctgtgccatcagccttgttggatgcctgttcacttcatagaactaggaagaagagatgttgtattgttgctcctcattctggctgcattagcctggctatctaaccatagagacttataattaagtttttcctaggtcttcttaaaactagtttagtca

SEQ ID NO: 184645 - DNA, 517 bp, Homo sapiens
gattactcacactgaccagcatgagaatttgttcatagtactgggctgccagtttggtgctaatgtgcccatattgagtgattctcactaacagcacacaaaggacaacttcagggctctaagctaccgaaagtccaccatgctcttcaggcttgagccacatatgtgggtccatagattgtttctcacccttccatatttcagctgctgatgactataggttcacttcctagtttatagctcccaagaaccatggttgtagcagtagatgtcctttactctgtgaacccccttatygctggcacccagagcagtcaccccatcctctctgaaggcttcatgccatgcatcaggcagtcctccagatgtggccacatctatgtcctcccttctgatttatgttctgtctttctcataatcagtgtggtgccattgtactctcctcagtcagccttaagccataccaacaataatataaacacttcttatatgaataggataattcttctttttcaac

SEQ ID NO: 184646 - DNA, 409 bp, Homo sapiens
tagactgtccaaaacctttgatttactgctaattgtcaacttctgagccatgctgagcagactctcacaccttcatccatggacataattatgtgaaccctctctttagtagtcaaggccatagatttaaaatataggcaaaatagtagctctgaggaatcctttttacaaaaaccagggtttatgtttatgatttttaaaaatctayctaaaaatgtatagatagcttctttgcccttttagaaccacccttaacggtttttcctctgtgtgacttctggcattttccaaatgttctacaaagtgcccacaaccattaaatgattttccctttgtcaattcggatccattttccaccctcttctgtaccacaatatgctccaggaggatcttctctatgggcttcctt

SEQ ID NO: 184647 - DNA, 555 bp, Homo sapiens
ctttcaattctgggatcattttactctttttcatgggttgggtttcaacttcctcctgtatctcattgagcttccttgccatcctgattctgaattctatgtttgtcatttcagccatttctatcttgtttggaaccattgctggagagttagtgtgatcatttgagggtaaggtgacactctggattttagagttgccagagttcttacactggttctttctaatctgtgaaagctgatatttctttatcctttgaagttgctgtcctttggatgaggctttctgtttttatgttctttatttccttgagggtttgactatggtgtaatttggatgtagctgattgtcttcatttctggatgctttcagaggaccaaggctcagyttggcactcctgggctgtgtgatctaactctggggggctgggactaggcacatgggtttgtcctctggatccccacagaggtcaaggacaagctgcattggaggggtcaaggtgctcccaggctgctggcaaaattgctatgtcaggggctgctgacaaaagcactcct

SEQ ID NO: 184648 - DNA, 565 bp, Homo sapiens
tgactatggtgtaatttggatgtagctgattgtcttcatttctggatgctttcagaggaccaaggctcagcttggcactcctgggctgtgtgatctaactctggggggctgggactaggcacatgggtttgtcctctggatccccacagaggtcaaggacaagctgcattggaggggtcaaggtgctcccaggctgctggcaaaattgctatgtcaggggctgctgacaaaagcactcctgtgggggcgcaggaatctcttgttaaagcacttcagtggggtgatgggrcatccattgaaagcactctgctagggcagcagggatgctagcacaagtactcctatgaggggccatcatcaaaaacactctggtggggcactgggggccccctgcaaaagcactctggctgggcagtgggatcctattgcaaaagctctctggtgtagtaacacaagtaccagcgaaagcactccaatggggggccatcagcaaaagcactccagtggatttccttcatgccataaatggggaaattgaggtacaaagaagttagttattttggcc

SEQ ID NO: 184649 - DNA, 498 bp, Homo sapiens
gcagtttggtagggcagctggagactcaagcgattctgcctcagcctcccgagtagctgggattacaggcacacatcaccatgcctggctgatttttttgtatttttggtagagacggggtttcaccaagttggcctcgaactcctgacctcaagtgatccgcccaccttggcctcccagactgctgggattacaggcatctttttttttttttttttttttgagatggtgccacactcagtcgcccaggatggagtgcagyggcgcgatctcggctcactgcaacctccacctcccgggttcaagcaattctcagcctccccagtagctgggattacaggcgtgagccaccgcgcccggcctaaaaaatttcttgaagtaaactctggtttgactaaagcttctgcaaatatttgcaaatgtaattatttttagaaaccagttttgtcctcatctaccttgcctcaatttctaaaacaaataaaagttaaggaattc

SEQ ID NO: 184650 - DNA, 624 bp, Homo sapiens
cttaatttattcaagttattctatgaagaaattaatttacaaagcttacaaaaacagaactacatgaacaacttcaattgaatgaaattttaccttagtccaaaatagaaatggccagttttattatacatctttctcttgatcccagttttatatttgagattaaaatgtatctacaaaagcactttaaaacaattaagatgatggagggaattgttagaggtacacatgaaaccrcctttgcaaaattatgactgagacagggaaagagatttaacttaagcgactccatctcacttttaacctccaagctgtccttgttcattcctgggcgtaggctgaactaactttgggagaaacttagtttgtagtttatcgtttaaacaaagatggtaacagccctttcccaaagcagatctccttcttgcctggggactagatcgcctttgtagaaccaacattagccacaagagcagaaattatggtttaggagtcatgcagctggaggctacaagattctgaccctccctagactgctcctaagatcaatgcttgactattttgcagaccctgcacttgatggatcagctggcaccacccggattaataaactggctcatctga

SEQ ID NO: 184651 - DNA, 607 bp, Homo sapiens
tgtgacattcttcttgatctagttccctaaccacaccagttttatcagtcaccaccacctccctaactccagttccatgcaccagccttgacgaacttgcttgcagcccttccaaaacatttgtctgaactctagaatgtcctttggacctctcctgatgcctagaatcttcatctagctaacttttacttgtacttaaagacttacctcaagcatttctcattcaagcattgagaagccttctagaatattcccagaagtcactagtttgtatgtgatactcacattgcactgtattattgttttccttatgagattatcaacttcttgaggtctagaattttgttattcatcctgatgttctcttgcagtggactctactcaaggttcttcttctgcaatgtttgagaacagaaattgtggtgtgagacattcttctgctattcctggaaatggaagtgggggttgggagttaggatgctcagatattggggactgctttgtgggtgaagcccagaaatagtaaatgtcttgcaatatactggacagttctkcacaaagaactatctcacccaaaatgccaatagcacatccattaagaaacacc

SEQ ID NO: 184652 - DNA, 595 bp, Homo sapiens
agagaaggttcacctcaagattcacctttgttagtactgtatatcattttgctatcagaacctgttttttgtttgctgttatggccaattatacaagtgagtctggaaaacattcaataattctcattgctgtagtatattatatcatccattattgacctcttcccatcaacaataagacttgaatctgtgtcattacctatagtgtcttatttagtcgcattatctgtagcatcttattcttactatagaaccacttcatacttctggacatggatttatagatgcactgcaatgaaattgygattaaaaacaatgatcaaaggctaacctaacatgaatgcctaatcactcagattacctgtggctcttcccttttgagatgcttcattagtgtgtatttattatttccaattacaaagctgtcagtatttatggatcagtatgtggtccaagtagttggcagcatgttttgctcataaaaaaggaaaatactctctttataaatttaaatagttaactctgtattatgtatatttatgagtgatagtccagtgtgaataagtcaaatccagagataatacacagaaattta

SEQ ID NO: 184653 - DNA, 595 bp, Homo sapiens
agagaaggttcacctcaagattcacctttgttagtactgtatatcattttgctatcagaacctgttttttgtttgctgttatggccaattatacaagtgagtctggaaaacattcaataattctcattgctgtagtatattatatcatccattattgacctcttcccatcaacaataagacttgaatctgtgtcattacctatagtgtcttatttagtcgcattatctgtagcatcttattcttactatagaaccacttcatacttctggacatggatttatagatgcactgcaatgaaattgcgattaaaaacaatgatcaaagsctaacctaacatgaatgcctaatcactcagattacctgtggctcttcccttttgagatgcttcattagtgtgtatttattatttccaattacaaagctgtcagtatttatggatcagtatgtggtccaagtagttggcagcatgttttgctcataaaaaaggaaaatactctctttataaatttaaatagttaactctgtattatgtatatttatgagtgatagtccagtgtgaataagtcaaatccagagataatacacagaaattta

SEQ ID NO: 184654 - DNA, 633 bp, Homo sapiens
aattctacctttgtttagtcaagagaagtaaaatgcatgtccatacaactatttgtgcaagaatatttataaaagctttgttcataatagcaccatactggagacagtctaaaagtgcattagtaacagaatacataaacagattgcagtatatccacatagtgaatatgttcaacaataaaaaggaatgaagtactgatatatgcaatagaatatatgaatatccataatgttatgctgaaataaagaaaccaaacacaaaagagtgcgtactatatgattccatttatatgaaattctagagaaaagcaaaactaatctatggtaacagaaagcagaccagcagttgactgaggccagggatgggggtgatgggggagatgactacaaagaggcatgaggcaatttcttggggtcatggaaaggtcttgattgagatagtgttcccatagtcatatacatttgcagaatgtcatcawaatgaaccttttaaataggtacattttactgcacgttaattatacattaaagtcgacttaaaagcaaaacatcctaaagctgggcctttcccaattcttattactgtaaagacataattgactttaagtgacattgttatttacataaatgtta

SEQ ID NO: 184655 - DNA, 633 bp, Homo sapiens
aattctacctttgtttagtcaagagaagtaaaatgcatgtccatacaactatttgtgcaagaatatttataaaagctttgttcataatagcaccatactggagacagtctaaaagtgcattagtaacagaatacataaacagattgcagtatatccacatagtgaatatgttcaacaataaaaaggaatgaagtactgatatatgcaatagaatatatgaatatccataatgttatgctgaaataaagaaaccaaacacaaaagagtgcgtactatatgattccatttatatgaaattctagagaaaagcaaaactaatctatggtaacagaaagcagaccagcagttgactgaggccagggatgggggtgatgggggagatgactacaaagaggcatgaggcaatttcttggggtcatggaaaggtcttgattgagatagtgttcccatagtcatatacatttgcagaatgtcatcaaaatgaaccttttaaataggtacattttactgcaygttaattatacattaaagtcgacttaaaagcaaaacatcctaaagctgggcctttcccaattcttattactgtaaagacataattgactttaagtgacattgttatttacataaatgtta

SEQ ID NO: 184656 - DNA, 518 bp, Homo sapiens
tgcattgtatataaaatcaggtgtaggtacaatcgagtttcacaaatgttgaaatgtgaagggaaaagtgcatcttaggatttaggaatagtgccatttgctgatgatatcagcagcgatatggtccagaggtggcttgatgttattataatttcctctaaaaatacaaaaaataaaaataaaaagttcaggaagtcatttagaaatttacattgatgtccctcagctgtccctagaagtaggaacgagttaccctttagacataatggggacatttgtgcgtsctgtcattttaggagttctacaaagccccactttccctcaaatgtttattgtctaccattcctttctactatcttaaaaatcccatcaaaacaaaacaaataaaagataactatgtgagatgatgaatatgttaatttgcttcactacagttaccttttcactatctatatccatcttataacatcacgttgtataccttaaaaatacgcagtaaaatttattttttaaaaaag

SEQ ID NO: 184657 - DNA, 575 bp, Homo sapiens
ttttctttttctctctctgcctctccaagtcatcaagacccattcaaggtccatttcttccagggatccggattagtccattctctaccaagctttccttcctctaaaataccatttttaaagccatgttatccagtagaaataaaatgcaaaccacacaagtaagtttgttatactgtagaaacagatcaaatgaattttgacaatatagtttatttaatctatcatttctacctgtaataaacttaagattattaatgagatatttccattttttttgaagtcttagaaatctggattatattttatacttaaagcacatgtcagtttggacaagccacattgcaagtgtccagtgtggctagagcttactacattgaacggtccgggttcagagcctgtgccacattctctagctctcaatcatgtacytccttatttcatagctttctaccagaccaaattgcaaacaactctgtagagttggcggctccattttacacttcctctgtcttcacattttattcctgtgtgtgtagtaagctattagtaattgcctattgatggattggtaa

SEQ ID NO: 184658 - DNA, 575 bp, Homo sapiens
ttttctttttctctctctgcctctccaagtcatcaagacccattcaaggtccatttcttccagggatccggattagtccattctctaccaagctttccttcctctaaaataccatttttaaagccatgttatccagtagaaataaaatgcaaaccacacaagtaagtttgttatactgtagaaacagatcaaatgaattttgacaatatagtttatttaatctatcatttctacctgtaataaacttaagattattaatgagatatttccattttttttgaagtcttagaaatctggattatattttatacttaaagcacatgtcagtttggacaagccacattgcaagtgtccagtgtggctagagcttactacattgaacggtccgggttcagagcctgtgccacattctctagctctcaatcatgtacctccttatttcatagctttctaccagaccaaattgcaaacaactcygtagagttggcggctccattttacacttcctctgtcttcacattttattcctgtgtgtgtagtaagctattagtaattgcctattgatggattggtaa

SEQ ID NO: 184659 - DNA, 435 bp, Homo sapiens
ctctgaccctactggtcttacccacacagaactgacttctcccttctccaggtcttctctatattctgtataaatttttggatatagcatttgtcatttttttttaaaagacagggtctcattctgttgtctaggctggcatgctgtggcatgatcatagtccactgcagcctctatctgcctcctggggtcaagcaatccttctgcctccaccttctaagtagctgggaccacaggcatgtgccaccatgcctgactaattttttaattttttgtagagatggggtctcactatgttgcccaggctggttttgatcgaactcctagtctcaagcaatcctccagcttaggtctccaaaagcactgggattacaggtgtgagccmccatgcccagccctatgtttatcactttttgttgcatttgttcacacaat

SEQ ID NO: 184660 - DNA, 470 bp, Homo sapiens
gaattcatttaatcctcacaagagccctatgtggtagctactgttattattcccattttacagatgaggaaactgaaactttgaatggttaacaactagttagctagttatcagctaatcagtagtggaacctggagtacacccaggcagttggctccaaagcctcttgtccatcatgactctaccgcctcttgtctgagatgacactccttaatttgagctctccaaagagaccctaaaacaaagacatggatgtaagcagtttattagagtgacggccccagaaacacaaacaagagagagatgaggcagggaacatgtgcactgatgagcaggttgtagacttgggcaactagggctcaaccttactagggatcgtctgaggaactatgaaaagcaagccttagaactgccctactgagggagacagaraagctggggtatttctccaccaactcctttcctttatt

SEQ ID NO: 184661 - DNA, 619 bp, Homo sapiens
actttttagctcccacatatgagtgagaacattagaattccattgctgttactgcatgctttttctctattctatctctttgctcctcccaggagaggagatttcctcctgagcaaaggaggtgtgtgggttgggaagggaaagcaaagtaaagggatagaaaacaaaaaagaagatataaatgcagcaaaaagtaaaaacagaagagycaaagaatgaacactaacaggagaagaaaagcaagaatgagaaagataggaatgctattcatctttctggctttctcatctcttttcttctctgttgataacataaaagtgtgaagaggctgatttctttttcagcaaaagccttcatggaaaacactggtgactgttttgttttcaatggctatatgcacaatgcaaggttgaagaaggagaaataaattttctgtaaagaaaaacaaaaatcagtcctggagtgggaggtgcatgctgagagatgtaaattcaattaatcatcacttttgataaaatccaagtcttcttgcacaataatgggtgctggcctagaatgttacttcctcttctgtcttcgaggagagaaaaatctgatttccaaagaaagagaaattcat

SEQ ID NO: 184662 - DNA, 520 bp, Homo sapiens
cctgaacaaaagcaaagtatgtcactaatgtgccatcattgttgaactatgtccctgtggccattgtaaacaattrccagcaaaatgacactatgttaattaaaggttgccgttaccctcttcaaagctgaggttatagctcttccccatctgttaattttatattattggaatttagatttcttgaggaagcagacggccataaactttcacaggtgttcatggtgcactgccttaactttatatgctgaacaggtacagcttgaagtttgctgggctgcacagggaattagtgctttaaatgatgtgtgggtagagaattaatttgttttgaactacctgaagaaaattcaatatactgtgcacagtggttcatgcttacttgacatggtgcaatacaacgagaaatgtcaaaaaaaaaaaaaaaaaaaaaagagatttaaagaaaccctgaattgtattcttcaaaccagcccaccacttgtcctgctaataaaacgccaaacaagaacatgatcca

SEQ ID NO: 184663 - DNA, 520 bp, Homo sapiens
cctgaacaaaagcaaagtatgtcactaatgtgccatcattgttgaactatgtccctgtggccattgtaaacaattgccagcaaaatgacactatgttaattaaaggttgccgttaccctcttcaaagmtgaggttatagctcttccccatctgttaattttatattattggaatttagatttcttgaggaagcagacggccataaactttcacaggtgttcatggtgcactgccttaactttatatgctgaacaggtacagcttgaagtttgctgggctgcacagggaattagtgctttaaatgatgtgtgggtagagaattaatttgttttgaactacctgaagaaaattcaatatactgtgcacagtggttcatgcttacttgacatggtgcaatacaacgagaaatgtcaaaaaaaaaaaaaaaaaaaaaagagatttaaagaaaccctgaattgtattcttcaaaccagcccaccacttgtcctgctaataaaacgccaaacaagaacatgatcca

SEQ ID NO: 184664 - DNA, 520 bp, Homo sapiens
cctgaacaaaagcaaagtatgtcactaatgtgccatcattgttgaactatgtccctgtggccattgtaaacaattgccagcaaaatgacactatgttaattaaaggttgccgttaccctcttcaaagctgaggttatagctcttccccatctgttaattttatattattggaatttagatttcttgaggaagcagacggccataaactttcacaggtgttcatggtgcactgccttaactttatatgctgaacaggtacagcttgaagtttgctgggmtgcacagggaattagtgctttaaatgatgtgtgggtagagaattaatttgttttgaactacctgaagaaaattcaatatactgtgcacagtggttcatgcttacttgacatggtgcaatacaacgagaaatgtcaaaaaaaaaaaaaaaaaaaaaagagatttaaagaaaccctgaattgtattcttcaaaccagcccaccacttgtcctgctaataaaacgccaaacaagaacatgatcca

SEQ ID NO: 184665 - DNA, 489 bp, Homo sapiens
tgttctttccaattatctttttgaaattggagtgtttatcctatgcctgttcattatattttggaagaagaaaactcatttcctagttgaaatccacagatgaagggttattttccccacggcagattgtacccagtctctcttgtagctgatttagatggtttagaagataaaaatttggactttgagctgttgctggagtggtttaaaactcccaaggatgttaagatgtcgtgaaaacattttgcacttagaaggacgtgaattttgggcccaaagggtgggtaagttgtagtgagtggactgtagtctctaaaaagttatgattgagtcctccctcacagtasttgtgaatgtgacttatttggcattgaggtgcttacataggtaaccaagttaagatggaatcatactaacttatgtcttcataagaaaaaggagtgggagatttagacacagaaacctcccctctctccccatgagcaccgc

SEQ ID NO: 184666 - DNA, 409 bp, Homo sapiens
tttaatattctttaatctgtatatttgatatttgatgttcacattaatgcttattctaagttcttattttttctgcatcactaatcctcaatagcaatacatttttatccaactttatattaaaaggtaactgttttaaagaaatttcagtttcagaaagcaaagcaatcttacattcttacattttaaaaatcaatgtaaatgtgacatttacygagtaccagcacattatttaaacttttacgtaacttataatactttataaaagtcaccttaacaaaagaaaatattgttaagaatcacaaatgtgaaatatagctatctgtggttattcataatgttatttgtaaatatctggtttctttcatggttctgttgttattgtatctaattttactctgttcattga

SEQ ID NO: 184667 - DNA, 529 bp, Homo sapiens
aattggaaatatttcaagatcattttcattttcatttcaagatcatttcatttgatcatatttcaagatcattcataccctcattggtgagggtatgaatccaaatagaatggattaaaaaacygatagtgtcaaatatatgtttcttaaagataaaatcaggatttatacaaatataaaacagacctatatcaaagtttttatttaattcattaattaatgaatgaaccagtaagagagcacagttagttcaaaaacaatttcaaaggatcgcacaataatgctgaaatgaatttaccatcacacacaatttgcatttttgttagtgttctacatcttacagaattatgaagtagctcaaaaacagtgaaagatagcaataaacctgaatggtccactagaaagaatctcatactatttttttcctgtttccaattttttcccacaattttcataaaataggatataaggaaatattgaaagtgagggtagaaaaaatgtagggcttcaagactaatttttgcaacgt

SEQ ID NO: 184668 - DNA, 508 bp, Homo sapiens
cttttcctcttcttttaagaattaatctcactggattaggstcccaccgttaagacctcctttaaccttaattaccttcaaataaagtcacgtttgaattagggttcaagataggaattttaaggtacacaattcagtccataataaaagataatattatttatcatcatttcctcctctcttcaatttaatagttttttaaagcataaattggaagttgactgcctctttagtagtaaggcaacatgtagccctgagtctccaaggtaaatcagaaaactgaaatcatgtattgagtatagacacatataaaatgttcacacacctatacttagactcttactcccacacactattttgttaacctagtagccatttgttggcagtaattcaaatcagagatttgtttaatattatttgtttcataaaaacattgaaatgactgttatcttattggggaggaggtggggatggttaatgggcacaaaaatatagttagatagaatta

SEQ ID NO: 184669 - DNA, 530 bp, Homo sapiens
cttccagagtctccacatcctcattagcatttggtattgtcagtgttttggatttggccattctaataggtgtgtagtggcatctcattgttgtattagagaatttggaattccctaatgatatatgatgttgaacatctttttgtatgcttatatgaaatttgtatataatttttgacaagatgtctatgatctttggcctattttttaatacaatttttcattttctcatcgtttcaagaatttttgtatacatttaagatagtagtcctttatcagctacatcttttgcaaaaattttctcccagtctgtgacttatattctcattctcttgacattgtctttcacagaacatggcttgttaattttaataaaattcagcttatcaattgcttcgtttatggattgtgcctttgtgttatatcaaaaattcatcaccatgcctgaagtcccctattttatcttctaggagttttctggttttgcattktaaattaaagtctatgacccattttgagttattttttat

SEQ ID NO: 184670 - DNA, 611 bp, Homo sapiens
tatagttgttttcccattattttactgcatatgctaggagagatgtattagacctttccctctctttgtctcactcctttatgctggatactcttaactgggcagtggtgtcaggtctaaaacagagtgggtggatcctcaatgagtctctttccaatccagttgtaaactgtttgtcttctaatttaaaacttgaagatagtgtagagtgggaagcagtggtgtactgcagcctkctcatacaagctcatgagagcaggttattccatttttgcaagttggttattaaatatacacagatgttattaaaaattaaatcatattgatttaaaaataaatgcattgtattaaaaactcccccatcctgattactttactatatttttctattatccatactattgaggttatttaagaccatttttgtgctttcagtgatgtcacattcgttgcttgaaatcagctatggtggcagtttacacgtcctgaaaattggcaaatactacaaatcagagctaggcttattgttttgttgatgatctagatttaataagaagacagaatgttaataacatatcttaaacataaatgtgcattgtatgttttgtcat

SEQ ID NO: 184671 - DNA, 611 bp, Homo sapiens
tatagttgttttcccattattttactgcatatgctaggagagatgtattagacctttccctctctttgtctcactcctttatgctggatactcttaactgggcagtggtgtcaggtctaaaacagagtgggtggatcctcaatgagtctctttccaatccagttgtaaactgtttgtcttctaatttaaaacttgaagatagtgtagagtgggaagcagtggtgtactgcagcctgctcatacaagctcatgagagcaggttattccatttttgcaagttggttattaaatatacacagatgttattaaaaattaaatcatattgatttaaaaataaatgcattgtattaaaaactcccccatcctgattactttactatatttttctattatccatactattgaggttatttaagaccatttttgtgctttcagtgatgtcacattcrttgcttgaaatcagctatggtggcagtttacacgtcctgaaaattggcaaatactacaaatcagagctaggcttattgttttgttgatgatctagatttaataagaagacagaatgttaataacatatcttaaacataaatgtgcattgtatgttttgtcat

SEQ ID NO: 184672 - DNA, 469 bp, Homo sapiens
gcttgttttcatttctgtggggtcagtagtaacattccctttattatttctaattgtgtttatttkttttcctctttttcattctaatttaaaactgtagattttctttggctctgcttgaactcagacatagtcatggtggttaagatttttgtggaaattgttatctttccatttggaactgatcaaagtagctgttttctcacctctttccaagttagacatctattgtaagagtttgtgtgtgtgtgtatgtctgtgtctgcgtgtgcgtgtgtgtgtgtgtgtgtgtgtggtggagggggtgtttattttccattttccttccattgcctcttacatatttctttggaaagcagggattggatattagttttatttatatttggatataatacctcagaacattagttttctattgacaagttacaaattactacagtcctagtgcctgaaaacaacacacaca

SEQ ID NO: 184673 - DNA, 620 bp, Homo sapiens
ttggctggttattacgttgatttaagaaatggggatacatatttctcatgatccaggtacctagctcaggcttgttctcatagcagaagcagatgtctaagagaaagaatggacacatttgagatttctggaggcctaggcttggaagtggcacataattacttataccatattctattagccaaagcaaaccacatgactaaattcaacatcagtggagtgaaagtacatttcacctccacgagaggaactgtaaagtcacatggcaatggttatgaaaacctggaggtctgaacaattgtggctatttatgcaatgtaccataaygcatagcacaatggttggtacatgcaagcattcagtaagagaccactcttatattttcattgtggagtgaggtaggttgaaaggtttagggggtggaatgctggcttaggaatgggggtgcaattgaagaaccataactatgctctggcctttcagaaagaagcctgagctctaaagatgtgctagaaatcagctgcccctgggtgtctagctgaccacggtcacttgattggaatgtttgtatcattctttttaactgttcgaatattaagaaagtctcaaattcttactcc

SEQ ID NO: 184674 - DNA, 499 bp, Homo sapiens
atcaccaactattctatgtattttgctaagttttatttactaaattaagtgtttaatgtatttattttctgtccctgctggaataaaagctcaatgaagtttggtatttttatttttatttttgctatattcctagtgtctaagacagtgtatggttcatagaggcacttgataaatatttcttgaactagtaaatgtcagcttactcctgtgtatatttagaatttgggtgaaaacatgcctatgaagtacactattgtattaatgtgaatgaattatataactatgaaaactggtaaaaagaatcagacaaattgggctccaatctcagtaataaaatgtgagtgaaaatgatatgtgtcccttctggatggaaaatgctataggcagcaggagatgctacaatrctcctttctcaatgcctgctgggcaaaagcatgagtcaagatggatcctttgtcaacttggttctgagagtgactacagtaagcagacaccc

SEQ ID NO: 184675 - DNA, 514 bp, Homo sapiens
attttttaagaatttggcatatttcctttcaaacatatttctctggctacacacacacccacatacacacacgcatgcatacccaccatgctgtatcatgcaaattggatcatgctatctgaatctaagatgttttgtagtttgccttttctactactatttcatggcattcctttctagttagtaaatatgtatatatcatcctttttaatgacttcataatattcaatcacattgctaactcctaatttatttaatgaccattttcttggcattcaatttccaaattttatattcatagtcatcctatgtatgtatatctctgaactcrtctgagtatttttctgatataaattgctagaagaaaaactgctaagccaaataggagcacatttataatactgacacatactgccagattgatattccaaattttgtactactttacactacaaaaaaaagtatagtcttaagatttaagtttcattggttgcaaagaacagaaagcatgcta

SEQ ID NO: 184676 - DNA, 429 bp, Homo sapiens
actacaattaaaaaaaaataaaatgttgcaatacmaaacgatggtgacagtatgaacagctggaactctcagctactcctggtgagaatgtcaatgtatacagccactttaggaaactgttggcagtatccttcaaagttgtgcgtatacctactttttcatctagcaactccacttttacatgtatactccaaagaaaaactcagatatgtacatcaattgacatgtaaaagaattttaataactgcattataaataagtgccacaaactggaagcaaactgagagcaatcagtagtagaatggataaattatgatatgttcacgcaattgcatacgatccaccaaagaaaatgggtaatttattgttgtaaaagtaagctgaatgaatttcaaaattattacgttgattgaaagaaaccagacataa

SEQ ID NO: 184677 - DNA, 540 bp, Homo sapiens
acacacattacatgtgaaactgttttttttatagtctcaattacatgttacaatgttaacttttagcgaaagttactttggtgaaaaccctggttagtaagcaattttaattatgtactaggtgtggagcctagccaaggacacaccatgcagaagtgcaggtaagggctgactctccagcatagctagggggtgtggctaactccacatgtccccagaacttaccttacttaagcatgcaagttgtacagtaagagtcatagtggcattttaggaagtattcaggaggcctgacaacctttgaattgtacatttcttacataaatcccctttcacaaatcctttcatgacttacacagaccatctgagacattcttggactttctgacttgccctaaacatccctccttttaaacaacyagtcattttactttagggcaagaattgaccatgcaagatcctttcttacataaaatctctttctttataatcttctttgtatagctagggggcatggctaattccacatgtccccaggcc

SEQ ID NO: 184678 - DNA, 566 bp, Homo sapiens
actcagttttagttatttatttcaatgtctgtgaatttacaaccttggcaagtgctttatgtttatttttaatggcagatrtctattttaatgtggacattttaaaatgctgacatatctacattgtgtagaatatgatcattaacttgtaaccaaggtgtgatctcatattattacctctccctttggttgaaaaaaaaaaacctaagtttttattatttccctccaagaataagtcagacaattggttaaaaattttaaaaggtaataaaataatagtaattttttaaaactaagaagctgatatttctacagtgctcttataatcaatagtttcttaaaattgaggacatgcatgcatacattttactagcagtttgtgcatattataaggtttcctttataagagtataaagaaaaaaactcataatcccaatgctcaaatacaaatactattaacatttttaataggtttctaaacatcttttttgtgtttatactcatattttttggcattaataaggtcatgtaatatatgttgttttataaactactatattcacctg

SEQ ID NO: 184679 - DNA, 566 bp, Homo sapiens
actcagttttagttatttatttcaatgtctgtgaatttacaaccttggcaagtgctttatgtttatttttaatggcagatatctattttaatgtggacattttaaaatgctgacatatctacattgtgtagaatatgatcattaacttgtaaccaaggtgtgatctcatattattacctctccctttggttgaaaaaaaaaaacctaagtttttattatttccctccaagaataagtcagacaattggttaaaaattttaaaaggtaataaaataatagtaattttttaaaactaagaagctgatatttctacagtgctcttataatcaatagtttcttaaaattgaggacatgcatgcatacattttactagcagtttgtgcatattataaggtttcctttataagagtataaagaaaaaaactcataatcccaatgctcaaatacaaatactattaacatttttaataggtttctaaacatcttttttgtgtttatactcatawtttttggcattaataaggtcatgtaatatatgttgttttataaactactatattcacctg

SEQ ID NO: 184680 - DNA, 607 bp, Homo sapiens
aaaactgtctcttacaattaacataaastaaaatttgttcatgtatgatttgttgctatccacagatgtgacgaaccattcctcaggaaaaaaaaagttatctatgtgagatgcaaatgatcagccaaatgatggtgactagtaagtagttgtagcaagcaacaaggacttatcccctgaaaaacttgagtgggcatgtaggctctaagtggagttaaacagagttcagctaatgaaagctcagagtcctgattcttctcaacaggttacccaaattttcttcgcagtcatttaaagttgctgaacacagtttgatgaatttttaggtcagtatttttcaaacaattttcaaagtgtatttttcaacatccccagtcatcccagaggtctatctatattcctattttctccccaaaccttaactaaagtatagcattatatacaaaagtacaaaattaagtgtattacttattgcatttccacaagttgaacatactgttataaacagcacccagatcaaaaaccagattattcgcactccagaatccctgccactcctgtgttccctccagacactacccatttgccctgtacaagggaaacagct

SEQ ID NO: 184681 - DNA, 607 bp, Homo sapiens
aaaactgtctcttacaattaacataaagtaaaatttgttcatgtatgatttgttgctatccacagatgtgacgaaccattcctcaggaaaaaaaaagttatctatgtgagatgcaaatgatcagccaaatgatggtgactagtaagtagttgtagcaagcaacaaggacttatcccctgaaaaacttgagtgggcatgtaggctctaagtggagttaaacagagttcagctaatgaaagctcagagtcctgattcttctcaacaggttacccaaattttcttygcagtcatttaaagttgctgaacacagtttgatgaatttttaggtcagtatttttcaaacaattttcaaagtgtatttttcaacatccccagtcatcccagaggtctatctatattcctattttctccccaaaccttaactaaagtatagcattatatacaaaagtacaaaattaagtgtattacttattgcatttccacaagttgaacatactgttataaacagcacccagatcaaaaaccagattattcgcactccagaatccctgccactcctgtgttccctccagacactacccatttgccctgtacaagggaaacagct

SEQ ID NO: 184682 - DNA, 607 bp, Homo sapiens
aaaactgtctcttacaattaacataaagtaaaatttgttcatgtatgatttgttgctatccacagatgtgacgaaccattcctcaggaaaaaaaaagttatctatgtgagatgcaaatgatcagccaaatgatggtgactagtaagtagttgtagcaagcaacaaggacttatcccctgaaaaacttgagtgggcatgtaggctctaagtggagttaaacagagttcagctaatgaaagctcagagtcctgattcttctcaacaggttacccaaattttcttcgcagtcatttaaagttgctgaacacagtttgatgaatttttaggtcagtatttttcaaacaattttcaaagtgtatttttcaacatccccagtcatcccagaggtctatctatattcctattttctccccaaaccttaactaaagtatagcattatatacaaaagtacaaaattaagtgtattacttattgcatttccacaagttgaacatactgttataaacagyacccagatcaaaaaccagattattcgcactccagaatccctgccactcctgtgttccctccagacactacccatttgccctgtacaagggaaacagct

SEQ ID NO: 184683 - DNA, 541 bp, Homo sapiens
ttcccaacctgatctgtagactaaatatcatyccaataaaaaatccagcaagttattttgtgatagagacaaactgattctaaagtttatacaaagaggaaaaagatatagaatagtcaatgaaatattgaaggagaagaacaaagttgaagaactgatactactcaacttcaagacatactgtaaacccacagtaataaggacagaatggtactggaaaaaaaattaataataataacaaaaacaaaaacagaaaaaaacaacctgacaaatggatcgtggattagtggcagcagaaaataaagcccagaaatagacctacataaacaatcaactgatctattaacaaaagagcaaaggcaataaatatagcaaagaaagcagtcttttcaacaaatggtgctggaacaactgagcacgtatatgaaaaaaaaatctagatgtagatcttacacatttcacaaaaataactcaaatggatcatagacttaaattaaaaatacaaaactataaaactactggaagataacatgggagaaaa

SEQ ID NO: 184684 - DNA, 417 bp, Homo sapiens
aatgtgtccttcctatacagtggttcatgatgwcaaaggtcttattccattgattacatgagttatgtttttgtctgtcagacttctcttcagcaagttcttacatttgcctttgtaattaataagtctcttggtgaaggtactatgagactacgcatatcttgtttctccccaaattttcactaactaatgttgccttgtctgcataatgtatctacatggtgtttccataatgatgattctttctgttattctacatgtattaatttgaattcagctgtaagaaagaactgtcttttctcccatatttatttatttattctgttatttatccatatcaggatgaactcatgaatatttatatatgggttaaaatcaaattttgttgctaaaatttgtctacttttagccattgag

SEQ ID NO: 184685 - DNA, 622 bp, Homo sapiens
agatcattatgcaaatactactcatttttaaaaagctgatgtagttatattattatctaataaactaggattcaggaaataatgagggaattttatagtaataaaagaagtgacaagagtcacatcttgaatgatgtcatgaggagctcagaggatcctttgcccagtgaaacaactgtaactggtgaaaattagtaagttttaacaaaggaaaaacaatgacacaaatctataatttttggaaaatgtctaagggcatccagcaaatggagacatatatatttaagaaaatcttctaaatcttattaagaacagtaaaaataggtggcatttgaactaaagacgtgctcccttccccygctctccagctgagcatgacagaagctctactccagccaagaggagttgcagccaagaacacagagcttgcattcctcccagctcccagtcaagggccgtggtatcttctcagaaaggacaggctgacagcatttctcattaccacccccagatctgtgttgcagaagctctattccaagcaagagcagctgaaaagtctggggctcccttcttccatccacccccattcacagggcagaagctctaccccaggtgtgactgg

SEQ ID NO: 184686 - DNA, 536 bp, Homo sapiens
taagcctgcaagtccatcccttgcagatttgacacccatatggacctccttaaaccatacataatttccaaataaaaagaaaacaaagcaacagttgtacctaacacgatgcaactaacttggtacaactctcctgtgattgkgattttctggattttagatgttaataatttaaactttaggactgggcatggtggctcatgcctgtattcccagcactttgggaggccaagtcaggaggatcacttgagcccaggagtttgaaatcagccggggcaataaattgagaccccatgatatggtttggctgtgtctccaaccaaatctcatcttgaattgtagttcccataatcctcacatatcatgatggggacccagtgggaggtaattgaatcatggaggcagttacccccatgctgttctcatgatagtgagttctcacaagatctgatggttttataaggagcttttccccctttgcttgtgcttctccttcctgccacctcatgaagaaggtgacttgcttcccctttgca

SEQ ID NO: 184687 - DNA, 390 bp, Homo sapiens
ccgctcagacccacacactgatctcttctgagaaatccatcacagacatacccaaaataatgctttcccagctttccagggattccttaatccagtcaagttgacacctgaaattaagcctgcaagtccatcccttgcagatttgacacccatatggacctccttaaaccatacataatttccaaataaaaagaaaacaaagcaacagttgtacctaacacgatgcaactaacttggtacaactctcctgtgattgggattttctggattttagatgttaataatttaractttaggactgggcatggtggctcatgcctgtattcccagcactttgggaggccaagtcaggaggatcacttgagcccaggagtttgaaatcagccgggg

SEQ ID NO: 184688 - DNA, 653 bp, Homo sapiens
tctctgcttaatgcaagctccgcctcctgggttcatgccattctcctgcctcagcctcccaagtagctgggactacaggtgtctgctaccaagcccggctaattttgtgtttttgttgtgtctctgccagattttggtgtcaagatcatgctgtcctcatagaatgagtttgggaggagaccatcctcctcaatttttggggatagtttctgtaggaattgtacaagctcttctttgtacattttgtagaatttggctgcaaatccataaagtccagggctttyatttttttgattggcaagctacttattacctatataatatcagagctttttattggtccattcaggaaataattgtcttcctggcttaatcttgggagagtgtgtatatctagtaatgtatctatttctttaaagttttctagtttgtgtgtataaaggtgttcatgttaatactgaccccacataaataaaaacaaccattagaaaccattaaagttgaacacttatgtctttaatctatttttatttaatttttgtacttggaatgtgataaagattcaactttactggtttaaatgtgaacttgttttcccagaatttattgtggaacaaactgtccctttctttacataatgactaaggcaccct

SEQ ID NO: 184689 - DNA, 583 bp, Homo sapiens
tggactgttgtgggttggggtaaggggcagggatagcattaggagatatacctaatgctaaatgatgagttaatgggtgcagcaaaccaacatggcacatgtatacatatgtaacaaacctgcacrttgtgtacatgtaccctaaaacttaaagtataataataataaaataaaataaaaataaaaaagagaggaagtaagccatgctgattcctgatgagaaagcattccaagcaaaggggaccacacatgcaaaggccctgaggcagaagcacaactgcctggtgtctttgaagattgcaaaatagaggggagactgactggactacacatcagagaagtgtcaggggacaagatggtttaaaacattcctagccatggaaggttttaagcagatgaaaacattattttccttatgctttgaaagacttactctggatcacctgaggtcaggggttcaagacctgcctggccaacatggcaaaaccacatctctattaaaaacacaaaaattagccaggtttggtggtgcatgcctgtagtcccagctacttgggagcctgaggcaggagaatcacttgaa

SEQ ID NO: 184690 - DNA, 583 bp, Homo sapiens
tggactgttgtgggttggggtaaggggcagggatagcattaggagatatacctaatgctaaatgatgagttaatgggtgcagcaaaccaacatggcacatgtatacatatgtaacaaacctgcacgttgtgtacatgtaccctaaaacttaaagtataataataataaaataaaataaaaataaaaaagagaggaagtaagccatgctgattcctgatgagaaagcattccaagcaaaggggaccacacatgcaaaggccctgaggcagaagcacaactgcctggtgtctttgaagattgcaaaatagaggggagactgactggactacacatcagagaagtgtcagggracaagatggtttaaaacattcctagccatggaaggttttaagcagatgaaaacattattttccttatgctttgaaagacttactctggatcacctgaggtcaggggttcaagacctgcctggccaacatggcaaaaccacatctctattaaaaacacaaaaattagccaggtttggtggtgcatgcctgtagtcccagctacttgggagcctgaggcaggagaatcacttgaa

SEQ ID NO: 184691 - DNA, 370 bp, Homo sapiens
ctacttttcaacgatctgtattttaagatattgacttttcctggtgctattttatgattatggataaaatagaattctttttagaaatctcaactccaaattgagaatagatgttttgatacttgtcctgctgtggcctgagacttggaatcatgaawtataagagaccttgttgtttatctacagattagaacacacaaataaacatcagcgtaacatcctaattagcattctggtagttacatttacttattccagagccaaattaatatatgataagaagtggaatattttctgttgatatctagggtattatgaaaacaaccttccttagaaaagaaacagtgtattttttttgaggacagtggat

SEQ ID NO: 184692 - DNA, 370 bp, Homo sapiens
ctacttttcaacgatctgtattttaagatattgacttttcctggtgctattttatgattatggataaaatagaattctttttagaaatctcaactccaaattgagaatagatgttttgatacttgtcctgctgtggcctgagacttggaatcatgaattataagagaccttgytgtttatctacagattagaacacacaaataaacatcagcgtaacatcctaattagcattctggtagttacatttacttattccagagccaaattaatatatgataagaagtggaatattttctgttgatatctagggtattatgaaaacaaccttccttagaaaagaaacagtgtattttttttgaggacagtggat

SEQ ID NO: 184693 - DNA, 370 bp, Homo sapiens
ctacttttcaacgatctgtattttaagatattgacttttcctggtgctattttatgattatggataaaatagaattctttttagaaatctcaactccaaattgagaatagatgttttgatacttgtcctgctgtggcctgagacttggaatcatgaattataagagaccttgttgtttatctacagattagaacacacaaataaacatcagcgtaacatcctmattagcattctggtagttacatttacttattccagagccaaattaatatatgataagaagtggaatattttctgttgatatctagggtattatgaaaacaaccttccttagaaaagaaacagtgtattttttttgaggacagtggat

SEQ ID NO: 184694 - DNA, 370 bp, Homo sapiens
ctacttttcaacgatctgtattttaagatattgacttttcctggtgctattttatgattatggataaaatagaattctttttagaaatctcaactccaaattgagaatagatgttttgatacttgtcctgctgtggcctgagacttggaatcatgaattataagagaccttgttgtttatctacagattagaacacacaaataaacatcagcgtaacatcctaattagcattctggtagttacatttacttattccagagccaaattaatatatgataagaagtggaatattttctgttgatatctagggtattatgamaacaaccttccttagaaaagaaacagtgtattttttttgaggacagtggat

SEQ ID NO: 184695 - DNA, 498 bp, Homo sapiens
ggtgtctggaatataatgatctgagtttaaaatggaatattttaaaaattcattaatatctgcattactgattgagtatatgcattaagttgcaaaagacaaatggtggtagaaatataatttgattccaagtactcattgctgaccatacacttccttttagttgtgactgtcccctgtatggttcttagagccactgttgccctgaggcttgtgagtagagttgtcaaaacagacgagacaacaaaagtggcaaatttctaccctttaagctcaaatgacctgagtcagcaacgtcccacwcccttcccataggatataaaataccttctgtttggggcagatgaaaagaagaaggtggaatattccacaggttagaggcagacatcctacctcctctccacaacaactaccttcactcatagataagtctgaaagacagaataaaattacatagtatcctttttaagtttgggcatcacaaagctaagataatat

SEQ ID NO: 184696 - DNA, 567 bp, Homo sapiens
taatgttttgtgattttaagactccttcaactcagaggagtgtgttagatgcctttaagagtttgacaaatggatagaaatcttcctatttgctattccttccccttttatctctgtttccatcccccaaccgctaaaatttagtcttacacttaaatkatattgaacaagaagactcattccatactaagaggctataaagtactataaggcagatataattatcttcatatattataaagttaggcatggaatataagcaaagtctaatatcaatattgagtaaaactattaatgacacattctctgagaagtgtggtccatctctagttacaaacaatgaaaggattataaagatgggtttttcttatggatttggttattatgactcaatgtaatattcttgctttacactcagttaccttaaacaataagttcttgtacaagtttaaaacagaatattattctcaatgcaactagcaaccacccattaacagtgggaaatgggataactagctagttctcgtgcctattttcaatgtctttcacaagatgtgtgttaaattg

SEQ ID NO: 184697 - DNA, 601 bp, Homo sapiens
tttttacttgttaatgtaagacataagaacagcctttatcttgttgattatggtaattagcacatagtaatttctcaataaaaatatgttggaaagtaaatgtttaagtactgttttatgtgtaattgactcagaacggtaattaattcaaaagtttatatcatagattgctgtaatttgtttttttctttattttctcttttcttgggaaggaaaaaaaattcttacctaaaaggtggcatcttttctggtaatattttagtcaatgtggcacctgagaggagagaatttaggcaaatagatttccataaaatttctcaaatccaacaatgtagacctcctgtgcctaacttattagtgtctcggggttaaatatttaaaatggccatttctgctacattttcaagtctattctggagttccacggttttcagataaagagaagagagaagatagcaaagaatgggtactcttgaaatcaccataaraaactgtaggcctatccagctttgggattgtgggaactggacatatttaacagttcgtaccactgatctggtctagtaccaactgtttgagaaacttttagaacatgtctgca

SEQ ID NO: 184698 - DNA, 557 bp, Homo sapiens
tttgcttacaaaaacatactttattcaagtgctctaaactatgaataacttaattttttwaaaaaattgaccctttttaaaccacagcagcaacctttcaagcaagatgttgttcacgtaaaccttcaatgctcagacactgaagaacatctcctagcactaacaccatccaggaaaacatgacctcacctcaccaattgaactaaataaggcatcaaggaccaattctggaaaaacagagatatgtgaactttcagacagagaattcaaattagtggttttgaaaaaactcagagaaattcaagacaatgcagagaaggaatttagaattttgtcagataaatttaaaaaagattacaataataaaaaagaatcaggtagaaattctggagctaaaaaatgcaattggcatactgaagaatgcattagagtcttttaatagcagaattgatcaagcagaatgaattagtgagcttgaagacaggctatttgaaagtacacagtcagaggagacaaaagaaaaaacaataaaaagcaataaagtacacctacaggag

SEQ ID NO: 184699 - DNA, 557 bp, Homo sapiens
tttgcttacaaaaacatactttattcaagtgctctaaactatgaataacttaatttttttaaaaaattgaccctttttaaaccacagcagcaacctttcaagcaagatgttgttcacgtaaaccttcaatgctcagacactgaagaacatctcctagcactaacaccatccaggaaaacatgacctcacctcaccaattgaactaaataaggcatcaaggaccaattctggaaaaacagagatatgtgaactttcagacagagaattcaaattagtggttttgaaaaaactcagagaaattcaagacaatgcagagaaggaatttagaattttgtcagataaatttaaaaaagattacaataataaaaaagaatcaggtagaaattctggagctaaaaaatgcaattggcatactgaagaatgcattagagtcttttaatrgcagaattgatcaagcagaatgaattagtgagcttgaagacaggctatttgaaagtacacagtcagaggagacaaaagaaaaaacaataaaaagcaataaagtacacctacaggag

SEQ ID NO: 184700 - DNA, 607 bp, Homo sapiens
ttatcctgcaaagttgacaaactcattcagtgattctagtggctctttgtagattccatcatgttctctacatagacaataacgtctcttgtgaataaaaacagttttaccttctccttcttcccaatttggatggcttttctttctttcctatttttttttccttcttgcattggccagagcctcccatgtgatcacgagtagaagtaggagagcatcccatgtgatcacgagtaggagtaggaaagcatcccacatgatcacgagtacaagttggaaagcatcccacgtgatcacgagtagaagtaagaaagcatcccacgcgatcacgagtagaagtaggagagcatcccatgcaatcaygagtagaagtaggagagcatcccaggcgatcaggagtagaagtagtagagcgtcccatgtgatcacgagtagaagtaggaaagcctcccatgtgatcacaaatagaagtaggagagcatcccatgtgatcaagagaagtaggaaagcagagacccttgctttattccagtcttcgggggaagacatccaatctttcaccattaattatgtcagttgttggtttttcacagatacccttcatcaa

SEQ ID NO: 184701 - DNA, 380 bp, Homo sapiens
tgaagattttattattctacctcaggaattgtggagaaggatacattctgatacttcagtaactatagagaaggagaggatcttctcccctcaataactgttaagaatggatcctaccttagtaactgtgaagaagaatggactctcttacctcagtaactatggagaagaatgattcttttatctcagtaaatatagggaagaacaaactccataacytcagtaaaaagaagagagattcttctatctcagtacaggtggagaagaatggattcttctaattcagaactgtgaagaagagattatcctcttgtagtaactgtggaggaaaatggattctcctccttcgtgactttgcagaaggagagattcttttatca

SEQ ID NO: 184702 - DNA, 586 bp, Homo sapiens
ggtggacaccagagagagatgaggctcctaatgagacctgtggcaaatctgaatactgttttctgcagttttgcagggttttgttgggtgtttagcagcttagggctgcagcagggtggcgtggagtgaggcgtctgcggagtctggtcaccctggtctcagtccttcatctttaagattcaatctgggtctactgcgtgcttgctgtgtgactttccacaactggctcaaactccctgagcctcaattttatgatattcactttaaaaagcagctttattgagctgatttttattaagtaacatacaataaaccacacatatttagagtataaaattcaatgagttttaatatatatacatacctatgaatctatcaccacaatcaggaatttgaacaaatcaattacccacaacttttcccctttaatatctcctccccgctctttttcccacacactccatccccaggcaaccactaatctactttctgtggctgtgtattagttcacagtccatggaatttcatataactgggtcayacagtgggtgctctgtttttatttggctacaattcatcaatgttg

SEQ ID NO: 184703 - DNA, 375 bp, Homo sapiens
caaagagaaaaccagcagggtgggcgacgcctgggctccaagaaccggtggggagctccatttccctcagatggagcrtttcctaacccggggcaactttcccgaaacatggcaggcttgcctgacccaaatagccccttattcttggctgcacttgtgaccaccgggccgagctcctcggaggcgtggacaaaggaggccttggcgagaacagggttcggtggccagtgggtggagaagtcggtgctggctgcgccgtggagcccgtggatcaacatttgctgaggacctcagtgcggaaagtcgtggtcgcacttccttccgggtctgctgagctgccactcacggcgggagagttgggacgtcctggaattc

SEQ ID NO: 184704 - DNA, 375 bp, Homo sapiens
caaagagaaaaccagcagggtgggcgacgcctgggctccaagaaccggtggggagctccatttccctcagatggagcgtttcctaacccggggcaactttcccgaaacatggcaggcttgcctgacccaaatagcccctyattcttggctgcacttgtgaccaccgggccgagctcctcggaggcgtggacaaaggaggccttggcgagaacagggttcggtggccagtgggtggagaagtcggtgctggctgcgccgtggagcccgtggatcaacatttgctgaggacctcagtgcggaaagtcgtggtcgcacttccttccgggtctgctgagctgccactcacggcgggagagttgggacgtcctggaattc

SEQ ID NO: 184705 - DNA, 374 bp, Homo sapiens
taacctttcattaactggcattgttgagaattagcttgatccacatgagtgaaattagttctgagtgcacacgctttaagttttatggtatgagcttatgcaattgagctctgattacctggtttaggtttgtcttctggataatgaagtttggtttaaaatgttctaaactaactaatatctttgtttggagaawtttacttgccttaaatgaacaaacaagtcataatttcaaaagtgactttgactgaagaaacatagacagaatgtcacttaatacaaatcaaagagcttcatgattgtgagaagatttgccttttagagacctagatgctctttactattattagttcagcagaaatcccatgtataag

SEQ ID NO: 184706 - DNA, 459 bp, Homo sapiens
caacagcctcttaattttttatgtactcaaaaatatttattgagagcctgccatatgtaagacactttggcaggatcaggcaagtcacctataattcaagaacacagtccttgctgtcatagatcatcattcaagtggagaaagggaggagatgctgatgttctctatgtaggaagggaagagataatgactaacaaactgctasataatgataagtgctaaccaacatgaggaaactgagagtgatgagcaggtgtatttttattaagcacttattttgtgccatgcattgttaaaattgttttatatatactatctcatttaaccatcaactttatgttgaagggcttgttataacatgttataataatgtaaggtgcaggaaacctaaggttatttacatcatagtctttagagccagaagagacactggagcaaacaggttccaaatcaagcttt

SEQ ID NO: 184707 - DNA, 567 bp, Homo sapiens
ctaataccagtattgtatgcctaatttaaattcaaaggcatattccctatagattttttggtaatacagttaatttaagaagaaaactacaagagtatcgaatgtaaagagactgaggaattcatgtgtattttttgtaaccaaaatactttttaaagtacatttaatttgcattcatagaaagaagaaaatatattccccaaatctaattttgtctcaactgtttttccccaatgtttgtctcccattttaagaactacatttaaaagcaaaataaccaagtcttatattattaaaatggagtctgtattgcttaaaaaattgcaagtaaatgaaaattccattggaaaagaacaatttcacaggaataaartgtaaggaagcataatagatacattgaaacagagtttaatgatctaaaattgacagtgaagttgatacaggcaattccatgtatgccaatgttgagctgtaaactattttctttgtaaatagttctactcgaagaatgcttcagttcccaaatttctctaaaagcagaaaaaggtaacacttgtcagagtctat

SEQ ID NO: 184708 - DNA, 601 bp, Homo sapiens
cctcttctcctccaaaggatcacaactacttgccagcaagggaacaaaactggacggagaacaagtttgatgaattgacaggaatagtcttcagaaggtgggtagtaacaaactcttctgagctaaaggagcatgttctaacccaaagcaaggaagccaagaaacttgaaaaaaggttagaggaattgctaactagaataaccagtttagagaagaagataaatgacctgatggacctgaaaaacacagcgtgagaacttcatgaagcatacacaagtatcactcgccraatcaatcaagcagaagaaagattttcagagattgaagatcaacttaatgaaataaagtgtgaagacaagattagagaaaaaagaatgaaaaggaatgaataaagcctcaaagaaatatgggactgtgtgaaaagaccaaacttacatttgattggtgtacctgaaagtgatggggagaatagaaccaagttggaaaacactcttcaggatattccaggagaacttctccaacctagaaagacagcccaatattcaaattcaggaaatacagagaacactacaaatacactcctgagaagagcaatcccaag

SEQ ID NO: 184709 - DNA, 483 bp, Homo sapiens
atgttggtttattaccgaattacatgaaatcaaatttttaataartttagaaagccatgtgtttctgaaagtagggcttatgagatgcacaggaagttcacttttggaaacaaaaaatagtcatcttcgaaagtcactaataagtaataaccatttttgttactctagatatgttatagtactgatagtatgttgaaaagagtccatgagtgaggaaaataaacaatggtttcaacttaaaccaaaattaaaaaaaaatcatggggtcaaacattctgaattacagatatttatctaggatcaaactgtagttctatgggcaactttacagaggatgctttagggtgagtagcaattagtaggtatatatttaacatagactaatgagtctcttaaacaacaaacaaggccagctaacgttaaatcaaggtgaaaaattacatattaaccagaagaaggcatgtctaatgggttaatgaatat

SEQ ID NO: 184710 - DNA, 406 bp, Homo sapiens
ggaggacatgtgatagattgcctttgtaaatgaagactcacactgttattgtctatagtttggaatagtcctgttagattaaacaccatttggtttggtcccttattrattatgatgctttccgctgtcctgctgattctttttttctgatggctccactatggagaaacacagcttctttgaaataagccatcgcaatgcaagcagctcattaacttcagccttcctcccagtttcctatgacaggctgaagaaccttccctaactaactttagagagagataataaagttttatttcccttgtcacagcaactcaagggcagttcatcatgttcttttcttcaagacagaattttgaacagaagcagagggatccaaattttttttttttttaatgttctggat

SEQ ID NO: 184711 - DNA, 514 bp, Homo sapiens
gaactttttgagggtgggatctattttctttctccatatattcatagcactaaacacctggcttggctcagaggacagtttattgaatgtgttagtctaatatctaccactcttttttaagcgtaattgccgctaacctacccagccaattaaaaggcttaattttctggctacttttacatgtcttcttcctgatacttccatgttgtaagttgccccmctactaattatagccactattcttcatgttgtggaccactgaatgggacaacacccccttcttccattgagccctgaaggaaattggatgaagcagaaccaaaccattgtatcatatcaggtttcagaggacagatgcattggactggaattcaaatataaaatgtattgctaaaaggtaaagtgaattatagaagaaaactataatacaggaaggattaggtggaaattctagctgacttaaacttttcctagtaccaaacaagagtggaagatttaagataaaggccttcac

SEQ ID NO: 184712 - DNA, 514 bp, Homo sapiens
gaactttttgagggtgggatctattttctttctccatatattcatagcactaaacacctggcttggctcagaggacagtttattgaatgtgttagtctaatatctaccactcttttttaagcgtaattgccgctaacctacccagccaattaaaaggcttaattttctggctacttttacatgtcttcttcctgatacttccatgttgtaagttgcccccctactaattatagccacwattcttcatgttgtggaccactgaatgggacaacacccccttcttccattgagccctgaaggaaattggatgaagcagaaccaaaccattgtatcatatcaggtttcagaggacagatgcattggactggaattcaaatataaaatgtattgctaaaaggtaaagtgaattatagaagaaaactataatacaggaaggattaggtggaaattctagctgacttaaacttttcctagtaccaaacaagagtggaagatttaagataaaggccttcac

SEQ ID NO: 184713 - DNA, 521 bp, Homo sapiens
atcccaaattagaacactttttgagcgattttacttcttaggtagctcttcaacataaatttcggcatggcaaaacttgactctgctgagacgatggcaactggaagtataattaaacagcatagtcatacctagattcggacatgaacaattcattttaaaaattgtgtgcaaacattgtaatgagcttatagatcataaattcattaccaaagccacaaaatattctaatttcttcatataattttcaagtcacttaagaatcatacaatatttctgaaattctttcatatttttaatgctggaatattataaagaaaatgttaaaagaagtatgttgatcactttgataaaaattctcttcagtcaggaatatacrttgacatataatggcaaaaaaaagagtgtctgtagtaattagttttaacattacttctctgaaaaattttcttttccatagtcacaaaaatatttttgttgccttgctctattttccttatatttgaaagtcaattttgtcc

SEQ ID NO: 184714 - DNA, 576 bp, Homo sapiens
ttgaggtcatctcagatggagatgagaaacttattgggaactggagtgaaggtcattcttgctatgcaaagagactggtggcattttgcccctgccttagagatctgtggaactttgaacttgagagagataatttagagtatctggtggaagaaatttctaagcagcaaagcgttcaaaaggaagcagagcaaaaatgtttggaaaatttgcagcttggtgatgtgatagaaaaaaaaaacatttttctggggagaaattcaagccccctgcagaaatttgcataagtaacaagggcaagacaatgggaaaatgtctccagggcatgtcagagaccttgatggcagcccctctcatcacaggcccagaggcctaagagagawaaaatggtattctggggcaggaccagggccccccctgctgtgtggaccttggggacttggtaccctgcatcccagctgctccatccatggctaaaattggccaaggtacagctcaggttgttgtttcagagagtgcaagccccaagccttggcagcttccacatggtgttggatcagcagctgtacagaaggc

SEQ ID NO: 184715 - DNA, 501 bp, Homo sapiens
tacttctccctctattttatgtaattgatatcatgtccctatttacacctgtttatgatatatatccattaacaagttattctagctatagttatttttaatactyttttctttagattatacattagcattaaaaatgacccttacataatcattatagtattagaggattctgtgttgggaacaggccccccaaaatctggccatatactggccccaaaacgggccgtaaacaaaagctgggcagcacagttaacatgtttgtgatggccatgacacccacgcttgaaggttgtgggtttaccagaatgagggcaaggaacacctggcccacccagggcggaaaactgcttaaaggtgttcttaaaccactaacaatagcatgagccatctgtgccttaaagacatgatcctgctgcagataactagccaaacgcatcactttattttggccatccctttgttacccataaggaatacttttagttaatctataatcta

SEQ ID NO: 184716 - DNA, 591 bp, Homo sapiens
aacagtcatttttgcaagtccagaatgttaggtattgccagagtggtaagaacttcctaagagatgccccactgtgcaacacctgtgtttctcgattcctcttttaggcaggtgaaagtagttttgttttaaacacattgagaaacagaagtttggtaacttgccagagaccaattcaggagtaggactttgaccaaaactttcgctttttaatttcagaactttgagccatgtttctcatggctcagaggaaccccgccccagtggattggtattttaatttcaaactcctaaarctcccagcatgggaaactggaacaagttaaaactttaagggtatatacaaaccaagggagaagacaataatatagaaagcaggcatactcttaaaaaaaaaaagaaaaaaaggattatttttggcagagaaaggttaaatctcatcccatcttttaatatcaatgaaataaaatccatacatcagacttcaactttattgtgattaggcataagtaactaaataattagacttaatgatgggcaactgttcttacttttttttcctagagattttcagtatatgttaaaaagact

SEQ ID NO: 184717 - DNA, 618 bp, Homo sapiens
tctatgaatgaagaatcatgtggagtacagagtggcaaatgttgtgacagaaatatgcactgtagctaaagggagggaagtctcaaagatggtttcaaaggggaagaggatgaacttctttggcaaggaggactggagctgagggggacccagaactatatatttaaaggccagaggtgaccaccaaagcagaagaactgaaaaagaattttcttctggatttggcattttccaagggcagagtaaagatgtcaggaacgcttgaggcaggcctagaaagaggaggcagctgacagaactgagaaagggcagaaaggaatggaaaaacaaccaayagttcacagggaaaaaatcaaagagagagtttccagggcctattgaattttgcaattagatcttcattattaatcacaaaagctattatgttctttatgccaagcaaagatcaaacacatgatctcatttaatcctcacaactactcttgaaatatgtgttattatctgcagaacagttcccggggtggctaagggcaaaatccaaaccgcagtgggttaagaagtgactgagtggggagaatgtagtctggatttgggataaatttaggatagaaagggatt

SEQ ID NO: 184718 - DNA, 618 bp, Homo sapiens
tctatgaatgaagaatcatgtggagtacagagtggcaaatgttgtgacagaaatatgcactgtagctaaagggagggaagtctcaaagatggtttcaaaggggaagaggatgaacttctttggcaaggaggactggagctgagggggacccagaactatatatttaaaggccagaggtgaccaccaaagcagaagaactgaaaaagaattttcttctggatttggcattttccaagggcagagtaaagatgtcaggaacgcttgaggcaggcctagaaagaggaggcagctgacagaactgagaaagggcagaaaggaatggaaaaacaaccaatagttcacagggaaaaaatcaaagagagagtttccagggcctattgaattttgcaattagatcttcattattaatcacaaaagctattatgttctttatgccaagcaaagatcaaacacatgatctcatttaatcctcacaactactcttgaaatatgtgwtattatctgcagaacagttcccggggtggctaagggcaaaatccaaaccgcagtgggttaagaagtgactgagtggggagaatgtagtctggatttgggataaatttaggatagaaagggatt

SEQ ID NO: 184719 - DNA, 530 bp, Homo sapiens
gtactcttttgagtatgtttgcatattccatcctctaatactcataaaattagaaaaaaaaatgatgcccgggcaaagttcaagtaacttagaggctgagtcaattctgactacatccataacctaaatctcagttttgtaaattactgcttctgagtggtcaaggycacagactagcaaaatgttctttgtttttcagcacaaaggtcgaccatatacagaataatactttgtgttttgagggcactcagatttgtacatctttggtaaactggtaatccatgtggtcttttggtgtgtgataggtggacctgaaatatatcatttggacacttgatggcaatattctaaatgggctattgtctacttccctatgtcgggggaatcttacatagggtttgcaaaacaaagcttcatctctgaaattccatttggtatctggctttctaagcctttttggtgtttgtgcccatagaaaatagaaaaggcaacttggctgaacctgccagtcaacctagccaaacacttgc

SEQ ID NO: 184720 - DNA, 568 bp, Homo sapiens
tttgtgaggaaacggtaataaaacaaatatgtaagattaaggaaaatttgagcccctgactcatgagtcagagtggctgctagactayaaaacttctattggacttcaatgttaaaatttaatgagcacagcaggcaaagcagaaaactttaatgtttcttaaaatttctttactatacttattcagttgataaaatattaaatgctttaaggatatggaagccaaaaataatatttggtaaaaccaatcatgcatgatccctatgagtctttgttaaattaaggctatttcagttcatagagaacaaaaaaagtgtccattcaaacaatttgaaaaggcagttagttttttcctaatctctaagggttaagaataattttgattgttctatttgttttctgaagaaaatctaagccaattaaataattaagtccctagatgaaatgcaaaaataggtacatcctttggtgatatttcaaagtaacaggtatctttcagtgtagccaaatttgaagagaggctcattattcactgtaataaaacaaataatgcttttgttccaaacag

SEQ ID NO: 184721 - DNA, 562 bp, Homo sapiens
tcagatgggaaaaatacagcttttattgccacataataccatattatatcagctaatgccctgtctgtttctcccctactttcttttactttctcccagatttcagctaggctatacttgctccttagaaattttagaaaaacttgtcttgaacctccaatttcaatacttgtgacagtttccctgtgatcttcctaagtccagagttctgtatcagttgaatggtttttcatctgtctttgtcatctacttcaatgtgtagtcttcggttttgccctttaaagctttaaacgttaaacctttctcttccrttggtttctgttaaaagacaaatatgggtgcatatgtgcacagacacacacacacacacaccctgcttagtagacctaccaaagacccaggagttagaaaaaagatactcatattgtaggaagggcagccttgatttcttcctggtctctggcttcatccttatctctatccttttcttcttcccttcccttcaggatgtcccaaggaactgtgtctgtgttctgtagtttcagaaattgccatatatcat

SEQ ID NO: 184722 - DNA, 433 bp, Homo sapiens
acctgcattccttggcttatagtccctttctctatgtttaaggccaactgcatagcatcttcccccatttctttgtaacttctgcttcatggtgatggggacatctctctctctgatcgtaggaattgatttagatgcttttctagccatatgtattatgaactaaatgcagttgaattacttatgggaggaaatgrcaggtgacctcattacttgtcaaatcatcgttagataactgacttgactgttaagattgctgaagcagtgatttattacctcagctaaatctgtatcaatctggtgacccgtgtaactgaaaccaagatgttaacactgtaagaaaacctagcttatgtttgcagctcctgagaataaatccctttatcttgaaatacctggaaatccctttttaatgtccagtggagtcatattg

SEQ ID NO: 184723 - DNA, 502 bp, Homo sapiens
tcttcatggaactcaaaattctgaatgaggtctgagaaaatacatttaaaaggataagatgggctacaggaaaataattcattcttgtttaacatatttggaactcatagcaaactcattgtacctttttattttttaatgtaataatggactttaactctctcttcctgtactagaatgagtatggtaattgttaagtagatctttattactcatatgaagctttctactgtagtctwaaactgacacctgtgagactttgtgtctcagtaaacattggatcccctcttctacccactcctggctgcccaactaagctaaataggagcaccataactaggcaccagaatgacaagagagcgcatgggtagcaggcggggtgcaagatgatatggaatgtagatctgaaaagaatcttgatgagttttctaaccattttctttctttttgtgttgaaatatataagcaacacattataggcaattgactgctgtgtggcagt

SEQ ID NO: 184724 - DNA, 502 bp, Homo sapiens
tcttcatggaactcaaaattctgaatgaggtctgagaaaatacatttaaaaggataagatgggctacaggaaaataattcattcttgtttaacatatttggaactcatagcaaactcattgtacctttttattttttaatgtaataatggactttaactctctcttcctgtactagaatgagtatggtaattgttaagtagatctttattactcatatgaagctttctactgtagtctaaaactgacacctgtgagactttgtgtctcagtaaacattggatcccctcttctacccactcctggctgcccaactaagctaaataggagcaccataactaggcaccagaatgacaagagagcgcatgggtagcaggcggggtgcaagatgatatggaatgtagatctgaaaagaatcttgatgagttttctaaccattttctttctttttgtgttgaaatatataagcaacacattataggsaattgactgctgtgtggcagt

SEQ ID NO: 184725 - DNA, 508 bp, Homo sapiens
ttttatggaaggacaaatcaatagcaatgcaaattttcagaaacatttatactaataagagcatctgaaaataaagacattttaggttactaatccacatacctagagcagcagcacattcaaaaattgtaagcagatattagaaattgtaattcatattttaaaatttcagtcacatctagtataaaacatgctatgaatcaagttaaagttattggtatgagaatactgatccttctattaagaattatgtctttggctgggcktggtggctcacgcctgtaattccagcactttgggaggccgaggcgggcagatcacgaggtctggagatcaagaccatcctgactaacacacgaaaccctgtctctactaaaaatacaaaaaattagccgggcgtggtggcgggcacctgtagtcccagctacttgggaggctgaggccaggagaatggtgtgaacctgggaggcggagcttgcagtgagcagatatcacactattgcactcc

SEQ ID NO: 184726 - DNA, 508 bp, Homo sapiens
ttttatggaaggacaaatcaatagcaatgcaaattttcagaaacatttatactaataagagcatctgaaaataaagacattttaggttactaatccacatacctagagcagcagcacattcaaaaattgtaagcagatattagaaattgtaattcatattttaaaatttcagtcacatctagtataaaacatgctatgaatcaagttaaagttattggtatgagaatactgatccttctattaagaattatgtctttggctgggcgtggtggctcacgcctgtaatyccagcactttgggaggccgaggcgggcagatcacgaggtctggagatcaagaccatcctgactaacacacgaaaccctgtctctactaaaaatacaaaaaattagccgggcgtggtggcgggcacctgtagtcccagctacttgggaggctgaggccaggagaatggtgtgaacctgggaggcggagcttgcagtgagcagatatcacactattgcactcc

SEQ ID NO: 184727 - DNA, 462 bp, Homo sapiens
gaattccgtcttttccttaggataaacttttcaaatgaatataactagtaactttagtttttcattgagcatcaaatttacactgagtgctacaagggcactcagttgagtttcttattaaaagcccakctccagatagcttactgacaattatattttttcgaccatatacaatgttaaagctctatgactttgaagtagagacttctctcatacccagcagggttaatcaacggtgcataaaacagcattggaaatcttttgggagtacaatatgctgcagaataactgaaggatggcacttatttctaaattaacaatttgggttaatttttgccagtcaattaaagttcacagtggaaatgtaagatttttatgtagtaattgtaattcaaggaaaaacaaaatctttatgtaaaattacctgttttagaaaactaagagatatgttttcaataatca

SEQ ID NO: 184728 - DNA, 462 bp, Homo sapiens
gaattccgtcttttccttaggataaacttttcaaatgaatataactagtaactttagtttttcattgagcatcaaatttacactgagtgctacaagggcactcagttgagtttcttattaaaagcccagctccagatagcttactgacaattatattttttcgaccatatacaatgttaaagctctatgactttgaagtagagacttctctcatacccagcagggttaatcaacggtgcataaaacagcattggaaatcttttgggagtacaatatgctgcagaataactgaaggatrgcacttatttctaaattaacaatttgggttaatttttgccagtcaattaaagttcacagtggaaatgtaagatttttatgtagtaattgtaattcaaggaaaaacaaaatctttatgtaaaattacctgttttagaaaactaagagatatgttttcaataatca

SEQ ID NO: 184729 - DNA, 607 bp, Homo sapiens
gagcttcaaaatgacccatggctgattctacaagagtgctttcaacctgctgaatcaaaagaaaagttttactctgtgagctgaatgcaaatgtcataaaacagtttcacagatatcttctttctattttttatcaggggatagtctktttttttaccataggtttcagtgggctcctaaatgtctcttcacagtttctacaataaaagagtttccattgtgctgcataaaaagtgatgtttaactctgtgaactgcatccacacatcacaaagcagtttcacagaaagcttctttttagtttttaatagtgggatatttggattttctgtaaaatcctcagtgttcaccaaaatgtcccttcacagttctacataaagagtgtctccaaccttctaaatgaaaagaaaagtttcactgttgtagctgaattcacacatcacaaagcattttcacagatatcttcattcaagtatttatcatgaaatattaagtttttcactgtaggcctcagtagtctccaaaacgtttccttgaatatcctagaaatagagtgttaccaacctgctgaataaaaaggaacatttaactctatgagctgaatccac

SEQ ID NO: 184730 - DNA, 624 bp, Homo sapiens
aaaagtttcacagacagcttctttctagtttttatcacaaaaatttgttttttsactgtaggcctagcgggctctgaaatgtcaatttgcaggtcctacagaaaggtgtttccaacctgctgaatcaaaagaaacatttaactctgtgagctgatggcacacatcacaagcagtttcacagatagcttttttcaagtttctatcatgagaaattctgtttttcaatataggctttagtgggctcagaaatgtccctccgtaaattctacaaaagagtgtttctaagttgctgaatcataagaaaggtttaactctattagctgaatctacatatcacaaaggggtttcacagatagcttctttccagttcacatcaggagatttttttttccctataggtcccagtgggctccaaaatgtctcttcacagattctagtaaaagagtgtttccaattttttgaatcaagagaaaggattaactctgtgagatgaatgcacacgtcatgaaaatgtttcacagaaagtttttttctagtttttattgcaggatattcagtttttcactatagcctctgtaggctttgaaatgaccctttacagatttacaaaaaaactgtttcaaa

SEQ ID NO: 184731 - DNA, 624 bp, Homo sapiens
aaaagtttcacagacagcttctttctagtttttatcacaaaaatttgttttttcactgtaggcctagcrggctctgaaatgtcaatttgcaggtcctacagaaaggtgtttccaacctgctgaatcaaaagaaacatttaactctgtgagctgatggcacacatcacaagcagtttcacagatagcttttttcaagtttctatcatgagaaattctgtttttcaatataggctttagtgggctcagaaatgtccctccgtaaattctacaaaagagtgtttctaagttgctgaatcataagaaaggtttaactctattagctgaatctacatatcacaaaggggtttcacagatagcttctttccagttcacatcaggagatttttttttccctataggtcccagtgggctccaaaatgtctcttcacagattctagtaaaagagtgtttccaattttttgaatcaagagaaaggattaactctgtgagatgaatgcacacgtcatgaaaatgtttcacagaaagtttttttctagtttttattgcaggatattcagtttttcactatagcctctgtaggctttgaaatgaccctttacagatttacaaaaaaactgtttcaaa

SEQ ID NO: 184732 - DNA, 463 bp, Homo sapiens
atcatttctttctaatttttatcacgggaaattcagtttttcactgtaggttctagtgggttccaaattttcacctcatagtttctacaaaaagagtgtttagaacctgctgattcaaaaaaaagttccactccaggagctgagtccacacattgcggtgcagtttcacaggcctataaggccctattgggctttgaaatgtcccttcacagattctacaaaagaagtgtttcaaaccttctgaattataagaaaagtttaatgctgtgagctgaatttacagcatcacaaagcagtttcaggatatcttcttaccagtttctgttgtgggattttaggtttttcactataggcctacgtgggctttgaaatgtcccattgtagattcyaaaaaaacagtgcttcccacctgctgaatcaaaagaaaagtttaactttgtgagctgagtgcacacatcccaaa

SEQ ID NO: 184733 - DNA, 593 bp, Homo sapiens
ttgttgcaaagttttatttctcactttaggcatcagtggtctcaaaactgtcctgtcmcagattctacaaaaatagtgtttctaaactgctgaatttaaaaagttatagccctgtgtcctgaatccacacattgcaaagcagtttcacagatagtttctctttagtttttgtcatgggatattcggtttttcactatagaactcagtgggctctgaaatttccatttgcagattctacaaaaagagtgtttccaaactactgaatcaatagaaaggtttaactctgtgagctgaatccacacttcacaaagtactttcagagacagcttctttctagttttttatcacgggatattcagtttttcacaatacacctcagtgggctctgaaatgacccttcgcatattctacaaaaagagtgtttccaacctagtgcatgaaagaaaaagtttaactctgaaaactgaatccccacatcacaaagcagtttcacatacagcttccttcttattttttattgggggatatttgtttctttgctacaggcctcagtgcttcctaaaagtcaatttgcagattgtaaaaaaaaagag

SEQ ID NO: 184734 - DNA, 609 bp, Homo sapiens
ttgatttttaactttaggcctcaaagcactctgaaatgtcccttcacagattctacaaaagagtgtttccaaactgctgaatcaaaagaagtttaactctgtgagctgaatccacaaatcacaaagcaggttccaagatagattatttctagtttttaccatgggatattctgtttttcactataggcctcaaagcactctgaaatgtccctttgcagattctacaaaatgartgtttccaaacagctgaatgaaaagtaagttttaactctctgaaccgaatgcacatggcacaaagcagtttcacagatagcttttttctagtttttaccacaagatattcagtttttaactatagacctcaaagtgctctgaaatgtccctttgcagattctacaaaagagtgtttataaacagctgaatcaaaagtaaagtttacctatctgtactgaatgcaaactttgcaaagcagtttcacagatagtttctttctagttttcttcacaaaatagtctttttttcactgtaggcctcactgtgctccaaaatattcctccacagtttccacaaaaagagtgattccaactttctgaataaatagaaaggttc

SEQ ID NO: 184735 - DNA, 573 bp, Homo sapiens
ctgcgtcctcattgccacagcttggggcctctgggagagacacagatgccttggggccaagcctggcctccagcccccacctgggggttgccttgggggcttcttttaagagagagtcctccctaggaggacccagcacacrctcaggccttgccacttcatgcctttgcctggcttaatgtccccctgagtttctgttggaccacacaggcctgcttttggaaatgctgctgcccatgggggtccttcacgagagaaacagccatcctgggccagaccctgggtctctagcccccacctggggacccgttgagggcttctgggatggaagagtcctccctgggtggacccaggacccactcagacctcgcttctcctctttgtctgcctcaaggacacctgagtttctgccgtctcacaaaggcctgcctgtggcccaaccgccaaccctgggggtcttctgccaaagccacaggccaaggcctgagccccggctctagccctgacccagggggtgccctgcaggcttctgggaagggagaggcctccctgtgaggacccagcacccacaca

SEQ ID NO: 184736 - DNA, 495 bp, Homo sapiens
ttcttcaatgaattcaatttctttagttgcctctgcagttaatgttcttttaccattcaagtccagatcccctctcaagatagggaacaaatttgacatggcataagtagggatgcctaaagttggctgaatccaattaatatctcctggcaatttttgaaagtcatttaatgttcttaatgkgtcttttcttaattctattttttgtggtttatttttctttcctctacctgcattcccaaataatgaaaaggagtggaggtctgaatcttatcagacgctattgtcagtcctgcatttgcaacctctgtctgaagaaatgtgtaagtcaattaatttgtctcttgtttctgcagcacacaaaatgtcatcaacataatgaatgatataacaatccaaaatcttgtttctaactggatgaagagcctgagctacaaaagtctgacaaatagttggattattaagcattccctgaggcaacactttccactgaaa

SEQ ID NO: 184737 - DNA, 582 bp, Homo sapiens
catagttagattttctggggaatctttaacttcccctcttcttaagatarttttaatgaaactgagataagaagcataattactttcagtttgtcccattgttaccctgggttcctccgagcacacaagcttaccgcaaggctgactgtggacatactcaggaatctgtcatcagctgctgtcctcaatgctcacattcttagcataccttcaccctagagaaaggcacccacttggggaagcagatgaaggggtggcctgcccctccacacctatggaatatctcatcaggtaggatgagaaactgagaaaagaaatgagacacagggacaaagtatagagaaataacagcaggcccaggagactggcactcagcatacaaaggacctgcactggcaccagtatctgagttccctcagtttttgttgattattatttttattatctcagcaagaggaatgtggtaggagagcagggtgataataaggaaaatgtcagcaaaaaaaatgtgagcaaaaggatctatatgatgattaaattcaaggggaggtactatacatggatgtgcacgtaggccagatt

SEQ ID NO: 184738 - DNA, 612 bp, Homo sapiens
ctgaataccctgcaataaaaactagaatgaagctatctgtgaaactgctttgttatgtgtggattcagctcgtagagttaaatctttcttttgattcagcaggttggaaaccctcttctgacagtatctgcaaaggtacatttcagaactcwatttggcctaatagtgaaaaactgaatattctgctataattaatagaaagaagctatcttgaaactgccttgtgatgtgtaagttctgctcacagaaaaacttttctttagattcagcacattagaaacactctttttgtagaatctgtgaatggacatttctgagcctactgaaacctatagtgaaaacagaatatcttgtgatataaactagaaagaagctatttgcaaaactcccctgtgatgtgattgtacagttcaaagagttaaatctttcttttgttcagaaggttggaagagctttttttacagaaactgctttggagcccactgagacctgtagtaaaaactgaatatgccatcataaaaactagaaggaagctctctgtgaaactgcttcctgatgtgtgcattcagcgaacagagttaaacctgtctttggattcagtagattagaaac

SEQ ID NO: 184739 - DNA, 584 bp, Homo sapiens
taaaaactagaaagaagatatctgtgaaactgttgtgtgatgtttggattgaactcacatcgttaacattaagcaggttggaatcagttttttgtaggatctgcgaagacaccttttaaagcacattgacatctccagtgacaaaacaaatatcccacggtaaaaatcagaaagaagttgtctgtgaaactgctttgttacatgtggattgggctcacaaagttaaacctgtcttttgattcagcagtttaaaaactctctttttctagaatctgygaagggtcatttcagagggctttgaggcctatagtgaaaaatgaaatatcccttgataaaagtagaaagaagctatctgtgaaactgctttgtgatgtgtgcattcagctcaaggagttaaaccttacttttgattcagctgttggaaacactctttttgtagaatctgcaaagggacaatttagagagctttgaggcatatagtagaaaaacgaaaatcccgtggtaaaaactagaaagaaggtatctgtgaaagtgctctgtgatgtgtggattcacctcacagagttaaagccaaaatttgattc

SEQ ID NO: 184740 - DNA, 430 bp, Homo sapiens
gttttactttcaactgtgaaatatattttttaaaatgcaaaaggagagaattgtctattatattaccctgatatttcctatttattttgcccttcctccatcctttttaattgacaaagaataattgtattctttgtcaataattgtatttataaatattgtatttatttatttattatttatgtatttattaaatatttataaatattatatttataaatacaataattgtatttataggctatggtgagaagttttgatatatttatacattgtagaaagcttaaatcaagctaattaacatatccatcaccttmccaagttaccatcttcattcttaatattccaagatactctgggttcatgtcccttctgtctgacaaatttcctttaacaaataatctgtactacaaacctccatgacacaagt

SEQ ID NO: 184741 - DNA, 539 bp, Homo sapiens
gattatgataattttgtaatataatttgaaatcaggtagtgtgatgcctccaattttgattttctttctcagaactgctttggctattcaggatcttttgtggttccttaacatcttagaatttttttctatttctatgaaaaatgccactggaattttgatagggaccgagttgaatctgtacatcactttggaattttaaatatttttaacaagattgattcttccaatccatgaacatyggttatcttttaatttatttgtgtcttcttcaatttctttcatcagtatcttagttatgtagtgtacagatcttttagcttcactgaatttattactaagtatttcatttttgatgctatcattaatgggatttttaaaaattttttcagacaggacactgatacacagaaatgcaactgatttttgtatgttgattttttatcctgcaactttattgaatttgtttattagttctaacagttgtatgtgtgttgtgtgtatatgtgtgtatgtgtgtagtctttagggtttttcta

SEQ ID NO: 184742 - DNA, 579 bp, Homo sapiens
tccagctccttttaatgggctgtgttgaggaagggcataaaataggacaagaatcagacagtatgcaggaagggttttttctcattaaaaaaaaaaaaatcaaccttgctcaagaagtcaattttctaaaatataggtggtaaattctacaatgtatctatatcyatgataaccctgatgaagacatgtttctccaggtccctaagggctgggctcgtatgaagaaaatcctagtgtcagacatagagaacactaaagacaccaaatgcccatctagaaaccgcattgcaggtcagtggggaggagacaggagaatcatttcagggatgttccacagtccagacactgtgctagagattagggataagagggtgatgagagataggtaaggtctctgccttcatggaacccatagtgaggtgcaagacacaagacagaggtaagcacactaactagttacaaattgtgtctgcagggatcaagaggaaaccaccactttagatgggggagtggggctcagagagacctctctgaccaggggctttttaaactgagacctgagaaccaaaaagaaggaac

SEQ ID NO: 184743 - DNA, 428 bp, Homo sapiens
ctttatgtggcttccaccaaccttcccaccaaccctccctacggcaacttakcaagatcccatctcaaataagtaagtaaataaaaagtaaacctgaaaagagggtggtagcaattaggtattgctgcataaaaaaacactctcaaaacttctcagttcaagacagccatcattttttattgctcatggatttacaggtaaaatgggtggccctgctaatctgggctgggcacagcctgtatcaacgttctcactcctgtgtctgcggtcatcttgcaggtggctgaggactgatcaatctaggatgactgtcagctggggtgctgaggactgctggaccacacctctctcatcatcagaaggttagcctggatctgttctcatgatggcaggacaactttccaggagaacaaatcaaagcatgcaag

SEQ ID NO: 184744 - DNA, 404 bp, Homo sapiens
cccaccaaccctccctacggcaacttagcaagatcccatctcaaataagtaagtaaataaaaagtaaacctgaaaagagggtggtagcaattaggtattgctgcataaaaaaacactctcaaaacttctcagttcaagacagccatcattttttattgctcatggatttacaggtaaaatgggtggccctgstaatctgggctgggcacagcctgtatcaacgttctcactcctgtgtctgcggtcatcttgcaggtggctgaggactgatcaatctaggatgactgtcagctggggtgctgaggactgctggaccacacctctctcatcatcagaaggttagcctggatctgttctcatgatggcaggacaactttccaggagaacaaatcaaagcatgcaag

SEQ ID NO: 184745 - DNA, 234 bp, Homo sapiens
caaatgagttgtatgtaaagtgcctggaccactccctggaagatagaaggtgctcagtaaatattatcaattattatttttattatctttcctaccaaaaggacaagtcatcttgttcctgggccaggggcatgtgccctggcccatgtgtactataaacaatatatagactagatatagcaggttgcagcacttctcaractagatggaataggctcaccaggtgagggaagc

SEQ ID NO: 184746 - DNA, 455 bp, Homo sapiens
gaattcacctggcccaaggctttctcattttagagcagccaagctcggattcagctcctggatccaggtgyagtgggctcccagctttttctctcccttgactacgtgggccgagaggggctgtgtctgctccagctgcttctgattaaattaccccgtcatccagcaaggaatgccagtgtgcctagcttggcaaagggcagaccgtgcctgttcaccatggcatcgtggtccttggcatttcacatagggcccagaacacagtagaaactcaataaatgcttgctgaacgaatgaatcaagttgcattatataacatgtacaaacagattctcattttataaaacaatcaatgtgtgttgatcaaaatgaactcagtgcatctaccttacattaaaatatgggtcagaaactaccaccttgaagacatttttcagaagcccaaccagcttagt

SEQ ID NO: 184747 - DNA, 568 bp, Homo sapiens
ttgagaaccactgctatatagcccatggagaacttacagaaacacacacacatacttacacatacacatattgacacagatggaacaagaggcacagggtgagttggataaggtctgaccaggaaagggttagaaacagccatccaaggaggaatcaagcatcactaattctatctccctaggaaactaggaaaacagtaaaagccctacaaagagtgtagtgattggggatgttaccaagagtggacaataagttcatccattatgcatttcttctaaaagtaattgctcctactttcattaaatcgttatttgaacacttcctacctcctacatacactgcatactcaaaaaacgaaggacaagcctccaccctcaaatggctcacaawctagtgaggaagagaggcaaataaatggtctgcagtggcacagctcaattgagctgtgataagaggaatttgcagagagggaatgcagccaatgtcgagggaattaggtaaggctttccagaagaactgacacctgaactgaatctcttgtcaccttaatcttgaaatttctcttct

SEQ ID NO: 184748 - DNA, 522 bp, Homo sapiens
cttattctactgttgttgggtggaatgctctataaatgtcaattacatccagttgttaacattgttgttcagttgacattcttgctgagttgttgtctattagctctatcactagaagttttaaaatatcaaagagaagttttaaaatatcaaacaattgtacatttgtctatttctrtctccaattctgtcagttgtacttcatgtattttgaaactttttggcttacatatacatttcggattattattttttgtgttgaattgacccttacatcaggttttgcccctgtttactcctgataattttctttgctctgaagtccatttagtatagccacgccagttttctttttattaatgtttgcatgatatgtcatttttagtttttttttttttttacttttaacctacctatatcattatataaaaagtgagtttcttatatacagcatatacttgggtcatgtgtttttataaatcctgaaaatccttgtgttttatttagtgtatttagaccatt

SEQ ID NO: 184749 - DNA, 588 bp, Homo sapiens
ttttgaaggcgcttgatcaaggaggcaggataaaggagaatacaggaatgtgagggcattttctcaggatatgggacttaatgcttggcaaagaccctagaggatggtgcagacttgctgcttgggtggttcaacaagcctggagataggtccatgctgagcggagctgaaacagatttttaaaggctcagggaagtgaacatgctggtatattatggcgatcagaagacccatcagaggattattatgcccagggaggtctggagaacacagcattcaccaagccattgggaaattagctgaaggctttcctctgcagaccacaactggtggtgtgaaaggctgttgtggagttgaatccacagagagtagtgatgatggggtgaaacagatgggaatcttgtgaggatacttctyaatacatctaatcaaaagatagccaacacaggccaggcgcagtggctcccacctgtaatcccagcactttgggaggccgaggtgggtggatcacttgaggtcaggaattcaagactagcctggccaacatggtgaaaccctgtctctactaaaaatacaaaaatcagctgg

SEQ ID NO: 184750 - DNA, 499 bp, Homo sapiens
acagagttaagggctatttcagatttcagtaaagatccggacagtgtcccttattctttgtggggataattaagaagctgttgctagtgtctgatgagaagtgaagttgctgtttctggcagaggggcaatgaggatcaaaacacatatttggaattttatgttgttcctgagctcccctgctgggccaggatgtgggttaaatttgctctcctgtcttaataaaaaaaaaaaaaaaaaaaaaaaaaaaaaaagacccaagggaggccaggtagtggaaagcaaaraaaataaaaggcagggagatgaagtcaaatttcctctgatctctcttggagctgctgtcgactcatcagcctcagttaattatagaggcaaaaactgagccactgccaaaataaacggtgctgggcacatacgtaccctcttgataagggctgcatttatctgtgaaaaaagcgtctcaaataaatgtggaatgacttactgccggaacttgg

SEQ ID NO: 184751 - DNA, 499 bp, Homo sapiens
acagagttaagggctatttcagatttcagtaaagatccggacagtgtcccttattctttgtggggataattaagaagctgttgctagtgtctgatgagaagtgaagttgctgtttctggcagaggggcaatgaggatcaaaacacatatttggaattttatgttgttcctgagctcccctgctgggccaggatgtgggttaaatttgctctcctgtcttaataaaaaaaaaaaaaaaaaaaaaaaaaaaaaaagacccaagggaggccaggtagtggaaagcaaaaaaaataaaaggcagggagatgaagtcaaatttcctctgatctctcttggagctgctgtcgactcatcagcctcagttaattatagaggcaraaactgagccactgccaaaataaacggtgctgggcacatacgtaccctcttgataagggctgcatttatctgtgaaaaaagcgtctcaaataaatgtggaatgacttactgccggaacttgg

SEQ ID NO: 184752 - DNA, 499 bp, Homo sapiens
acagagttaagggctatttcagatttcagtaaagatccggacagtgtcccttattctttgtggggataattaagaagctgttgctagtgtctgatgagaagtgaagttgctgtttctggcagaggggcaatgaggatcaaaacacatatttggaattttatgttgttcctgagctcccctgctgggccaggatgtgggttaaatttgctctcctgtcttaataaaaaaaaaaaaaaaaaaaaaaaaaaaaaaagacccaagggaggccaggtagtggaaagcaaaaaaaataaaaggcagggagatgaagtcaaatttcctctgatctctcttggagctgctgtcgactcatcagcctcagttaattatagaggcaaaaactgagccactgccaaaataaacggtgctgggcacatacgtaccctcttgataagggctgcatttatctgtgaaaaaagcgtctcarataaatgtggaatgacttactgccggaacttgg

SEQ ID NO: 184753 - DNA, 600 bp, Homo sapiens
gaacaggtctttgctctatcctctgccttcctggccactgtggtaatgacccttttccctgaacattcatcygatgctgaagtttggggatgatgaatccatgggggctcttttggcacagccagggcctggtggctgactcagtcccagttccacctcagtgcaggctggagcatctgagtctgaggtctggtggcgaccctcacccctcattcatccttggtgtgggtagcttgttctgcagcccttagcttcaggttcactcagtcttgtctgagagtcagcctctaggagctgactactcagtcacaacctttcctcagctgggcatgcaggaacatctgccctttactgtacacatggaagtgctaacctagactgtctctctccctgatgtcccagcaatcctgggttgtgaccctgtgaccagtgaagcatcattcggagtcctgatgggaagccaggctagagtccctcctgctttccagctttttcttctaaaatgaccccatttagtgaggtgagattatagatgatattttttcttgccagtttttatatgttgttaggtatgatcataatgctttttataaatcataa

SEQ ID NO: 184754 - DNA, 532 bp, Homo sapiens
actctgctgccttggcctggagaacttgctttgtagagagcagactcttcaacattttcagaaagggagtcatttgattgagaaaggatgcagggcacagtgacatttggcaagggaaaggctaatttaggatttggttggcaaggtgagcagtttcttctgaagaggagttctcaggaagaccttggccccacattcagccyctcctgggtctgctgtataacgggattaggtagatatttatatttacctcctcatctcttatttaataggtgcctcatttaagtcctccaatgcttgttcacagttttcgtcatttcttgaatttaattcaatgacagcattgcaaaacctttcagcaagaaactgctataatatgttttgcagacatcagaaataccccgaggagaaagttaataggagagaacataataagcctttttacgaagaataaaatgtgggatatattttatcttaacagttttcaacaaagcccctggaggttgtttttatgtgggtagaagtttttcat

SEQ ID NO: 184755 - DNA, 580 bp, Homo sapiens
tactgctcaacaatgcacctcatcccccaagagctctgatggagatgtacaaggagataaatatcgttttcatgcccactaacacaacatccattctgcagcccatggtcaaggagtaattttgactttcaagtcttattatttaagaaatacgttttgtaaggctatcagtgccatagataatgattcctctgatgcatctgccaagtcaattgaaaacattctggaaaggatttaccattctaaatgctattaagaacattttttattcatgggcggaggtcaaattatcaacattaacaggagtttggaagaagctgattccaactgtcatgcacaaatttgaggaattaaaaacttcagtgaatgaagtaactatagacatggtggaaatagcaagaaarctagaatcagaagtggagtctgaagatgtgactgaattgctgcaatctcatggtaaaacttgaatgagaagttgcttcttatggatgagtaaagaaagtggtttcttgagatagaatctactcctggtgaagatgctgtgaatattgttgaaatgacaacaaaagatttgaatatt

SEQ ID NO: 184756 - DNA, 580 bp, Homo sapiens
tactgctcaacaatgcacctcatcccccaagagctctgatggagatgtacaaggagataaatatcgttttcatgcccactaacacaacatccattctgcagcccatggtcaaggagtaattttgactttcaagtcttattatttaagaaatacgttttgtaaggctatcagtgccatagataatgattcctctgatgcatctgccaagtcaattgaaaacattctggaaaggatttaccattctaaatgctattaagaacattttttattcatgggcggaggtcaaattatcaacattaacaggagtttggaagaagctgattccaactgtcatgcacaaatttgaggaattaaaaacttcagtgaatgaagtaactatagacatggtggaaatagcaagaaagctagaatyagaagtggagtctgaagatgtgactgaattgctgcaatctcatggtaaaacttgaatgagaagttgcttcttatggatgagtaaagaaagtggtttcttgagatagaatctactcctggtgaagatgctgtgaatattgttgaaatgacaacaaaagatttgaatatt

SEQ ID NO: 184757 - DNA, 508 bp, Homo sapiens
gtaagggctgtgctaatttgcaatcccaccaacaatgtgtgaggttttctctttctccacatccttgccarcacttgttatcttttgcctttttgatgaaagcttttctaacagatatgaggtgacaaaaccacatcttattatggtttaacttgcatttccctgttgattagtggtattgggcatttttttcatatacctattggccattgttatctctttttttgagcaatgtctatttaggtcctttgcccatttttaagttggattattgttttcttgctattgagttatttgaactccttatatattttggatattagccccttatcagacatataaattgcaaatattttcttctattctataagctatgtattcgctctgttgattgttttctttgctatgcagaagatttttagtttggtgctattccatttgtctattttcgcttttgttgcttgtgcttttgaggtcatatctaagaaaatctttgccaagatcagtg

SEQ ID NO: 184758 - DNA, 551 bp, Homo sapiens
aggtgggggtggggtgggacagcatggaggcctgggtcacatcatggcatgggctgcggagttagagggactgacttccacactagctatttgacttctgtgatgtggatgttccttacctgtagaatatagaattataatagctgcttcctgtaatgatgaggaataaatgagatcatggatttaaagcactggaaagaaatgtagtcaatggcaagccttcmataaatggccacatcaaaatcatggtgttctcacatcatagcctcttggtctgtgcctgcccctactcccatctgtctggccttttgtacattttgtctgttattctctctgactcccacccttccccacggcttgccagctcagatatttgaaccccttctctctttccctctctctctctctctctttttttttttaagagacagagtcttgctatgttgcccatgctggactcaaacttctgggttcgagggatcctctcacatcagcctcctgagtaggtggtactacaggcacatgccactgtgcacagctcttaaccctgt

SEQ ID NO: 184759 - DNA, 551 bp, Homo sapiens
aggtgggggtggggtgggacagcatggaggcctgggtcacatcatggcatgggctgcggagttagagggactgacttccacactagctatttgacttctgtgatgtggatgttccttacctgtagaatatagaattataatagctgcttcctgtaatgatgaggaataaatgagatcatggatttaaagcactggaaagaaatgtagtcaatggcaagccttcaataaatggccacatcaaaatcatggtgttctcacatcatagcctcttggtctgtgcctgcccctactcccatctgtctggccttttgtacattttgtctgttattctctctgactcccacccttccccacggcttgccagctcagatatttgaaccccttctctctttccctctctctctctctctytttttttttttaagagacagagtcttgctatgttgcccatgctggactcaaacttctgggttcgagggatcctctcacatcagcctcctgagtaggtggtactacaggcacatgccactgtgcacagctcttaaccctgt

SEQ ID NO: 184760 - DNA, 267 bp, Homo sapiens
aactaattttttaaaaaagaatcctctctcaaaatcatgttaaatgctcaataaaatataacaaatacttaaattcaaggttaactttgaaagaaagtaattctgggaataaagagggaatcaaagtcagatagtcaacgggagctgtactttcaggccttttgtctgtgctaaacacttggatgagcatctctatgtawaaaaccttttttcaattttgtctgcctcatctccaccctcagcttccaggatatattcgtagaagta

SEQ ID NO: 184761 - DNA, 508 bp, Homo sapiens
ggtaaatctgagctctggttctagaaacttcaagataaaaggccagttatggggcacattgagtggggcatctcaggatttagaactagaattgaggaggctgttgtcagaaggaaggtgcctaatggaggttgggggtggaggtgggtcacaaacccagaaaacaatgtttttgttttgtttttaaacataaatccttgccatttgaaagagaaaggtagagatttccctcaattccagtgaatcctgtgttgtcaatgaaacatcttttagaatcttcagttggaaaaaaatatgagaacttctcttgcctagtcttctgattctagtgtgcaaatattggggcctttcctattctagcaaacctcagggtgtgtcctaagtttacatctgcaaaccygtctatataacccacctcataatgtgagaccagctcctgagaacatcactcacagtagatgttctgggatagattgctcccttcctgcctgtgttccccctctccagc

SEQ ID NO: 184762 - DNA, 594 bp, Homo sapiens
ataaaggaaaataatcccagaagatagtcgatatgagaaaaggggatcaaagttaaatgtaactaaggttctgaagtttttccctaactatgaggttaccacattcatctcacaagcaagtggtcctcagtttaaaatcagagagtgaggctggctcttatccttggccctaaatgacttcccagtagttgacagttcagctcctgagattcagtggcaaaataggctggcatgtttaactaataatgaaatgttggttggtcaaacccaccctggaattagctcttagtaagttgtgctggtcttttcctgatgctacttttttctttctttctattaraataactcacttgacttatgttctcacctggctcaaatagtatgttttgcgcctagtgatgacattcccctactccccgcaccaatccagggccttagttgagaagtcactattgcagccactgaagctgaggctgaatcttgacatctctgagtcaccctttcttaaaagcaatatcttaagaagttttttcctacaatacttctcagctagcctttaatactgggcaatatccaagtcaaataagaaccctc

SEQ ID NO: 184763 - DNA, 594 bp, Homo sapiens
ataaaggaaaataatcccagaagatagtcgatatgagaaaaggggatcaaagttaaatgtaactaaggttctgaagtttttccctaactatgaggttaccacattcatctcacaagcaagtggtcctcagtttaaaatcagagagtgaggctggctcttatccttggccctaaatgacttcccagtagttgacagttcagctcctgagattcagtggcaaaataggctggcatgtttaactaataatgaaatgttggttggtcaaacccaccctggaattagctcttagtaagttgtgctggtcttttcctgatgctacttttttctttctttctattaaaataactcacttgacttatgttctcacctggctcaaatagtatgttttgcgcctagtgatgacattcccctactscccgcaccaatccagggccttagttgagaagtcactattgcagccactgaagctgaggctgaatcttgacatctctgagtcaccctttcttaaaagcaatatcttaagaagttttttcctacaatacttctcagctagcctttaatactgggcaatatccaagtcaaataagaaccctc

SEQ ID NO: 184764 - DNA, 553 bp, Homo sapiens
aaaatgtagagattgtaaacaagtaggtaaacatttttaaatagccttcaaaactctagatgtgaaaagagctgaccacaatttctcctatcttttcatttattctagccaattataccctcttgatataaagaaacaagctcaccacaccaggacccccctcagcttccactccagtgacccttggaccaatagcatttttgactaaatgaatatcccttcaagacttaggatacctacactgaatgtttctacctccttctctccacccacaaatgcatctagttctccatggtctcccaaactatctcccagaaacctattaataaataatcttcaaacaagtgggccaaaatcctatccctcccagaattcctaaaagagagacttaaaatttagtctctcttttcttgtccagagagaacagtcaatcaatgacttcatacactgtatcactgagttcctyttgtaactttaatgttttcatttaagtatcagtgccaggcccagatttgggaaaagtcctgaaattgctaagcgttcatttttgtgc

SEQ ID NO: 184765 - DNA, 581 bp, Homo sapiens
ctggagactgctttggattttttgtgattggattttttaaatccaaagaggaccccgcttgtggccatttcagcctaagggccattatggaatctaactgactttcaaagcctcatccactcaacccatgggccaactgttcccataagagaaaatggcaaggaggacagacaacttcagcaacagagaaaatgccaactaactgatcctcataggaagttytggggacttctacatgtaggtaaggcctctatggaattataagataaaacttggatagtgctgctgcactgagcaagtgccagctacctgccccatgtcctgcattatctaggagatggcgacttgtattgcatgaacccaaccctccaaattttagatcctggaactaggtacagctgttttttgaaaccaaagagcagaaaagaaaaaaaaaaaaacccacacaagtcccaggagcaggttttattttgctgctggttctattttcaatcatttttgagggtcaatgttcattctcaactccttcaagggtttgtaatttggctgctttggggatagctgagtcacattttatgaca

SEQ ID NO: 184766 - DNA, 581 bp, Homo sapiens
ctggagactgctttggattttttgtgattggattttttaaatccaaagaggaccccgcttgtggccatttcagcctaagggccattatggaatctaactgactttcaaagcctcatccactcaacccatgggccaactgttcccataagagaaaatggcaaggaggacagacaacttcagcaacagagaaaatgccaactaactgatcctcataggaagttctggggacttytacatgtaggtaaggcctctatggaattataagataaaacttggatagtgctgctgcactgagcaagtgccagctacctgccccatgtcctgcattatctaggagatggcgacttgtattgcatgaacccaaccctccaaattttagatcctggaactaggtacagctgttttttgaaaccaaagagcagaaaagaaaaaaaaaaaaacccacacaagtcccaggagcaggttttattttgctgctggttctattttcaatcatttttgagggtcaatgttcattctcaactccttcaagggtttgtaatttggctgctttggggatagctgagtcacattttatgaca

SEQ ID NO: 184767 - DNA, 409 bp, Homo sapiens
tagttttattgtatgttacatctagtagataatttttaaaaatagttcatatgaatgaatagtttcaaatagagtaaatatattctaccatgttacaaaacacagcaaatcaaaagcaattaccaagttgaataataagtcacaaagaaataattctggcttgtayaggaatgtgtagtatattcaacgctcttaacagttacccactaatacatatttctaaagcttaacttggagttcaaagatgagtttcacagtaatataattttaaccttcatttacattcatttttatatattactaagatgcctagtctatgtcacaatgatgctttccagtgtccacaaattttagtttcaagatgtgcatatgtaattcactaacatatgggacagttcttactattatt

SEQ ID NO: 184768 - DNA, 605 bp, Homo sapiens
cacgctctcaataaataattgttggatccatgaataagatgtactaagtgccaaaatctggttacaaaaaaagttatatggtctgatttatgtcacactttatatatgtgtatataaaatgtacaaaaagaagtgaggctggagaaacagcaagggcttactytagggtatttctcgataattattttaaaaaatgcctttctttgctgtccttgtcctgaccctgcttttttttttttttttttaacaataaacatgtattttaaaaaaccagaatatgataaagttattttcgtttggaaaatagtaaacaaatgaactagggtcctgactttcagctctccagagttgaggcacagctcttcccaccagttccccatccccagagcaccaagtcatttttgcacatgattttctgttacccttctcactggccttctcttcctccaggttctaattttcaggtgctctaaaaggactaaaaggacttgtaaacagaatctctcccttatatcccttcaagaagtctttctgtggtgctatttgaaattcttttaattagtattagaaaatgaaagccttagccttgggttgctttcttagaa

SEQ ID NO: 184769 - DNA, 563 bp, Homo sapiens
tatatgcttctgtagatttcaaacaaagtatatatctcccctccaccccccaaacaagtgctgcagtcctggaagacatatctaaaaagtctttggtgacagtactgagatacagggcagccaggcagtgatgtccctatggtgataactcttcagaattgcaagggcattagggaagccaggggaagttgagtgctgcaggagagaccatgctgatagaccatttctgtcatctctggtcttgcctttaagcttaagaaagtgatctcaggaagcacattaggcagaactagacaggaccttatggctgaattgccttagctgtggccacatgggtctcttgagtgtttaagtaacaggcacaaatggaggccccatctcattctatgcatacctctggctctgtccctctccacacttcttcagcaggtacctgttctttttcaaagatgagtaacaatcaggaaggaacctgtacataaaaactggagggaagaaacttatacaaaaggcagagaaaggacaaataatayaagagaaaaagaagacgaatcatacatagt

SEQ ID NO: 184770 - DNA, 410 bp, Homo sapiens
acttagaactgcaagcatgtatgtttatgatatgtttaaaaatcagcagcaaaaggcaacctgggtctttgtcactcaccctggaatttgctgcacttggtattttaagcatgatcatatttctgttcccaatttccataaccgaaggcaatcagcttaccttttcttagactctacttagataakaaccattatatttgtttagtcactttggaacactcaataagctcatttttggccacataatgacacacgctataccatcttgaagaattaatggttgcgacagtataaaatgattccaggaatttttcatctctcagataatcttttgtgtctttactggcatatttttattaactgaaattagaagaaactctagatataagcataaagtgagcagtattaat

SEQ ID NO: 184771 - DNA, 337 bp, Homo sapiens
gaatattctaaggaagtaacttagaactgcaagcatgtatgtttatgatatgtttaaaaatcagcagcaaaaggcaacctgggtctttgtcactcaccctggaatttgctgcacttggtattttaagcatgatcatatttctgttcccaatttccataaccgaaggcaatcagcttaccttttcttagactctacttagataagaaccattatatttgtttagtcactttggaacactcaataagctcatttttggccacataatgacacacgctataccatcttgaaraattaatggttgcgacagtataaaatgattccaggaatttttcatctc

SEQ ID NO: 184772 - DNA, 491 bp, Homo sapiens
ctaactagaagtagagcaatttgtgctaytggtttggggagcattttttttatttctatagttggtcctgagttggaagtatgggcaaaaatcagagaagctagtagttattgacaaagtcctgaccaatttgggccaatttctgcagaggttgtggtttggccttctggactaactgcagaggttatttttcagtgttctattttcatatacgatctggccattgaccatttgtatacacaatctcaagggaaacactagaagcatatccattaaagtcaggaaataaggatgcctactctcccaattttgtactcagatttggttaggtaatctagccaaagcaataaagaaaggaaataagctgacaatacccgaaacaaatcgttaaaattatcatcaattatagataatgtgattgagaacctaggagaaatgaaaagaaactcttactaatcagtacgtagtttcctttaatatcaacaatatcc

SEQ ID NO: 184773 - DNA, 485 bp, Homo sapiens
acacaatgataaaactgcctaatgatgtgtatctcagaacagattgccgtagttacgtaatgcatgactgtacatgatttttagaattttaacagtacagaaatgcataagatataaagtaaaccactgtcaactcatccagtctcattttccaaggcgcttttggtcatatctgtttttattttgattggcagtcttatggttcaaatgttttcccctccaaaactcatgctgccccttaattcccattataatggcattaagaggatgggaaatccaaytatggtatttgagaggtgagaactctgagaagtagttaagattagatgaggtcattaggatgggatattagtcaccttcataagaggaggaaaagaaacctaagctagcaagctcagccccctcaccatgtgatgccctacactgcctttggactctgcaaagagtctccaacagcatgatggacctcaccacatgcagcccct

SEQ ID NO: 184774 - DNA, 558 bp, Homo sapiens
tctgcactgaagtcttgaacccctcaaagtcacccacgagggttggaatcaacttctttcaaagtcctgttaatgtcgatgttttgacctcctaccgtgaataatgaaaatgttcttaatggcacctagattggcgaatactctcctgaaagtttttaattgatgttgcccagatatatgagagaaatctctacctacggcaactagtcttacaaaatgtatttcttaaataataaggtttgaaagttgaaattactccttgatccacgggtttcaaagcagatgttgtattagcaggcatgaaaacattaattgccttgtrcttctccctcagagcactcgggtgacaaagtacattgtcagtgagtagtgatattttaaaatacatcatttttttctgagcagtaggtgtcaacagtgggcttaaaatatccagtaaaccatgccataaacagatgtgctgtcacctttgttattctgtttatagagcacagacagagtagattcagcataattcttcagggccccaagatttttggagtgataaataaacattaa

SEQ ID NO: 184775 - DNA, 557 bp, Homo sapiens
gaattataatgaactcgtcaaaaacaaattatgatgattatagtcaatatcatcattagcatcatgacctctaaatatgctaagtgtgtgtgtgtatgtgtgtgtgtgtgtttgtgtaatcatatatgagaatgaacagtattgctagaggctgaggcaatacttggttgtgattaaagacacaaactcttgggagcaaattctctaagtactagtactggccattgcacttatccactatcaaattaagttamtagcctctgtataaatcaattgcctcaatcctagtaagaaaagtaatagtacctacatttggtaatagtcaaagatctcaattcatcccctttctgtatgtgcatgctgcctattacatggaaacatagaatctaattccccctccttgaagctgggctagcttgagtgacttggctttgcaagtacaatgtaacagaagtgaatttctcccatttccgaagctagatcataagaaaccttgcgactgttgccttaatctctaagatcacttgctctggggatgtcccctgaccaagtccaat

SEQ ID NO: 184776 - DNA, 557 bp, Homo sapiens
gaattataatgaactcgtcaaaaacaaattatgatgattatagtcaatatcatcattagcatcatgacctctaaatatgctaagtgtgtgtgtgtatgtgtgtgtgtgtgtttgtgtaatcatatatgagaatgaacagtattgctagaggctgaggcaatacttggttgtgattaaagacacaaactcttgggagcaaattctctaagtactagtactggccattgcacttatccactatcaaattaagttaatagcctctgtataaatcaattgcctcaatcctagtaagaaaagtaatagtacctacatttggtaatagtcaaagatctcaattcatcccctttctgtaygtgcatgctgcctattacatggaaacatagaatctaattccccctccttgaagctgggctagcttgagtgacttggctttgcaagtacaatgtaacagaagtgaatttctcccatttccgaagctagatcataagaaaccttgcgactgttgccttaatctctaagatcacttgctctggggatgtcccctgaccaagtccaat

SEQ ID NO: 184777 - DNA, 570 bp, Homo sapiens
atttacaggtggtaagaaaataaatctttcaaacaaaaatattttgataaaaggtgataaggggtgtgtggaaaacacagtggtaatacagatgaggtaagcagtgattaatcttccagtgagaaaactcaagaaaattattgaacaggaacaaataagaataaggtcttggaaaaaytgatagaaattcaccaagcagtcaagatgataaaggcattctaagtagcaggaataattgatgtaaatttttaaaactcatgaaattgaatggcatcatcaaaaatagaaaaaagaattcatttctttagacacactaaagtacaatggagagaagagtagctcacatggctgaaataagagccaaatatttgaccacagagtctgcagtaccctaaggaatttatcttacttcttgatggaagtaagctaatgggaaactactagattgaaacacaggtaattaacccaatttgctttgtaacatactggtttgagattgcttcttctgaaaatatgcacatgtaagctactgctctagactatcactgtacaatagaaatataatgtgag

SEQ ID NO: 184778 - DNA, 652 bp, Homo sapiens
cttactgctttaaaattgactacaaaaaaagagaaacatatttttattttgtgatagtagtcaattaaaaatattttattagttaattacaaaaactgtgtgttttcctaaaattttctttcctagtggtggatctatgtaaatgagatataggattttgtttccaacagcttctcagcatagagtttataattacgataaatacacacaagttgccatagtagacaatggtgtgacccacgttattaacttggaatgtaaattttttacttacagggataacatgaggttcctagcrttgatttcgacgtttccctaacagacatggaacccaccattatattatttcacattcttgagtaaaggatacattggattactaacttctcattcttcctaaatgttcacctaacaatgtaggcatctatgcatatatagagttaccgttgtgcttatgagctcatttatccccttactgattataactacatttaaatcttcttgaaacaaggaacagaactaaatatgcaggttccagttcagatttatctttcccctttcctcaccaagaaaatttctcttcttgaaatttctgcaataatttgtagctttctattttcacaatttctacttttagtaatccttatctgga

SEQ ID NO: 184779 - DNA, 558 bp, Homo sapiens
gttttagttgctctctgtctccaccacttctacatcaaaagctttataatgtagtctgccttgcacagtgacacttagaagaatggctagcaactagtcactctaaacttattatctacttatcttttatcaataagagttatatttatgttacatataatcacaaacattggaagtaaatggcttttagcatggacaaggaggcgatataacatgatsaatgaagataataatataatcttaaagatgaataaaaatctgtttttatcatctctaatttaccaatcagtgcattcaatgatttctaaatatctcaacaattccaacatatagatacttttcttcctacttgatggatgagaaaattaagtctcttgatcagaagttaagtcacctgcctaaaaacacaaccagtatatagcagagttagaatatacatttatgtttgaatgcttctgtttatttacactaccttccctctggtactttagtgtttttcattataagtatgtaaaagctaaaatacaaaccactcaccctatttgattgcattcacaa

SEQ ID NO: 184780 - DNA, 558 bp, Homo sapiens
gttttagttgctctctgtctccaccacttctacatcaaaagctttataatgtagtctgccttgcacagtgacacttagaagaatggctagcaactagtcactctaaacttattatctacttatcttttatcaataagagttatatttatgttacatataatcacaaacattggaagtaaatggcttttagcatggacaaggaggcgatataacatgatcaatgaagataataatataatcttaaagatgaataaaaatctgtttttatcatctctaatttaccaatcagtgcattcaatgatttctaaatatctcaacaattccaacatatagatacttttcttcctacttgatggatgagaaaattaagtctcttgatcagaagttaagtcacctgcctraaaacacaaccagtatatagcagagttagaatatacatttatgtttgaatgcttctgtttatttacactaccttccctctggtactttagtgtttttcattataagtatgtaaaagctaaaatacaaaccactcaccctatttgattgcattcacaa

SEQ ID NO: 184781 - DNA, 528 bp, Homo sapiens
ctcttctttttcttcccctcccctcttccttctctttctcctcctgttctcgtttcatcatcatcatcatcatcatcatcatcatcatcatcatcagctatgaatgggtttgtattcagagcaytttgcaggttgggttcatgaacaaacgataaaaactttacccttcaggaatttgtactttgagaatggagctacagcataacacatacataagaaaaaacagtaagatatgccatatagtaagtgacaaacatttaagaaataactgttacaacaattcgaaaaagttattagtcctttaattctgactctctgactcaaggaaaattgcttggtcacctttttaaatgggcacagtgtgttaagatgagaggaaaggaaacatggagaaggaatctgcatttactcaactcctagtatgttccaggaattgtaataggcgcttttacctagtctttattacatctaactcacattaaacagacctaaacccaaagataatggtagagaaaattaattctcaaa

SEQ ID NO: 184782 - DNA, 528 bp, Homo sapiens
ctcttctttttcttcccctcccctcttccttctctttctcctcctgttctcgtttcatcatcatcatcatcatcatcatcatcatcatcatcatcagctatgaatgggtttgtattcagagcactttgcaggttgggttcatgaacaaacgataaaaactttacccttcaggaatytgtactttgagaatggagctacagcataacacatacataagaaaaaacagtaagatatgccatatagtaagtgacaaacatttaagaaataactgttacaacaattcgaaaaagttattagtcctttaattctgactctctgactcaaggaaaattgcttggtcacctttttaaatgggcacagtgtgttaagatgagaggaaaggaaacatggagaaggaatctgcatttactcaactcctagtatgttccaggaattgtaataggcgcttttacctagtctttattacatctaactcacattaaacagacctaaacccaaagataatggtagagaaaattaattctcaaa

SEQ ID NO: 184783 - DNA, 374 bp, Homo sapiens
ttgggtatttgtcctaaaatttttatattaattatttttctatcttctatagctggtatggttcatacctgttcatatgttcatatgtycatacatttgttttctatcatatagatattgtgtctgattatagatagctacctagtaacccatcccactccttgaaaacttttgtgagcttctgagatattgaataaccagataaattaccaactccagaaaggtaatcgaacatttcttgatacttaaaatatatttgaatatttaaagtttaatgcccagactctgagcaacacattctaatttcatgttttagtaaaaataattcacatatagaaaatcacaattctagtcacatgagcaaaacagtgtaa

SEQ ID NO: 184784 - DNA, 574 bp, Homo sapiens
agtcttaacgtaaaaatattttatactgttttcagcctaagcaaagtaaaaatatgtgggtaagcttcatgaccaggtacccacactgtgcttgcggtcatattgtggggagagatccttacgaccagttgaaggaggagaaaaacacaatctgactatggcttacagacagattgtctcagagcatgtgtggaaaccaaaaatggatagcagctgcattgtggccacattagaagtagccttgaaagatagtggagatcaaaaattttcccaatggacaaaactacagcactacacctagtcatccatattggatgaagaaaaggtggcccaagatgagaatgcatatagatttctagacagtgaccaatggtctgtttatgtgctcaggtgcctaaaaggaaaagaactagaaaacccatgtggtagaaggaacaatatccccctccccccaaaatatccacatcctaattcttggaacytgaggatgtattatcttacatagtaaaagggacttcgtagacgtaagtaaaattaaaggccttgatatggtgagattatcctgcattattag

SEQ ID NO: 184785 - DNA, 555 bp, Homo sapiens
tagtgtgcttagagtcctggtttgctcctgttgttgtagagatgttattagaatcaccttcttttcaccatcaaaagaatttgatttggatgatatgtaatattattagtgtttattagcttctaaaattgtattatatttatcctactccattgcttgcatccatttacttcttagctttatcttctcttctgtgctcccaagaggtcacatgtgttttactaatttcattctacctactttaaagaggattgaccacatgttggccttagctgataatttaraggtggcctcttaatttcactcctctgcaatttgctgtcctacattgtaatttggagttccagtgttcagaaaataagatatgataccaaatgctgtgtaaaaagtctgtgtgttctgtgcatttgagctataaatttcatgacttgccaatgaattaacatgcaaaacttcagggataaagaagtctacatttgtatagtgctttccagtttagaacatgcttttataaaaatcatgtcactgtgcttctttatattttaaaaaaacact

SEQ ID NO: 184786 - DNA, 495 bp, Homo sapiens
tgctcatgttctcactgcagtcaaaggatgctggttaattgctaaagtactttcattgtctaaaagaaatctctgaacgtgactaatactgagctttggaaagagcagtaacaaatgcatggatcaagcctccacgcaagctattatgtaagtcctatggcaatttctcaaaagattgtgatgaattggtcagcttgytctatagccatgaatttcctctttcttatattctaatttaaatatgatgccagaaatgtaattatccttgaaggttagcattttcaattataatatttgtatataaagtacataatctttgatatggaaagttcatcttttggtattcacacaatataggtgaagggtgtacaaagtaatttgtgaatgacaaaattttacatggaacttatctgcaagaggtatttttttcttgatggctgagtgctatttgcctattataaatgacatttgtaactttaatttaaagaacacaat

SEQ ID NO: 184787 - DNA, 554 bp, Homo sapiens
aggctctctgcaagaagaaaaatatggctctttttgcccaaccccacaggcagtcagaccttatgattgtcttcccttgttccctaaaattgctgttattgtattctttttcaaggtgcactgatttgatattgttctaacatacatgtttacartcagatttcatattgttcaaacacacaggttttacaatcaatctgtatagttaacgcaatcatcacagggtcctgaggtgatgtacatcctcagcttaccatgaaaacaggattaagagattaaagtaaagacaggcataagaaattagaacagcattattggggaactgataaatgtccacgaaatcttcacaatttatgttcagaaattgcagtaaagacaggcgtaagaaattatggcaatattattaggaaagtgataaatttccatgaaatcttcacaatttatgttcctctgccatggctccagacagtccctctattcagggtccctgacttcccgcaacaatccttggtgaacatcagtgcaaaaatcctcaataaaattctgacaaatca

SEQ ID NO: 184788 - DNA, 554 bp, Homo sapiens
aggctctctgcaagaagaaaaatatggctctttttgcccaaccccacaggcagtcagaccttatgattgtcttcccttgttccctaaaattgctgttattgtattctttttcaaggtgcactgatttgatattgttctaacatacatgtttacaatcagatttcatattgttcaaacacacaggttttacaatcaatctgtatagttaacgcaatcatcacagggtcctgaggtgatgtacatcctcagcttaccatgaaaacaggattaagagattaaagtaaagacaggcataagaaattagaacagcattattggggaactgataaatgtccacgaaatcttcacaatttatgttcagaaattgcagtaaagacaggcgtaagaaattatggcaatattattaggaaagtgataaatttccatgaaatcttcacaatttatgttcctctgccatggctccagmcagtccctctattcagggtccctgacttcccgcaacaatccttggtgaacatcagtgcaaaaatcctcaataaaattctgacaaatca

SEQ ID NO: 184789 - DNA, 554 bp, Homo sapiens
aggctctctgcaagaagaaaaatatggctctttttgcccaaccccacaggcagtcagaccttatgattgtcttcccttgttccctaaaattgctgttattgtattctttttcaaggtgcactgatttgatattgttctaacatacatgtttacaatcagatttcatattgttcaaacacacaggttttacaatcaatctgtatagttaacgcaatcatcacagggtcctgaggtgatgtacatcctcagcttaccatgaaaacaggattaagagattaaagtaaagacaggcataagaaattagaacagcattattggggaactgataaatgtccacgaaatcttcacaatttatgttcagaaattgcagtaaagacaggcgtaagaaattatggcaatattattaggaaagtgataaatttccatgaaatcttcacaatttatgttcctctgccatggctccagacagtccctcyattcagggtccctgacttcccgcaacaatccttggtgaacatcagtgcaaaaatcctcaataaaattctgacaaatca

SEQ ID NO: 184790 - DNA, 503 bp, Homo sapiens
atttagacacaaataatttaccatgtactgataagtaaaagatacaccaaggacttcttgctgtgattttaaaaacaaaaagatttccttttggaacctgtatttatgggctttatgcttcacaaacactttcagaaatttayatttgaagggaaacgtaacaaactgaaacaaaatgacgagtgttttggttatcattattatctttttctttctatatacaacagggaggcaatctgactctttgatgtagctttacatttagaataagtgaatttatcaaatgcatgtggaattagcaacttgagacttagtcttttcaaaatataatgtacaaaagatacatagatgtgttttagtgaacatagtggacacttaaaaatgcattttctcaactagttagaaggacttatacttgacgtctctagttttttttttaataaatcatcctaaaacatgaacagctacatgcctcccatccccatgtcaggccacagtgaact

SEQ ID NO: 184791 - DNA, 583 bp, Homo sapiens
gaaatagtcttaaacatgacatagaagattcagcattatttatctaaactctagccagctccccaaatttctcctttwcatctgctcaattcctcagaaagatcaattttcatttttttcttaaatatgttgtgctatttctttcaggattctgtatatgaactttgttaattctactttctctgcttgtaattctcttttcctcactcttagaatgactacaaacattttatctttcaagattcagatcacttaagcacagggactattcttaaccaccatcttatttttttttccttcctggaatttattattgctgataattgttttataaatttctttttagttaaaggtctaggagagaaggaacattgggggccttctatctctgattcttcaacaattagcaccctgcataactcatagtaagtattaattaaatattagccaatttaatgcataatatcagaaactggtttttgatgagtggatgtaacattttattatatcttattttgtattttgtctctcaaaaaagtagatttaattcatgtgattgtatcaagtatttattcacaacgct

SEQ ID NO: 184792 - DNA, 583 bp, Homo sapiens
gaaatagtcttaaacatgacatagaagattcagcattatttatctaaactctagccagctccccaaatttctcctttacatctgctcaattcctcagaaagatcaattttcatttttttcttaaatatgttgtgctatttctttcaggattctgtatatgractttgttaattctactttctctgcttgtaattctcttttcctcactcttagaatgactacaaacattttatctttcaagattcagatcacttaagcacagggactattcttaaccaccatcttatttttttttccttcctggaatttattattgctgataattgttttataaatttctttttagttaaaggtctaggagagaaggaacattgggggccttctatctctgattcttcaacaattagcaccctgcataactcatagtaagtattaattaaatattagccaatttaatgcataatatcagaaactggtttttgatgagtggatgtaacattttattatatcttattttgtattttgtctctcaaaaaagtagatttaattcatgtgattgtatcaagtatttattcacaacgct

SEQ ID NO: 184793 - DNA, 608 bp, Homo sapiens
ttatgggtaatatcactgctgtatttttatcccagttcattgggttacaaattctaggacactgagtgagaaacattacaccagcactgaaggagccaaacacaaccatttatttacaggatattttcaatttgagccctgtcatctttaaccatatccttttaaagtgcattaaatcaccaactaaaaatttattatttggtcttctgcttgctttcaactggactccttgttatctgtctctaaaataaagggaaatcaagcttcattttctaagtagaatctgaatatcatacttgctattaagccaacttaaatgttactcacaaaactctgatttgggtagtcactggtccattctgaactttgtaaagtaygtcgtgccaaagttgctctttctatcaataatattatttattctcagttgtcatctgggattatgtcccataccaatattgagttcatatttccaaaatatttaatgatcattcaattctttacaacttctcattcaggtaatttattatactataaagtgcatgtataaaaatataaatatattctaaaacacaaagcattcctcagcatatgacatagctatttaataa

SEQ ID NO: 184794 - DNA, 608 bp, Homo sapiens
ttatgggtaatatcactgctgtatttttatcccagttcattgggttacaaattctaggacactgagtgagaaacattacaccagcactgaaggagccaaacacaaccatttatttacaggatattttcaatttgagccctgtcatctttaaccatatccttttaaagtgcattaaatcaccaactaaaaatttattatttggtcttctgcttgctttcaactggactccttgttatctgtctctaaaataaagggaaatcaagcttcattttctaagtagaatctgaatatcatacttgctattaagccaacttaaatgttactcacaaaactctgatttgggtagtcactggtccattctgaactttgtaaagtacgtcgtgccaaagttgctctttctatcaataatattatttattctcagttgtcatctgggattatgtcccataccaatattgagwtcatatttccaaaatatttaatgatcattcaattctttacaacttctcattcaggtaatttattatactataaagtgcatgtataaaaatataaatatattctaaaacacaaagcattcctcagcatatgacatagctatttaataa

SEQ ID NO: 184795 - DNA, 579 bp, Homo sapiens
aatacatcataagttctgtctgatgtttttgctttttcatttctctaaaaatgtttctatatggtaccaattctttttctatgattttctttagtttcattccctgcatctcagaagtgtccatgtggtaaaagaagtaaaaagtcttgaaaaatcagaacgttcctgccaaattgtctaatgtcaatttgttttctgacattgcttcttatacatcctcaccatctggcactggtttggacacactcatcttcaatcaggttgtcttctgctaattcctgtagtatgttgtctactagatcttgaatttctctaagattcatatcttaaaactctttacactcattttcttttctttttcttttaactaaatccacagtctctttcattatttcttgactggctctgttgtaaatctgatgaagtcacacacaacatctggrcacagttctcctgcagaaatttattggtttgagcttgatagctttcacagctttttctgtaacaagaatgcatcttcaatagtgtaatcattgcacatttttatgatgttctctctatcgaggttcttctctataa

SEQ ID NO: 184796 - DNA, 579 bp, Homo sapiens
aatacatcataagttctgtctgatgtttttgctttttcatttctctaaaaatgtttctatatggtaccaattctttttctatgattttctttagtttcattccctgcatctcagaagtgtccatgtggtaaaagaagtaaaaagtcttgaaaaatcagaacgttcctgccaaattgtctaatgtcaatttgttttctgacattgcttcttatacatcctcaccatctggcactggtttggacacactcatcttcaatcaggttgtcttctgctaattcctgtagtatgttgtctactagatcttgaatttctctaagattcatatcttaaaactctttacactcattttcttttctttttcttttaactaaatccacagtctctttcattatttcttgactggctctgttgtaaatctgatgaagtcacacacaacatctgggcacagttctccygcagaaatttattggtttgagcttgatagctttcacagctttttctgtaacaagaatgcatcttcaatagtgtaatcattgcacatttttatgatgttctctctatcgaggttcttctctataa

SEQ ID NO: 184797 - DNA, 434 bp, Homo sapiens
ttgcatcataaatggtagatagcaattggtcacaagtcatgcaagtgttcacatatgggtgaactctagcaaaaagcatcacttttaaggagcattactataagttttgaaaaaacagacttgagtactttgtrtcctgattgagtataggtttcgaagtcaaaaaaacctaatttgatgtatatctctgacactttcttgcttcgaaaactttaggaaattgcatgttttctctcaacctcattgttcttatctccaaagtgaaggtagagatgggggaagatatagacagattaggttatatctcctaggtcatatatcacataagtgggtaaagactatgaacctagattttctaaattcagattcattgtgctttcctttatatcacaataacctatgtttaaatatctagaaaaagcaataaagaattc

SEQ ID NO: 184798 - DNA, 571 bp, Homo sapiens
gaggtctgaccccacagctcatctgattacctagtgcttctcaataataagaaaagtcaaacttttacaactaccacctaaccaaataagttttatcaattttgcaatgaattcacctgctggtaattggatgtcttataaaaatacaaattttttattttcaacaaatatttttctataagaaaatgtttcaaccacraacatttaatgacatgagttggtggcactttgtctagagctgcaactttctcttctgtttgaatttattaatataaacatgatactgcaagtactaaaattgaatcatcacttggttccttatttgttttttttcaaaagttttacagatggtttttatttaagagagtacacttcaatagagtactgcagcaacattcactgtactgtgaacatctgaaaatgttttgtgagtaattttaaccaactcaagattttccacttttttaacagatgtagtgaatagtaaatttaacctgcgcatcatgccaaatattttttgcattatggaatagaattaacagctttgaatactaatggtaaattatgagtc

SEQ ID NO: 184799 - DNA, 554 bp, Homo sapiens
caggcttataaagtccttatatattcattgtgtaacttgagcctctcagaacaatcttggaagataaatagaccatagtacctccacattgcacaacttcaggggccccaatgatcatgtattccatgtgaatgatacctccccactgtgaacaacatccccactggagttgtacaaaaatggctgccctggaagggcagacatttctattctgtttgacaactattaaaattgagccaaagaaggttcctgagtgctctttatgtcccaataaactccacagttttgtcatgttcagctgctgacgttggatccctgatgcagtcatagttcccccttccagagaattgcaccagcccgccctgtgatgacytagattacacaggctactacaataagaacagctccgccttcttctacaactgtatctgcccaaaacaggatgttaaaaaggttactgaacttataacctcctttcacagtcacttcttaagaagtgtgtgtgtgtgtgtgtgtgtgtgtgtgtgttgccttttttttttttttttttgaga

SEQ ID NO: 184800 - DNA, 570 bp, Homo sapiens
agggttaacttatctcaaggtcttttttgaatgacatgcttgcagatgtttttcacatttttttcttcattcctttgcaagctcagcagctgtacacttgcaagctaagccttgttccctgaatatgccaaagggctgcagaggtagaatcagctctagctaatctaacctccagtaggaatcattttggggaacttgacacctaatgttgctctggtggtgtttagttcatgtccatgacatccctgtgactcccattttcctatcacactctctggacacaataggccacatttcctatctccccttttcttcagtttccttctcatgactcctttgaggactgggcatggtctcaaatggaagtttggcaaaaccagatatgaaccttgtaaaatggatgggtggtctctggagtgatcagtttacagtttcaagctgctctgaattgagagccaaagcaaatcttatgacacagagaagaaaaaattacttcatattttccayctcagttctagttcatttcataatcatcagcaaaaacaatctacctcacaaagataaaagtct

SEQ ID NO: 184801 - DNA, 539 bp, Homo sapiens
  misc_feature (1)...(539): n = A,T,C or G
accttgaaacgtangtcagcagatagggctgctctgatctgactgaccctgtcccatgggcgggacagttcttttaaaaccatgtcctgcagtcaacaaaggccaaagtcacctagaggagcatggtgaactttaggggatgggcttccttggccacgctccactgcaaccattcccatgccacaccctctgggttcagcacaggctggagtcctgtctctgccacctctccaagtagctctccctgccatttcagatgtccatgggggtcatggggtctcctgcaggtaggattccagaggtctggtaagagtgggccactccttgcctatttaactcactccctccccagcagccactggtgrcagtggggggtagaaacaagtccggttcttgtcagccccaggcaaaattcccaggttcctcttccttcgccccaaggtttgcatactccctccatccactctcaattcctaccttccaaagatttgctcagaatatgccggtcttcttgatggtctggtctctcagtgggagat

SEQ ID NO: 184802 - DNA, 591 bp, Homo sapiens
aagcttgagcttgatgttagcacatcacttggtaccctgtaaactgcttactgactgcacacactgaaaagcacatccttgtccatgggaaaagcactgaatggagatttgttcaaattcagccctgcccctcaatgactggccaattcactttatttcttttaacttcagcttctttttcaaagtggaggaattatgattataagtaatcacagggattatagagataacagtgctttaagatagctatcttaaaagattggagttatgaaaaattcaaaaatgaaatcagaaatgaagccaggagtggcggttcacacctgtaatcccggcactttgggaggccaaggcgggaggatcgcttgagctcaggagttcaagaccaatttggccaacatggggaaaccctgtctctactaaaaatacagaaattacctgggtgtgggggkacatgcctgtaatcccagctagtcgggaggctgaggcatgaaaattgcttgaacccaagaagtggaggttgcaatgagctaagattgcaccactgcactccagcctgggcgacaagttgcctcataatacataatacacaca

SEQ ID NO: 184803 - DNA, 485 bp, Homo sapiens
ttggtttactttattttatttatatttttctggggttaaaaacaattttaaaacatctaaaaacaatgttgaggtatatgtattctgtaacttagaatgctgctttttaaactttcwgccttctcattttattggcttgagctcaaaaatatggtaattaatctaccagtcaaaaatagcactttatgtccagactttttggctttgttttcaggatgcagacagcttgattttagttgaagagcctaggtttttccccattgtgtgtctttgctcttcttgaccacttcttttttttttttttttttttttttttggaaatggggtcttgctctgtcacccaggctggagtgcaggggcacaatcatagctcactgcagccttgaactcttgggctcaagggatcctcctgattctcccaagtagctgggattacaggctttcaccaccacactcagctaatttttttgtaaaaacaggggtct

SEQ ID NO: 184804 - DNA, 515 bp, Homo sapiens
agctgtccctgccaggggacctttgatgcatcaggatcctgggacagcaagcaaagtagggaagactcacaacatgaatcaggataacaataacaacaaaatttgctgagcacttactatgtgctaggagttccatatgcattaagacacttggtaccaaaaatgacactgggaggtaagttctacacacccttgtcttaagataaaagtggccaggggaggtggttcacgcctgtaatctcagtactttgggaggccgaggtgggtggatcacctgagaccaggagttcgagacyagccggatctcgataaaaaattagccgggcgtggtggtacatgcctgtaatcccagctacttgggaggctgaggcaggagaattgcttgaacccgggaggcggaggttgcagtgagctgagatcgcgccattgcactccagcctgggcaacaagagtgaaactccatctcaaaaataaataaatacataaataaataaaagctctgaggtacagaaact

SEQ ID NO: 184805 - DNA, 457 bp, Homo sapiens
gggaagactcacaacatgaatcaggataacaataacaacaaaatttgctgagcacttactatgtgctaggagttccatatgcattaagacacttggtaccaaaaatgacactgggaggtaagttctacacacccttgtcttaagataaaagtggccaggggaggtggttcacgcctgtaatctcagtactttgggaggccgaggtgggtggatcacctgagaccaggagttcgagaccagccggatctcgataaaaaattagccgggcgtggtggtacatgcctgtaatcccagctacttgggaggctraggcaggagaattgcttgaacccgggaggcggaggttgcagtgagctgagatcgcgccattgcactccagcctgggcaacaagagtgaaactccatctcaaaaataaataaatacataaataaataaaagctctgaggtacagaaact

SEQ ID NO: 184806 - DNA, 573 bp, Homo sapiens
gatcaacaaaatggaaaattagttctttgaaagggtaaacaagattaattgacagctagataaacaaaggaaaaaagagagaaaatccaaataagcataaccagaaattacaaaggtgacattacaattgataccacagaaatacaaaagatccttagagcctactatgaacatctgtatgcaaacaactagaaaacctagaggaaatggaagaattcctggaaatacacagccttctaagattgaaccaggaagaatttccaaacctggacagaccaataatgagttataaactcaaatcagtaattaaaaaactgccaaccaaaaaaagccatgtaccagacggattcacagccaaatttcaccagatgtacaaaggagagctgatagcaattccactgaaactattccaaaaaatcaaggaggagtccttccttcattctatgaaacctgtattatctggtactaaaatctgccaaggacacaaaaatactrcaggcccatatccctcacgaatatagatgcaaaaatcctcaaaaaatactagcaaactgaatcccgcagcataacaaa

SEQ ID NO: 184807 - DNA, 591 bp, Homo sapiens
ttttaacttcaaaaactcagaaacacatgtatgggatatatgatcacattaacacagtaacttgaatcayggtgtgctcttcctccagaaattaaatcctcactccttgcctcttaactacagaatgaggattaactcttttttctgtcaaagtctcctaaaatctgaccttaaagtgacgtagtggaataagaaacagactgagagtggggagaccatgatttaaggaaatggcccagagcttgtccaactttcctggatttcagttttctcatgatcagagactagcctcattcagctttaatctccttctcgttaagttcaacaaatgactgtgaaccaaacaatgtcactgattcagctgagtctaccttctacagacagagatgacatcccagatcatttaaacacagatgtaatattagagctaggagcaaccttaagacacatgaatcaacttccttattttaacaatgaagaaacagacgcttgatgtggggatatgacttatttgaggtcctgtggcaggttgtggtcagctctagtatacatttctctgcccaaccctattcttacccatcattccatgcc

SEQ ID NO: 184808 - DNA, 563 bp, Homo sapiens
gagcaatcttcatgaacatattagttctccatgagagtcctgggagttttttttctctataccagtggcacaatctccaaagttatcataaagcttcattcaaaagcaccccttagagtcctayagctaattgcaaaccacctttttaaaagcaccaaagtagaacaactgtcaatgacagaagtcttaggacagccatggtcaaggacacacttaacaaggaaatttggttatttctgtggcatataacaatttaacataataattataaatactaataacatatataaagacatcagaatgataggaatatcacgcaatgttgaaaaacatactagtaacaggtttaatataaatgtagaacaaataaagttgaacaccatttcatatttgacaatgtttcctatatgattttaacatgccaaatacaccgaatatgtctgtttttggcttcaggggacttaatatcaaaaaagataatgaggtcaacaagactgaatttagaatttgattttggaaagtttgattttcttcagtccccactttgaaacttaaaacaagtt

SEQ ID NO: 184809 - DNA, 405 bp, Homo sapiens
gacagacagctgcattttaaagccccttctgtacattgctmctgggggataaggctcctggaaatgctatgcacctgtataaaatcacctttttcctgtggtctaaagagacttgcatatgtctaattccctctacttcaagaggtaggaggttgaggatgtagtcttaggtggaagctgtaatagtgggatgctcatcatgtggacaaactctaggaggaatcagtagacacaaaattatagctgactagattgggagaggcagttgtctcatctaacatacagaaactaacacagaaagtcaaagaaaatgatgaaacagagatatatattccaattaaaaacaaaataaatttccgaaactgtacccaagtgatgtggagatatgcaatttacctgacaggg

SEQ ID NO: 184810 - DNA, 405 bp, Homo sapiens
gacagacagctgcattttaaagccccttctgtacattgctcctgggggataaggctcctggaaatgctatgcacctgtataaaatcacctttttcctgtggtctaaagagacttgcatatgtctaattccctctacttcaagaggtaggaggttgaggatgtagtcttaggtggaagctgtaatagtgggatgctcatcatgtgracaaactctaggaggaatcagtagacacaaaattatagctgactagattgggagaggcagttgtctcatctaacatacagaaactaacacagaaagtcaaagaaaatgatgaaacagagatatatattccaattaaaaacaaaataaatttccgaaactgtacccaagtgatgtggagatatgcaatttacctgacaggg

SEQ ID NO: 184811 - DNA, 399 bp, Homo sapiens
gaaagctaattgcctacatcatataaagaggcctagcgcatctgcagtgccacctcctggaatatgacatgactttaactgaactgacctcttctcagtactaaaaggcttgctgaaaacagatatgagaggatctatttaaatttgcttttttwatattattcccagtttgtttttccattcctttatctgtttttcaatgcctctaacccaaatctctcgaaagctatcagcttggctttttgtatgtgagacttgtttgaggtttcaaagtggtgactgaagaaaataaaaatattttaccactaaatatatttctttgacatatttcaaaatggctgccgcttggccagtaggcagaagtggccttgcaaagctgtcttaagtggggaaaatttg

SEQ ID NO: 184812 - DNA, 399 bp, Homo sapiens
gaaagctaattgcctacatcatataaagaggcctagcgcatctgcagtgccacctcctggaatatgacatgactttaactgaactgacctcttctcagtactaaaaggcttgctgaaaacagatatgagaggatctatttaaatttgctttttttatattattcccagtttgtttttccattcctttatctgtttttcaatgcctctaacccaaatctctcsaaagctatcagcttggctttttgtatgtgagacttgtttgaggtttcaaagtggtgactgaagaaaataaaaatattttaccactaaatatatttctttgacatatttcaaaatggctgccgcttggccagtaggcagaagtggccttgcaaagctgtcttaagtggggaaaatttg

SEQ ID NO: 184813 - DNA, 574 bp, Homo sapiens
agcattcgataaaatatgacgtcctttctcaataaaaaamcttaacaaactgtatatagaaggaacatatcccaaaacaacgaaggccatatatgacaaaccaacaactaacatcatgctgaacaaaaaaaaaaacttgacaacatttcctctaagatctggaatgggagaagaatgactacttgcatcatttttattcaacatagtactagaaatcctagccagggcaatcagataagagaaagaaataaaaggcatacaaatggaaaaaaaataagttaaattgttcttgtttgaagatgacatgttcttatatttagaaaaacctaaagactccaccaaaaaactatttgaagtaataaattcagtaagtttgcaggatacaaaatcaacatagaaaaatcagtagcatttctatatgccaatagggaacaatttgacaaagaaatcaagagagcaaaatttaaaaaaaatccattcacaagagatttaaaaaatacctagaaataaattttaccaaaaaagtgacagaactctaaaattagaaaacattgatgaagaaaattgaaaatca

SEQ ID NO: 184814 - DNA, 574 bp, Homo sapiens
agcattcgataaaatatgacgtcctttctcaataaaaaaayttaacaaactgtatatagaaggaacatatcccaaaacaacgaaggccatatatgacaaaccaacaactaacatcatgctgaacaaaaaaaaaaacttgacaacatttcctctaagatctggaatgggagaagaatgactacttgcatcatttttattcaacatagtactagaaatcctagccagggcaatcagataagagaaagaaataaaaggcatacaaatggaaaaaaaataagttaaattgttcttgtttgaagatgacatgttcttatatttagaaaaacctaaagactccaccaaaaaactatttgaagtaataaattcagtaagtttgcaggatacaaaatcaacatagaaaaatcagtagcatttctatatgccaatagggaacaatttgacaaagaaatcaagagagcaaaatttaaaaaaaatccattcacaagagatttaaaaaatacctagaaataaattttaccaaaaaagtgacagaactctaaaattagaaaacattgatgaagaaaattgaaaatca

SEQ ID NO: 184815 - DNA, 574 bp, Homo sapiens
agcattcgataaaatatgacgtcctttctcaataaaaaaacttaacaaactgtatatagaaggaacatatcccaaaacaacgaaggccatatatgacaaaccaacaactaacatcatgctgaacaaaaaaaaaaacttgacaacatttcctctaagatctggaatgggasaagaatgactacttgcatcatttttattcaacatagtactagaaatcctagccagggcaatcagataagagaaagaaataaaaggcatacaaatggaaaaaaaataagttaaattgttcttgtttgaagatgacatgttcttatatttagaaaaacctaaagactccaccaaaaaactatttgaagtaataaattcagtaagtttgcaggatacaaaatcaacatagaaaaatcagtagcatttctatatgccaatagggaacaatttgacaaagaaatcaagagagcaaaatttaaaaaaaatccattcacaagagatttaaaaaatacctagaaataaattttaccaaaaaagtgacagaactctaaaattagaaaacattgatgaagaaaattgaaaatca

SEQ ID NO: 184816 - DNA, 586 bp, Homo sapiens
tgtccagtaaggtgtccattagccacaggtaactattgagcaattaaatatggctagtgcaactgagaaccttaatttttattgtactttatttaatgaatttaaacttaaatatcaacatgtggctggtgagtatcaaattagacagttgaagtttagactccagtctcagacgcttcctatgtgatagctgtactcaacatgcagtttcctgccttgggatctaggcacattatccccactccrggagccagctctcccctaatcaccaccctcctccctacatgatccacttccatggaacgtacaggtttctcttccaagaacctctccttgagaccctcaggtccagattagacacgcctcctcagatatcataaacttatgcctgttggtatctccagcaccttgaagactgcctgaatacagcactctctgcacacgcttttataaataaatgaaaaaataaagaggcagactcacttaactggatcaggcatgagtagatgttggtaattagcagataatggttttttgtactgcaaatttgctatataaaattccacaaagctgagctctagagaat

SEQ ID NO: 184817 - DNA, 586 bp, Homo sapiens
tgtccagtaaggtgtccattagccacaggtaactattgagcaattaaatatggctagtgcaactgagaaccttaatttttattgtactttatttaatgaatttaaacttaaatatcaacatgtggctggtgagtatcaaattagacagttgaagtttagactccagtctcagacgcttcctatgtgatagctgtactcaacatgcagtttcctgccttgggatctaggcacattatccccactccgggagccagctctcccctaatcaccaccctcctccctacatgatccacttccatggaacgtacaggtttctcttccaagaacctctccttgagaccctcaggwccagattagacacgcctcctcagatatcataaacttatgcctgttggtatctccagcaccttgaagactgcctgaatacagcactctctgcacacgcttttataaataaatgaaaaaataaagaggcagactcacttaactggatcaggcatgagtagatgttggtaattagcagataatggttttttgtactgcaaatttgctatataaaattccacaaagctgagctctagagaat

SEQ ID NO: 184818 - DNA, 575 bp, Homo sapiens
atgatgaagctctggccacaatgatctttcattcaaatacgtggtgatagacatttagcaagtaaacactgaaagtgaatgcataaaatacagcaatttcaggaactattaagtatttacaaagactataataatgcagccctgtgatagtgacttgtgattgtgggaagaggtgagggaagaccttcttgcagaggtgatgtttgaggagcaaatagaatgatgaaaaggaaggagcaatggatctcagttttctttcttctagacccattacacagcaaattcacaaactttaaagtaggaaggagcttggcaagttcaagaaatacaaataagccagtgtggcagaaccccattggtgcaagaataaagacaggagtttgaagaagagtcgtaggtcagatagatatcatgtctrgtacgtactggcaaaaagtttggacttgatattcaagcattggggcagccactggagaggttggattgaaagagtggtatcacctaattaagtttttctacagatctctttggtatgggaagaaattggattataaggtgcagaggctggaaaaagg

SEQ ID NO: 184819 - DNA, 584 bp, Homo sapiens
aagggaaacaggttaaaatattctcttcttaaaagaaggaaataaagaattttgaatggatggcctaattatatcatttaagaatatctttttaaccaataaaataaaatgaacatatattaatataagycaattaggattgagacattgcaaaaactggttttaaaaaacaaagatattgtagtctgcaacagattagaatatttctatctactttactagaaaatttacatattgcattgctaaattgattttctagaatattcttaacattctattgactaaagcttaaatatcttcactggtaaaatgcctgattttagaaatcacctattaaatcttagaattgtgatatgtttacacatattaagacaaatacgtagatcttgctttgctaacagattattttaaaactaaagtaacttttctatttcctgtcttcattttgattctaaattcggtaagcaaattttatatttgagatgtgataattttcttttcatggaagtatttgtatctttacagaagataaggcactgtagttagatgtttctcataaaagctggcctggtgtttgttgagca

SEQ ID NO: 184820 - DNA, 584 bp, Homo sapiens
aagggaaacaggttaaaatattctcttcttaaaagaaggaaataaagaattttgaatggatggcctaattatatcatttaagaatatctttttaaccaataaaataaaatgaacatatattaatataagccaattaggattgagacattgcaaaaactggttttaaaaaacaaagatattgtagtctgcaacagattagaatatttctatctactttactagaaaatttrcatattgcattgctaaattgattttctagaatattcttaacattctattgactaaagcttaaatatcttcactggtaaaatgcctgattttagaaatcacctattaaatcttagaattgtgatatgtttacacatattaagacaaatacgtagatcttgctttgctaacagattattttaaaactaaagtaacttttctatttcctgtcttcattttgattctaaattcggtaagcaaattttatatttgagatgtgataattttcttttcatggaagtatttgtatctttacagaagataaggcactgtagttagatgtttctcataaaagctggcctggtgtttgttgagca

SEQ ID NO: 184821 - DNA, 584 bp, Homo sapiens
aagggaaacaggttaaaatattctcttcttaaaagaaggaaataaagaattttgaatggatggcctaattatatcatttaagaatatctttttaaccaataaaataaaatgaacatatattaatataagccaattaggattgagacattgcaaaaactggttttaaaaaacaaagatattgtagtctgcaacagattagaatatttctatctactttactagaaaatttacatattgcattgctaaattgattttctagaatattcttaacattctattgactaaagcttaaatatcttcactggtaaaatgcctgattttagaaatcacctattaaatcttagaattgtgatatgtttacacatattaagacaaatacgtagatcttgctttgctaacagattattttaaaactaaagtaacttttctatttcctgtcttcattttgattctaaattcggtaagcaaattttatatttgagatgygataattttcttttcatggaagtatttgtatctttacagaagataaggcactgtagttagatgtttctcataaaagctggcctggtgtttgttgagca

SEQ ID NO: 184822 - DNA, 575 bp, Homo sapiens
aattgattttctagaatattcttaacattctattgactaaagcttaaatatcttcactggtaaaatgcctgattttagaaatcacctattaaatcttagaattgtgatatgtttacacatattaagacaaatacgtagatcttgctttgctaacagattattttaaaactaaagtaacttttctatttcctgtcttcattttgattctaaattcggtaagcaaattttatatttgagatgtgataattttcttttcatggaagtatttgtatctttacagaagataaggcactgtagttagatgtttctcataaaagctggcctggtgtttgttgagcactcctatacttatgacaaattgaatttccagagaatgcaytcattcatattagaccatgtgtttgggcttaatgttcagaaaacatgaacattacactgagacagcaagggttgtatagattttaccaattttccaatttttacttggaaagcttagttcaaattggctaaaatgggaaaactgtcacataaggaaaagtggcgtaaacaataccaggagcagttttaaaatggac

SEQ ID NO: 184823 - DNA, 575 bp, Homo sapiens
aattgattttctagaatattcttaacattctattgactaaagcttaaatatcttcactggtaaaatgcctgattttagaaatcacctattaaatcttagaattgtgatatgtttacacatattaagacaaatacgtagatcttgctttgctaacagattattttaaaactaaagtaacttttctatttcctgtcttcattttgattctaaattcggtaagcaaattttatatttgagatgtgataattttcttttcatggaagtatttgtatctttacagaagataaggcactgtagttagatgtttctcataaaagctggcctggtgtttgttgagcactcctatacttatgacaaattgaatttccagagaatgcattcattcatattagaccatgtgtttgggcttaatgttcagaaaacatgaacattacactgagacagcaagggttgtatagattttaccaattttccaatttttacttggaaagcttagttcaaattggctaaaatgggaaaactgtcacataaggaaaagtggcgtwaacaataccaggagcagttttaaaatggac

SEQ ID NO: 184824 - DNA, 421 bp, Homo sapiens
caagggttgtatagattttaccaattttccaatttttacttggaaagcttagttcaaattggctaaaatgggaaaactgtcacataaggaaaagtggcgtaaacaataccaggagcarttttaaaatggacacaacagttcattcctaagccacatctagaaatcagcttattagaatgcagattggactagagaaaaatcattgaaaacagcaatactcagcagatgagaaactcacaaatcactcagcctgaaggaggcacaggctgaaaggtaatttgaagtatttgttagtaggctgggtagtgtgcacatctcaaaaacagcctcatgaaaacaggtgatgagaggcagcaggaaggcaaagagtttgagctgtgtgtgaggaggctgcctctcttccaggctgtgaagggacaac

SEQ ID NO: 184825 - DNA, 537 bp, Homo sapiens
agaaaataatcaggcaaaaggtgtcaggaaaggactgcaaaccttcccacattaaatgcttttattcaattatatacaatctgataaaactacatttgactttcttgaatagcacatttgtcttctcatctcatctcatctcatttagaagactactgattcttcatttgcaacctattacccaaaattgcttggcggaatatagtaggtgatatatgatgtagttggggaaacaagactaagatggaaaatcttgcctacaggagttatcactaagaaacgtaaagagaaatgttcctacatttctctttgccctaacatatcattgttcttgctacaactattcaacwcctgctgattttttaaggccaccttttatattgtacctctactgtgaactcttttctatcttccccagggataatctctttgttattatgataccatatgacttattacacagttttcttttctattttttctttcctcccctccctccctccctccctcccttccttccttctttccttccttcct

SEQ ID NO: 184826 - DNA, 592 bp, Homo sapiens
ttccctttagtcttcctctgggaaargcagaagggcagaaattttaagtcaaacatttttatcaacaacatttatacagaaagtgcatcaaatgacttcccccacctttcccatgaattagggtgaaactgtttggggcattttatcccttcaaagaaccaggcccactattgtctactaagaacctttggaattcacagctttgcagaagagattagcttaaaagaaaacattaatatctggctttacagagactttcagctttgctttaagtcatgaggttttgttcccccccacaaaacaataaataaacacaaaggacagaaaagcagatactgagaaggtcaaatacatcactaaagacagaatatgtaaatattcttagcctaatgtgcagatttcctttaggatcccctgttagcttgtggaatagctggtagagttgacattgaacaggagttctggaggtgattactatcatgagcatgggatacaatgaggcatattgtggagcaagctattctagtccagaagaatttcctgatggaattatatgaaaaatcagacctgaatgatgaattaatgttgcaag

SEQ ID NO: 184827 - DNA, 592 bp, Homo sapiens
ttccctttagtcttcctctgggaaaggcagaagggcagaaattttaagtcaaacatttttatcaacaacatttatacagaaagtgcatcaaatgacttcccccacctttcccatgaattagggtgaaactgtttggggcattttatcccttcaaagaaccaggcccactattgtctactaagaacctttggaattcacagctttgcagaagagattagcttaaaagaaaacattaatatctggctttacagagactttcagctttgctttaagtcatgaggttttgttcccccccacaaaacaataaataaacacaaaggacagaaaagcagatactgagaaggtcaaatrcatcactaaagacagaatatgtaaatattcttagcctaatgtgcagatttcctttaggatcccctgttagcttgtggaatagctggtagagttgacattgaacaggagttctggaggtgattactatcatgagcatgggatacaatgaggcatattgtggagcaagctattctagtccagaagaatttcctgatggaattatatgaaaaatcagacctgaatgatgaattaatgttgcaag

SEQ ID NO: 184828 - DNA, 592 bp, Homo sapiens
ttccctttagtcttcctctgggaaaggcagaagggcagaaattttaagtcaaacatttttatcaacaacatttatacagaaagtgcatcaaatgacttcccccacctttcccatgaattagggtgaaactgtttggggcattttatcccttcaaagaaccaggcccactattgtctactaagaacctttggaattcacagctttgcagaagagattagcttaaaagaaaacattaatatctggctttacagagactttcagctttgctttaagtcatgaggttttgttcccccccacaaaacaataaataaacacaaaggacagaaaagcagatactgagaaggtcaaatacatcactaaagacagaatatgtaaatattcttagcctaatgtgcakatttcctttaggatcccctgttagcttgtggaatagctggtagagttgacattgaacaggagttctggaggtgattactatcatgagcatgggatacaatgaggcatattgtggagcaagctattctagtccagaagaatttcctgatggaattatatgaaaaatcagacctgaatgatgaattaatgttgcaag

SEQ ID NO: 184829 - DNA, 592 bp, Homo sapiens
ttccctttagtcttcctctgggaaaggcagaagggcagaaattttaagtcaaacatttttatcaacaacatttatacagaaagtgcatcaaatgacttcccccacctttcccatgaattagggtgaaactgtttggggcattttatcccttcaaagaaccaggcccactattgtctactaagaacctttggaattcacagctttgcagaagagattagcttaaaagaaaacattaatatctggctttacagagactttcagctttgctttaagtcatgaggttttgttcccccccacaaaacaataaataaacacaaaggacagaaaagcagatactgagaaggtcaaatacatcactaaagacagaatatgtaaatattcttagcctaatgtgcagatttcctttaggatcccctgttagcttgtggaatagctggtagagttgacattgaacaggagttctggaggtgattastatcatgagcatgggatacaatgaggcatattgtggagcaagctattctagtccagaagaatttcctgatggaattatatgaaaaatcagacctgaatgatgaattaatgttgcaag

SEQ ID NO: 184830 - DNA, 644 bp, Homo sapiens
aagggaggagtattttaagaaggaagtaggggtcaacagtgtcaaatgctctggagagatcaagcaagatggaactgaagaatgaatataaagccctgtaaggctttggctgttggcctgagagaacaattttggaagagtaataagggcagacatgaaataggactgggctgcaaagctgagtgagcagtaagaaatgagagaacgagtgcagctaactcctttgagaatttggactgtgagaggaaacagactaagaattgaagggaggcatggatagagggagaaattcatttttaaaggtgggagacatttgaacataaataaatgcaaattagaaataataagttgtgaggcaaaaatgcagttacagaagagagggaataattgacagtgcaagttctctaagaagactggagatgttgggatctagggcagatgtgtggaaggcaggcttggataggagagatggcccttctagtgctgcagaggaatggaagacarcatggatgcagatacttgcttgttgcatgaattttagagtatgcaaatgagtgggtttttttgtctgatggcttttatcttctctgaaaagtaggaggcaaggacatttgctggcaatgtgagaggggtgaaggtttatg

SEQ ID NO: 184831 - DNA, 511 bp, Homo sapiens
tttttaactggcagctgaatttaaaattccttttaggattgcttttatatgcaattttagtaaaagggcttgacagtcctacacatcttttggacttctatgatgactgtgcctgatattagaaggtctgagagagtacacacttagaatagggacatagtgaaaagatggactaggaacaaggcgtgaaggtgactggtgcagtggaaaggagaaagtggtgaaattgcaaatggtaggtactgataatkgttgtgactcttgtaggggcccaagagtccatttttattaatgctaatgtagattataacagtaataatgaccacttattaaggacatactgtgtgccaggcaccatgcaaattgttcattcttccatgtaattctcaaaacaatcctatgtgataatatccttattcttgtgttttttctaaaaaactgtcataaaatatacgtaacataatatatacaattttattcattttaagtggcattcttatgtacattaaca

SEQ ID NO: 184832 - DNA, 511 bp, Homo sapiens
tttttaactggcagctgaatttaaaattccttttaggattgcttttatatgcaattttagtaaaagggcttgacagtcctacacatcttttggacttctatgatgactgtgcctgatattagaaggtctgagagagtacacacttagaatagggacatagtgaaaagatggactaggaacaaggcgtgaaggtgactggtgcagtggaaaggagaaagtggtgaaattgcaaatggtaggtactgataatggttgtgactcttgtaggggcccaagagtccatttttattaatgctaatgtagattataacagtaataatgaccacttattaaggacatactgtgtgccaggcaccatgcaaattgttcattcttccatgtaattctcaaaacaatcctatgtgataatatccttattcttgtgttttttctaaaaaactgtcataaaatatacrtaacataatatatacaattttattcattttaagtggcattcttatgtacattaaca

SEQ ID NO: 184833 - DNA, 511 bp, Homo sapiens
tttttaactggcagctgaatttaaaattccttttaggattgcttttatatgcaattttagtaaaagggcttgacagtcctacacatcttttggacttctatgatgactgtgcctgatattagaaggtctgagagagtacacacttagaatagggacatagtgaaaagatggactaggaacaaggcgtgaaggtgactggtgcagtggaaaggagaaagtggtgaaattgcaaatggtaggtactgataatggttgtgactcttgtaggggcccaagagtccatttttattaatgctaatgtagattataacagtaataatgaccacttattaaggacatactgtgtgccaggcaccatgcaaattgttcattcttccatgtaattctcaaaacaatcctatgtgataatatccttattcttgtgttttttctaaaaaactgtcataaaatatacgtaacataatatatrcaattttattcattttaagtggcattcttatgtacattaaca

SEQ ID NO: 184834 - DNA, 597 bp, Homo sapiens
cttactgcctgaggaaacagagagcttctcacagtaaacaaagatcaagcatatacccatctgtatcagatgcatctggcttttatccataagcactgtatactggcctggaggttgaactgtgtaacccaatagaaaatccactgacataagtgcgtagcactagggaatgagataaacttcctgagacctctgtcatgctgggcccacaggaggcagtgagcccactcacatgcccagtatatcactgctacaaccagcgtttgggaatgccaccatacaaaggctatctataaccaaggaatttatagagtcttggccactgaaaacatccagaaccaaagcctagggaccatacatcatacacattatagtcacatcccaagtgggaaaatcccatccaaatgaaagtaattttttttttttttttacaaaaggagagatggcttatccagatgaaaargaaccagacaaacaattctagaagtatgaaaaaaagttacaacaccccaaaaggatcatactaactctccagcagtggattctaacaaaattgaaatcttaaaaatatcaaataaagaattaaaaatattgatt

SEQ ID NO: 184835 - DNA, 581 bp, Homo sapiens
tattaacttaatcgtatctagataaatgcatagataaatgcatcgtagggaaattatgaaaagtgaaattaaagcttcatgaacatagatcatcctaaattcaaagtaaccacaaactccggttgtgtaatcactatggacatacatcgttaaaaagataattagtttccctgtatccatgtatgtcatcactgcaattacagtgtagtgtaatcattgcctttattccaaataatgtaaagccttttatattaaaatgattgaagtttgtgtatttttatcacaatgttggtcccttttttttaaaaaaaagcaaaataaaatacatccatctctaataaacaaatggatctagtcctcatcttgttcactatactatatatattttacatatgggcaataatataattttacttaattrctgtatttagcttgaaaatagcatttgacaaaatatttaaaaagtttgtagatttccttataaatatataaagacatttttactgttatagagaaatggcatatttctaagaaataggaatacattatctaataattatataataacatttcaactgagt

SEQ ID NO: 184836 - DNA, 520 bp, Homo sapiens
tatgaaattactgatattcaaaaaatccacaaatattaaattaaatttagtcaatctaaataagttttcagcacagttttaactttagctggattaaactttgtgataatcctgtattgcattcctctaaataatttttcagttttaaaataatcaaagccagtatgagtgacttttagaatttggctgctccacattaaaaagaaaatttgaccctgtagccctgtgaaatgattttttggggaagatagacatgtctttctatgccatgatgcttcctgaaaaagaattagacttgataaaatttctcyttgctcacagctactaccacctatttcttcttgggctatgattctttagttttgtctccatgtattgggagagttgaataactaatcgtagtgtaaatgtaacaggagaacaaaagtacactagatattttcaaccaagagattccaataaaaggaaactgttaaatagatgttggagaactgaaaagaaaacctaaaaatgaacacta

SEQ ID NO: 184837 - DNA, 389 bp, Homo sapiens
cttcttctctagcagcattcatggcaggagctttacatcccctgacaacctttcttttcttgagaaagggccaggacrggtcacataggtgtgtgtttagggctaacttccctctagggcagctatggttatcttcctcctactcttcttcctcctctaaatggcagcatgggtgtatagcctgagacatgcattgaagataagtcctatctgcccactaggactgcaagtgcagtccactttctctccactagctaacaagccataggggagttccaggaaagcatagcaggaaattaatatgaccatttatcataatccactttgcctcatgaaataaaaatttttcaagtgaatgaaggaaccaaattttcatttataatgataat

SEQ ID NO: 184838 - DNA, 567 bp, Homo sapiens
ttgggctccttttcaagggcagctatcacgccgcctctggtccctgaactttcatcactcttcgggaagcgctttgtctttttaaaggagattggggacgaatattaatgactgtagccgagaatctatcaaatccgcccaattccatgccagggatagactcaggtccttgcaccgaaggcgagcccctgacactagctcgcgttcttcacacacsgtcaccccgcagacccagagatttctcccacttccccaaatctgcaggagaaaccataggagggggtcacgaggcaccatcctggagcccagcttctcctctgccccagtcctccgcatacaacctgcttcaaaagcccaggagaaaagcagtcaccttgactctagcgcctcggtccttaggggtttggaaaacgccaggaagcccaaggctacccggcacgcgctcgcctggcctgagacccaccctggaagacgagtttccctcccgcgggcatcgtggcaagttaccacttagtggcagataaagcagggcggggcaggtggagcgggcgccgagcgcctagcccg

SEQ ID NO: 184839 - DNA, 582 bp, Homo sapiens
atgacccagtttctccatctttctatcaccaaccctgctaccacttactaaaacacattgggacaatcatgtaatttctctgggctttaattttgtcactggattaatcaaggttctccagagaaacagaaccagtagtatatatatagagagaaagagatttattttagagaaattgtctcatatgattgtgagagctggcaagttcaatatatgtagggcaaactggaagcctggaacatgagataagaattgttcttgcagtcttgagttcaaaatctgcagagcaggccagcaggccaggaactcaggaaggacttctatgctgcagttttgaggcagaattgctgctgcttcagatagctttagtctttgttcttaaggccttcaactgatttaatraggcctacccacattataacaggtaatgcactttactcaaagttaaatgattataaatgttaatcacattgacaaacatcttcacagcaacatctacactagtgtttgaccaagcaattgggcatcacagcctagccaagttgacatataaaataaaccatcacacccacttgcaaatta

SEQ ID NO: 184840 - DNA, 586 bp, Homo sapiens
aacttcagtatccagcattaaaggctttccaaggcaaaatacattgtgcaatattaatttttcaagttaaaaattggaggtatttgaaaaccattgcttccccaaacaggaaggaaaaccactgtttgggtggtaaaatgtgctaattctgtacaaaatgcctttaagcccttgacctaatgaggttagtgacagggatatggatgactagaacagaaaatgaaactcagaaagaattttgttcatgaactgccatatttctcctgtcatttagccaattttccctctcaaaattacaacatggactgcaaatcttcaaggctaatgctgcatatgacagactaagtgctatttaaaatgtaataatatatctgtcaatctgataggaaaaaacaagaggccacrcgaaggacttttcaggtagacatgggtcctaaaaggttataaagacggtaatcaggaaagcaagccaccacacagcttttcccgtccaattagtaaaagtgcagtattgtcagcgagttctacaaatgaaagaatcctttcagcctgagcactcaatggcgtatacccactctattaagtg

SEQ ID NO: 184841 - DNA, 493 bp, Homo sapiens
tggttttataaggcagttttccctgctcttgcatgctctctctctcgcctgctgccatgtaagatatgtctgcttccccttccaccatgattctaagtttcctaaggcttccccagccatgcagaactgtcagycaattaaacctcctttgtttataaattagccagtctcagttagtatctttatagcagtgtgagaacggactaacacatcatctaatcataaggtcaatatagggtgttggatgtaactcaactctcagaactagaatgaaaagaggtgctgctttgggcagagaccctgagcagtcagatgtgtcaacattctaacagcaaatgaataaatggaaaactctagaaagcaaacaaaagttctcaaaaactacagcagcctagaataaattagtcaatccctctatttgttcccatgatactctctacacataccccattattactgaaggtctcattacaccattacatttcttcaaagg

SEQ ID NO: 184842 - DNA, 555 bp, Homo sapiens
ttttataaggcagttttccctgctcttgcatgctctctctctcgcctgctgccatgtaagatatgtctgcttccccttccaccatgattctaagtttcctaaggcttccccagccatgcagaactgtcagtcaattaaacctcctttgtttataaattagccagtctcagttagtatctttatagcagtgtgagaacggactaacacatcatctaatcataaggtcaatatagggtsttggatgtaactcaactctcagaactagaatgaaaagaggtgctgctttgggcagagaccctgagcagtcagatgtgtcaacattctaacagcaaatgaataaatggaaaactctagaaagcaaacaaaagttctcaaaaactacagcagcctagaataaattagtcaatccctctatttgttcccatgatactctctacacataccccattattactgaaggtctcattacaccattacatttcttcaaaggtttctgactcaccctgggaagtgacgacctgatcacagcccactacgatttccgaggcaagccaa

SEQ ID NO: 184843 - DNA, 556 bp, Homo sapiens
gttttataaggcagttttccctgctcttgcatgctctctctctcgcctgctgccatgtaagatatgtctgcttccccttccaccatgattctaagtttcctaaggcttccccagccatgcagaactgtcagtcaattaaacctcctttgtttataaattagccagtctcagttagtatctttatagcagtgtgagaacggactaacacatcatctaatcataaggtcaatatagggtgttggatgtaactcaactctcagaactagaatgaaaagaggtgctgctttgggcagagaccctgagcagtcagatgtgtcaacattctaacagcaaatgaataaatggaaaactctagaaagcaaacraaagttctcaaaaactacagcagcctagaataaattagtcaatccctctatttgttcccatgatactctctacacataccccattattactgaaggtctcattacaccattacatttcttcaaaggtttctgactcaccctgggaagtgacgacctgatcacagcccactacgatttccgaggcaagccaa

SEQ ID NO: 184844 - DNA, 413 bp, Homo sapiens
gaattccaactctgacacaacactcatagcttagatttagtcagaatcaacttaccaagcctcaaaatgttccacagaagcttttgtttttattaatctattaagactttacaaagtttccttctctttggttagaaatgaaaaaagtgggttaatctcatgtcttgtttcaaccgggaagccatgacttaaggagagcagcctatctgccacagatgataccaaaaattaaggatactcaaaaacactggtcccaaatcaatggcatgtccacagcctttgttccctgaagatctgcagctcataaacatccaggggaggccaggtctcctctctgtccttcctagttgcagatactgatacagcagaaggcaaagttagracatgtatggattagattgttctgatctcag

SEQ ID NO: 184845 - DNA, 498 bp, Homo sapiens
tgtgaagatatttccattttcaccttaggccacaaagtgctccaaatatccatttgcagattatacaaaaagactgtttccaaactgctcaatcaaaagacattttcaactctgtgagatgaaagcacacatcacaaagaagtttctcagaaatcttctgcctwttttttatttcaagataattcctatttcaccataggaatcaatgggctcacaaatatccctttgcagattctacaaaagttctgtttccaaactgctcaatcaaaagaaacgttcaacattgtaagatgaatgcacacatcacaaagaagtttctcagaatgcttctgtctagttattatgtgaagatatttcctttttcaccatagtctttaaaccgctcaaaaatatccctctgcagatactataaaaagactgtttccaaactggtccatcaaagaatgtttcaactctgtgagatgaatggactcatcacaaagaagtttctcagaattc

SEQ ID NO: 184846 - DNA, 634 bp, Homo sapiens
taggatctgcaaagggatatttttgagcactttgaggcccatggtgaaaaaggaaacacactcacataaaaacaagatagaagatttctgagaaacatctttttgatatatacattcattgcatagagatgaaactttcttttgatgagcagtttggagacagtattttgtagaatttccaaagtgttattagttagcgctttgtgtcctgtgttgaaaaaggaattatctttacataaatactagacagaatatttctgagaaactgctttgtgatgtgtgctttcatcccacagaggtaactatttcccttcattgagcagattggaaattctgttcttgtaaaatctgcaaaaggatatttgtcagcgctttgaggtttatggtgaaaaaggaattatcttcacgtaaaaactagacagaagctttctgtgaaacatcttggagatgcgagaattcatctcacagagttgaaacattcttttgattgagcagtttgtaaacagtactttggtaggtagaatctgcaaagggatatttgtgatgctttgaarcctatggtggaaaaggaaatattttcacaggaaaactagagagaagctttctgagaaacctccttgtgatgtgtgcattc

SEQ ID NO: 184847 - DNA, 440 bp, Homo sapiens
gaattctgctacctaaagataaccattgttaccatgtaggcaagcttcctttcatgctgagtcaagtgtttaaaaaatatggctcaatattacaaacacacaggactgcgtagaggataatggtattaaactttcttgtacctcccagttaaaattcaaatgtggtaacatttggatgcatttgctccagagtttaagggaagaaaacattacggattcagccataatattcaagctgaagctcaagttatatgccccttttccagtccagttaccaccaccctcccactattctgaagtcaatgtgtgtcttcccatccatgtttaatacctagtgtgcatgtccatgaagaatggatagtatttttttggtctgtttttgcaattttatacaaatarctgtccatacatactctcctgaaagttgcttttcccttcaa

SEQ ID NO: 184848 - DNA, 440 bp, Homo sapiens
gaattctgctacctaaagataaccattgttaccatgtaggcaagcttcctttcatgctgagtcaagtgtttaaaaaatatggctcaatattacaaacacacaggactgcgtagaggataatggtattaaactttcttgtacctcccagttaaaattcaaatgtggtaacatttggatgcatttgctccagagtttaagggaagaaaacattacggattcagccataatattcaagctgaagctcaagttatatgccccttttccagtccagttaccaccaccctcccactattctgaagtcaatgtgtgtcttcccatccatgtttaatacctagtgtgcatgtccatgaagaatggatagtatttttttggtctgtttttgcaattttatacaaataacwgtccatacatactctcctgaaagttgcttttcccttcaa

SEQ ID NO: 184849 - DNA, 452 bp, Homo sapiens
gcttttcccttcaacaatatcttccagatgaatccagaattctgcatttctggtgagcagaggatgcgtgcctccccctgcaaccaccaccccaagatgatgctgatgttctggtccaaagcctgcacgtagcctggtgagacttggggtcttgggacaggtctgttgtcagcccttccyaggaagcacagccagatgaccttggggctggaatcctcacaatgcccctcgccagcagtgctcacaaccatcttcactcattttcatcaatatttgttatcgcactttttgatattgttcctggaatttgcagtgcagctgaacgtgtgccttgtgtttcccagcccttcgggtctccttctctgtgaattgctcctggtccataagtctgttggatctttggtttctccttgctgacttgtaagtactattttttttttagacggagtttt

SEQ ID NO: 184850 - DNA, 452 bp, Homo sapiens
gcttttcccttcaacaatatcttccagatgaatccagaattctgcatttctggtgagcagaggatgcgtgcctccccctgcaaccaccaccccaagatgatgctgatgttctggtccaaagcctgcacgtagcctggtgagacttggggtcttgggacaggtctgttgtcagcccttcctaggaagcacagccagatgaccttggggctggartcctcacaatgcccctcgccagcagtgctcacaaccatcttcactcattttcatcaatatttgttatcgcactttttgatattgttcctggaatttgcagtgcagctgaacgtgtgccttgtgtttcccagcccttcgggtctccttctctgtgaattgctcctggtccataagtctgttggatctttggtttctccttgctgacttgtaagtactattttttttttagacggagtttt

SEQ ID NO: 184851 - DNA, 452 bp, Homo sapiens
gcttttcccttcaacaatatcttccagatgaatccagaattctgcatttctggtgagcagaggatgcgtgcctccccctgcaaccaccaccccaagatgatgctgatgttctggtccaaagcctgcacgtagcctggtgagacttggggtcttgggacaggtctgttgtcagcccttcctaggaagcacagccagatgaccttggggctggaatcctcacaatgcccctcgccagcagtgctcacawccatcttcactcattttcatcaatatttgttatcgcactttttgatattgttcctggaatttgcagtgcagctgaacgtgtgccttgtgtttcccagcccttcgggtctccttctctgtgaattgctcctggtccataagtctgttggatctttggtttctccttgctgacttgtaagtactattttttttttagacggagtttt

SEQ ID NO: 184852 - DNA, 605 bp, Homo sapiens
acttattcactaccaggagaacagaatgggggaacggcccccatgattccaattatctcccactaggtccctcccaggacacaggagaattatgggaagacaattcaagatgagatttaggtggggacacacagccaaatcatatcatgcactgtctttgtcttttaactttattcatcgcctcttttgtcagatcaaagcttctacatttaatacaactgaatgaatttatcagtaatttattttacggtgtctgtgttttgtgtcatataaaatttttctctctgcttagtgtcataaaatatgtcctctgttttcttctaaaaattggaaatctrcttttcatattttatttcctttgttattttatttgtagggatgtgaggtagaaatctctattaattaactctagctttgtaacaagtaatcccacacctcagaggcctatgaccataggccaccatttctcactcatgagcatgggttgcttgggaggtttcagttcgaaatgtggtggttgagctgcatctgctccaagtgtctctgatcctcctggggtcggggcctgccagggtgccttcttctcatggcaatggcaggagtgc

SEQ ID NO: 184853 - DNA, 605 bp, Homo sapiens
acttattcactaccaggagaacagaatgggggaacggcccccatgattccaattatctcccactaggtccctcccaggacacaggagaattatgggaagacaattcaagatgagatttaggtggggacacacagccaaatcatatcatgcactgtctttgtcttttaactttattcatcgcctcttttgtcagatcaaagcttctacatttaatacaactgaatgaatttatcagtaatttattttacggtgtctgtgttttgtgtcatataaaatttttctctctgcttagtgtcataaaatatgtcctctgttttcttctaaaaattggaaatctacttttcatattttatttcctttgttatttkatttgtagggatgtgaggtagaaatctctattaattaactctagctttgtaacaagtaatcccacacctcagaggcctatgaccataggccaccatttctcactcatgagcatgggttgcttgggaggtttcagttcgaaatgtggtggttgagctgcatctgctccaagtgtctctgatcctcctggggtcggggcctgccagggtgccttcttctcatggcaatggcaggagtgc

SEQ ID NO: 184854 - DNA, 547 bp, Homo sapiens
agaattatgggaagacaattcaagatgagatttaggtggggacacacagccaaatcatatcatgcactgtctttgtcttttaactttattcatcgcctcttttgtcagatcaaagcttctacatttaatacaactgaatgaatttatcagtaatttattttacggtgtctgtgttttgtgtcatataaaatttttctctctgcttagtgtcataaaatatgtcctctgttttcttctaaaaattggaaatctacttttcatattttatttcctttgttattttatttgtagggatgtgaggtagaaatctctattaattaactctagctttgtaacaagtaatcccacacctcagaggcctaygaccataggccaccatttctcactcatgagcatgggttgcttgggaggtttcagttcgaaatgtggtggttgagctgcatctgctccaagtgtctctgatcctcctggggtcggggcctgccagggtgccttcttctcatggcaatggcaggagtgcaaagaacaaagggaaatgtgaagatct

SEQ ID NO: 184855 - DNA, 529 bp, Homo sapiens
gacaattcaagatgagatttaggtggggacacacagccaaatcatatcatgcactgtctttgtcttttaactttattcatcgcctcttttgtcagatcaaagcttctacatttaatacaactgaatgaatttatcagtaatttattttacggtgtctgtgttttgtgtcatataaaatttttctctctgcttagtgtcataaaatatgtcctctgttttcttctaaaaattggaaatctacttttcatattttatttcctttgttattttatttgtagggatgtgaggtagaaatctctattaattaactctagctttgtaacaagtaatcccacacctcagaggcctatgaccataggccaccatttctcactcatgagcatgggttgcttgggaggtttcagytcgaaatgtggtggttgagctgcatctgctccaagtgtctctgatcctcctggggtcggggcctgccagggtgccttcttctcatggcaatggcaggagtgcaaagaacaaagggaaatgtgaa

SEQ ID NO: 184856 - DNA, 533 bp, Homo sapiens
tctccagaattctacagaaactggaagtttctctctgggttcacacacgatttcagggagaaaccaccctggaagggtggagtgtggaactgaacctccatgatagtcttgattttccaggccctctccgtgaagccggcaatgcctgtgggtgtcgccgttgccgtgatagtcacacacgcaggtgtgtggatctcattcatttttttattttcattttttatttctacctcttaaagtcaatgataaagtcatgagtgtaaaatgaatgcatttaaaaacataaaagatacatttcaatgacaagaaatatgcaatgatcatgaaaatctactgtacactttgccaaggtcaaagaatgaaagamaatatggaaaagccaatcctcaaatatatccttaacaaaaactgtctcctacatagtaaaagcatcatctaaacagcggctccaaccgagaaaaaaaatacaacaaaaaacaaaacaaaacaaaaaaacagcagggtagatgggacagataactttccccaggttt

SEQ ID NO: 184857 - DNA, 533 bp, Homo sapiens
tctccagaattctacagaaactggaagtttctctctgggttcacacacgatttcagggagaaaccaccctggaagggtggagtgtggaactgaacctccatgatagtcttgattttccaggccctctccgtgaagccggcaatgcctgtgggtgtcgccgttgccgtgatagtcacacacgcaggtgtgtggatctcattcatttttttattttcattttttatttctacctcttaaagtcaatgataaagtcatgagtgtaaaatgaatgcatttaaaaacataaaagatacatttcaatgacaagaaatatgcaatgatcatgaaaatctactgtacactttgccaaggtcaaagaatgaaagacaatatggaaaagccaatcctcaaatatatccttaacaaaaactstctcctacatagtaaaagcatcatctaaacagcggctccaaccgagaaaaaaaatacaacaaaaaacaaaacaaaacaaaaaaacagcagggtagatgggacagataactttccccaggttt

SEQ ID NO: 184858 - DNA, 533 bp, Homo sapiens
tctccagaattctacagaaactggaagtttctctctgggttcacacacgatttcagggagaaaccaccctggaagggtggagtgtggaactgaacctccatgatagtcttgattttccaggccctctccgtgaagccggcaatgcctgtgggtgtcgccgttgccgtgatagtcacacacgcaggtgtgtggatctcattcatttttttattttcattttttatttctacctcttaaagtcaatgataaagtcatgagtgtaaaatgaatgcatttaaaaacataaaagatacatttcaatgacaagaaatatgcaatgatcatgaaaatctactgtacactttgccaaggtcaaagaatgaaagacaatatggaaaagccaatcctcaaatatatccttaacaaaaactgtctcctacatagtaaaagcatcatctaaacagcrgctccaaccgagaaaaaaaatacaacaaaaaacaaaacaaaacaaaaaaacagcagggtagatgggacagataactttccccaggttt

SEQ ID NO: 184859 - DNA, 540 bp, Homo sapiens
agtttctctctgggttcacacacgatttcagggagaaaccaccctggaagggtggagtgtggaactgaacctccatgatagtcttgattttccaggccctctccgtgaagccggcaatgcctgtgggtgtcgccgttgccgtgatagtcacacacgcaggtgtgtggatctcattcatttttttattttcattttttatttctacctcttaaagtcaatgataaagtcatgagtgtaaaatgaatgcatttaaaaacataaaagatacatttcaatgacaagaaatatgcaatgatcatgaaaatctactgtacactttgccaaggtcaaagaatgaaagacaatatggaaaagccaatcctcaaatatatccttaacaaaaactgtctcctacatagtaaaagcatcatctaaacagcggctccaaccgagaaaaaaaatacaacaaaaaacaamacaaaacaaaaaaacagcagggtagatgggacagataactttccccaggttttccagataaaaacatgtggtcaccaggaattc

SEQ ID NO: 184860 - DNA, 580 bp, Homo sapiens
gttcgatctgctaaagtgcatccgctgaccagatctaccatggcgctgctacttagagccatctaagaaagtggcctcactcatgctcattcacctgttctgtggcctatcaagagtcacacataacaatggttttgctttttttaaaaaaaaacaaatactttatacagtgaactacagaaaaaacaattctaaatatacttttaaaattctagagagttaaggtaacctcattttttaaaatactgaaaatgtaaagggtccatataaagagttgtattaagtacatacttcctattttaataattcacttgctgtgctcttaaaatctctatgagagaagcagatattttactcgtgtcttttggcaagagattcaaaagcaaaagtagcagggctgtaaaatttcataaaatttgtgggatttttaaaagctaaattattcaatatttggkattgttattacactcatatattgcccggaatatatatacagaaacccagcaacagtgattgcaacaaaagtaaggtaaataggtctacaaagcatttgatttccttattagataagtgaagtttt

SEQ ID NO: 184861 - DNA, 494 bp, Homo sapiens
taacctcattttttaaaatactgaaaatgtaaagggtccatataaagagttgtattaagtacatacttcctattttaataattcacttgctgtgctcttaaaatctctatgagagaagcagatattttactcgtgtcttttggcaagagattcaaaagcaaaagtagcagggctgtaaaatttcataaaatttgtgggatttttaaaagctaaattattcaatatttgggattgttattrcactcatatattgcccggaatatatatacagaaacccagcaacagtgattgcaacaaaagtaaggtaaataggtctacaaagcatttgatttccttattagataagtgaagttttcatagaggaagtgcaaattcagatcaggttacataagcttaacaattattcaaaccttatataaaattaaatctaaccctcaccactacaaatctgtaaggaatcactgtcaggaatctacaggacttggctcatattt

SEQ ID NO: 184862 - DNA, 580 bp, Homo sapiens
gttcgatctgctaaagtgcatccgctgaccagatctaccatggcgctgctacttagagccatctaagaaagtggcctcactcatgctcattcacctgttctgtggcctatcaagagtcacacataacaatggttttgctttttttaaaaaaaaacaaatactttatacagtgaactacagaaaaaacaattctaaatatacttttaaaattctagagagttaaggtaacctcattttttaaaatactgaaaatgtaaagggtccatataaagagttgtattaagtacatacttcctattttaataattcacttgctgtgctcttaaaatctctatgagagaagcagatattttactcgtgtcttttggcaagagattcaaaagcaaaagtagcagggctgtaaaatttcataaaatttgtgggatttttaaaagctaaattattcaatatttgggattgttattacactcatatattgcccrgaatatatatacagaaacccagcaacagtgattgcaacaaaagtaaggtaaataggtctacaaagcatttgatttccttattagataagtgaagtttt

SEQ ID NO: 184863 - DNA, 581 bp, Homo sapiens
ctcattttttaaaatactgaaaatgtaaagggtccatataaagagttgtattaagtacatacttcctattttaataattcacttgctgtgctcttaaaatctctatgagagaagcagatattttactcgtgtcttttggcaagagattcaaaagcaaaagtagcagggctgtaaaatttcataaaatttgtgggatttttaaaagctaaattattcaatatttgggattgttattacactcatatattgcccggaatatatatacagmaacccagcaacagtgattgcaacaaaagtaaggtaaataggtctacaaagcatttgatttccttattagataagtgaagttttcatagaggaagtgcaaattcagatcaggttacataagcttaacaattattcaaaccttatataaaattaaatctaaccctcaccactacaaatctgtaaggaatcactgtcaggaatctacaggacttggctcatatttacattcgacgcacacttagaaatttcataaatgatgagattcaggccaaggggattcctcaaagggctccacccaaaaggaaaagaaagag

SEQ ID NO: 184864 - DNA, 621 bp, Homo sapiens
ttaaaatactgaaaatgtaaagggtccatataaagagttgtattaagtacatacttcctattttaataattcacttgctgtgctcttaaaatctctatgagagaagcagatattttactcgtgtcttttggcaagagattcaaaagcaaaagtagcagggctgtaaaatttcataaaatttgtgggatttttaaaagctaaattattcaatatttgggattgttattacactcatatattgcccggaatatatatacagaaacccagcaacagtgattgcaacaaaagtaaggtaaataggtctacaaagcatttgatttccttattagataagtgaagttttcatagaggaagtgcaaattcagatcaggttacataagcttaacaattattcaaaccttatataaaattaaatctaaccctcaccactacaaatctgtaaggaatcactgtcaggaatctacaggacttggctcatatttacattcgacgcacacttagaaatttcataaatgatgagatkcaggccaaggggattcctcaaagggctccacccaaaaggaaaagaaagagagttaaacagagaattaccacttacgtatttgtgggtaatcagcttat

SEQ ID NO: 184865 - DNA, 470 bp, Homo sapiens
ccgcgtgccggggcacattgagagattccttctgcctgcgcagcctggctaggctggagcggtgggacggcccttgctccctggctcacgaaagccccctgtgggagagccccaggcatgcagggtgtgtggggtgcggcaagccctgttcccyatgccccggtgtgggtgaactcgattgaggagggaggaggatgacatccgccgggggtgttaattagtaagcacagtggcctcaaagagctcaaatgaaaggaagaattgcacgtctctcacttgaagtccagagctagaaatgattaagcatagtgaagatgtaaaattttcatcgctagagagatgtccacacttggcttcaaaacttcaaaggatgggctgactctctttaaggaccactgcagttggtgactttaagttacagccagtgctcattgaccactctgaaaatctcagggccgttaagaattatg

SEQ ID NO: 184866 - DNA, 469 bp, Homo sapiens
gaattctgagaaacttctttgtgatgtgtgcgttcatctcacagagttgaacctttcttttgattgagcagtttgcaaacacaatttttgtagattctgcaagtggacatttggagtgctttgcggcctatggtagaaaaggaaatatcctcacataaaacctagacagaagcaatgtgagaaacttctttttgatttgtgcattcatctcacagagttaaacatttcttttgattgagcagttttgaaacactccttttgtggaatctgcaagtggacatttggagggctttgaggcctatggtagaaaaggaaatatcttcacataaawtctagacagaagcaatctgagaaacatctttgtgatgtatgcattcatctcacagagttaaacccttctttgattgagcagttttgaaaatctttttttatagaatctgcaagaggacattttgagggctttgaggcc

SEQ ID NO: 184867 - DNA, 418 bp, Homo sapiens
  misc_feature (1)...(418): n = A,T,C or G
gaggggccgtgtggagcacangccctgatattacaggaagacaatgtcccatctgctctcctgtcctagctaagcctcaccccakatggctcacaactgaatgcagccacaggaattaacactgaaggactagctgaagcactactcacctgagcccagtatggattgcagaattgtcacaaacggtagttatttgtgacaatattgcacagttctgtgaaggcacaaagtaataataaaaatttatttattattatgtttgattcctttatgtcatagaaggaacctgataaacagagaggttaggtgacttgttcagagttccatagcatcttcccattcaacatacaacctagcctcagttttctagtgtaaaaggggagagaggaatggaatagaatgtaggaggaaaatagaa

SEQ ID NO: 184868 - DNA, 591 bp, Homo sapiens
accatgtatcactgacctcaacttaaccttatggccacatcagcaataatggagggctggatcctacacttccgataaaaataaaaaatatattgactcaattggcatttattgcacaaacgttgtgtgatcgagactttcagcagttacttcatttaatattctctgactagatatcatcagcttggtagctgggggtcaccaagccactgcagaggttaartaaccttcaaggtctcaacatctcctttattcagacagaactaattccaagtctgtttaattccaaaactactgttcttcctggtatattattattttgtttctttattaaattcctaaagattaaactttaaaacttcaaagcatttacttccaagacttctgaatttttaaaataattcttagtgaaataaagaatctctgttatgcctccaaatacaggtttagtagaaaatattgtcaggtagttttagaataagttctgtctctggacttctgggactagttaagtaaataaccagtatttataatgctccatttgttcccatgtaaattatgacaacaatagtcattgtttttcaaacgttt

SEQ ID NO: 184869 - DNA, 542 bp, Homo sapiens
taggcccaatctcctgtatgtgtgtatgagtgtgttttgtatgtgtgtgtgtaaagccctaaaagcttagaaatgagatgtaatatagcttttctcttccatataccaatatctaggttttttctattattgtaccagaggtaggtgggcaactcaaattcttgacatccaaccatcaagaatcttaggcaataagaaaagatttatttcaaatgtgtttatattttartatggagacaaaggaggtgatcaaagtctagagacatagatgcggaaaaaacagaaatagggaggaaatatccaaagggaagaaaataaaagaatatgagaaccagggtattagtttgttctcatgctgctataaagaaatacctgagactgggtaatttacaaagaaaagaggattaattggttcacagttctgcatgactggggaggccttaggaaacttacaatcatggaagaaggcacctcttcacagggtggcaggagagagaatgagtgctgagcaaagggaaaaaagcccattataaaaccatcag

SEQ ID NO: 184870 - DNA, 542 bp, Homo sapiens
taggcccaatctcctgtatgtgtgtatgagtgtgttttgtatgtgtgtgtgtaaagccctaaaagcttagaaatgagatgtaatatagcttttctcttccatataccaatatctaggttttttctattattgtaccagaggtaggtgggcaactcaaattcttgacatccaaccatcaagaatcttaggcaataagaaaagatttatttcaaatgtgtttatattttagtatggagacaaaggaggtgatcaaagtctagagacatagatgcggaaaaaacagaaatagggaggaaatatccaaagggaagaaaataaaagaatatgagaaccagggtattagtttgttctcatgctgctataaagraatacctgagactgggtaatttacaaagaaaagaggattaattggttcacagttctgcatgactggggaggccttaggaaacttacaatcatggaagaaggcacctcttcacagggtggcaggagagagaatgagtgctgagcaaagggaaaaaagcccattataaaaccatcag

SEQ ID NO: 184871 - DNA, 541 bp, Homo sapiens
tggagaaaatactgttgaactgaaatacagatcaaaagaaaatatcctgactaaagcacagaaagacaatrgattagaaatgtcagggaagagcattagaggcatatggaatgccaagatgtcttaacatatgtgtaattggaattacagaagaaagggagggaggggagagagaaagaggcagagagagagaagaaatatttattatttgaaggaataatgtcagaaaaatttccaaatgaatgaaagacatgaagcaacaggttcaagaggtgatgtgatcccaacacagaataaatacagagagaccacgtacagatacatgataataatactgctgaatacaaaagactaagataaaaatgttaaaaatgtttaaggaagtcagaaaatattataatacctttaaaggagcaacaataaggcttatcaaaagaaatgatgcaagacagaccacaatgcatattatcttcaaagtgccaaagatttctatgttcagcaaaagcagcattaaaaaagggcagagcagatatgaacttct

SEQ ID NO: 184872 - DNA, 617 bp, Homo sapiens
tccactcttgtcagttgtctagtttgattctgctgccactctcattgctgcctgtaaatccagtgacacctctggaacagaacattactggagmctgattgactacttgggtaaaataacagcccaagggggcttctgcttctaaaggaaggcatggcagtgtcgggctttaaagttttctcaggagggttcttatagggatagctgtaaatttctcactttcagaaatactaaaatgctactacttggcctaagttaaccttgttgtaccctggagttattggccttagaacaatatccaggtgtacccttgctgggttttcttagcaactttggagaagaataaaccctggattgagttgttaggcccagaaatattagttgccaaaagtacaattgctactatgtctcgatatttagcaaaattgtagctcattttaagggttgtggcagtctttttgaaggctgatgtgattaagaagtacttagctttcatcactgaatgccttcaaggaataggagtctacacctctactttctggactctgatcaaccaaagtacagaataaagttgatgatactctgtttctatccctttggaaataaaatggaattaa

SEQ ID NO: 184873 - DNA, 482 bp, Homo sapiens
aagtgtcctattgcttgactgctttattttactaatcccgaaaggataaagtaatttttgaaagtttacagagttagtaaagagctgggtctagtttttttgattaccagttcagcattcttcccttatcatactgcctcttagatttaccatatataatatacatacacacatatactatttatacaaatatatatgtatgttttcatatatatggkgtattcatcctcacactattgaagtatccatatattaacagtttctcattttgtttcttagcccacttagaaatataccttggaaagaaagtaaatatttgctagaactttcaaactatgtaggaaagcaaaacccacaaaaattctggttactctgggaagtgtatactgtctttttttttttttttttttcctaaaaagtgtctggaaagcagggtctccagcgagtttcatccaccaaattattgcaaaatttgacaaccc

SEQ ID NO: 184874 - DNA, 482 bp, Homo sapiens
aagtgtcctattgcttgactgctttattttactaatcccgaaaggataaagtaatttttgaaagtttacagagttagtaaagagctgggtctagtttttttgattaccagttcagcattcttcccttatcatactgcctcttagatttaccatatataatatacatacacacatatactatttatacaaatatatatgtatgttttcatatatatggggtattcatcctcacactattgaagtatccatatattaacagtttctcattttgtttcttagcccacttagaaatataccttggaaagaaagtaaatatttgctagaactttcaaactatgtaggaaagcaaaacccacaaaaattctggttactctgggaagtgtatactgtctttttttttttttttttttcctaraaagtgtctggaaagcagggtctccagcgagtttcatccaccaaattattgcaaaatttgacaaccc

SEQ ID NO: 184875 - DNA, 571 bp, Homo sapiens
tcagaattcagtgggagatgcagatgagtaaataggcaatcacaattcgttgtgatgactgctgacaaaggggaagacgcaggtgttacgagagcctctaactcaaataaggagtcaggagggagagggaggagtggctgttagtgttgtgttgtcctctaatcaaggttcacgggcaagactggaggaaggcaagagaagccacggagaccagttagagagctgtaggaataggtgattagaattacacattttaagccgcctcctcctccatctctaatgaatgaaaacatagccgtgatagggagcatgcctagagcatgatgggctgttcaagttgttataacaacccttctaaagatttgcttccatccgatatgaagtcttctgataaaatatgtaaaatgacaacacaggtcaaaatgatattgaggcattattttgcatacctggagggatcacatgcaaagcagcagagaaagtggaaacacgggtgtgttctttcctcatgcttcaraagcatgattcccacagaagaagttatacacttgagaggcacagagttacaggc

SEQ ID NO: 184876 - DNA, 586 bp, Homo sapiens
taagagaagtagtaagggtggcttctcccatcctggtgcttctgtgtttggtttatattacttaraatctaaattgtagtggttattacctcctgagaagaaaagtagtaactggagtccttgtcagtattttcctaccccagtgtgtatcagactgttttcagaagcatttcactctaaccttgaaagttgcctgtaaaatcacctgattctgaccctttttgttatcagcaaggatgccagggcccagagttaaagacaattaacagcccactgtggagttggcacctataatcacagattcccaggctggtgctggtgctgtttctgccacaacacacaggctcctaccaccaattactcacatatatgtgaatttcctccaaagccatgaaccttctgagctggaggagggcttgacaattagtctttgccccacagtctttatcatttcatgctttggctgtcacagtatagcctttcaggttaactgtcagaacctaacaacccagaaagggtagatgatggcaggcccttcctcacacgtgtgtgtgtgtgtgtgtgtgtgtgtgtgtgtgtgtgttct

SEQ ID NO: 184877 - DNA, 404 bp, Homo sapiens
gaattcttgaacaggagagattttctgtacttctagtgagagtggatctctgcttggtattggcayaggatcctgggcccacaagattttctgcctttctcaagggcaaaagattactgtttttacatgtccttcaagagcagtggatctctgcctgggccattagggcaggaaggtttgccatctctcccccagtggctttgctttgtacaagagaaaggtctgaggaagtgggcagtgtttcacgcctgtcagcccatcatttcatgcatgcctgtgtcactgaggggtctcttctcaccagtctcttgccccagtctttctcattagcatgcagttgaggcttgtggaaagtgattgtgaacctctgtcatgtcaagggacctatttaaactgatattgat

SEQ ID NO: 184878 - DNA, 539 bp, Homo sapiens
tagattctgggccaagatctattttcttgtggttcaaaattctggctctgtccaaatcagaaaggaagttaaattgttcctgtttgcaggtagcatgatcttatatacagaaaacgcctaaagactccacaaaaacacctgttagaactaatcaacaaatttagtaaagttgcaggatacaaaataaacaaactggaccttatctcactcttaactcaaaagatattaaagacttaaatgtaagaacttaaattactaaaagaaattattagacaaaaacattatagaaactctccaggatattggactgggcaaagatttctaaataccccayaagcacaagcaaccaaagcaaaaatggacaaatgggatcacatcaagttaaaaaaaagcttcttcacagcaaaggaaacaataaacaatcaacaatgtaaaaagataacccacagaatggaataaaatattagcaaactacctgtctgacaagggattaatagccagagaatataaggagctcaaactactatggggaaaaaaac

SEQ ID NO: 184879 - DNA, 376 bp, Homo sapiens
tggtggttcatgcctgtaatcccagcactttgggaggctgaggcaggcagatcacttgggatcaggagttcgataccagcctgggcaacatggtgaaaccccatatctacaaaaaattaactgggtgtggtggcacgcgcctgtagtcctagctactcaggaggctgaggtaggaggatagcttgagcccaggaggyggaggtcacagtaggccaagatcctgccaccgcattccagcttggcagacagagccagaccctgtctcagaacacagaagttgcttttgcctctgaggacatatgccaatgaaggaaaggtggattttattgtttttattctttcagggtctgcaagttcagaaattgaagtttatgtt

SEQ ID NO: 184880 - DNA, 451 bp, Homo sapiens
agttgcagctgggtggtggttcatgcctgtaatcccagcactttgggaggctgaggcaggcagatcacttgggatcaggagttcgataccagcctgggcaacatggtgaaaccccatatctacaaaaaattaactgggtgtggtggcacgcgcctgtagtcctagctactcaggaggctgaggtaggaggatagcttgagcccaggaggcggaggtcacagtaggccaagatcctgccaccgcattccagcttggcagacagagccagaccctgtctcagaacacagaagttgcttttgcctctgaggacmtatgccaatgaaggaaaggtggattttattgtttttattctttcagggtctgcaagttcagaaattgaagtttatgttctggcaaaggtggggagtctaataggaaaccttcctctataaggttaggacccaaaaggact

SEQ ID NO: 184881 - DNA, 523 bp, Homo sapiens
  misc_feature (1)...(523): n = A,T,C or G
nnccattttgccatttccagctgtacattaaatacatttacattgtggggcaatcatattgtttatattttcacttttctgcatattatgytttgacatcttaaattcttcttggctgggagagaatgcccctccggggctagctaatttgtagagatagcaaagagttaggctgggagcatgtctttgatatacagactaacctatccagggccagaactcttctatcaaggaaatatttattcctctgcttttatcattccaatgccaggtaccaggcaactagggaccacccctatagcttagagcctgctgaaattattcaacctaaccaatcctaaactgtgtaccctgctctgcctttcttgtggaaactccaataaaggcttggcccaggtcctccccaccctcctgcctctctgcctcctgactgaaaccgatgctttttcatgtggccctgagtggtccaccatgtctgtgttttcctgaacatctcctgtgtctcttcttgtggatgcacttg

SEQ ID NO: 184882 - DNA, 523 bp, Homo sapiens
  misc_feature (1)...(523): n = A,T,C or G
nnccattttgccatttccagctgtacattaaatacatttacattgtggggcaatcatattgtttatattttcacttttctgcatattatgctttgacatcttaaattcttcttggctgggagagaatgcccctccggggctagctaatttgtagagatagcaaagagttaggctgggagcatgtctttgatatacagactaacctatccagggccagaactcttctatcaaggaaatatttattcctctgcttttatcattccaatgccaggtaccaggcaactagggaccacccctatagcttagagcctgctgaaattattcaacctaaccaatcctaaactgtktaccctgctctgcctttcttgtggaaactccaataaaggcttggcccaggtcctccccaccctcctgcctctctgcctcctgactgaaaccgatgctttttcatgtggccctgagtggtccaccatgtctgtgttttcctgaacatctcctgtgtctcttcttgtggatgcacttg

SEQ ID NO: 184883 - DNA, 421 bp, Homo sapiens
tgcatgagatgatttgcctttctaaaagtaaatgtaaaacctataaactatgtgattatactttcccaagtttctaggaatcaacccaagtgcaattattataaacatgtaagaaatcatgtctaccattgaaaatataaaatttaaaaatatatatttgttcataacagaacctataatcagcaacttctttgttttccttgtcttactgttccttcttrtaattgttgacagacacgcattttaaaaagaatgaaagttcagtatttgtgggaaagaatttcagagttatttctagtaattcccttgctcccttaatgagccggtatgagattttttttaatgtgtagaagactttattttgttaacacttgctctaatctagcttcataaagtggaagttttctctctccactgatgc

SEQ ID NO: 184884 - DNA, 385 bp, Homo sapiens
cagtaggcatctttgggtgactaactcaatagccattcccagcccctctcccttccctgcttctattctagaagaggctggaaaaacccaacatcccctctgtaggccttttttggagttaagggatgacaatatgaccaaattctggctaaaaagacagagggaagtctatctggatgcttctagaaagccttttgctttcctgatggaagaaacaggcacaagagagagcaagctcaccagcactgtctctcctttgcccctggcttccatgtagacttgatgcctagacccgtgggacagtagytggcttcgtattgtgttggtccagctaagcagcatctgttacgcagaatcctcccatagttccaggttagcattggcc

SEQ ID NO: 184885 - DNA, 479 bp, Homo sapiens
agggtgttaatctgttttctgttaaggaactctaggctctatgtaaactgaaactgtatcaaaatgctgacactaaaattagaaatgggaagaagtagcttttaaaccacaaaattaacygggggtaactgacaagcaagattagacttgcacttaaaggaacaaacgtgatggtccagttgctacgtagcgacagcaaacttatcaactctcctactcagcaatctagcaacagggaacacagcaaactgctaaaccaaacacacacacacacacacacacacacacacacacacatatgtatgtattctgtccaaatgctggaagcaattaaaaggagtaatttgaacaagcaatgctgagcagcacagtaattaataggatactggcctcccaagatttatagggcccactctagtcttcctcttgtcacataccttaccacaggtgagacaccctcagggcactattcacccaga

SEQ ID NO: 184886 - DNA, 429 bp, Homo sapiens
ggagggattgcaaaggtagaaagtgggggtaagagagcacaactagcatggagagaagaaaaggaacattcggaggggaattgggagggagcagtaaggcaagattgtgtgaaaaaggaacaaacttcagcttggtaaaactatgaataactacatyttatttttattccttggaatctaggtgtagctttgtggggcagtaaagcaggattgtgtggaaagggggaaatttttcagcacgaatagctagattttgtttttacttagaatctaggcgttgctttgtaatgtgttggaggaagtatatttatttttaaactgcatgtaggctgtgcttttaagactgtgggggttgaaatgtgtattctttttaaatgatcactttagagtggctgttagaaacattggaattaccagaacaactaacca

SEQ ID NO: 184887 - DNA, 507 bp, Homo sapiens
ctaggtcccctctctccctgctaaactgcctgtatactactttggtggacactgcatttcacattgcttagcagtgtttattgctgtcttcttcagacatacccaaagaatctatgttattctctctattctaccactttatgttctggccctcatcatttttatttaaatttctataaaaaattattgctgatctccaagccttcattctcttcctttttkcaggacatttaacttcctaatgggactgcactccctttaataatcaccttggttgtaggacaggacttccagcggtcttgagttaatatatcatggtaattatgtagatggagggcgattccatgcacgattccacccttaatccaaaggaaccataagtgaatcactagaacttattattatcttcttgggaagaggaaagtgtgctatctgagggttcaaaccattactgcaaacagagttgaagtgtgaactgcccgctaaatagggtaatatatgctagtt

SEQ ID NO: 184888 - DNA, 507 bp, Homo sapiens
ctaggtcccctctctccctgctaaactgcctgtatactactttggtggacactgcatttcacattgcttagcagtgtttattgctgtcttcttcagacatacccaaagaatctatgttattctctctattctaccactttatgttctggccctcatcatttttatttaaatttctataaaaaattattgctgatctccaagccttcattctcttccttttttcaggacatttaacttcctaatgggactgcactccctttaataatcaccttggttgtaggacaggacttccagcggtcttgagttaatatatcatggtaattatgtagatggagggcgattccatgcacgattccacccttaatccaaaggaaccataagtgaatcactagaacttattattatcttcttgggaagaggaaagkgtgctatctgagggttcaaaccattactgcaaacagagttgaagtgtgaactgcccgctaaatagggtaatatatgctagtt

SEQ ID NO: 184889 - DNA, 556 bp, Homo sapiens
cgctaaatagggtaatatatgctagttactctaagaaaaacaccaagtctcagtggcttcacaccatagtcgtctatttcttgctcacctcatagttcagctttatgtcaggtgatccttctgagtacttttcctctaagcaatgactcagaaatttgggctgcttccatctggtggctctgcctcctctaggtagaaggcagaaatctttcctcaaagtcaccaggggagcaaagacagaaagtgcagaggatctttcagtgtttcacagttagtaataaagatgcctttcattggccagaaccctgcctcaacctaacagcaagggaggcaggcaaatgttctcttcctgtgtgcccaggaagaggaaatgtgacacattagcgtcttccagtctctgatacagctcacaaccttttcttcatcagcaagcagcatcttggtgcytaagtgaattcttgtagtttgatggcactgatggtgggtgaaggaagtataccaactaattgtcaataagtccacattagctataacatgagatgcaaactccctaaca

SEQ ID NO: 184890 - DNA, 527 bp, Homo sapiens
gtaagaaagcccagggctccctcccttgcggtcagcaggaagttcaaacagggaagtcccaggcatatgagggaaccttcatcccagctccattccctaaccacaataaaagccaagtcagtgcccttccccgctctctaaagccatttttatacgcactcacaagcctcccctgtcctccccagaaagcctcattytgtgagtagtaaacctttctcacccttcttggtgcatgtatgacatcagtttcaacaacagaaccaaactttgggtgggtgacaaagtccacagtgtctttggggtagccacaacaagcaccatctaagtgtgatccttattattaaggtgaactaggacttgagtcattattcctttcactgtttagtccagcatttttatttgtcaaggaaaaaccagtaaccagtattttatgacattacttatgtgaaagtggttgtaactctttgataatgactatgggaatagggctctaatttttctctgggagtatcacaagtcccttgccc

SEQ ID NO: 184891 - DNA, 464 bp, Homo sapiens
aaggcctgtttccctctgagtactcacttggcccaagggaaacatatcatccttgccataccccatagtgggagttcagactgactcactgctgccttctctttctgtgttattatggattgtggtctcccttcaraattttccagaaaaggggctcataagtctctatgttcatatatgcctcactctactgaggatacatgtcaggtttgctcaagaaccctgttgctgtattctgctctgacgacacagtgaggtgggctaaccaggttctgcatttctgcaagtgtacagtttaagaatgagaggccagtctcctttgttcactctccattctccttcagtgtttctcctgatcaccatccgtttagcttgaaggagtaggtgcaccttccactccatttataaggccaccacactttccctttaggctgcaaactcctcatttctgttggtgactgaat

SEQ ID NO: 184892 - DNA, 467 bp, Homo sapiens
caaggcctgtttccctctgagtactcacttggcccaagggaaacatatcatccttgccataccccatagtgggagttcagactgactcactgctgccttctctttctgtgttattatggattgtggtctcccttcaaaattttccagaaaaggggctcataagtctctatgttcatatatgcctcactctactgaggatacatgtcaggtttgctcaagaaccctgttgctgtattctgctctgacgacacagtgaggtgggctaaccaggttctgcatttctgcaagtgtacagtttaagaatgagaggccagtctcctttgttcactctccattctccttcagtgtttctcctgatcaccatccgtttagcttgaaggagtaggtgcaccttccactccatttataaggccaccacactttccctttaggctgmaaactcctcatttctgttggtgactgaattc

SEQ ID NO: 184893 - DNA, 591 bp, Homo sapiens
tttcctctaattcttttaaacttttcttttacttcctctgcattctgttcatttttattatttttatcttttgtgtcccaaataatgctttccatagggtctatttgttcattttgttcctcatagataccttttcctctaccttttactcatttcttgagtttggtcagctagtatttcaatttcttctgttttctcatcacctttttcctgagattttgcatttctgttttgtaatctttctttagagaggtgatgtgttagtttgctacggctgccattacaaagcaccccagactgggtgatttaaacaacacagttctggaggctagaagtgcaagatcaaggtgctggcagggtcgctttcatctccttgtgtctacacataatgtctcctctgcacatgtctgtgtcctaatttcttcttatatggacaccagttatattggctttgggctcaccccatgacctaatttaactttagctctttaaggactcaatatccaaatacagtcacattctgaggtactggtgattagaatttcaacatatgaattttagtggtgcaggaayacagttcagcctacaaca

SEQ ID NO: 184894 - DNA, 642 bp, Homo sapiens
acaggtgtgagccaccgtgcctggccaccttaggatattttaaatttacaatgggtttattgaatattgaataytggacattacgttggaactgtgacagttttgcactactgtgaagtcaaaaaattgtgagttgaaccattgtaagctgggaactgtctgtattacatgctgtataacacatatattgaacagcatcaatattgcctttaactagacagaacatcagaatgtttgctgactagattcattttatttcttattaactcttttaaaagtagtcttaatggtcaaaacatagatatgttgatattatttatgcctgcttttttcttacctcctatagtagcacccgtctgctgcgatggaaaactgtaattactggtagcatcagtgtcagattaaaataactcagtgctatattcttatttatgaatcacaataataatataatttaaaatatttcttttattctagaggaaaaataacttactataacattaagcctaaaagcactgctctcaatctaggagcattgattcattgccttccttttttttattttttcaagcctaaactactgtaattctccttaactggtcttcccactgggcaaatttaacctccaaacagtataaagct

SEQ ID NO: 184895 - DNA, 642 bp, Homo sapiens
acaggtgtgagccaccgtgcctggccaccttaggatattttaaatttacaatgggtttattgaatattgaatactggacattacgttggaactgtgacagttttgcactactgtgaagtcaaaaaattgtgagttgaaccattgtaagctgggaactgtctgtattacatgctgtataacayatatattgaacagcatcaatattgcctttaactagacagaacatcagaatgtttgctgactagattcattttatttcttattaactcttttaaaagtagtcttaatggtcaaaacatagatatgttgatattatttatgcctgcttttttcttacctcctatagtagcacccgtctgctgcgatggaaaactgtaattactggtagcatcagtgtcagattaaaataactcagtgctatattcttatttatgaatcacaataataatataatttaaaatatttcttttattctagaggaaaaataacttactataacattaagcctaaaagcactgctctcaatctaggagcattgattcattgccttccttttttttattttttcaagcctaaactactgtaattctccttaactggtcttcccactgggcaaatttaacctccaaacagtataaagct

SEQ ID NO: 184896 - DNA, 642 bp, Homo sapiens
acaggtgtgagccaccgtgcctggccaccttaggatattttaaatttacaatgggtttattgaatattgaatactggacattacgttggaactgtgacagttttgcactactgtgaagtcaaaaaattgtgagttgaaccattgtaagctgggaactgtctgtattacatgctgtataacacatatattgaacagcatcaatattgcctttaactagacagaacatcagaatgtttgctgactagattcattttatttcttattaactcttttaaaagtagtcttaatggtcaaracatagatatgttgatattatttatgcctgcttttttcttacctcctatagtagcacccgtctgctgcgatggaaaactgtaattactggtagcatcagtgtcagattaaaataactcagtgctatattcttatttatgaatcacaataataatataatttaaaatatttcttttattctagaggaaaaataacttactataacattaagcctaaaagcactgctctcaatctaggagcattgattcattgccttccttttttttattttttcaagcctaaactactgtaattctccttaactggtcttcccactgggcaaatttaacctccaaacagtataaagct

SEQ ID NO: 184897 - DNA, 642 bp, Homo sapiens
acaggtgtgagccaccgtgcctggccaccttaggatattttaaatttacaatgggtttattgaatattgaatactggacattacgttggaactgtgacagttttgcactactgtgaagtcaaaaaattgtgagttgaaccattgtaagctgggaactgtctgtattacatgctgtataacacatatattgaacagcatcaatattgcctttaactagacagaacatcagaatgtttgctgactagattcattttatttcttattaactcttttaaaagtagtcttaatggtcaaaacatagatatgttgatattatttatgcctgcttttttcttacctcytatagtagcacccgtctgctgcgatggaaaactgtaattactggtagcatcagtgtcagattaaaataactcagtgctatattcttatttatgaatcacaataataatataatttaaaatatttcttttattctagaggaaaaataacttactataacattaagcctaaaagcactgctctcaatctaggagcattgattcattgccttccttttttttattttttcaagcctaaactactgtaattctccttaactggtcttcccactgggcaaatttaacctccaaacagtataaagct

SEQ ID NO: 184898 - DNA, 592 bp, Homo sapiens
gggcttacctgtgttcagctgaaatataaaaaatcactcacctactcaactgtaaattatttcagatcatttacaatttcacacaatcccgacctcttctgttctctcaattagtgtagataatgataattgaactaaactatgtaattaacctcatatctacctagatttttctttttttgcaaaacctcaaagagaaacgtgtgtcaaacttgtattttattttaatattttcgtgttccttgaaaattctacttactctcataaataaagaatacttgtcagagctatgcttttcaattttttaaaaaacaattttttttctaagctccttccataaattgtttattgttcaatgtggctgtgacttttcaatgcagttacttatttttcatgccttcaatttggtataaatatttcttttgcccagaatcaaatgcataaaaggtttcctttcatctcaaggatgcaagttattttgttatcttctatgggaaattaataatggtggggtcaaggtgsggaaggaagttagcggatccctctaacttaatgactgcatattgtaatagaaataactcataacgatgca

SEQ ID NO: 184899 - DNA, 384 bp, Homo sapiens
ctcaatgactaaaaccagggtaaaagactgaatcttacatgtaatattttgggcatgatcatagttactggggcctgagaacagcctcagaatagattcagaattgagtcatttcttacttggttctcactaaatattaggcaataatgttgtgtacatttaaaataaagtcaatgattttatatgcaaagcagtttctattctaagttttaaattcagatgcactaaagtagaaacttttttttctkggatttaaaatagcatgtaaagtagctcttgattacaaagggctgttctgagggcatgatgtgtattcactcatttagtcttcgcaactttacacaacagtttccattattatcccatgttacagatgagaaaact

SEQ ID NO: 184900 - DNA, 590 bp, Homo sapiens
ctctctatagccagtaatgttaaacctttacaacattgtttgaagaatcaattttggaaactagggacctttaccaagctttaattattattgcattttaaaacagaaaaaaattacatggctagataaactatcttaaggataaaagacatttacaccaatttagtcttttgcagtcatttattttagaattctcagtaacatttatcttcaataacttatttgtggtgatattagattccaaaagtatttttagaagaattttatagtagtcaaatgtgaattatctaccttttttgaatattaaatattataaaataagcaattttacaaagcagagataatctctgatagcctaaagttttaagtaaaattattgtcatttattaagtttagtttattaattttcattatttttagtgactataaaagtaaatcattgcattttagatttttaygtaaaattctggtatgaaattaattttaatgaaaacatttcctaattataattttatttctgcaatgaccttatttctacatttgaatattacgccaagcaaatatcacctgaaaagggaaggagttagcca

SEQ ID NO: 184901 - DNA, 621 bp, Homo sapiens
aggtctatcattcatccagaaaaatatcagttttgtcactcttctcaggcagggagactaattggtgcagctgtggcagaacacagtctttcttctgggaaagccgccttgcatgaaatagaacatgctaaaggacttgcaggtgttatgaattgagtgtaaaagatgagactaygtctgattagggagagctaacgatgtatagacatgtctttctaaacaccgagttactaatattttttttgtgtgtggatgacagttctttcattgaacaaatatttttgaatttgtaatctgcacaaagcagtgcactagacacagcccatagcctaagaaacaaataaaactggccatgatggaaaagacagtgaaaaatcaacatagaaatgaactcaatctctaaggtaatgcagtgccttattttggttttctttttcataatgagatttccatccaactcattctagagatcataaaggtattagtaaaagctaacatttagcatggccagagaggtgaaattatctgcccaaggtcttattcaggttttgtaattcccagtttagtaaaatgttgacttcaccataatcttctgtgaaccaatcagataagagttcatga

SEQ ID NO: 184902 - DNA, 590 bp, Homo sapiens
ccacatttgaaaaggcaaatgagaaaaaataaaaacatcaccatgtgaagacttcaagcttatttcatacaacagatgacaaaggctaatgaaagaaaggaaagctttctgaatacaatgcaatgagaaaggcagaagcaagggtaaatgcatacttaccttagatgycatatgacagtgcactgagatctttgacaggtgataaagacacaacttggcacaatcagcacttatttttggcacctacaaaagaggtagtgaagcagaaaaatccctccaagaattaatctgcagctgcataattgcaatgctttatcatctgtaggctgtgacacaaaacacattcaggtatatgcaagttccttaaatagtggaccatcagaataaatgtttaacaattgaggtattaataaataaaaaatgtatgtaaaaataggtacagatttccccatgtattttagttttacctttaatagatttaagaataaaaatgaatttgctagaagaatatcttcaagaaatttcattgcatgcaacccaaaataatttcataattttcagtagcccaacttgtgttccaacaggattta

SEQ ID NO: 184903 - DNA, 388 bp, Homo sapiens
ttatagagctccaaaaaaatgcattttgcatcttaggtctgcactgtaaatgcccaagttctaacaccagaaattccatagtttacttttatacattagcaaaagtgctgataatatgaaaaacaagcaaaacaagattcagatctgccagataycacctgtgaagagacacaatcttatcttgcagattacgtgaattaatagtagaaatgttatatattttcagtaactggagcctgaggtcctttcatcttattaaaattatagcaagaaaaaattattgaatatgaaaatattatttggatcaagcttattcttttgatgtgatcttatcaagaaacaaatctatgtaatatttgtaatccacataccggtagggcatgggtga

SEQ ID NO: 184904 - DNA, 388 bp, Homo sapiens
ttatagagctccaaaaaaatgcattttgcatcttaggtctgcactgtaaatgcccaagttctaacaccagaaattccatagtttacttttatacattagcaaaagtgctgataatatgaaaaacaagcaaaacaagattcagatctgccagatatcacctgtgaagagacacaatcttatcttgcagattacgtgaattaatagtagaaatgttatatattttcagtaactggagcctgaggtcctttcatcttattaaaattatagcaagaaaaaattattraatatgaaaatattatttggatcaagcttattcttttgatgtgatcttatcaagaaacaaatctatgtaatatttgtaatccacataccggtagggcatgggtga

SEQ ID NO: 184905 - DNA, 399 bp, Homo sapiens
acacaatcttatcttgcagattacgtgaattaatagtagaaatgttatatattttcagtaactggagcctgaggtcctttcatcttattaaaattatagcaagaaaaaattattgaatatgaaaatattatttggatcaagcttattcttttgatgtgatcttatcaagaaacaaatctatrtaatatttgtaatccacataccggtagggcatgggtgataactttcttagtaactctttcaggatatacataaggttacttagggcatgacatagtactcagcaattgaaaatgaacttttaaaaagaaagagattccttctccaaagtataaacttacacagcatcccatagagagtctttgaatcagattcagaaccaaaatgcaaaaaggggtg

SEQ ID NO: 184906 - DNA, 612 bp, Homo sapiens
agctttttttacataagtaacaaaaggtaaaataatcacacagatcatatgtcaatatgtcttccatatgttgtatatacaaactataaatgcatgtagattatatatgtagactacttagaaatacacatacacagtcttacttcagtacctttcaggtataataggtggcaggcagattraaagcattttatttatggtgagacattgagaaaggttgagcataaataaaatggaaatcaaattgctattagagtcaaatagttaagcatgagcctaaccattgcaaggaaattagaggaaagaaaaattgagaattaaaaatatattttattaaccaacttttagtactctctttaatgggaatgtaccacaagttctactaaaataaatgcggtaacaaaaatgcttcaaaatgcgtatgcatgggagctgggtacaatgttgagaacaagtgcaagtgatgacttgattcagttaaggtggctgtcagtttagtttactatcaaacctgcaacaagctgtgtagaggacaaacacaaggttaagaacacagtgagcaggatcactcatgcctccttcgttcatcctgggatgcaccaataattctgg

SEQ ID NO: 184907 - DNA, 505 bp, Homo sapiens
tatgagataaatttaacaaggagattaaaataatttaaaagaatcagacagaaattctgggctgcaaaatgcaattggcatacwgaagaattcatcagagttcttcaagagcagagttgatcaagcagaagaattagtgagcttgaagatagactatttgaaaacacacagtcagaagagacataaaaacagcaataacaatgaagcatgcttacaggatctagaaaataccctcaaaagggcaaatctaagaattgttggctttaaagaggagatagagaaagagataagggtaaaaagtttactcaaaaggataataacagagaacttctgaaatctagggaaaaatgttaatatccaagtacaagaagggtatagaacaccaagtagatttaacccaaagaagattacttcaagacatttaataatcaaattaccaaaggtcaagtataaggcaaggaaaaagcagcaagagaaaataaagaaataacatacaacggagctc

SEQ ID NO: 184908 - DNA, 505 bp, Homo sapiens
tatgagataaatttaacaaggagattaaaataatttaaaagaatcagacagaaattctgggctgcaaaatgcaattggcatactgaagaattcatcagagttcttcaagagcagagttgatcaagcagaagaattagtgagcttgaagatagactatttgaaaacacacagtcagaagagacataaaaacagcaataacaatgaagcatgcttacaggatctagaaaataccctcaaaagggcaaatctaagaattgttggctttaaagaggagatagagaaagagataagggtaaaaagtttactcaaaaggataataacagagaacttctgaaatctagggaaaaatgttaatatccaagtacaagaagggtatagaacaccaagtagatttaacccaaagaagwttacttcaagacatttaataatcaaattaccaaaggtcaagtataaggcaaggaaaaagcagcaagagaaaataaagaaataacatacaacggagctc

SEQ ID NO: 184909 - DNA, 560 bp, Homo sapiens
atatatctggcagcagacttttcagtgggaaacttacaggccaggagagagtggtatgacatatttaaagtgctgaaggaaaagaaaatgtttaacctggaatagcatacttggcaaaaaatccttcaaccataaaggagaaataaagactttgccaaacaaaagctgagggatttcatcaataccagacctgtattacaagaaatgttaaagrgagtatttcaatcagagacaaaacgatattaatgagcaataaataatcacccaaaagtacaaagctcactggtaatagtaagtacacagaaaaatacagaatattataacactgcgactgtggtttgtaaactacttttatcttaagtagaagggataaataatgaaccatccaaaaataataactagaattacctttcaaattatgtcagtacgataaaatacaaatagagtaaacactccaatcaaaagacagaatgactgaaaggataaaaataaaactgaacctaaaaatctgttgtctacaagaaacacacttcacctataaagacacacatagactgaca

SEQ ID NO: 184910 - DNA, 560 bp, Homo sapiens
atatatctggcagcagacttttcagtgggaaacttacaggccaggagagagtggtatgacatatttaaagtgctgaaggaaaagaaaatgtttaacctggaatagcatacttggcaaaaaatccttcaaccataaaggagaaataaagactttgccaaacaaaagctgagggatttcatcaataccagacctgtattacaagaaatgttaaagggagtatttcaatcagagacaaaacgatattaatgagcaataaataatcacccaaaagtacaaagctcactggtaatagtaagtacacagaaaaatacagaatattataacactgcgactgtggtttgtaaactacttttatcttaagtagaagggataaataatgaaccatccaaaaataataackagaattacctttcaaattatgtcagtacgataaaatacaaatagagtaaacactccaatcaaaagacagaatgactgaaaggataaaaataaaactgaacctaaaaatctgttgtctacaagaaacacacttcacctataaagacacacatagactgaca

SEQ ID NO: 184911 - DNA, 555 bp, Homo sapiens
aaataaaactgaacctaaaaatctgttgtctacaagaaacacacttcacctataaagacacacatagactgacaataaatgaatagtaaaagctatttcatgccaatgaaaaccaaaaaagagcagaagttgctatacttatatcagacaaaataaatttcaagacaaaaattataagaagagacaaagaaggtcattatataataataaaggggtcaattcaacaagaggatataatgattataaatatatatgcacctaacactggagcaccctgatatacaaaagaaatatgattagagctaaagagagagataagcctcgatataatcatagctggagacttcaacatcatactttcagcattggacatatcttccagacagaaaatcaacaaagaaacagtggccttattatgcactatataccaaattaccccaataaatatttacaaaacatttkatccaatggctgcagaatatacattattttttctcaggacatgaatcattctcaaagatagaacatatattaggtcataaaacacatcttaaa

SEQ ID NO: 184912 - DNA, 555 bp, Homo sapiens
aaataaaactgaacctaaaaatctgttgtctacaagaaacacacttcacctataaagacacacatagactgacaataaatgaatagtaaaagctatttcatgccaatgaaaaccaaaaaagagcagaagttgctatacttatatcagacaaaataaatttcaagacaaaaattataagaagagacaaagaaggtcattatataataataaaggggtcaattcaacaagaggatataatgattataaatatatatgcacctaacactggagcaccctgatatacaaaagaaatatgattagagctaaagagagagataagcctcgatataatcatagctggagacttcaacatcatactttcagcattggacatatcttccagacagaaaatcaacaaagaaacagtggccttattatgcactatataccaaattaccccaataaatatttacaaaacatttgatccaatggctgcagaatatacattattttttctcaggacatgaatcattctcaaagatagamcatatattaggtcataaaacacatcttaaa

SEQ ID NO: 184913 - DNA, 571 bp, Homo sapiens
gcagcaaaccaccatggcacatgtatgtatacctatgtaacaaacctgcactttctgcacatgtatccctctgtttttttagaagaaataaggaaaaaaaaaraaagaaagaaagtgtcactgtttggactcatggactatattttcttccactgcatctaagtgccccatgcatgaaatcctactactggttgccataactccctaacgctgattactttgattttcttcagttaattctatttggatatattttaagtttatgcctcatctctctctggatagacactctggatttagtattcatccattgcctgactcatttgtttattttatttcttttttaattttatattttttaagtattcaaataatttaaaatgatatttgcccaatgaagtaattttctcttttagaggtatctaaattgaaaataataggcttcttccacttttatttacaagatgtaaagaaagcttcaataaggtaagtcctgaaattgctacctctcttaaaatgcagtcagtataaatgatgatacatcacagagaaggaaagatataaattgtgc

SEQ ID NO: 184914 - DNA, 530 bp, Homo sapiens
tatggatatagttggaaaatcatgttcttttctgttgaacttgaaccaagtggacaaaaatctagaattctgtggagctaccacaaaaagagagcctaccttattgaaagtgaagccaacatagatcataatagagttgagctcctagatcttaacttttatgcatctgacactacccacrgactttataattacacaatccaattcattcttttcttttcccctcttagttaaaatgaggtttttagttacttttaaccaaaacagctccagtgatcttttaggttatatgatcttttggccaataaattttcagctctatatggaggaaaaaataaattataaaaatatatttacaaaaacctaaagaggtataaagataatcacacttcttcacatgtacccattctttcacacatcaatttataagatccaattgctttatagatgaattacttctactctttatgtaatggattatccctatgaattaacttggcctggagcagtgccattccatatggtagcca

SEQ ID NO: 184915 - DNA, 530 bp, Homo sapiens
tatggatatagttggaaaatcatgttcttttctgttgaacttgaaccaagtggacaaaaatctagaattctgtggagctaccacaaaaagagagcctaccttattgaaagtgaagccaacatagatcataatagagttgagctcctagatcttaacttttatgcatctgacactacccacggactttataattacacaatccaattcattcttttcttttcccctcttagttaaaatgaggtttttagttacttttaaccaaaacagctccagtgatcttttaggttatatgatcttttggccaataaattttcagctctatatggaggaaaaaataaattataaaaatatatttacaaaaacctaaagaggtataaagataatcacacttcttcacatgtacccattctttcacacaycaatttataagatccaattgctttatagatgaattacttctactctttatgtaatggattatccctatgaattaacttggcctggagcagtgccattccatatggtagcca

SEQ ID NO: 184916 - DNA, 392 bp, Homo sapiens
tatgacattttgctgagtcattcttcagttaatagactttgggtgctttccatttgggggctaataggagtaatgctgctgtgaacatttgtgtggaagctttttgtggacatatattttcaattctcttgggtctgtattgaggcatgsaattgctgggtcatgtggcaactctatgtttaactttttgaggaactgccagactgttttcccaagtggttgcactatttatatcttaccagcaacatacaaggggtccaatttctccacatccttgtccacacttattattgtctgtctttttgattatagacacccaataggtgtgaagtatatctcatcacggttttgccaatctcaaagggcatggattttgtttcattaaataatgt

SEQ ID NO: 184917 - DNA, 392 bp, Homo sapiens
tatgacattttgctgagtcattcttcagttaatagactttgggtgctttccatttgggggctaataggagtaatgctgctgtgaacatttgtgtggaagctttttgtggacatatattttcaattctcttgggtctgtattgaggcatgcaattgctgggtcatgtggcaactctatgtttaactttttgaggaactgccagactgttttcccaagtggttgcactatttatatcttaccagcaacatacaakgggtccaatttctccacatccttgtccacacttattattgtctgtctttttgattatagacacccaataggtgtgaagtatatctcatcacggttttgccaatctcaaagggcatggattttgtttcattaaataatgt

SEQ ID NO: 184918 - DNA, 615 bp, Homo sapiens
ttgtataattggaaccatacattatcagtcttttgcttctggtttctattagtttgtttgaggttcatatctgttgtagcatgtascattatttaattcattttgatggccaaataggattccaatataaaatgtacttaactgtttttccttatattaactggttgacattttgacatttgagtatttccatttttcatatttggttataacaaacaatgttccagtgagtctttgtgtgaaccaacattttcatctcttttgggcacatgagtgagagtggagctgatgcaccaatatggtaattccatgttaaacatttcgagaaactaccaaattgttttgtaaagcggctgtgctgttttacagttttatcagcagtttgtgagggttctatgtttacatctctgccaatgcttacttttgtttgttgttaaatcattctactgcataagaagggatatctccctgagggttatttttttgagacagggcttcacttggggacccaggctggagtgcaatggcatgcttatggctcactgctgcctccacctcccaatctcaaatgatcttcctgcctcagccacctgagtagctgggactacaggatgt

SEQ ID NO: 184919 - DNA, 545 bp, Homo sapiens
tctggaagatttgaggtaataatctcattttatatattttgaatggatagacacatttctggactctatgtttcctaacttttattaaacattttaaatgtatccattatcagacactcccacttacttgaaatacatctttttttatatgtactataagtagtaggtagatgataggcagagagatcacatgtatagayacagatacagatttaggtaaaggtatagataaaaatacttatctgtttggacaatgctctttctacagtcatggacaacaatcactttttactactttaattcaatacattgaaatattttacatcttatgtcttcaagtatatttgcatttcaataacaaatacatatacagctggaggggcagagcatgatggctgaatagaaatctccactgatgatccctccacaaagaccccaatttaacaactatctacataaaaaagcaccttcataagaaccagaaattaggtgcatactcagagtacctggttttaacttcatatcgctgaaagagatactgagaa

SEQ ID NO: 184920 - DNA, 620 bp, Homo sapiens
tatgtagacaactatgctcatatttgtttgttttaataaggctgtggtccaaaaccttacgtttttatagaaattaaagcttttcagttccattctaaagaaaggacagccccatgatctaaatccaaaggtgatggcttagagtgaggaccatttcttgttgacatggagatggttgagatggtctacaataaatctatgggagaagcaggttgtgatgacttggaagtgttggctgccttcatggtctcaaagttctttgccaagttcacctcagcagtgctgtactgttctgctgtcagattgggaatgcttggccagtagtggttctctgcatggtccaaaactgcggatgcttccttgatacactgcctgccagaaatgcaattgtagcaaaggaggtcggtaaggggacagaaactagctggccactgcctggtggggaagagcgatgggcacccaatcctagctcacatgcyaagtgccatcatcatcccggtacccaggggtgtctcccataatgtgcactgcctggccttatgtaaatagagagctcagctaaggcctaaagttgtaaaggggcctttccggagccccaagtgtgctggacaactcactag

SEQ ID NO: 184921 - DNA, 554 bp, Homo sapiens
tctcattagaaaacaaatctcacacaaagtaacatacagagtgttctaataagtatgagtttatacagaagacctagggagctcttattctactttttcaaatggagactgtcccctaaaaatagaaaacctgacgtactactaataaatatgtttaagctcatggtgaatatttccagcccctatcatcrctaagttagtcaataacgttacaaggatttaataaatagcagagaataatatttccacatactttcgtggtagccagaaaacaagataaacaaaaacctacacatatagtagttcaataccttacttgttttgattactatagctttgttagtgtagttttaaatccggaagtgtgtgccctaaaacccatgggcatttatggcctaatttcacactgatcataggttactctgatttccacatacccagtgtagttcaccagtcttgttgtgcccatgaatggacttggaggagaacaagcctttagaatacctgccagggtcatcattaagggaggacccatcattttttcacaagctctg

SEQ ID NO: 184922 - DNA, 554 bp, Homo sapiens
tctcattagaaaacaaatctcacacaaagtaacatacagagtgttctaataagtatgagtttatacagaagacctagggagctcttattctactttttcaaatggagactgtcccctaaaaatagaaaacctgacgtactactaataaatatgtttaagctcatggtgaatatttccagcccctatcatcgctaagttagtcaataacgttacaaggatttaataaatagcagagaataatatttccacatactttcgtggtagccagaaaacaagataaacaaaaacctacayatatagtagttcaataccttacttgttttgattactatagctttgttagtgtagttttaaatccggaagtgtgtgccctaaaacccatgggcatttatggcctaatttcacactgatcataggttactctgatttccacatacccagtgtagttcaccagtcttgttgtgcccatgaatggacttggaggagaacaagcctttagaatacctgccagggtcatcattaagggaggacccatcattttttcacaagctctg

SEQ ID NO: 184923 - DNA, 530 bp, Homo sapiens
tgttttcacagtctggcattcagtgcctgaagctttccaggtacacagtgcaagctgtcaatggatctactattctggggtctggaggatggtggccctcttctcacggctccactaggcagtgccccaatggggactttgtacaggggcttcaacaccacatttcccctctgaactgtactagtagaggttctccacaagggctccacccctgcagcagaattctrcctcaacatccaggcattttcatacatcctgtgaaatctaggcagagactcaaaaacctcagctcttgccttatgcacacctgcaggcccaacactacatgaaaaacaccaaggcttgggtcttgcaccctcagaagcaatggtctgagctgtaccttggccccttttagctatggctggagctggagcagcatggacagagggtgccatgtcctgaggctgcagagagctgcaagaccctgagcctggcccatgaaattattcttccctcctaggcctccaggcctgtgatgtggggggggc

SEQ ID NO: 184924 - DNA, 530 bp, Homo sapiens
tgttttcacagtctggcattcagtgcctgaagctttccaggtacacagtgcaagctgtcaatggatctactattctggggtctggaggatggtggccctcttctcacggctccactaggcagtgccccaatggggactttgtacaggggcttcaacaccacatttcccctctgaactgtactagtagaggttctccacaagggctccacccctgcagcagaattctacctcaacatccaggcattttcatacatcctgtgaaatctaggcagagactcaaaaacctcagctcttgccttatgcacacctgcaggcccaayactacatgaaaaacaccaaggcttgggtcttgcaccctcagaagcaatggtctgagctgtaccttggccccttttagctatggctggagctggagcagcatggacagagggtgccatgtcctgaggctgcagagagctgcaagaccctgagcctggcccatgaaattattcttccctcctaggcctccaggcctgtgatgtggggggggc

SEQ ID NO: 184925 - DNA, 558 bp, Homo sapiens
cactgaagtttacaacaccctaaaccccgccaccttgctcccggtatcagagagcccagttgaacataactatgtagaggtattggactcagtttattctagtgggcccaacctctgagaccatccttaaacatccagtagactgggagctgtacgtggatgggagcagctttgcaaacccctgcaaagtgactctgaagaagacaagccctcctccagtcacacgcggaaactgactggtccacgcacggctgaagcatgaggaaaytcatcgcgggactcattttccttaaaatttggacttgtacagtaaggacttcaactgaccttcctcagactgagggctgttcgcagtgtatacatcaagtcactgaggtaggagaaaaggttgctatggtcctattattttatggttattataagtgtactggaactctaaaaagaacttgtttgtacaatgttattctatacaaggtatttagcccaggaaatgaccaacctgatgtgtgttatgacccatctgagcctcccatgaccacagtttttaaaataagatta

SEQ ID NO: 184926 - DNA, 603 bp, Homo sapiens
gttccatggatagagtttcagtttgggatgataaaatagttttgaaaatggatagtggtgatggttgcacaacaatgtatttgtacttaatgccactaaattatacacctcaaaatagttaaagtggtcaactttgttatgcmtattttaccacagtaaaaaaattagcaagtatttaaaaatctacatttttctttgaactgtctctttatatctgatatggtttggcttggtgtccccacccaaatcgcatcttgaattgtactcccatatttcccacatgttgtgggagtgacctggtgggagattcttggatcatggggacagtttcccctctgctgttctcgtggtagtgaataagtctcatcagatctgatggtttgataaggggaaacctgtttcacttggctattattctctctcctgctgccaccatgtgagacgtgcctttcaatttccaccatgattgtgaggcctcctcagccttgtgaaactaagtccagtaaacctctttcttgtaaattgctgagtcttgggtatgtctttatcatcagcatgaaaatgcactaatacaacattctttgtccatttttcaattttgct

SEQ ID NO: 184927 - DNA, 488 bp, Homo sapiens
gtcttcaactcctgggctcaagttatactaccaccatgcccccaccaagtgctggaattacaggcatgagccaccacagctagccagaagatgcactttagattaaaaaaaaaataataagttgaaaagaaaaagctagaagtgtgaaaacaaccaccacgatagtaaagccggactggctatactaaaattagatgaggttaaaacaaacaagtgttattaaagttaaagaggggcatttcatggtgacaaaaagtcaatgtattaaagagatgtaataattataaayctacaggcaactgacaatatagccctaaaatacaagaaacaaaagctgacaaaactgagagagggaatttaaaattagtatttggagattttaataatctacttaaacaactaatgtaatagcttttcagaagctcaaaaataaaacacaatatttgcacagcactatcaaccatctacacctgataaaaatccataga

SEQ ID NO: 184928 - DNA, 585 bp, Homo sapiens
cctacaaaacaggctctgatgaagtcwgttaaaaaaaaaaaaagtagcttaggtagagaaattggtctcagaaggatgtaagacaacatcatagagtctgttaaatgtatcttctcagtttaatatgcaagaatacaactataggaaaatgcaaagaaaaagataaagcaaaattagcaaaataagatgaagatttaaaaaggaagatgaagaggaggaaaagggagaaagaagaaaagaatggaaagaaaatatagtaagaaaagtgacattgtcaagatgacagaataggaagcactggaaccttccatttcactacagatacactgattcaataattatttgcagacaaattccctttgtgaaaaatccagaaacaaattgtgcaaattgaaaggctcaatttgtacctaagccactttttgtagccggaaaagagcccttcttagaatcctggggttcttctttcttttctgatattttgttaaatatcttatatgattcattctactggtgtggcttgtatcttatttccataagagaatacttacaattgtgaatgtgaaatcacattcatcaaagcca

SEQ ID NO: 184929 - DNA, 649 bp, Homo sapiens
tgggatttgtagttttataattctgcagggaaagtaatgtaacagctgtgaaataacgtgattcttaaatgccattttcttacaagtagtaaggatttttaattgatgtacttagyaggtattaagcaaccctctacactcctgtccagtgggaagaggttgtcatgtgccccatgctgttatcccatatggtagaactgcccatgttcaaaattccttccgtttggatctgataaaaatccctgactaatttagacttgcaattgaaagtgttgtaaaaaatgtgaacgatatatcatacctgagttaagcgccccctctcttcgtctcctacttttctctagttcacataagcatagctagccacattctgtttcaggattaaggcattgattatttcatttcatgtgttagttaagatcagatgcatttttaaatgtattttattttttatttttattattttcaaatggacaaattaaatggtagctatttacagcatacaacatggtgttttaaagtatataacatttcagaatgactaaatatagctaattaacatatgcatccttttttgttgttcaaaagtcctttttcacagtgaaaactttatgagtgaaataacatttctaccttacgttcaggggtt

SEQ ID NO: 184930 - DNA, 539 bp, Homo sapiens
gtgcatgcctgtttcacacatgcacacacaactcaagttgttcccagaatgcatttatgggagcacacttcattatagcayagtctggggcactctaacctgcatcagcataagctgataaaagagcagcttatggaataatttgcacaaacatcagtctggtaaacagatgtctcctaattaaatatattatatcatgtttatcaaacatgttaaagtgttcattttcacgtattctccaagcttgatcaatttaatgaaaaatactaaaggttcctataaggtataatttggactatgtaaatagtttttctattgtaatttccccccaaatctatgcctttccatagtcattacaaattatttgaagtctttttttcttaaggccgatactgagaccaaatgcctttatttttaattcctccttgtaaataggaaacaaatgaagtaccccaccactaccaacatacacacacacaacaaattaaaactttgttactttcaagttgtctttggaaacaatatttagaacaatatgt

SEQ ID NO: 184931 - DNA, 454 bp, Homo sapiens
ctagaaggcgatagagacagaaaaccgagaaataagattcaagcacaagagagtcagaaaccggctataaatccaaagaggaagcaaagagaaccaaaggcaggaaccttaagaaagacactgaagtcaagggacctatccagacatggccaacatgacgaagggtgtatcatggcgggtccagctcttctattcttggacagtggacctccatggagccaggaccaaggcaagataaaaagtcaaagggattcacagaaaccactcttccagttgaactgttgttagggaatacgaggaatacttacattgtaggcagtgagtcttgaagttgccagtgraaaaggccgatgtttcactgcccttttcactatcctctttgctcagtaccctgcctggagacactgtctgctacagtgtctcacttggcttcttgaattagaaggaaccctag

SEQ ID NO: 184932 - DNA, 454 bp, Homo sapiens
ctagaaggcgatagagacagaaaaccgagaaataagattcaagcacaagagagtcagaaaccggctataaatccaaagaggaagcaaagagaaccaaaggcaggaaccttaagaaagacactgaagtcaagggacctatccagacatggccaacatgacgaagggtgtatcatggcgggtccagctcttctattcttggacagtggacctccatggagccaggaccaaggcaagataaaaagtcaaagggattcacagaaaccactcttccagttgaactgttgttagggaatacgaggaatacttacattgtaggcagtgagtcttgaagttgccagtgaaaaaggccgatgtttcactgcccttttcactatcctctttgctcagtaccctgcctggagacactgtstgctacagtgtctcacttggcttcttgaattagaaggaaccctag

SEQ ID NO: 184933 - DNA, 604 bp, Homo sapiens
ctcctatcagttaagtagacttcttgtttccctaaaatattgttgagttccctggctcagggctgctgagggagacctgtgtaggccagttaaaacatactgcttggatctagtctcttcatggcctcactggccctgataaggaccagttcatctcaaaggtcaccttaattaagctcaagtcttagagcaacgttagcaacctctaatgttcctgggaacaaaggagggacataaayaggtcttgagcaagacgtaaattaataaattagcagtgagtcctatgactaacataaaggcattcaatttctatttgttttgcaaacactgtcccagatatccagaacatatcagcattgcatgttctgtatcagcccagggacctgcctatttgtaaatcgtgccagaaatctgtatataataaattttttccttgatggtcttgttcaactcctcctgttccctaatttgaagtacaccatggctttaggaactcaaccttagcataacagtttccctagatgggttcctttatctctttttagcaaggtaggagttgcagcaacacaaacatataggctacaagcacattcaaaccagaata

SEQ ID NO: 184934 - DNA, 569 bp, Homo sapiens
attcacttttcattcaagtgaaaaatcttatctgtgatttaaaaaatgtgtaatggtaaaattcaaacaaatgtctataacttaaatcagaatatttccattcttgtaactgcaagacttagggtagcactatgtttatcccaggtctcaagagccaaatgagaaaaatctatgcacttcctctaaagacagaggkaaaagggcacccaggagagtaggtaaggtatagcctctcttccagccacagtacctgggacaagtcgtttaacctccctggcctgtttcctcatcctcaaaatggacttagaatgggcctccagttaagatgcttcttgctgcattcttctctcagcctgtgactaggtagggggcagaagtaagcaatgttagaaaatactaattagtatgtacctctcacttattcctgggtgtccggatggacaatgaactttgtacattcctagcagaagttttttttataatcaaatatattttgttaaagccttctttacgccatccttgctctggacaatgctatggcttggctgaaccctcctatgactgtacca

SEQ ID NO: 184935 - DNA, 569 bp, Homo sapiens
attcacttttcattcaagtgaaaaatcttatctgtgatttaaaaaatgtgtaatggtaaaattcaaacaaatgtctataacttaaatcagaatatttccattcttgtaactgcaagacttagggtagcactatgtttatcccaggtctcaagagccaaatgagaaaaatctatgcacttcctctaaagacagagggaaaagggcacccaggagagtaggtaaggtatagcctctcttccagccacagtacctgggacaagtcgtttaacctccctggcctgtttcctcatcctcaaaatggacttagaatgggcctccagttaagatgcttcttgctgcattcttctctcagcctgtgactaggyagggggcagaagtaagcaatgttagaaaatactaattagtatgtacctctcacttattcctgggtgtccggatggacaatgaactttgtacattcctagcagaagttttttttataatcaaatatattttgttaaagccttctttacgccatccttgctctggacaatgctatggcttggctgaaccctcctatgactgtacca

SEQ ID NO: 184936 - DNA, 460 bp, Homo sapiens
ggttgttactgaaagatgtccttatagtctgcagaacccactctacctgaagaccagcatccattaaaagcaatgaccagcagtgctgagctgaggatggagttggagtgtgaaatccaaggtaaccttgggctgaggaattttccctcacmcatatcgaaagaggaatctgaaagctctaccaaccaacatgtgtatcagttaccatttgtttctttctttttttaatacaaatgatgtgagttagaagacattatagctaaccttactagggagctagtaagattctgttgggatgagccatagcttgtggcttcgtccatatgtgctgtttctagcagagaggcatccttacctggctccactggtggtggtacagcaggactctctgcccagcactgtcaggcttaggttaagtatgagctgattcttcttattaataaagcttgtctcatcactc

SEQ ID NO: 184937 - DNA, 374 bp, Homo sapiens
tctgggttgctcctaggtctttgcttggctagcatttaataagttatactccagctttgtgtctgtgacttcgtccccttgttctttcagaaccacgtctttgtatctcctgtacagttatcctggcagttactggataaatgtgtgacttaagcttcatgactttagataggtcacttaagcactgagacctagtctcctcagctttaaaatgtggctttctgcctcttgactttcactratgtcgtcaataaagttgcagttgccaaatcagatggctgggtttggactttgtgtcctatgacattagacagtgaccactgcttcttgaccctccaggtctactcattcttatgcttcttaaaagattgatc

SEQ ID NO: 184938 - DNA, 424 bp, Homo sapiens
cttattagtataaagtctcaccattaccctgttatackttcttacatatatttgggtgttcctggattttctattctcttgcattcatttatctatcttttcagctgttagcaaactatttatgcaaattaatagcacattttgaaaggcaagactttttttctccattacaaaaatgttaagccatcttaatattaaaagacagcatgtgtaattcaaaaatgttaactttgataactttgatttatgtaaaattaataaagatctcacacctcgagaaaaatgagtcttcttattcaagaacgtgaaccttcttcctacttcaaagtttccttctaaggtctctcagcaaagaacatatttacataggtattcattgatataaaatattggattttagccaaaaaattattagcccagaagg

SEQ ID NO: 184939 - DNA, 573 bp, Homo sapiens
aactaaatgcaacctgtaattctgaactagatcctgttgctaaacagaatttgatgagataactggtaaaacttgaataaagtcaaagatgtgattatggaaatgtattaattttctcattttgatggtcattttgatattacacagcagaatgtcctttttgtaggaaaataccacaaaatattcagaagcgatgggtcaccaagtcagcaacttactctcaaatggttcaggaaaaagcaaatgttctcggaattgtactcataaccttcctgtaaatttaatattgttttaaaacaaaaaaaattacttcttaaaaatatagaaggctatctttatgatctcaggatatagaagaatttcctaacctaggtataaaaatattgcaaatcatgaatrttataaattcagtaacatgaaaattaagaactttataaatggaacattattcagctgttcaaaaggaaagaaattctggtttttatgagtcacataacatacatcatatgtggcaacatgggtgaacccttaagacatatactaactcaaatatgcctctcacaaaaagacaaa

SEQ ID NO: 184940 - DNA, 573 bp, Homo sapiens
aactaaatgcaacctgtaattctgaactagatcctgttgctaaacagaatttgatgagataactggtaaaacttgaataaagtcaaagatgtgattatggaaatgtattaattttctcattttgatggtcattttgatattacacagcagaatgtcctttttgtaggaaaataccacaaaatattcagaagcgatgggtcaccaagtcagcaacttactctcaaatggttcaggaaaaagcaaatgttctcggaattgtactcataaccttcctgtaaatttaatattgttttaaaacaaaaaaaattacttcttaaaaatatagaaggctatctttatgatctcaggatatagaagaatttcctaacctaggtataaaaatattgcaaatcatgaatgttataaattcagtaacatgaaaattaagaactttataaatggaacattattcagctgttcaaaaggaaagaaattctggtttttatgagtcacataacrtacatcatatgtggcaacatgggtgaacccttaagacatatactaactcaaatatgcctctcacaaaaagacaaa

SEQ ID NO: 184941 - DNA, 573 bp, Homo sapiens
aactaaatgcaacctgtaattctgaactagatcctgttgctaaacagaatttgatgagataactggtaaaacttgaataaagtcaaagatgtgattatggaaatgtattaattttctcattttgatggtcattttgatattacacagcagaatgtcctttttgtaggaaaataccacaaaatattcagaagcgatgggtcaccaagtcagcaacttactctcaaatggttcaggaaaaagcaaatgttctcggaattgtactcataaccttcctgtaaatttaatattgttttaaaacaaaaaaaattacttcttaaaaatatagaaggctatctttatgatctcaggatatagaagaatttcctaacctaggtataaaaatattgcaaatcatgaatgttataaattcagtaacatgaaaattaagaactttataaatggaacattattcagctgttcaaaaggaaagaaattctggtttttatgagtcacataacatacatcatatgtgrcaacatgggtgaacccttaagacatatactaactcaaatatgcctctcacaaaaagacaaa

SEQ ID NO: 184942 - DNA, 570 bp, Homo sapiens
cttaattttcagctaccaccctgatccctggcactgtttctgctctgatgaccacttaaagagtttgctctgggaataaaaactcattcaaatatatttctaagatagataaatatagattctatcgatctatatctatcatctgtctatctatctatctatctatctatctatctatctatctatctatctatgkatctatttatctttataaaggctaagctcctgctggaattaacaaacattccaaaataaaaaagtgccttctggattagcttgctgttgattgcttacagggaatcacgaactggccaaaaccagtttcaatacctgtcgcaagtattacccacgcattttgtaaatttaaatcctaagtttgcaccactttgagagggaaacaaattccttgtagtatgaggcagcttccaggagtagccaatcctcaggcagaggtgggaaccgcttccatatgccatttgtatgcatgcacttgcaagcaaggcacaaaaataaaaaggctgtgagcaaagacctttatgattgatggtctctgatctcggaaaaatactc

SEQ ID NO: 184943 - DNA, 568 bp, Homo sapiens
atgcataaagctgtcatattttatgacaacaatgccttcttctggaatatctcctgaaggacctgcctgaggctgatttacagttaatgttttttataagcagaaaagtataacttttcaaagttttactctaaaataatgatagaaagtatagcataataaatatataaacaagtaacggtcatttgttatcattatcaaggattatgyaatgtacgcaattacatatgctataattttatacaactggcagtgcagtaggtttgtttacagcagcatcgtcacaaacatgtgagtaatgcattgaactgatatgtcagaatggctacaatgtcagtagatgataagaatttttcagctccattattatcttatgggaccactgtcctatatgtggtctgttgttaattgaaatgttgttatacagcacgtgactgcacctaaaaaaataaatgatgaccatgccagagagtggcaagtgtattaggaagaaaaaagtcgatatttgtgtacaataaacatatacaattttgatttgtcaatttaaaaattcaattaaaaaagaaca

SEQ ID NO: 184944 - DNA, 568 bp, Homo sapiens
atgcataaagctgtcatattttatgacaacaatgccttcttctggaatatctcctgaaggacctgcctgaggctgatttacagttaatgttttttataagcagaaaagtataacttttcaaagttttactctaaaataatgatagaaagtatagcataataaatatataaacaagtaacggtcatttgttatcattatcaaggattatgtaatgtacgcaattacatatgctataattttatacaactggcagtgcagtaggtttgtttacagcagcatcgtcacaaacatgtgagtaatgcattgaactgatatgtcagaatggctacaatgtcagtagatgataagaatttttcagctccattattatcttatgggaccactgtcctatatgtggtctgttgttaattgaaatgttgttatacagcacgtgactgcacctaaaaaaataaatgatgaccatgccagagagtggcaagtgtattaggaagaaaaaagtsgatatttgtgtacaataaacatatacaattttgatttgtcaatttaaaaattcaattaaaaaagaaca

SEQ ID NO: 184945 - DNA, 464 bp, Homo sapiens
gcaggaaaactcctatttttaaaaccatgagatcttgtgagacttaatcattatcactggaacagcacgagaaaaacttgctcctacatttcaattgcctcccaccaggttccttccacaacacgtggcaattcaaaatgagatttgggtggggatacattcaagccatatcagaggaaaatatgctttaagttatagtgatacttcatgacaacccacagaagcatatttgttcttccagcccttaaatattttagattaccactctcaagaagatagggtatatttcctacttctgtttatgtcaatagccagccatcctttcctcattatgtttaatccatgctaaaattctgattgttactctaaatttatttctggmttagggccttgtccttttcatttactttgtctgagtccaattctacccacccaaacagatttgacctctggctcccagaaac

SEQ ID NO: 184946 - DNA, 639 bp, Homo sapiens
ctgcagtacagtatttcaaataactcaagcacacacatacatatttgtaatatatatatatgaaaaaaggcagataatgtcattgtaatctaggtgatagaaaaattatgaaaatactaaatcatcaatttgttggtagattaaaatctgagcactgaatttattacggtgcaatttttggttaatctttttcttagaatttgaaatttaacatttttattcttcccctcagtgagaataaatgagaaaatgaaatctcaggggaacttctttgatttcctgcttcagatcttttctctgtgttagggatctatattgcatagtcttcttttgatctctatctgaaaaggccactgaaaacaggtagaaactttggtatgaaaagtgctatatggacacataccaaagtttaaagaagagtgtaataaggatattccagctatattacaactatgttaagtccaattaatgtttttaaaagactaataataggtctccttatatattcatcatctcccattatacattggtattagatttataattatataagattttgcccaaagaytaaaggtcaaaagtagatatagacagcatctaatggagaatattagataccaatattttaaaatagccttt

SEQ ID NO: 184947 - DNA, 364 bp, Homo sapiens
gaggatatttttaaataaaattaaatgtgcttattatatgctcaagcaagtaatattatttttggaaaattattctgcagaaataaatttaactgtaaacacagaataaacacacacacaaaatcacatgcaccatatttggcgataataaaaactagaattctcataggaaaattattgaaacacattacataagyatataatgaattaatatcagtaaaatatgggttaatttaaaaaaatagttactacatgcctcctgttctaaaaatagttactatatgcctcctgctttcaataggcccaccatttgaggccttgattatacaataatgattaaaataagtggttgaactgtaaggcc

SEQ ID NO: 184948 - DNA, 588 bp, Homo sapiens
aaagccaaagataataaaaaagattcatgaatttggcagaaattctatggtataatttctttacaggggtttctttcaaaagtgatgcagagccaaataactttaatttgtctaaggggacaggatggtgggccgttcttctcatattgtttgatacaagggagtttgtaatgaggatggaggagcttgtactcatctgtaacgaagaacagattccatagtttagttttgacttcaagcaacrtaaaattagtccattttcacgctgctgataaagacatacccaagactgggaagaaaaggaggtttaattggacttacagttccacatggctggggaggcctcagaatcatggtgggaggcaaaaggcacttctttcatggtggtggcaagagaataaaatgaagaagaagcaaaagtggaaacccctgataaacccatcaaatctcatgagacttgttcactctcaggagaatagcgtgggaaagacgggtcccatgattcaattacctccccctgtgtccctccaacaacactagggaattctgagagacacaaacaagtttagatttggctgggacatagcc

SEQ ID NO: 184949 - DNA, 603 bp, Homo sapiens
accactataaacattgtttatcataatcacactgactttcaaacttaaaccataaatctcctactgactattttttcaaatataggacatatatttaaacgttctgaaagtgctttaaataaccattcaaataaaaagtgcataatcttacaagatgtgatagtttcaggagtatcagaaataatattatatgtaatttacacctttggtaaagtgtcattcatgttaagaaactacgtagggtatgggatgtatgtgtgtgtgtgtgtgygcgcgcgtgcgagagagagagcgattaccttaacaaagtttaagaatgaagaaagtttaaatgatttttctggctaagggtacattcttagtgcttatgacttctcaatgaaaggattattaatgaatccgaaatggttacaaaattgaatctaaaatgatctcttatattctcttcatgaagttgtaatttatatttcattatgcattaaaattaataatagtacattttagacatttgttacacttgagttaatataattatgtagtctttataacaaatgctacccaccactcttctccaactcctatcactcgataaaaaaattaact

SEQ ID NO: 184950 - DNA, 590 bp, Homo sapiens
taggcttggtggttgttttcatggtatgtttattttttgttttctttctttttttcctgactctctgtgtttaccttgatgaatgttgatgatcatatgtacttgttaggaagcacttgattattattcacgtcttgtgacaaatggcacattatgtgaatgaatgattgtttctacatttaaatagttccattagaagtaataacatatgtaatacaatgtaatacaatattgaactaatttcaaatgattgttttaagctgcctatgaaaagaacaattactacttctctttttttttgagacggagtctggctctgtcgcccaggctggagtgcagtggcacgatcttggctcactgcaaccttcgcctcctgggttccagcaattcttctgcctcagtgtctcgagtagctgggactacaggcacacgccaccacgcctaggtaatttttgtatttttagtagaggctggtctcgaactcctgacctcgtgatctgcctgcctcagcctcccaaagtgctgggattacaggtgcaagccaccgcaccyggcctacttttaaaatttctatttgccaaagcaaattg

SEQ ID NO: 184951 - DNA, 510 bp, Homo sapiens
gaaaagacattttacaaagccctaacactatttttagcccatatatgtgttgtttggcaacgtttaaggaattactctgcttagacaggtgtattataaagtttattgcaatttactgtttaaagtgaatacagttgaatgctgatgataaattttctaaactcatgtgcttcatctttaataattagttttcttgttcaataaaataaaaattacatattgagatttccttatataagtatttttctatttwtcaaatagctttcttatttacttttaaaatgtcagagttatatcataactttaaaatttataatggcaaaaagtatctgctaagatacattgatactaaagtagaaactttcaaattaattaaaatcagttttaatagataagagctaatcactctaaaaccaattcatcaaaatggaacataaattgctaccttgaaataaaagaaaaacacatatatttctctcattttatattccatagtatctaataaataaa

SEQ ID NO: 184952 - DNA, 598 bp, Homo sapiens
tattgagatttccttatataagtatttttctatttttcaaatagctttcttatttacttttaaaatgtcagagttatatcataactttaaaatttataatggcaaaaagtatctgctaagatacattgatactaaagtagaaactttcaaattaattaaaatcagttttaatagataagagctaatcactctaaaaccaattcatcaaaatggaacataaattgctaccttgaaataaaagaaaaacacatatatttctctcattttatattccatagtatctaataaataaaccgcttggctatattcagtagttttttggatattttgatttaataatattaaacaatgggtaactgcttatgtttactcaatatttttgacatttctctgctcttaaatgattgcttgcttttttcttttactatttaatgatactttcctcttttcctttttttttttttttgtttttgttgggtttccatcatcatatttctgaacattttytcacctggccatggcaaattggcatgctcagttctaaataaacctatcaacttgaaatctttcttttaaattaaattagcacaaatcactg

SEQ ID NO: 184953 - DNA, 575 bp, Homo sapiens
tgtaatcccttcctctgatcacaccatgacctcatggagaattcattttgatcaactaatgaagaaggaaaagttttgtacctggtttgtggatggattaattgaatataatagtgctagatgataaatggaccattagcacacacaatcataatgagaattagccttaaaggactttggtgaaagggtaatcctcctcgtgggccaagctatgagcatcacatttggatttccatttatgtggtagaaaatctattggaattacaatgtgtttaaatgcttggatataggtgaatggctgacctgattgcacatagacctggatggagtaagacagaaagatcagatgtacaaagaagggacatgtggatggacctagaaaaatagaaataaattatgcacatctttggttttcttttgcttcaatgcttgcctgagatcatgcataacattgkccactggacaactgaagctatgtgcccaacctgtaagcagtagagactgggattaagcctttgataacgttccattcattacattagagcaagcaaccacttagaataagtcagttactg

SEQ ID NO: 184954 - DNA, 645 bp, Homo sapiens
agcgtaatcaacctccgagagccctcacacttgatactcaatattacatcacattggcccttttcaatttcagccacaatggaagtggatagctactggggaactcaaactcctgttattatctaaagaccaaaacaaatgtttccctgctttttgtactcaggacctttcccaaagctgagaatagtctgcataaatacagtctataaatatagtaaagttaatgaccccaaaggtaaccctcaaataatgaaagatggaagtcagtggataaaaactccagcctccgcctttggattcctagcagaattatgctctcattgcctacaaccagtgacctggattacatagccttatatcagtttttcattcttacttatctaatgctcttctctgtcactcctccttcagagtatttactaaattatctgcaactaagttcttgtctcaggttctgcttttaaagaaatataaaytaagatatctgtgttgtatactgaaaatcttttctaaaccaagaagagtaactaacatgtagcagctttcatgcaaattttattgaacaaataagctatattatttaataccaaagctagaattgtacataatggccaaacactaaaagggtttcaatttatttcacaa

SEQ ID NO: 184955 - DNA, 454 bp, Homo sapiens
tataatatataatatatttttatagtatatagggtattattttattggaaaatatccatataatgaaatacctattattaaatttaatacaactttagattctaaattatgacattttctacatgtatttatcctgttacgtttacctaattattttattttaatcatttacctacataatttgtgaaaactgtgatastcattatttaaagttatagaactgccattgtgaaattttaactgagacagtgaaaaagatatgacctaactgactccatcttgcttctaacctcaaggctgttcttgttcattcctgggcctaggctgatctaactttgggaggaaattaatttatactttagctttgaaacaaagacactaacagttccttctcaaaacaaaccttacagcctgtggactagattgcctaaagccacaagattagaagttatgg

SEQ ID NO: 184956 - DNA, 605 bp, Homo sapiens
aataagattgtacatatactaagttcacaaaagcacgaacaggataaacccatgattttaaaaaataggaataaaacagaatacccacatatgtaactgggatatttcagatcaccagagatcgttttttaatcctttagggaatttggtgcttgttggtattataaatttgataacaaaatataagcttactgaataagaatcattttaattgtattaatatcatgttaataatcatgttaatcgttttgattagcaattgtgttaatgcaaaattaatattattttaggaaaaattaatcatatatacttcttatttctagttacacaaagaactggtcctcaggacaaaagggtgtctaagttcaacacaagagttcaacaagaatcataaaatgatggctgcatagcaagcataaaaagcagattcatatggaagaatcagtagaattttttacagtttggatgctcttaggcatcttaatgattatttaacgattagaaaaaggggcaaagagaagaaatcatggatagggaagtgggaaacagcattaagctattttgarcaattgatgaagtgtgagaaaatataatctgttagatct

SEQ ID NO: 184957 - DNA, 579 bp, Homo sapiens
tcttgcttatcagtcagtcacccactaggttagccgtgtctacaaatcatacttcagttttctgccaggcaccagtctcatagagaagactaattaccctgaacttcaatcgtatcagaggctaatacaggcctggccatatgcccaatcccataattactagaataaccaaagaaagtaaaatgggaaattaaataactaaaagtaaaattttgtcaagatttyaaggcagaggtctgaagctatgggatgatgggttattaatcaagaaagatgagtataagtgaaataagaatgacaaaagaatgcaaaggatcctaaggaactgttacgaataattacacacaaataaattagatagcctacaaggaatgtataaattccttgatgtatacacccttcaaaggctgaagtatgaagaaatgtaaaattttaacaaaccaaaaatgattaaggagattgcatcaataataaaaagtctctcttcaaagaaaagcccatgatctgatgtcttcaatgttgagttccatcacacatttaaagaacagcgattgtcaactcttttcaaaatcttccaaa

SEQ ID NO: 184958 - DNA, 502 bp, Homo sapiens
catgagactgtaaatgtttaatatttgaatattaccacaaaatgtatgattgatagttcctatcaattaaatamtaaattgtttttcttaaaatgtgtttaatcatataattgagagtataacataagcttttaagtaacagagcaattgtaatacattttggcacttttttaatgctttattaaggttgttagtccattttgcactgctctaaaggaatacctgagactggaaaatttataaggaaaagatgtttatttggctcactattctgcaggtcacacaagcatgacactagtatctggtcagcttttggtgaggcttcttgtagcttctaccatggcagatgacaaagggagcacagatgtgtcacatggcaagagaggaagcaagggaaacaggtggaggaggagccaggctcttttaaacaatcacttctcttgcaaacaaatagagcaagaactcactcattaccatgaggagggcaccaagccatacatga

SEQ ID NO: 184959 - DNA, 579 bp, Homo sapiens
ttaaaataaggtgccatgtctttataaagccaagtttggagacaaagcgaaatttcagtgataacgtgcagtggttatggttgaatttttaaagtagaaatagcagttatatcataagtggtagtatcctttcacaaagcatgaatctggaaaacaattctgccatagtttccattttatttatttactttttctttattctagtactctagaatattttaaggcctgggaaatttggggggtttatagtacatgttccccattttgttccgtgtgacttgattgtagttactactttggaatctaacacctgatcacagtgaagtatctaagaacttttgaaatgtacagttagtactaaacaatcaagggatcttgaagaraatgggatgttctaaaattcagcttgatttttatccttagcacacccccacatgtaatagcatctgcaagactcccttctctgtgtcatatctgtcatctgaattctcaaatcatgtagcctttgattaaaaaaaaaaagctttttttttctttcttttctttttttttttttttagatatactactatagatatg

SEQ ID NO: 184960 - DNA, 430 bp, Homo sapiens
gttggtattctatctgtttggttttagacattatgtttcttcaatagccgaattatctttctgcatgaaactagaaaaaaagattctttcatgattctttctagttattagatttatttgctgggctctttaatatatttataccatgttaagaagattttgatactttggttctgttaccctgagtctccagcattttgaaatatgttagaattaagttttaaattttcagagagagagagagagagtttcaaaacttakattatcattttggcaatataataaatattaattcagaaacagaaatgaaaattagaaatgttttaaatctgtgaagtttcaaactatattaactcatattgaatgtctttcaaaagtaagacagttatatattaaggtattacattacatttgattttagagaagcatg

SEQ ID NO: 184961 - DNA, 521 bp, Homo sapiens
cctttgctaaatcctaacataaatcctaaataaactttgtgtttcccccagctttttataaatattataaaatattcaagtagatgaatggatgtttaggaaaaatatagatggacttcaaatgaagggaagacagatcctcgtgtgtaagtaataattgtagagagcgttagcaaaccataggctgacaggctaaacagcttacctggcccaagatgaacagacaacaggcagcttcccaacacactaaagtatatttccttagggaatatatttaattatagtgctagtaaaatcaatggatatttcaagttatttccccaaagaattcaacatttattcaacatttacacaataagaagtgagaaatcctttactgcctgatgctstgagccacagttaattgcagttgaacctttttaatttctaatatatattttaattataatcatgaaaatgtacctacactttttaacgtatcagtgctaaactcataaagttgcagcctctttctagcattg

SEQ ID NO: 184962 - DNA, 521 bp, Homo sapiens
cctttgctaaatcctaacataaatcctaaataaactttgtgtttcccccagctttttataaatattataaaatattcaagtagatgaatggatgtttaggaaaaatatagatggacttcaaatgaagggaagacagatcctcgtgtgtaagtaataattgtagagagcgttagcaaaccataggctgacaggctaaacagcttacctggcccaagatgaacagacaacaggcagcttcccaacacactaaagtatatttccttagggaatatatttaattatagtgctagtaaaatcaatggatatttcaagttatttccccaaagaattcaacatttattcaacatttacacaataagaagtgagaaatcctttactgcctgatgctgtgagccacagttaattgcagttgaaccttyttaatttctaatatatattttaattataatcatgaaaatgtacctacactttttaacgtatcagtgctaaactcataaagttgcagcctctttctagcattg

SEQ ID NO: 184963 - DNA, 472 bp, Homo sapiens
aaagcatctagcacttagaggatttaataagaatgcatgcgaaagtgcagggcgctgtgcttgatgtacagtaggttagagacaggtcctcctcccccacatcttattccataaatagctcctatgcccaacagaaaccaggtgcacagatctttccactttgggcctaggaggcagagggctgtaaacagccagaggtccagttttcagacccgaggtcattttctgacactgctcaacagcaatcttakagtaccgggggatatgggagacaagagctcggccccactctgcaagggagagaggctgccaggagccaggatgactccataggctgccttggggaagaagcaggtaagcaaacctagcccctggagcctgcctccggggaggtgatgacagcagaaaccttggacactccctccccacaccacctcccagctcccctaggctggcgcggccctccacttcc

SEQ ID NO: 184964 - DNA, 519 bp, Homo sapiens
tacctttgcctcattttttttttcatgtagacttgtctcaaagcagtgttcaggtcagcagaaagtccaagaaaagaagagacttttracactcattaggctgaggagagctcaatttattaaatgtaattgttttcagtaactattctttcatacattatttcctgaaaacttttttccctcctatcctttggggaatccagttacccttataataggccactgaagttatcccactgatgttctcttcccatttttatttttcatttcagatactttctattgttaaacaattacattcactgtttttttactgcaattgataatctgcttttgatttcatccagtatagttttcatctaagacattgtttccatgtttgtttgattaatcccgagaagatgatttcacattttgctctctctttcatgtctctcatttgatgctttcctctaccttttcaaacatagatacctgttttaatgtcattatctactaattttagcaactgtgtcattg

SEQ ID NO: 184965 - DNA, 519 bp, Homo sapiens
tacctttgcctcattttttttttcatgtagacttgtctcaaagcagtgttcaggtcagcagaaagtccaagaaaagaagagacttttgacactcattaggctgaggagagctcaatttattaaatktaattgttttcagtaactattctttcatacattatttcctgaaaacttttttccctcctatcctttggggaatccagttacccttataataggccactgaagttatcccactgatgttctcttcccatttttatttttcatttcagatactttctattgttaaacaattacattcactgtttttttactgcaattgataatctgcttttgatttcatccagtatagttttcatctaagacattgtttccatgtttgtttgattaatcccgagaagatgatttcacattttgctctctctttcatgtctctcatttgatgctttcctctaccttttcaaacatagatacctgttttaatgtcattatctactaattttagcaactgtgtcattg

SEQ ID NO: 184966 - DNA, 519 bp, Homo sapiens
tacctttgcctcattttttttttcatgtagacttgtctcaaagcagtgttcaggtcagcagaaagtccaagaaaagaagagacttttgacactcattaggctgaggagagctcaatttattaaatgtaattgttttcagtaaytattctttcatacattatttcctgaaaacttttttccctcctatcctttggggaatccagttacccttataataggccactgaagttatcccactgatgttctcttcccatttttatttttcatttcagatactttctattgttaaacaattacattcactgtttttttactgcaattgataatctgcttttgatttcatccagtatagttttcatctaagacattgtttccatgtttgtttgattaatcccgagaagatgatttcacattttgctctctctttcatgtctctcatttgatgctttcctctaccttttcaaacatagatacctgttttaatgtcattatctactaattttagcaactgtgtcattg

SEQ ID NO: 184967 - DNA, 526 bp, Homo sapiens
taattagaattcagtcattggctcttggtattcattgttcaaactggccaaagagctacacagagaaaagggcataattttatttaatttcaataagaatgtttttgtagtcttcttttgccctcacttttgtatgtaaatatttattctttctcaactccagcaacagataytaccttttgttaggccagtttaatctatctagagggaactgcttccaaacagggacaggttgagtatctcttaatcaaaatgcttgggacctgaaaaatccaaaattgtgaatttttttgaattttggagtatttgcatatacataatgagagatcttgggatgggacccaagtctaaacacaaaatttatttacatgtagcctcatgttaattttaattttctcttgaaagcactgaataaactatgtgttgtgtacctgtgctttggctatgatacattgcatgaggtcaggtgtagaattttgtacttgaggcatcatatgggcacccaaaaaatttcgaatttgggaga

SEQ ID NO: 184968 - DNA, 553 bp, Homo sapiens
gaaaacatctaaaattatacccaggactgacaactggcctagactcaatgtctttggaatttgctctactaaatttgctaccgtttgaatgtgttccctccaaaactcagctgtttytaatgtgaatatgatgcaaaaagtgaaaaccttatacatctttacagcagcctagaagtaaagatgaagcaatcctttttttttttttttttaaagaatctacagttactacaactaactgaaaaagtgggaaatctggagaccaacacatagaagaagaaaaatggcagtcaaagactcactctccaaattggacatttatttaaaccagggtttctcagcctcagcgatgtgtatatactgggccagacaatttgtggagggttctcctgtgtgttgtaggacgtttagtaacaccccctctacccaagagatgccaatagcacctcccatcatgaccagttgtgacaaccgaaaatgtctccagattatttccaaacatcccatggggggcaaaaatctccttcagttgaaaattactgtgtaaactagagct

SEQ ID NO: 184969 - DNA, 577 bp, Homo sapiens
ctaaaattatacccaggactgacaactggcctagactcaatgtctttggaatttgctctactaaatttgctaccgtttgaatgtgttccctccaaaactcagctgtttctaatgtgaatatgatgcaaaaagtgaaaaccttatacatctttacagcagcctagaagtaaagatgaagcaatcctttttttttttttttttaaagaatctacagttactacaactaactgaaaaagtgggaaatctggagaccaacacatagaagaagaaaaatggcagtcaaagactcactctccaaattggacatttatttaaaccagggtttctcagcctcagcgatgtgtatatactgggccagacaatttgtggagggttctcctgtgtgttgtaggacgtttagtaacaccccctctacccaagagatgccaatagcacctcccatcatgaccagttgtgacaaccgaaaatgtctccagattatttccaaacatcccatggggggcaaaaatctccttcagttgaaaattactgtgtwaactagagctacatcctagatcttagaaaaacatgtaagctt

SEQ ID NO: 184970 - DNA, 582 bp, Homo sapiens
aagtatttacaggttaaatgaaatgtactccagctccttcctccccactcctccccaaaaaagttggggagagatagacaaaacaagattagcaaatgtttataatttgttgaagtagagtaaaaggtacattttactatttcttagcttttatctttgaagatgtctgggaactcctgagctcaagtgatcctctcacttgggtctctcaaagtgctaggattgcaggcatgagccaccatgcctggccaatttttaaaaaggttaaattacaattaaaggattttcttttgagtgtgtcctagaatgctgtagatatttgattaaatatcagtgatcaatacagtgattacctcaacttcttgtctttgatcttcggtggtctcttctgtgtcctcactaagtctttccatcatgagcccaaattcttttsttctcagtggcatgtttctagattccagattctcataaattttgatattacctttactggaatggaaggaaatgaaagaaggtactcctgcaaacctgggaaccttatgaaagttatgctttcccattttaaagctgttagaagaaggg

SEQ ID NO: 184971 - DNA, 453 bp, Homo sapiens
agatcttaagctgctctatatcctcaggaaaaacagaggtcactatagcttccagctcctttagaatgaatgtccaaaagagatcataatagcctaaatctaatctaataagggggttcagagtttgcagtcattctaaaggaaaacagtcacatgtatataattttctcaagaattcaaaagaagtttaatatgctttcctaaacttgtattattagtcaagcagttcaaggagaacaatttgccatggacggaactatgaaaagttaaatcactaaaaaatcggtatttttccacaactgtcytatatatagatttctaatatgactcccatcccccactcccttttcgtttgtttgtttgtttgtttgttttaagagacaaggtgtctcgctctctcacccaggggggaatataatggtgcaatcacagctcatgtgcagccttaacgtc

SEQ ID NO: 184972 - DNA, 453 bp, Homo sapiens
agatcttaagctgctctatatcctcaggaaaaacagaggtcactatagcttccagctcctttagaatgaatgtccaaaagagatcataatagcctaaatctaatctaataagggggttcagagtttgcagtcattctaaaggaaaacagtcacatgtatataattttctcaagaattcaaaagaagtttaatatgctttcctaaacttgtattattagtcaagcagttcaaggagaacaatttgccatggacggaactatgaaaagttaaatcactaaaaaatcggtatttttccacaactgtcctatatatagatttctaatatgactcccatcccccactcccttttcgtttgtttgtttgtttgtttgttttaagagacaaggtgtctcgctctctcacccagggkggaatataatggtgcaatcacagctcatgtgcagccttaacgtc

SEQ ID NO: 184973 - DNA, 397 bp, Homo sapiens
aattcaaagagaagtcagctttttctttcttggttctctttttgtctcttaattgctgccttgaaatttctcaagtttttctaaatttcatagaccacggggaggccctattgaatttaaatacagtttaataaaattaaattgttacaactccakttgttggtgtatggatcttaacaggagtttctaattacaaagtaggttagttttctattgccacgtaacaaattactgcaaacttagcagcttcagacaacatccatgtatcatctcacagcttccgtggggcagggagtccaggcatggccttagtaggtcctctgcccagggtctcacaaggctgcagccgaggtgtcgcccaggactgaagtctcatctgagacttggggtcctcttc

SEQ ID NO: 184974 - DNA, 447 bp, Homo sapiens
gcctccaatttcttgttatgttgtccctgactgccaagcatgaggctacccttgggtctaccaagattctgtggcccatttgctccctccatgcactcttcttgttttaagtagcttgatgttttgttaattatctgaacttcagaaagccctaactgcatgccatgttatggtgttgccttgataatttttccagatttttcttggccttcaaactttctggttatctctaccttccttgacaaagggcagttaaagtggatttcacttcatgcacactgtgtgcctctctgaaaggacttgtgagtagaacgtyacttgatccttggatctctgaggttagacaaggaattagaaatatcttaactctactttagcccctaatcttatcattccaaatgtgtgcttaataagaagcagaatcaacacatcaggtcagaataagtt

SEQ ID NO: 184975 - DNA, 576 bp, Homo sapiens
gcttcctccaagccagctgcatgggacacaggaccagtgtcatgaggttgcagagagtcaggctaggttgttccgtggaaaatacagtagccaaagacctaaccttagttcaggaagcaagaaattcttcccctttgctcccatttcctcaccttggggctagtttggtgccttccctgtagtctraacccaacctctgctctttttggcattttataaagtgccaaaatataaacttcagtttttctgacaaggaggatgttagtttaattaccacttgatcattttgtgccactgccttctaacatcataaaatctctttccatgatatctatgatatttccatttctggtaccatcaatgccaacaaacaccatctgaccatacatcctgattctcattaagggatcccctaatatgaatggcatttgaggattttttcctatagtggactatagtcaactctgggacagtttttccaaagaagcctgaaatctgcatttttaaaaaaatatcaaatctcccaatttttaaatgctgacaaccattaaaacatttaacaatatatgagggcaa

SEQ ID NO: 184976 - DNA, 490 bp, Homo sapiens
tcctagactgcaaaccttgcagcgtgtaactgyaccaaatactgtaggcagttgtaacacagtgagaagtatttccgtatctaaacatagaaaaggtatggtaaaaatacagtattaaagagaaaaaaatggtacatctatgtggggtactcaccatgaatggagcttacagaattgaaagcatgaacattactgttcatgcctaggacattactgtacatcactgtagactttataaacactgtgtactgaggctacactaacgttattaaaaaagaaaagtagttgtgctacaatgttatgatggctataacatcactaggtgatagtacattttcagcttcattgtaatctatggaaccactatcttgtagaacattgttgactgaaatgttaagtagtgcatggttgttactaaaagtagaattgccaagttttatggcaggtggatgtttagcttttaagaaattgcctgtcttccacaatggct

SEQ ID NO: 184977 - DNA, 594 bp, Homo sapiens
gtggtgggaggtaggaatgtgtgtgattatgaaggaatagcatgagagtgttctttgtggcgatggaatagttttttcatcttgactggggtggtagttacatgaatctgcatgtgataaaatgatatggagctatccatgcacattttaccaaagtgaaatgcttggtcttgatatagtactgtagctaagtaagatataatcactgagggaaactggtgaagagtacctgggatctcaccatactacctttgtaatttcctgtatatttatatttcaacataaaaagtaaaaaatcagtacgcatcttatgttgctyagcttctataagaccactatccatactcaacccaagaaaacaccacacaattagcataggctggattattacatttgttatgttcaacgaagtgatatcatagtctttgtgttttttatgatgatcagacccacttttgaattcattctgtattcagtactacatactatattctatagactgagttggctgaaatccaggacataataagtaggtaggggaacttgggcaagatttgctaggcagggcatgctgtgactttaactatttgaata

SEQ ID NO: 184978 - DNA, 594 bp, Homo sapiens
ccattgcgtagaaagtgtctagagtgagatgggggcccagtcacygtccagagaggaaagcaggccacagttcttccattgctcagacgtgcctggagtggtgagcagagactgagtgaacacctgctgtggaggtgggcactgcagtggcaaaaatggggactcagtggcacctttcaatggcagacccaggctcttggccaagttgtgatgaaagaaattcagcagcaggtgggcgaatcagaggtgacaaaaccctgtttggggctgtttatcaccattttgagaaaattaaaaccaaagcaatgttttctgagactatttttgaacccattatgagtatgatttctagagtaggaagtacaggattggaggatgatgtgctcattaaagtccccaagaatggacagcagtgatgattcagaacaggcaagtcctggaagaggcctggttccgatgtggcaataggggagtagcttgaggaaacacactgcacatcccttgaagccttggactcaacaaagagaggccctgaagaattaagtgggctctctgctgcctctggcttcatgtcgcctgtatttaaatcatgat

SEQ ID NO: 184979 - DNA, 390 bp, Homo sapiens
atctatactgtttttgtgtgtgtatgagacagagtctcactctattgcccaggctggagtggagtggcacaatcttggctcactgcaacttccacctcctgggttcaagtgattcttgtgcctcagcctcccaagcagctgggactacaggcatgtgccaccacagtctgctaatttttgtgtttttagtagagatgggggtctcatcatattagccaggctggtctttaactcctggcctcaagygatccacccaccttgacctcccaaaatgctgggagcatgagccactatcccagcctagaccttaattattagacctttataatagtccttgtttgctagagcaaatcatcctgctttatgtttcttcttcaacaatgtcttggt

SEQ ID NO: 184980 - DNA, 608 bp, Homo sapiens
caggcctgtttacacaatttatttaaattacttgcaagtgtgcaatgtgaagtaaacagtccttgaagctgcttgttcagtgttactttaaatccctctttggggtcacttccaagatggcagaataggaacagctccggtctgcagcacccagtgagatctatgcagaagacgggtgatttctgcatttccaactgaggtacctggttcatttcattgagactggttggacagtgagtgcagcccacggagggcaagctgaagcagggtggggcatcgcctcacccaggaagcacaaggggttggggaatttccctttcctagcaaagggaagccatgacaagctgtacctggaggaacggtacacttctgtccaaatactgctcttttcccatggtcttagcaactagcagactaggagattccctcccatgcctggctcagtgggtcccatgcccatggagccttgctcaatgctaatgcagcagtttgagattaacctgcaatrctgcagcctggcaggggaggggcatccaccattgctgaggtttgactagggaaacaaagaggctgggaagctcaaactgggcagagcccactgcagctca

SEQ ID NO: 184981 - DNA, 433 bp, Homo sapiens
cctacaaagttccatgtgctgcactgggccctcagcccacacacatgcctaattctacatcttggctctccagtcttcttcacagacagcgcttggtgcctggggcctttccaagaagaaaggtgttatagtgtaaggctctggtgccagtcatgttggactggccttgctaacacaagactgttgtagagaagaagaggaggtctggtgtgccccagggaccaccccttggcataggccactgtagacgcagcatgaacatgctggggtcagcagggcagccagggctctattaaaattmtaggccagttggcacaaaaaagagaataagaatagggtgtcagttggagccctacacactgagctggcctgtggttttaaatatcgtgcaaatgctgacaagtctcgaaggtatattttcagcccagacctc

SEQ ID NO: 184982 - DNA, 584 bp, Homo sapiens
cttactacatgacagacacaaactaagtgcttcacatgcactatgtcatttaaaastcacagaactcctagaagcgaagtgtttttattcccattgcaagtaaggcccaagatgtgtgcaatccaaggctcaagctgggaatcaccacctcctgtcttcccttgggatagtgtaaggtggtgattaccagcgtaggtcctggacctcacagttctcacttcacttctggctcaaccatttacaagccatgttacttaccttgggcctcacttgaaataggtagggaggaggtgctaaagaaggctgttggcaattcagcatgtggcatgagattttgtcatcagccaagctgatacatgcaggtgaagaagtaggtgtaaggagagagtgagttaggtttagacaagtcaaatcaaaggagcataggtcttccatgtgtggatagtagcaaagagttgaggggtggatctgaaattctcgtgagggataagaacaggaagagagaggaggtgtgagagtggaagctatgacttcaagactcatattttacggataaatagaaaaagggctctcaaagacaactt

SEQ ID NO: 184983 - DNA, 584 bp, Homo sapiens
cttactacatgacagacacaaactaagtgcttcacatgcactatgtcatttaaaagtcacagaactcctagaagcgaagtgtttttattcccattgcaagtaaggcccaagatgtgtgcaatccaaggctcaagctgggaatcaccacctcctgtcttcccttgggatagtgtaaggtggtgattaccagcgtaggycctggacctcacagttctcacttcacttctggctcaaccatttacaagccatgttacttaccttgggcctcacttgaaataggtagggaggaggtgctaaagaaggctgttggcaattcagcatgtggcatgagattttgtcatcagccaagctgatacatgcaggtgaagaagtaggtgtaaggagagagtgagttaggtttagacaagtcaaatcaaaggagcataggtcttccatgtgtggatagtagcaaagagttgaggggtggatctgaaattctcgtgagggataagaacaggaagagagaggaggtgtgagagtggaagctatgacttcaagactcatattttacggataaatagaaaaagggctctcaaagacaactt

SEQ ID NO: 184984 - DNA, 584 bp, Homo sapiens
cttactacatgacagacacaaactaagtgcttcacatgcactatgtcatttaaaagtcacagaactcctagaagcgaagtgtttttattcccattgcaagtaaggcccaagatgtgtgcaatccaaggctcaagctgggaatcaccacctcctgtcttcccttgggatagtgtaaggtggtgattaccagcgtaggtcctggacctcacagttctcacttcacttctggctcaaccatttacaagccatgttacttaccttgggcctcacttgaaataggtagggaggaggtgctaaagaaggctgttggcaattcagcatgtggcatgagattttgtcatcagccaagctgatacatgcaggtgaagaagtaggtgtaaggagagagtgagttaggtttagacaagtcaaatcaaaggagcataggtcttccatgtgtggatagtagcaaagagttgaggggtggatctgaaattctcgtgagggataagaacaggaagagagaggaggtgtgagagtggaagctatgacttcaagactcatattttayggataaatagaaaaagggctctcaaagacaactt

SEQ ID NO: 184985 - DNA, 546 bp, Homo sapiens
tatttaccatatgtcaggcatataatgaatgtttcatatgttacatgtcatttaatcttcacaacagttttgtgaggtaggtagtattgcccatttcacagatttggaaaataaagcataggcggtatagggatcttggctaaagccatacaatgagtcagtgaagatgaatccagaactgacttcagaactgtaacaattaacccctgtactctacactctactgcctttgtaaagaatgaaaagtgaagagacagagaaatggtaaagaaaggatccctcaggggtgttttccaccactgtcctgarcacaatcagaaaagctccatactaaatcagaaaaacaaactcaaccagtctctgttccaaagcgatacttcataaactgcatcaagggagcactgcgttgagaaccattaccttgaaacccttcgggaaggttggtggaggagggaggttgtatgttggggacaggggtaggtggttgtagcactaaagcaacaccaaacaaaagaaagttcctgctcattccaaatcagtaacagt

SEQ ID NO: 184986 - DNA, 546 bp, Homo sapiens
tatttaccatatgtcaggcatataatgaatgtttcatatgttacatgtcatttaatcttcacaacagttttgtgaggtaggtagtattgcccatttcacagatttggaaaataaagcataggcggtatagggatcttggctaaagccatacaatgagtcagtgaagatgaatccagaactgacttcagaactgtaacaattaacccctgtactctacactctactgcctttgtaaagaatgaaaagtgaagagacagagaaatggtaaagaaaggatccctcaggggtgttttccaccactgtcctgaacacartcagaaaagctccatactaaatcagaaaaacaaactcaaccagtctctgttccaaagcgatacttcataaactgcatcaagggagcactgcgttgagaaccattaccttgaaacccttcgggaaggttggtggaggagggaggttgtatgttggggacaggggtaggtggttgtagcactaaagcaacaccaaacaaaagaaagttcctgctcattccaaatcagtaacagt

SEQ ID NO: 184987 - DNA, 654 bp, Homo sapiens
actccctggccctccccacttccaaagctcagacatcctaaatcgaagagattacagataatgtaaaggaaaggcccagagtttatcctctcaccattttaacaggaggcaggagtgtttaacaaaaacattcaaactcacttatctgacaaaagaagaaaaaggaattaaagaaaatttgttatatgtcccattttcaaaggcttcttgctttgagctgtttcaagttgagtgayagaaaagtttttttttgttgtgttttgttttgttttttgacaaacacagggctcatactatgagccaggcactgttctagggagttccaaatagtaactcatttaatacgataacaaccgtgtgagatagatattattattattaccatctcatagatgaggaaactgaagcacaaaggttgtgattttcatgaatcacacaactaagcagattcgagagttttctgccttccccaagggcattgttaattttgctttaatattagacttctttgtgagcaataatattataactcaccaaaaatagctgtgcacatttcaggcactgtgcaagagatagcagtaccagctgggacctagagaaccatttggcattcctcaaatagaattctgtgggctgttctccctcaaagccctt

SEQ ID NO: 184988 - DNA, 618 bp, Homo sapiens
ttccagtttgcagaaactagaaattatgtagctcaagtggaaattatgaagttcagtaagtgtaatgacagggaaagtacagaaatgtctaataggagcacccaaccatggttttgagtttttttgttgttttttaaaataacttcacagatgatattttgtctaaggcctgaaagatgggtagaacttggcaaggcagcaaggacagagaataacatcattaagaacatagcagtttcaataaactggaaaaaaaaagcatgatatgacccaaatgcagcatgaggcaaagatgtgggagagacgtgagaaattaggctgggaaatggatagaggccaaatcagaaaaagcctcaagaaccacattaaaaagatatatatatataacttctcctcaacttatgatgaggttacatcccaataaacccatcgtaaattgaaaatattataatttgaaaatgcatgaaatacacctaacctaccgaacatcatagcttagcctwgcctgccttaaatgtgctcaggatacttacattagcccacagttgggcaaaattatctaacacaaagcctattttataataaagtgttgaatatctcatggaatgtattgaatac

SEQ ID NO: 184989 - DNA, 551 bp, Homo sapiens
aatattctgtgactgccacttctagctgtgtgactttggatgagttgcctgaaatctctgagcctctgcttcctgatgagaagcatggtctaacacagctacttgaggtggtggttctgatgatgtaatgagaaaatgtttgtaaagcccttaaaggtgcaatcctcaataaatggtaaatgtcatcattaccattatcattaccacaactaccacctagtggtggtggtcatcataatcaacatcatcttccttattaccttattaagaaactaggaatactgaactaccttgtcttggaaccctgactcttgtattgcttgctttccrtatttgttaaacacttacaaacttgcaccaggccccaggtaaagaggaaaagtgaaaactctgagtctagtgggggagtctgattcccatcccccgcaaaaaataaatggcactgtacaaagtgattgatagcactgtagggatggactcagggaaaagggagcctagatgagcagtattgcaagtgataaaaactagcttcaactagctcaagccaaaaa

SEQ ID NO: 184990 - DNA, 577 bp, Homo sapiens
ttgagcaaattaaaatgtttaagtgtcagtggcctggtgttgaatctcatacaattctggcttcatttggatgggtggtctgggctaaatctaacccaggactctggaatcaaattcatccaccctttctgcttagccattctgccagctttttcccttggagatggagactggttatggaaatcagattttttgcttcttctaaacatgcagactcatagttcaaacttgtcatttgtgattctatgataaagaaaaaaataagctgagaggaaggaagacattatcatttctgaacttracttgaagctgacttaattcatcccaagctacgtctaagaataatagcaattcctcattagataccaattaaaataaacctctcttatcaagatgggatgacggttgaggggatctggtcatttaaacagaatgggttattgagagtcagcctttgaaatgaaaagtagggatggtagtccttcgaaattgtggacaaagtttttttctattcctgcatgtaatagcagcatccaacatttactgagagcttactatatgcctggcacagtactaa

SEQ ID NO: 184991 - DNA, 585 bp, Homo sapiens
tgggctgtagaatcatcaggtaccagtttaaatcctgattctaccactattagctctggacagtgagcaagttacttaataccactagacctaatttccttatctataaaatgaggactgtaatagtggatatataataagcctgttgagaagattcratgagataattcaattaaataatagctaatttttacttagtatttacttacataccaggcactattctaagtgctttatacattttagctcattcactcctcacaactttgtatggtagatattattcctagtttgcagataaataatatgagggctggagcggttgaagaatcttccaatgagttgcacaaataaatgatagacctgagacttgaaacctaggaagtctggtttcagagtctgggctgtgaaccgttatctgatgctaatcttagcatgatgcctagtagaaaatattcatgcagtgcatgtaagctaatcattattattataaagttactgttaacttatgttatttgactcaaggcaaatggtttaaagtgatagaggactttctctgaatttgttttccgttatgttgagttg

SEQ ID NO: 184992 - DNA, 570 bp, Homo sapiens
actcccttcaaatccttggtgatgcatataagggagatcttaaggaggttgaagggaaattgaagctggaaaagctgaattgatatttcagctgctgctcacaacagaagagccagatttgcaatttaaatcctgccaagttacaggagcttggtaaaaaaccttaggcttccattgaaatccccaaaagattataacttaggagtaaagcctatgttccagaattaagactttttttagctaaaggaaaagtctaaatagagttaccccccaaaaaaagtttaaataaatctccacaaatacaagatgattatctgataaattaattgcttattagaaaaaartcaacaattttcacagaaagataatagaatccaaagtctgaacaatagccaataaacaataaaaaatgagtagatatgtgaagaaactgaaaaatgtgagccatagaaaaaagaaaagcaatcaatgtaaatatactgtgatttgacctatattttggaattagcagacaaataatttaaaatattgttacagaaatgttcaaggaattatgagaaaggcagactg

SEQ ID NO: 184993 - DNA, 558 bp, Homo sapiens
agtgcaagaactctggcaactttgaaagccagagtgtcttcctaccttcaggagatcacactagctccccagcaatggtccttgagcagatcaaaatggttgaaatgtcagacatagaattcagggtctgggtagcaaggaaacttgttgagatataaaggaaggttgaaacccaatccaaggagaacagtgaaacaatccaagagttgaaaaatgacataatcattttaagaaagaaccaaactgaacttctggaaataaaaaattcactacaggaatttcaaaacacaactagaagtattaacaacagaacagatcaaactaaaaaaagaaactcagagcttgaattccgcttcttcaaagcaacacagacagacaaaaaattttaaagaaattaaaaagtaaacaaaacctttgagatwgagaaatatagcatactgtgaagagaccaaacctacaactcattggcattcctaaaagggaaggagagtgagcgagcaagttggaaaacacatttgaggatatagttcatgaaaactgtcccaatctcactagaga

SEQ ID NO: 184994 - DNA, 583 bp, Homo sapiens
ataatagtgggggatttcaacacctcactgacagcattagacagatcatgaaggcaaaaaactaacaaagatagaaggatttaaactggacacttgaccaattgtacctaagagacatctacacaacactccaccaaaccacagaatatacattcttttcacctgcacatggcccatactctaagattgaccgcaagcttgaccataaatcaaatcttaataaatttaacaaaatataaatcataccaaccacattcttggaccacagtgcaataaatgtataaatcaataccaaaaagatctatcaaaaccatacaattaaatgcaatctaaacaacctgctcctgattgacatttaggcaaagaataaaattaaggcagaaataaaaaaaaagtcgagtttcaggatacaaaattaaggtacaaaaatcagtagcttttcyatataccaataatatccaagctaagtaccaaatcaagaatgcaatcccatttagaatagacccaaaaagaataaaatatcaaggaataatacagcttaccaaaaaggtgaaagatctctaaaatgagaattacaaaacac

SEQ ID NO: 184995 - DNA, 581 bp, Homo sapiens
ccatgaaatactgcttggtaatgaaagggaacatgtgacaacatggaggaatctcaaaaatactatgttaagtgaaagtgatactgggcaggtgtgttagtccattctcacactgctataaagaactacctgagactgggtaacttatgaagaaaagaggttkaattgactcacagttccatgggctgtacaggaagcaagactgggaggcctcaggaaacttactgtcatggtggaaggcaacagggaagcaaacgcatcttacatggcagagcaggagagagagagagcaaagagggaagtgccacacacttttaaaccatcagatctcgtgacaagtcactcactatcatgagaatagtaagggagaagtccacccccatgattcagtcacctcctaccagcctcctaccccaacacatggggattacaattcgacatgagatttgggtagggacccagaaccaaatcatatcattctgcctgtggccactcccaaatatcatgtccatctcacatttcaaaatcagtcatgctttccaacagtcccctaaagtcttaatttattccagcactaactc

SEQ ID NO: 184996 - DNA, 581 bp, Homo sapiens
ccatgaaatactgcttggtaatgaaagggaacatgtgacaacatggaggaatctcaaaaatactatgttaagtgaaagtgatactgggcaggtgtgttagtccattctcacactgctataaagaactacctgagactgggtaacttatgaagaaaagaggttgaattgactcacagttccatgggctgtacaggaagcaagactgggaggcctcaggaaacttactgtcatggtggaaggcaacagggaagcaaacgcatcttacatggcagagcaggagagagagagagcaaagagggaagtgccacacacttttaaaccatcagatctcgtgacaagtcactcactatcatgagaatagtaagggagaagtccacccccatgattcagtcacctcctaccagcctcctaccccaacacatggggattacaattcgacatgagatttgggtagggacccagaaccaaatcatatcattctgcctgtggccactcccaaatatcatgtccatctcacatttcaaaatcagtcatgcttyccaacagtcccctaaagtcttaatttattccagcactaactc

SEQ ID NO: 184997 - DNA, 558 bp, Homo sapiens
acattcaacaagtctgtaggaagttttgaacttgccctaatcttcgtatcttcttctgagccccccaaactgtttcaacctctgcccattacccagttccaacattactgccacattttcaggtatctttatagcagtgccccaccttcctggtataaattttctgtattaattcattctcacctggctataaagaattacctgagcctgggtatttatgaaggaaagagttttaattgactcacagttctgcatggctggggaggcctcaggaaacttacaatcatggcagaaggtgaagaggaagcaagggatgtcttaaatcatggcagaagagagagagaatgaagggggaagcaccacacacttctaaaccatcagrtctcacaagtactcactcactatcatgagaacagcaaggggaagtctgccccccacgatccagttacttcccatcaggtccctccctgaagacatggggattacaattagaactgagacttgagtggggacacaaagccaaaccatatcagcaggtgagctacaaaattggggctt

SEQ ID NO: 184998 - DNA, 392 bp, Homo sapiens
gggggtgggaggagggggtaaatgaggacactgggttgtcagggcggccaggggggccaggttcctgctggagcggagagtgtctgcctgtgcgtgggggagcgagcacatgtgtgccgtctgtgactgcgtgcttgtgcaggccgggcgtgtgtggctcccagggtcacgctttgggatgtgtgtgtctgtgtgtgtgtgkgggggggcgggggggacacaggctcgttgcattgtctccgcatttgtgtccctgaatgtccccaagtgggacttcactcaacacattcgtgagtccctactgcgatagggcagtgaacaaaatagaaatctctgccctcaggaaactggcattctagcgtctgtgtcctgcggggtgctgtgaactcgcg

SEQ ID NO: 184999 - DNA, 589 bp, Homo sapiens
ttgctaattctttgctttaaatgaagtactaagttgaatatcatcaacaccaggcattggctccttcagcatttgtatagggggactgtctctccctggagctggccaactgcaggctcatgataaatgggatgaggaggttgccaaccaattcccttgtggtgtgtgaatggggagctagcaggcaatctgggaatgaatttgctataaatgactggctttagtatggttctctgtaacagcccgttgttttttgttttttctgagactactttgaaaacccagaattacatcagatcctgccctgtctctttctgacctctcataccagctgagcccttcacattcacctggaagcaaacactgaaaccagccactcctgaaaacaagtggagaagaggaccctcgtttttcctgggagagttgcttgcttaatcccctttacattcacccygtggctagctcctcctccatatactttttgactcctgacttaaaagttcccaggttactctaggaagagagctttcatttctgcagtagccctctccacatctcttcttggttactctactctaaattctccatt

SEQ ID NO: 185000 - DNA, 564 bp, Homo sapiens
agacacacatgtatttttttttatgtggttttagttttggttctcatttttttagctgaatgtatgtatgtatttatctgtttggtttttgctgctacaagtctgtgataaacatctttgtccatacatccctatgtatgtgtgcttctgtatactctatagtrtacagtcccataattgggaatgttaggacaaatgatttatatatttttattttaatagatattgtcagattattttccagaaagattgtggcaagccatgttctcactgacagcccatgaatttccccatatacttggtactgctcaatcttatcaattttccaatttttcctcatatgatagctgaaaaaaattccttaattggtgttttaattttcacttccctaatgatcagaaagatttccatatttttattggcaatatgtattttctttcaatagatttcctctttataattatggcttgtttggtgattgttatttttctcttcttgtcattttatagacattccctccataagaaaaatagtagccctctgaatatcatatgtatagctaaa

SEQ ID NO: 185001 - DNA, 564 bp, Homo sapiens
agacacacatgtatttttttttatgtggttttagttttggttctcatttttttagctgaatgtatgtatgtatttatctgtttggtttttgctgctacaagtctgtgataaacatctttgtccatacatccctatgtatgtgtgcttctgtatactctatagtgtacagtcccataattgggaaygttaggacaaatgatttatatatttttattttaatagatattgtcagattattttccagaaagattgtggcaagccatgttctcactgacagcccatgaatttccccatatacttggtactgctcaatcttatcaattttccaatttttcctcatatgatagctgaaaaaaattccttaattggtgttttaattttcacttccctaatgatcagaaagatttccatatttttattggcaatatgtattttctttcaatagatttcctctttataattatggcttgtttggtgattgttatttttctcttcttgtcattttatagacattccctccataagaaaaatagtagccctctgaatatcatatgtatagctaaa

SEQ ID NO: 185002 - DNA, 564 bp, Homo sapiens
agacacacatgtatttttttttatgtggttttagttttggttctcatttttttagctgaatgtatgtatgtatttatctgtttggtttttgctgctacaagtctgtgataaacatctttgtccatacatccctatgtatgtgtgcttctgtatactctatagtgtacagtcccataattgggaatgttaggacaaatgatttatatatttttattttaatagatattgtcagattattttccagaaagattgtggcaagccatgttctcactgacagcccatgaatttccccatatacttggtactgctcaatcttatcaattttccaatttttcctcatatgatagctgaaaaaaattccttaattggtgttttaattttcacttccctaatgatcagaaagatttccatatttttattggcaatatgtattttctttcaatagatttcctctttataattatggctwgtttggtgattgttatttttctcttcttgtcattttatagacattccctccataagaaaaatagtagccctctgaatatcatatgtatagctaaa

SEQ ID NO: 185003 - DNA, 620 bp, Homo sapiens
aattcttttgacactattccacaagttagaaaaagagggaacctgccttaattcattctatgaagctagcatcaacctaataccaaaaccaggaaatgacataaccaaaaaagaaaactacagaccgatatccttgatgaacataaatgttaaaatccttaacaaaatattagctaatagaatccaacaacatatcaaaaagataatccgccatgatcaagtggcttcataccagggatgcagggatgatttaacatatgcaagtcaataaatgtgatataccacataagtagaattaaaaacaaaaatcacatgatcatctcaatagatgcagaaaaggcatttgacaaaatccagcatcccttttaattaaaactctgagcaaaatcagcatacaaggggcatacctcaaygtaataaaagccatctatgacaaacccacagccaacataatagtgaatgggaaaagttgaaagcattccctctgagaactggaacaagacaaggatgcccactctcactattcctcttcaccatagtactgtaagtcctagccagagcaatcagacaacagaaagaaataaagggcatccaattagtaaagaggaattcaaactgtc

SEQ ID NO: 185004 - DNA, 556 bp, Homo sapiens
aactaagaggtgaaatgtggaagagatggtaggaagaggccagatcatgaaagacctcaaaagccttgtttaactgatattttttaaaggtccaggagaaattaaagtgcaaggaagagtagcgataatcaacagagcaatattcctgagaaggcaggaggagacaggagtcagatcttagatgaagggttaagttttaggcaagagaaagaaaaactctcacatagttactgtaaaaaagaaagaaaaggtggacacaagtacatgtaaggttacagatatattggtaggaaataaagggaatttgtaccaaaacacttgtattttctctgtgaagctgatgaagtcactaggtgtgtgtgaaggatgtagkgggatcctagttgaggttacaaaccagaagtttataatgtataatctttatggttttatatcctttttttcctacaagtgctcaatagccctggaataggacagagagagtagagagctagatttatcaagactcagaatttgccagactttgtaaaaatgaggtcaggaagtgacacagatt

SEQ ID NO: 185005 - DNA, 556 bp, Homo sapiens
aactaagaggtgaaatgtggaagagatggtaggaagaggccagatcatgaaagacctcaaaagccttgtttaactgatattttttaaaggtccaggagaaattaaagtgcaaggaagagtagcgataatcaacagagcaatattcctgagaaggcaggaggagacaggagtcagatcttagatgaagggttaagttttaggcaagagaaagaaaaactctcacatagttactgtaaaaaagaaagaaaaggtggacacaagtacatgtaaggttacagatatattggtaggaaataaagggaatttgtaccaaaacacttgtattttctctgtgaagctgatgaagtcactaggtgtgtgtgaaggatgtagggggatcctagttgaggttacaaaccagaagtttataatgtataatctttatggttttatatcctttttttcctacaagtgctcaatagccctggaataggacagagagagtagagagctagatttatcaagactcagaatttgccaractttgtaaaaatgaggtcaggaagtgacacagatt

SEQ ID NO: 185006 - DNA, 614 bp, Homo sapiens
ggcatttcatgtgaatggacaccaaaagcaagcaggagtagctattattatgtcagacaaaacaaactttaaagcaagagcagttaaaaaaaacaaaggggacattatgtaatggtaaaaggtcttgtccaacaggaaaatatcacaatcctaaacatataagcacctaacattgcagctcataaatttataaaacaattactaatagacctaagaaatgaaaaagacagcaacacaataayagtgggggacttcatcaatactccactgacagcactggacaggtcatcaagacagaaagtcaacaaagaaataatggatttaaactataccttgaaacaaataaacttaatagatatatacagaacattccatccaacaactgcagaatacacattctattcaacagtgcatgtaactttctccaagatagaccataagataggccacgaaatgagcctcaataaatttaagaaaatttaaattatatcgagcactttcttagaccacagtgaaataaaactggaaatcacctcccaaaggaacctttgaaactatgcaaatacatggaaactaaataacctgctcctgaatgatcatcaggtcaaaaacaa

SEQ ID NO: 185007 - DNA, 564 bp, Homo sapiens
atttacagaacatttcatccaagtgatatggaatatgcattgttatcatcagcacatggaacattttctaggatagatcatattttaagtcacaaaacaagtctcaacagattcaaaaaagccaaaattatatcgaatatcttttctgaccacaatagaatacaactagaaattattaacaagaggatctgaagaaattatacaaacacatggaaattaaacatgttcctgaatgatcaatgggcccatgaagraattaagaaggaaattttttaatattttgaaacaaaagaaatggaaacacaataataaaatctatgggctatggtgtaagcagtactaagagggatgtttatagcaataaatgttccaaaaaacagaaagagttcaaataaacaacctaatggtgcacctcaagaaactacaaaagcaagagcgaatgaaacccaaaactaatagaaagaaaataataataaagacgagagccagatgaaatgaacagagactaaaaaacaataccaagtacagacaaaacaaaaagttgatttttgaaaagatgaaatt

SEQ ID NO: 185008 - DNA, 584 bp, Homo sapiens
gccaaacaagtagcatgatttatagatgatagcttgaggacagaagggtaaaactcaatttagaaagcaccagcactgtgactacttgatggcttcattttaattgaggagggaagagacaaatgtgctcaatggatagaattaagaggagyatcctcatggcatcagaggaactagataacaatagtgatatggtatggatttttttggtttttgatttttttggtagtagccaatggactggcagtatagtttggaaaatgggtcttcttttactgcaaaataaaagaaatccaagtgtgggctactttgttacagaaaattttatggatttgaagaggaaaaataaaaaaggtgtatgttagctcctcatttagtgaatacccttctgaactcagaaagtgctctaaactacagtgcattaacagaaaatttgagatataatcagaccaacagatcaggagacaattgccattgcaacaccatgaggggccacatggagaagcacaggttggtcaggaggcagagagggagaggaggaaactgggcaacagcctttttgtagtttctgtggaaggaaggaa

SEQ ID NO: 185009 - DNA, 619 bp, Homo sapiens
gtttcatttactgacatttaatgttattatttataaagtaagagcttactcttgctattttgstgtttggtttttgttttttgctttgtggtcttccttctttccttccttcctgtcttttagtgaaggtgatgttctctggtagtatgatttaatttcttgctttttaatttgtgtgtatatgttattttctgatttgaagctaccataaggcttgcaaataatatcttatagcctatcattttaaactgatgacagcttaacactgattgcataaacaaacaagcaaaaagaaaactaataaaaaactttatgttttaactgaatccctcccatttttaaactttttgttgtttctctttgtgtcttattctgtgttgtaaagtttttgtagttattatttttgattggtccattgtttagtctttctacttaaggtaagagtagtttacacagcacacttagagtgttaaaatattctatgtttttctgtgtgctattaccagtgaatttcataccttcagatgattcattattgctcattaatgtctttttctttcagattgaataaccccctttagcatttcttataggacaagtgcagtgttgctgaaatcac

SEQ ID NO: 185010 - DNA, 538 bp, Homo sapiens
tttttttttgtttgagacggaatctcagtctgtcacccaggctggagtgcagtggtgcgatctcggctcactgcaacctccacctcccgggttcaagagattctcctgcctcagcctcctgagtagctgggattacaggtgcgtgccaccaggcctcgctaattgttttgtatttttagtagagatggggtttctccatgttagccaggatggtctcaatctcctgacctcgtgatccacccgcctcggtctcccaaagtgctgggattacaggcgtgagccaccgtgcccggccactacagggttgctttatggggggatggaatgttctggaatctgatggtaatggttgtacgaccttgtgaatatgctaatcccccactgaatttttacttccaaggggtcaattttatctaataaatagcaaaaggcaactgagtagacctagggctggggggacatgaggagccaccactggtttgtcacctagcagaataaagttkaatctctgtaccatagcctgtgaggccctttgcaa

SEQ ID NO: 185011 - DNA, 458 bp, Homo sapiens
taataatcccttctgtttgatctagcctttcccctatatgggtccatgatcacacatattccctgggcttctagagctataaataagcaggaaattgcaaatatttaaatagctaaactttcttgtctccctgaggcatgatgggatttggctttttttaataggtcacaagacaatgataattgttgtggtggaacatgaagatatttggcatcttcttgaaggtaamtatctcggggaggtcactgcagggtctccacgcaaagcagaactggcatgattgggtggggaagaagggttgcttctgctggtgagcaaggcacagtggatattgggggctccaaggactcatattcatctgaatttgcgcaactgttctcatttcagttctcaaagttccactctttcttaaccaaagtctaacttgcacatagaagacccagtgaggctgtgaattc

SEQ ID NO: 185012 - DNA, 458 bp, Homo sapiens
taataatcccttctgtttgatctagcctttcccctatatgggtccatgatcacacatattccctgggcttctagagctataaataagcaggaaattgcaaatatttaaatagctaaactttcttgtctccctgaggcatgatgggatttggctttttttaataggtcacaagacaatgataattgttgtggtggaacatgaagatatttggcatcttcttgaaggtaactatctcggggaggtcactgcagggtctccacrcaaagcagaactggcatgattgggtggggaagaagggttgcttctgctggtgagcaaggcacagtggatattgggggctccaaggactcatattcatctgaatttgcgcaactgttctcatttcagttctcaaagttccactctttcttaaccaaagtctaacttgcacatagaagacccagtgaggctgtgaattc

SEQ ID NO: 185013 - DNA, 597 bp, Homo sapiens
gaggcaaaatttgtaacactatctgatgtggtggtgctcaatatatgtagaggaaatacttgagacaattgtattttagaagtgggaagcacaaagggacctaaatggaagtaagctttcaacacttaaagaggcaaagtgttgacaccagtagacggtgataarttatgtatttatattgcaatgtctagagagatcactaaaaaaaattatgtggggcaatatgctcgaaagcatcatagaggaaaattaattttttcaaagttcaagtaatgcccagaaggcaaaaaggaaaaacagaagaatgaaaaacagagggaggaaacagtaaagaagtaataacatggcaaacttaagcctcaatatatcaataattaatttaaatgcaagtggcctaaatacactaattaaaagacagagattagcagaataggggaaaaatgatccaacaatataaccgcctataagaaactcactttgaacataacaactatattagtttcctattgctgttataacaaattaccataaacttagtggcttaaaacaacacatatttattatctgacagctctggcaacagtagactggataaat

SEQ ID NO: 185014 - DNA, 540 bp, Homo sapiens
caccctagccttggatcttgcttccctagacctgctattgaaccctggtcactctcatcttcccaggccttgtccagtgtataaaggagtgagtgaaaacaactgtgaagggtctcccagcctgattgatgtattcctataccaatggccccttccaggtagtggatttaactcagccagaaatggccttctcaaagccaaaaaagcctcttccaggcagatggaggtctacctcagcgtgacatctgacactccctttcctgcagtkcagctctcattgcctgaaacgccctccctgagtcagtcaccctgcatcacttgcctcagcactcagggctctgcacacgtgctgtaggcatttcatctattttaataataaaacaaaaatgacctcagcatagggacaacagcaaccagtcaatggctgcaaaatcattcctacaatttcatattaacattctgtcatcagtgacgggaatgatgaagacattcattaaaaaaaaaaaaaaaaaggacagacttagccctgggaagatggat

SEQ ID NO: 185015 - DNA, 565 bp, Homo sapiens
tcctaccactagatggcacgatcagcacagccagctggtgaaaacagctctgaagtctaagggaaagggatcccacttcgttttcttttctcaggatgaagtttggaaataattatcacagatgtactgaagaagtcttcatttttgctgtaaatcatgtattaccatcagagattttcttgggcagtagacttccctgaggaatggttggaagtgaggcctagaaactggagtggtctctttgaaacgtcgtttgatcatgtccttcccatacatgcctcttttatcgtgtccttcccagactttaatctcactgtggtttgctgtcacctattcaagtacatataaaataagtcactcagggctgggtgcggtggctcatgcctataatcctagcactttggctgaggcgggcggatcacttgagttagagtgaaactctgtctggaaaaaaaaaaaaatcactcaggttgagagtgagaggcccctagtcctgcccctgaggcaccacagtggagccctggaactccgtgagccatggcygaagaaccactgcaggaggaag

SEQ ID NO: 185016 - DNA, 600 bp, Homo sapiens
gcacaattctactgtatccctgattgtaccaggggcaatatttgatgataaagggcagagtaaattgtagagcattaggttcatgtgatgacaaagcaaagggcaaaacttcagcagatggcaggccttgatcactggagacaaacattctggggcctttctggttagggcaatggagaacccattctaagagttatggctgagattgtgtgaatttaactcacccacctgcaaatcagagacagacttggctacaggaagcctctgttgctaggggcagaattggggagcttttgggaccttctctcttgtgagttgtccatggcctgggcttgcactccaaaagcctcctggctaattgaaatccactggtacagcttgcatcaacaaagactccaggctcctactcaggagttcattttgcccttggcctacctgtaaacccattagagtggagagtgcagaggaatttctctccccactaggtccagcaaacacattttcwtgtccttgtaaacgatgagggagtcttccatggaagactgtaggtagagccatcactggctttcacaacatggtttagtatttttgttgtcagtc

SEQ ID NO: 185017 - DNA, 279 bp, Homo sapiens
tgtcattgcaggagttttactctgttagatactcaaaaagtatttgttgaattaatgaataaatacaatttgtctcaagcaatgacctgaacttcttaaagagtcagacaacaaaatgtataaataaaccaatacaaggaatcaacatttggcaccactaaatcctgggtgtctagcatacaggctagctamtaaaatactaatgacatactagcaagtctagattttgaaaactgaaggaattgcatggcatatctgcacaccagattagcctaaact

SEQ ID NO: 185018 - DNA, 279 bp, Homo sapiens
tgtcattgcaggagttttactctgttagatactcaaaaagtatttgttgaattaatgaataaatacaatttgtctcaagcaatgacctgaacttcttaaagagtcagacaacaaaatgtataaataaaccaatacaaggaatcaacatttggcaccactaaatcctgggtgtctagcatacaggctagctaataaaatactaatgayatactagcaagtctagattttgaaaactgaaggaattgcatggcatatctgcacaccagattagcctaaact

SEQ ID NO: 185019 - DNA, 437 bp, Homo sapiens
gcagctgctcagtaattcccttagggcatcactgtgtgtggttaagatacagcatrataagatggacaagcatggtaaagtgccttatatcaaaacaggacagatagatatgcatagggggcatctgaaccatgtatctttaaagttattcttcatgaactccaaccctttcattttactgaagaaaatcatcaaggttattaggtgtcaaggaatattttttaaaagcagtgtcagagcagagagagccattgctcctcttccctggaccctttctcttagttgctacccaatctctgacggtcatgtttattatttaattttaaaagaaaaacaacatattcaagcattttagatagtaaagttcagatactacagccattctgtagtaagagaagaaaaggagtccatgctttgtttgaagcttgtaccacata

SEQ ID NO: 185020 - DNA, 662 bp, Homo sapiens
gcagcgcagttcttaaagtggtgattatttcatttttttacacttggaactccaattctttgtaattaattatgcaaaaaatgtaagagaagtttgtggaagtaaagcatcttggtattgcctaaaaattaaaaaaacttccaattcaaaacatgaatccttctgtacatgtcacccagtggctaactaaatgcctttaactgtcagaaactcatcttcatagggctgcccctgtggttgcgtgagggtggaactctgtatttctgtgcctttccttggctgatagcagcttacagtagttgttcttttagtccacccagcatgcctcccmatcctacccctcaccttgtccatgacccaagcccagggaagcaaagtactttccaagtatttttcaggcttagctgacagtaaagagccttcttttctctctggttgcttgatgaatgacagtctgggggaacataacgcagtaagataatatcaagtttgttgtaaaagtaagtgagagagaaaagagagagagagagagagagagagagagagagagagagaaacaccctggtcctagttttcactatggctagccctttttctgactttcccaccatttggttatgtgagccaataagcccttcttgtttgcttatgatacttccagt

SEQ ID NO: 185021 - DNA, 549 bp, Homo sapiens
  misc_feature (1)...(549): n = A,T,C or G
ctaggtgaggggctgataactttccccaaagagtggattataactatgtatattgagacacaaatattgttcatcttttcggaggctctcaacttatctctctntctctctttctctttctcattttatcagtgagaaagacccatgtcaggtcacccttccattactgtattttagtacaacacacactgtgagatacaggatctgtttctggagaaatggtgaatgaaccagatgacagagcccagagtatagggagttaactcctcatggagtgaaactaggccagttagaagtgagagatgggagatagytaggcaaatacatttcccattctttctgtctgtgggttactctggagagaggttctccctataaactttctgcaaaatcctcatgtacagaattaacaactctattgagtgacctgctatggcttattataaagtagtagccaaggtgataagacattgcattccattcttactttgcttcctgtatctttcactctcaccttcattgccatgatcttgcatccccagtaaaatg

SEQ ID NO: 185022 - DNA, 564 bp, Homo sapiens
gttctattgtgtacaaggtgcactggttcctaattaaggtttccattgccattattggtcataaagaattcagcatgaacaaatttattaatgattcccccaagctgacttgagaacaactcacggtggctgcattttaagtgagaattggggtgcagggaagaccrcgtagcagaatatatatttagagtggacagaaccagttaggacctagaccaaaatcctgagcagcccagggacagtctgggcagtatcacagtgtgggctaaagagaagggttggaagtgtcacaaggaaggaaagggaaatagaggatgtaaacatgaaaacaacaacaacaacaacaacaacaacagaaaccttattcagctgcgcagatttttttttaagcccatttgtacagccttaacacttacagagcaagaaggccctttgaaacaaaagaaggacttctaaacatgaaacttcactatattaaaatccattttaaaggtcagaatacttctttagaattagaaaagtgaaaaatatcagttaaaatgcctatctgaaatgtaaggtttt

SEQ ID NO: 185023 - DNA, 362 bp, Homo sapiens
tcaacttttctgctaagaattaaattttaatttctttagtcacctcttgcctctcatctgatctatctttaaatagatccatccaggttayggttcaattcttctgaccaacacctttaggagactatccgatgcttaacactatagtgttaagatactttatattttctgaaacacagatcaggttgaacaaggattttgtatatctttttttgtacataagaggcagtctaaattatactgtctagatgctattaggatttcttgaacattataagaatttggggaccacagtataatatcgtaattggaaataggactggcctggaaattctgagacatatggtttccctgccatgttt

SEQ ID NO: 185024 - DNA, 589 bp, Homo sapiens
tcagttcatctaaattcccagtctgtggcatgcagttatagcagcataaatgaactaagacaacatctatcggcctacaaatctcagattctttttgtgattctgtggaaatggagagagggaaagtaaatttacatggagataagtaggcttcagtgaggaataagataaagcccatgaccctttctctttagatgattaaaattattaggaactctgaggttttaggataatgtcagtcaaagttctcttgtaggaaaggaccttaaaaacccaagaaaacaaggaaagtaagaacctgtactagtgatccttgttccacacagaatatatagatcgtgataaggaaggcctttaagacracttcagacccagccaccccataaatgttagctcgtgagtaaaaaccataatcacttgtaccttggagatctgtgtggcgatcagaaccagagaggcaaccggtctttacgtgcaacactgtgtcacagcaatagaagccacagcagttgaaaaccaagtctagttggtgggcaacatggcctggcatttgtcaagagcaaccatgcaaataaggccaagtaagctt

SEQ ID NO: 185025 - DNA, 296 bp, Homo sapiens
aactaacattggattgcccaatttctttatcctaaaatcacatggaagaataaaaatcatctactatcattggttcataaatggaaggacattttaacatgataggtatttacaaaaarcaattctttaacttgaatacatttaaatgtatgagaaacacacactgttatccataccatcattgtgcaatggagcagttggaaacttcgtgacagctgggtcttcacctataaatgggcatttggccctactggctctgttggcttaagtctgacatacctgtttctttaccttct

SEQ ID NO: 185026 - DNA, 295 bp, Homo sapiens
agatcttgtgagaactcactcactatcaygggaatagcatgggggaaactgctcttatgatccaatcacctcctaccaggttcctccctgaacacctggggactgcaatttaagatgagatttgggtggggacacgaagccaaaccatatcacctgcccaaagagaaagggaggaaccaggatgatttccaggcaatcacccaagctatctctatcacattgcctcttttaattttattaaagcccttatcattcactgtcattttcttgtttactaattaactgtcttttcttt

SEQ ID NO: 185027 - DNA, 586 bp, Homo sapiens
gccatagggtgtaaatggagaggatatttcctgttatagatgaagtgtttccatttgatttagttctaggaagtcagcatgaattggccttatgttccctgcctccagaccctattctcctgcctcacctggtccacagacatgctttttcaatgggtagattgctcttatttttaataatagcaacctttttttaatagcatcttcctggataacagaatgcatccccccatctcttgaaccgtttgcggaaccttccttggtggagtggtgcttctttgagtcttgacagatgtaaacatctaggaaggtggaatcatggcatggggctcaggggtgccttggcataactatgagaaataggctttcttctctcaggtcctgtttttccttccttgccatcatctacctccttttcccttagccacctgttgtgtggactcacaccatttatgttgagttcacagccatttatatcattaagtagatgatacagagaaagaacaaaagaaacacatttaattttaatcaggccactatacacaatsatgaatcaagtgcttcagcagtcacaacaatttctttt

SEQ ID NO: 185028 - DNA, 499 bp, Homo sapiens
gggagaaattagcttaccaaatttcagaatgtattgcatagctgcattaaccaagactatgtggtagtggggaaggtatagacacagagaactattaactagaacagagaacccccaaatcaactccaacaatatgcccaactgatttggcagtggtgaaagcaactctgtggagagaaaattaccttctcaataacagtgtttcagcaactggacatccataggcaaaataaactaaccttgatattcaaaaaaatgaaatctcatattatacaaagttaacacaatatagatcatagagttaaatataaaaaaagtatttgaggagaaaattttcaatatctagggctagaaagaattcttggacttctcaccaaaaacaatctataaaaggaaaaartgataaattttacttcaccaaaattaaaaagtttttgttttgtggaagattctgttgaaaatgaaaaggtaagttagggagtagaagaacatatctgta

SEQ ID NO: 185029 - DNA, 479 bp, Homo sapiens
ttcctagttttagccactcttgattatatacaaatgcaattaggaaaattcaccaaaaatttgtcatgtaatatcaaaaaatacgtaccagggaggtttctgctggtgccaatcctcaaatgttctgctttyctcttgacctgcataagcagattgcatcttgcgtgcaaggtggcctggacatgtaactagagaaagacctatttgcatttattctgaaagctatctgaatcatgataaaataggggtaatgctggaattttgatgtttagtaggaatcatcaaaagagtaaaatattctcctcaagtgggtcctgaatactctcacttatgcatctacttacatgcatgccaaaaaatgcaaaaccctctcgtttatattttttacatcagctttatttaaccactactactgctagcatgctcaccacacaccttcaatatcaatgaaactatacatttatttgtaagcaacagat

SEQ ID NO: 185030 - DNA, 479 bp, Homo sapiens
ttcctagttttagccactcttgattatatacaaatgcaattaggaaaattcaccaaaaatttgtcatgtaatatcaaaaaatacgtaccagggaggtttctgctggtgccaatcctcaaatgttctgcttttctcttgacctgcataagcagattgcatcttgcgtgcaaggtggcctggacatgtaactagagaaagacctatttgcatttattctgaaagctatctgaatcatgataaaataggggtaatgctggaattttgatgtttagtaggaatcatcaaaagagtaaaatattctcctcaagtgggtcctgaatactctcacttatgcatctacttacatgcatgccaaaaaatgcaaaaccctctsgtttatattttttacatcagctttatttaaccactactactgctagcatgctcaccacacaccttcaatatcaatgaaactatacatttatttgtaagcaacagat

SEQ ID NO: 185031 - DNA, 558 bp, Homo sapiens
actataatgattatattataaatataaattattatattaggaatattataatatttatgtattatttataatttagctctcatgttgattttagacccacttctctctacttttatctgcatactaggatataygcactatagctactaaaaaaatgtgttcatattatctgcttgagttcagaagttaaatgtgaaaaggttgtcatacctgcatttttagcaattattagtctaaacgcacttttaagaagtggtctctttactttttttgttgaatcagaataacatcacaaaaaaatgttacaccgcaagccaggaagtatggtactgtagcaaaataagagaccactcttaggccttacttataacactagcaaagatatgtttatttttttaatagctacaaaataaattagtgaaagaaaaaagtttagaacatggattaagtgttaaaatagaacttttaggtaattttgtgtatcatatagctaacatctgagtgtgtcctgaaatgaacccaagatattatggtaaattgtgtttgaacaccttaagt

SEQ ID NO: 185032 - DNA, 558 bp, Homo sapiens
actataatgattatattataaatataaattattatattaggaatattataatatttatgtattatttataatttagctctcatgttgattttagacccacttctctctacttttatctgcatactaggatatacgcactatagctactaaaaaaatgtgttcatattatctgcttgagttcagaagttaaatgtgaaaaggttgtcatacctgcatttttagcaattattagtctaaacgcacttttaagaagtggtctctttactttttttgttgaatcagaataacatcacaaaaaaatgttacaccgcaagccaggaagtatggtactgtagcaaaataagagaccactcttaggccttacttataacactagcaaagatrtgtttatttttttaatagctacaaaataaattagtgaaagaaaaaagtttagaacatggattaagtgttaaaatagaacttttaggtaattttgtgtatcatatagctaacatctgagtgtgtcctgaaatgaacccaagatattatggtaaattgtgtttgaacaccttaagt

SEQ ID NO: 185033 - DNA, 440 bp, Homo sapiens
aacatttgaccacatatctggacactgtagcccagccaaattgacacataacattaactatcacagaaacaatgtatttaataggcaagaaaagaaaaaggagataaaggagaatcataaaaaagataaaatgaaactaaaaacaagcaaacatcatttattaactcagatatcaataagagaaatcaagcaaaagataatcttttttgcacctgtattagtggccttgaggatcacatgacttaatatttcatgcccacagagcaaaaatayaaagtgaatgaaatcatgagattgctgggagatgcagatgattgtaagtcgttgaagttccggtaagagaaaaagaaacacatgtaggatagattaagaattatataaaaaacagaggaaaacgctcatgagttaaataaatatctacaattgtaaatgtaaagaat

SEQ ID NO: 185034 - DNA, 575 bp, Homo sapiens
catttttcatgtgataattttccatttgtttctttttttcataaagtgttcaaattctttgcccatttttaatgcttttgacttttttcttcatatttagatatgaaagttccttatatattctggatataaatctttttcagttataagttatacaaatattttctccccattctgtgttattatgttgcttttcatttccctaactgagtctttggaagagcagaggtgtttaattttgataaagttcaactcactctttttttattttttctgttttgtgcttttggagacttacataagaattgttatcctaccattaggttataatattttctcctctactttacctaggaattttataattttaggttttacaccagattcctaatctaattttgkttaatttttaattactatgtgaagtattagtggaagtcatttttttacccataaacatctatttttttccaacacaattaattgtgttatgtcccttctacataaattatcttagcaccattgtctgaaattgagcatacagctatgggtctacttctaagctatgtattttg

SEQ ID NO: 185035 - DNA, 598 bp, Homo sapiens
acttttaggtgcaagtaagaggacatctaattcaaaccaatgtaacattaagtggtgtttgtaggcacaataaatcaaaagtcctgaagtgggaaaaactttaggtatagttwgtccaggaattcagttttatttccctgccattctctccatactggcctcctctgtgaggctgcctcatcctaactggcttccctcaagatatgaagatggctgccagcgtctcttggagcaacacgtttccctgtccagtcagggggagagagatactctcacaaacattcagagaaaaaccccagacatctctctgtttgggccaagtaaggttacatgtccactcctgaaccacagtggcaaagggcaatgagacgaccctgaggcttggagccctggagccaatggggtcaagtcaatccaaacagcatgacagtaacaccacggtatgtgtgtggaatggatactgtggagacacccacttgtctagcatagtaggggactgaattaaactgttctgcaaagtgggtcccttctgatctggtgatatcaaggaacggcctctggggtcaagttttgaaatcacctgccacactggaggtgc

SEQ ID NO: 185036 - DNA, 598 bp, Homo sapiens
acttttaggtgcaagtaagaggacatctaattcaaaccaatgtaacattaagtggtgtttgtaggcacaataaatcaaaagtcctgaagtgggaaaaactttaggtatagttagtccaggaattcrgttttatttccctgccattctctccatactggcctcctctgtgaggctgcctcatcctaactggcttccctcaagatatgaagatggctgccagcgtctcttggagcaacacgtttccctgtccagtcagggggagagagatactctcacaaacattcagagaaaaaccccagacatctctctgtttgggccaagtaaggttacatgtccactcctgaaccacagtggcaaagggcaatgagacgaccctgaggcttggagccctggagccaatggggtcaagtcaatccaaacagcatgacagtaacaccacggtatgtgtgtggaatggatactgtggagacacccacttgtctagcatagtaggggactgaattaaactgttctgcaaagtgggtcccttctgatctggtgatatcaaggaacggcctctggggtcaagttttgaaatcacctgccacactggaggtgc

SEQ ID NO: 185037 - DNA, 598 bp, Homo sapiens
acttttaggtgcaagtaagaggacatctaattcaaaccaatgtaacattaagtggtgtttgtaggcacaataaatcaaaagtcctgaagtgggaaaaactttaggtatagttagtccaggaattcagttttatttccctgccattctctccatactggcctcctctgtgaggctgcctcatcctaactggcttccctcaagatatgaagatggctgccagcgtctcttggagcaacacgtttccctgtccagtcagggggagagagatactctcacaaacattcagagaaaaaccccagacatctctctgtttgggccaagtaaggttacatgtccactcctgaaccacagtggcaaagggcaatgagacgaccctgaggcttggagccctggagccaatggggtcaagtcaatccaaacagcatgacagtaacaccacggtatgtgtgtggaatggatactgtggagacacccacytgtctagcatagtaggggactgaattaaactgttctgcaaagtgggtcccttctgatctggtgatatcaaggaacggcctctggggtcaagttttgaaatcacctgccacactggaggtgc

SEQ ID NO: 185038 - DNA, 522 bp, Homo sapiens
gacaggagaggctagttcactatgaataaggaaggcacaatctggttgggataattaattggctgtgtgagtaatgaatctaggatggccttgggatatgtaagttgggtgactggttggagagttgggaagactctgagatagggaggaggtctggttgatttggagtgcatgtggtttgtttagraagcagtgggttctatgagtctaaaattcagacaaggggtcagggctgaagacacagatctgcccacagaccctatggaaagaagaggtaaaggagagaataattcgaaatacagtactaatatttagggagttggtagaggaaatggtgccagcaaaagagaaggcaatgttaagagaagtagcaagagaactgagagagtaagattactgaagttgaggaggtggggagagattttttctggagggaggagggttacatttcagagacattaagtaggataagcaccaatgaggtcacttcatgagcttcatcagggcagtcagtagaacatt

SEQ ID NO: 185039 - DNA, 391 bp, Homo sapiens
ggtaaaggagagaataattcgaaatacagtactaatatttagggagttggtagaggaaatggtgccagcraaagagaaggcaatgttaagagaagtagcaagagaactgagagagtaagattactgaagttgaggaggtggggagagattttttctggagggaggagggttacatttcagagacattaagtaggataagcaccaatgaggtcacttcatgagcttcatcagggcagtcagtagaacattgggtgtagaatctagattgtctgcagatggtcagagagggaacgggaagtgagattataaagccagcgaataggagcttttgttcccagaagtcctattgtaaaggaaagaagcccatggaggcagtgggttaagcagatgt

SEQ ID NO: 185040 - DNA, 376 bp, Homo sapiens
taaaggagagaataattcgaaatacagtactaatatttagggagttggtagaggaaatggtgccagcaaaagagaaggcaatgttaagagaagtagcaagagaactgagagagtaagattactgaagttgaggaggtggggagagattttttctggagggaggagggttacatttcagagacattaagtaggataagcaccaatgaggtcacttcatragcttcatcagggcagtcagtagaacattgggtgtagaatctagattgtctgcagatggtcagagagggaacgggaagtgagattataaagccagcgaataggagcttttgttcccagaagtcctattgtaaaggaaagaagcccatggaggcagtgg

SEQ ID NO: 185041 - DNA, 376 bp, Homo sapiens
taaaggagagaataattcgaaatacagtactaatatttagggagttggtagaggaaatggtgccagcaaaagagaaggcaatgttaagagaagtagcaagagaactgagagagtaagattactgaagttgaggaggtggggagagattttttctggagggaggagggttacatttcagagacattaagtaggataagcaccaatgaggtcacttcatgagcttcatcagrgcagtcagtagaacattgggtgtagaatctagattgtctgcagatggtcagagagggaacgggaagtgagattataaagccagcgaataggagcttttgttcccagaagtcctattgtaaaggaaagaagcccatggaggcagtgg

SEQ ID NO: 185042 - DNA, 391 bp, Homo sapiens
tatggaaagaagaggtaaaggagagaataattcgaaatacagtactaatatttagggagttggtagaggaaatggtgccagcaaaagagaaggcaatgttaagagaagtagcaagagaactgagagagtaagattactgaagttgaggaggtggggagagattttttctggagggaggagggttacatttcagagacattaagtaggataagcaccaatgaggtcacttcatgagcttcatcagggcagtcagtagaacattgggtgtagaatctagattgyctgcagatggtcagagagggaacgggaagtgagattataaagccagcgaataggagcttttgttcccagaagtcctattgtaaaggaaagaagcccatggaggcagtgg

SEQ ID NO: 185043 - DNA, 391 bp, Homo sapiens
ggtaaaggagagaataattcgaaatacagtactaatatttagggagttggtagaggaaatggtgccagcaaaagagaaggcaatgttaagagaagtagcaagagaactgagagagtaagattactgaagttgaggaggtggggagagattttttctggagggaggagggttacatttcagagacattaagtaggataagcaccaatgaggtcacttcatgagcttcatcagggcagtcagtagaacattgggtgtagaatctagattgtctgcagatggtcagagagggaacgrgaagtgagattataaagccagcgaataggagcttttgttcccagaagtcctattgtaaaggaaagaagcccatggaggcagtgggttaagcagatgt

SEQ ID NO: 185044 - DNA, 391 bp, Homo sapiens
ggtaaaggagagaataattcgaaatacagtactaatatttagggagttggtagaggaaatggtgccagcaaaagagaaggcaatgttaagagaagtagcaagagaactgagagagtaagattactgaagttgaggaggtggggagagattttttctggagggaggagggttacatttcagagacattaagtaggataagcaccaatgaggtcacttcatgagcttcatcagggcagtcagtagaacattgggtgtagaatctagattgtctgcagatggtcagagagggaacgggaagtgagattataaagccagcgaataggagcttttgttcccagaagtcctattgtaaaggaaagaagcccatgraggcagtgggttaagcagatgt

SEQ ID NO: 185045 - DNA, 539 bp, Homo sapiens
ccccaggtgaagggctacagtgggggtggcctggcaggccccaggagaacactaggcttggagttggcataaccatcatcttgtcaacagcctccttcctgctgtctctgtttaaattggaggacaggaaataaaaacaagtgctgagtctataaaggctctgaatgctaacatctgaatgatgaccaaagatttagatacttttttttttgccaaatattaaaacaataatgtaaacactgaggcttttcttgggccccggctccagccccggaggcttctgtggctccatttataactaacagatgaagagcagagactgtgggctttgctaggcccattaacttggtctaattattggaaaatgtttttttcccagtgattaatcacagatgaaatatttcaactcacttcatgattttttcccttaytgtttccggagcaaacatactcacacacttctctgttcctgtcctttgctttgggaacagacactccatcacgcacatctcgggcagtcttggagaagcaccatgctg

SEQ ID NO: 185046 - DNA, 570 bp, Homo sapiens
cacaatgagataccacctcacacctgttaggatgactgttctcaaaagtcaaagggtaataagggttgacaaggatgtagagaaaaaggaaacatttatacactggttgatgagaatggtgattcgtatagccattatggaaaacagtagagaggttccgcaaaaaatgaaaagtagaattaccatgagattgatctggcaatctcattcctgtgtatataaccaaagaaaataagatcactaccccaaagagatatctgcactcccatgtttattgcarcattattcacaatagccaagatatgaagacaacctaagttttcattggtggatgattaaagaaaatgtgtatagatcatggaatatttttcagtcttaaaaatgtcgccatttgcgacaacatggataaagctggagaacattatgctaagtgaaataagccagatgcagaaagacaaacaccttataatcttgcaaatgtagaatctaaaaaagttgaactcatagaagcagagagtagaagcatggttattaggagtcagggggtggggaaaatagggagatgttggt

SEQ ID NO: 185047 - DNA, 570 bp, Homo sapiens
cacaatgagataccacctcacacctgttaggatgactgttctcaaaagtcaaagggtaataagggttgacaaggatgtagagaaaaaggaaacatttatacactggttgatgagaatggtgattcgtatagccattatggaaaacagtagagaggttccgcaaaaaatgaaaagtagaattaccatgagattgatctggcaatctcattcctgtgtatataaccaaagaaaataagatcactaccccaaagagatatctgcactcccatgtttattgcagcattattcacaatagccaagatatgaagacaacctaagttttcattggtggatgattaaagaaaatgtgtatagatcatggaatatttttcagtcttaaaaatgtcgccatttgcgacaacatggataaagctggagaacattatgctaagtgaaataagccagatgcagaaagacaaacaccttataatcttgcaaatgtagaatctaaaaaagttgaactcatagaagcagagagtagaagcrtggttattaggagtcagggggtggggaaaatagggagatgttggt

SEQ ID NO: 185048 - DNA, 515 bp, Homo sapiens
gaattctcctgcctcagcctcctgagtagctgggattaggtgcccaccaccatgtccagctaattttatttttgtatttttagtagagacggggtttcaccctgtwggccaggctggtctccaactcctgacctcaggtgatttgcctgctttagcctcccaaagtgctaggattacaggcatgagccaccgcacccggccaactatgatttgattactatgctgtctcatttctccttgcccctgtctgccttccctccccctggaagacacttgctcactatgtgagtgtggaaaatcacaatctctctgtgcctcattttccttatctataaggtgacaattcctgcttaatgttgttttgaaaatgagaaaataatgtagctcttcgtgatgtctagcaccaagtacattctcaattaatggaagctattaatattatcatcactattatatttccctattatccttcagcccttgtttatagacacccaaatttccatataattgaaaga

SEQ ID NO: 185049 - DNA, 461 bp, Homo sapiens
tgcatatgttaattagcttgatttagccattccacaatgtatacatataccaaaatgccattccatatgcaataaatatatataattttatttgtcatttttagaaaaataaaagtatgcatttctgtgctctatgtgagaccagctgtgaatcggtaactctggaggtgggtggaaytagataaatctagtgttttataagttcctgaggtgattcttttaatcaggtaaggctggcaagtaccagtctaattcaatacatctgaacctcccgggaagcttttcaaaccaggcaaacccatttttatctccatctgccttcagagattctgagtaagtctagaatatgtattgaaaaaacttcttaggtgattcttatgcttccctttcccatcccttcctcagttaaaaacccatttctacttgtttcacgtataatatatacactgtggtccacaact

SEQ ID NO: 185050 - DNA, 461 bp, Homo sapiens
tgcatatgttaattagcttgatttagccattccacaatgtatacatataccaaaatgccattccatatgcaataaatatatataattttatttgtcatttttagaaaaataaaagtatgcatttctgtgctctatgtgagaccagctgtgaatcggtaactctggaggtgggtggaactagataaatctagtgttttataagttcctsaggtgattcttttaatcaggtaaggctggcaagtaccagtctaattcaatacatctgaacctcccgggaagcttttcaaaccaggcaaacccatttttatctccatctgccttcagagattctgagtaagtctagaatatgtattgaaaaaacttcttaggtgattcttatgcttccctttcccatcccttcctcagttaaaaacccatttctacttgtttcacgtataatatatacactgtggtccacaact

SEQ ID NO: 185051 - DNA, 423 bp, Homo sapiens
tcaatgttctcataatgtaaaatgattagcttaggtagggcctctgtggcaactccaattacatggtattttctgctgggggcatcgtgtagaaaagatctattgggccacattttggctcaataattgattagtgatgtgtgccaaggtaggggtgaggcactacatcacccatcacatttttgccatccctaagtgaaatgctctattaattattactgagtttctttgatgctatagtgttatatgactgctgctaagatctcaacttactctcactttttaaaatatgtatttgcccttgtgccaatgrgaatgaagaaaaggaatagaagaaagtgatcctccaaactggtactgtgctttgggtaatgaagacccagaaatctggtccactgcttctctatgaaccatagcatttta

SEQ ID NO: 185052 - DNA, 686 bp, Homo sapiens
aagtaaataaaaacctaactgtgataagccaaacttttaaaaatttttaaagaaaatataggagaatatctttatgactttgaaataagtgcagattctttaaacaagaaatatacaaaccaccaaggaaagactcatgacttttactataattaaattacaaatgtctgtaaatccaaagacaatctcaaaaagtaaaaaggacaaaccacagagtccaagaacatttttgaaatgcctataaacaacagatgatcaatagccrgattatgtaaataacttataaaaattaaaaatttaaaaaacagcaaaacttagaaaattcaccaaaatttataaaaattaaaaattaaaaagaaacagcaaaacttataaaaagaaaattcaccaaaggtaatctgaatggcaaagtgacatttttaaaacaatgctcagggaaatagataattaaaacacaatgaaattcatttcatacccatcggatcagaaaaaaactaaagtctggcaatatccagtgtcgggaggatactgagcagcaggagtctgaactgatacctaattaagaggaaatctggcaaccacagacaagtctgtaacagcaaaatgttacaaacaacctaaaagttcaatagaagaatggataaattgtaatatacccacacactaaaatgctatatagcagttaa

SEQ ID NO: 185053 - DNA, 588 bp, Homo sapiens
ttaaggctaaaagagattaaattatttgtccaaggtcatagaggtagaaaatagtagtggtgagatttatatccaggcagtcagatcccagaacttatgggcctaacagttgcaaccatacagagctcctatttggtatggagacagccacactttgtatcatttacccacagattccttcacccaatatttcctagatactgactatattcaaaagaccttaaacagttttaaaagtttatgttaaaattgccccatcttcctagtgtccctgtgtggaaatctaatcttgtcaacttgactgcaagctccttgagggtagcttctttattcctatctctcttttaccctctgccctttyatcctgtcccagtatgctggatgtagatgctcacccaactgatggtcttgattggattatagcacctatagtctgtgacatgtgcaacagattctcaaattgggggagaagttagaagtcttctggtgaacttccctgattccaagtagccccaactacagctacaactaaaccatttaaggcaacacaataatttaattcaggggttggcaaatgatggcccatgg

SEQ ID NO: 185054 - DNA, 562 bp, Homo sapiens
gtttagttggccagatatacaaacttaaaattataatttattgtggtaaggtttctacaagagtacatcagagaggaaacattgggggtcctagaaaggttaatgagaggaaatgatgccttttgaaggatggattaggattagccaaatgaagaagtargaagagaaagagaaggggaaaagattgttctaggcagagggaattatatgaacaaagggctagaggtgagagaagttatggagcattcaaggaactgaaggaaattcaggattgctagatttagagtttgaagagtcaagaaatgtggatagagagacaaatagggactagattatgacttttaagttatgttaaggaactttgtacttcattttaagagcaattgggaactattgaaggatttttagctgaggagtgaaatgattatatttgcatccaatgctgagagtagaagtagtaggtggcctgaaccagaggactaataatagtgatgaagagaaatgggttgttttgagagattattgatgagttagatggaggttagaaggtagtggtgtctgc

SEQ ID NO: 185055 - DNA, 587 bp, Homo sapiens
caagtatcatatgaatagttttttactattaaagaaaaaattaattctttcattacgttgttttctggatatgctcaccaactagaattttgttgggctttttttcctcgtttgtatcatgaaaataagaagcatattacatatgcgtcttggtctcttctctccccattgagaattacttattaagagtaggactagattatcacaaaagtcactttcaaaacagtttcttgttttttttagagtgtgtgctccatagtaacagagttggacatgaagattcctccatcatgggtttggttagtggtttttccacttggagatgayaggtttcaggagaaaagcttttctatggtatgtgccatgttctaggtttttgagtgcctttctctgtgtgttggcagaagaatgaaaattacattcctttttatgacaagcacagtgctttgtgtgtgggtgtacattgtttcattaattcttacaacaaccctgttatctagatattatatttccattttgcagatgagaaaactgaggctcagatgaaatctgtaacttgtttcaagtcacttagctgttaagtggag

SEQ ID NO: 185056 - DNA, 572 bp, Homo sapiens
ctcctgcctcagcctccttagtagctgggattacaggtgcgtgccactatgcccggctaatttttgtatttttggtagagacggggtttcaccatgttggccaggctggtcttgaactgctgacctcatgtgatccrcccacctcggcctcccaaagtgctgggattagaggcatgagccacaatgcccggcctaatatttttgaaccaatgttaactactcacttaagaatttagccttacactaatatttgagataaccggtttgttgggctggttttagtattttctaacacaaataagaataaatactcaaacattcttaaaaagtgcatgtagcacttaagactatcttggtactccatttgggaaaccatgtagccaaggctgttggggcgaaccaaggtggtgggagtccgacgggccagcagggggcgcacttgcaggtcacctgaagtccttatttacgggataaggtggaggctgaggaaagtctttcagaggccggacgctggcactggacggagtagggaaccctagccgttatcccaccaaagggtcccagcgcctaga

SEQ ID NO: 185057 - DNA, 572 bp, Homo sapiens
ctcctgcctcagcctccttagtagctgggattacaggtgcgtgccactatgcccggctaatttttgtatttttggtagagacggggtttcaccatgttggccaggctggtcttgaactgctgacctcatgtgatccacccacctcggcctcccaaagtgctgggattagaggcatgagccacaatgcccggcctaatatttttgaaccaatgttaactactcacttaagaatttagccttacactaatatttgagataaccggtttgttgggctggttttagtatkttctaacacaaataagaataaatactcaaacattcttaaaaagtgcatgtagcacttaagactatcttggtactccatttgggaaaccatgtagccaaggctgttggggcgaaccaaggtggtgggagtccgacgggccagcagggggcgcacttgcaggtcacctgaagtccttatttacgggataaggtggaggctgaggaaagtctttcagaggccggacgctggcactggacggagtagggaaccctagccgttatcccaccaaagggtcccagcgcctaga

SEQ ID NO: 185058 - DNA, 572 bp, Homo sapiens
ctcctgcctcagcctccttagtagctgggattacaggtgcgtgccactatgcccggctaatttttgtatttttggtagagacggggtttcaccatgttggccaggctggtcttgaactgctgacctcatgtgatccacccacctcggcctcccaaagtgctgggattagaggcatgagccacaatgcccggcctaatatttttgaaccaatgttaactactcacttaagaatttagccttacactaatatttgagataaccggtttgttgggctggttttagtattttctaacacaaataagaataaatactcaaacattcttaaaaagtgcatgtagcacttaagactatcttggtactccatttgggaaaccatgtagccaaggctgttggggcgaaccaaggtggtgggagtccgacgggccagcagggggcgcacttgcaggtcacctgaagtccttatttacgggataaggtggaggctgaggaaagtctttcagaggccggacgctggcactggacggagtagggaacccyagccgttatcccaccaaagggtcccagcgcctaga

SEQ ID NO: 185059 - DNA, 382 bp, Homo sapiens
ggatggtttaatctggatgccttccttgtttgggaggtactgtagaaaagaagacacattttgaatatggtgccatagctttagaaccaaaatgtaaacaaaagtgttcagcagtaatgtttaaaaaaaaaaaggcctctgaattataattctkcttcaccttaatcattaatgtcatcatcattcttttacattaaaaagaatgtcaggttcttgacagaacagagctgctatgcagaatttggaaattataatgattcaactaataggggctgctaaggtgagctagcaaatgtgctaacatctttatgcattatctcggttagtcttcccagcatctctttgagaaagatattattatctccactttcatataaggaaa

SEQ ID NO: 185060 - DNA, 224 bp, Homo sapiens
accataaaaattttaacatgagtaacaaaacaagcaatagtagcaaagtgtaacacaaccaaaacaggatccagaagtgtacatacatactttggagacaatcagcatagataarctatagcaagggactaatggtgtaaacacaggttatggatgacaaaattgaaattgagaataatccacccattcatgtatttttctgtgccattttgggaaagacagcc

SEQ ID NO: 185061 - DNA, 628 bp, Homo sapiens
taattaattgacaataataaactattaatgtttcgttgaatgaagtgaatggatacaagcattgaatttctggttcaatgactcaaactctcctttactcactaaatgtttacctttttgcttctctccctggctgaggtccttttctatacatttgcttttgaatttgtcttttaaaagactctacttgtttatgtctcattcaattaatttttccaaaaagtagcacatcctccctgctcttctctattgtccagatgttgtgtcagtgcaggatgatagaagsaaggcagaaatgatgctaagtgacaaagtgtaaagtgcgaaattcacgtgtattattttccctcttctccctttctcctaatgcgttaaaggtaatagtctgaatcaaggctctgaatttgtttactcctttctgacagaattagctggggcagttcagtctctctgatttattgttgagtctcatcactatccattgctttcaggcatttttttttcattctcttaaaaaattaaaattgcccagagacatcctccatggttattcggtttgacaaacttatcagaagatatagagcatggcttagagtagatcatatttgtcctggtgtatttgtgacac

SEQ ID NO: 185062 - DNA, 580 bp, Homo sapiens
atttctgtggcttaagttaggaagaaaactgactagcagttaggcaagaatgagcagtaacgctgataaacagtaggacttgtggatgctattaactttgcttgcgattttctggttcaggaatgaacatggcaaagaagctctgaaagataagccagaagagacaggtctgattcttttgtgagcattcatttcctcacttacaaaactaggcaatcattgagggcttttttcatgtcattcataatacaggcattttatattaaataaatcaaaagatcacttgcagttctaacattaaatgccttggggttatgggttttctccttcctttctctctcaacttgaactagttataagaaatcaataaatgtcatgtcaaagtgttgaaaattattattcagtttctgtcaagcgaattatgctattccatgaaatacaatggtgctgctgggatcatgcttgtaggaattatctgaaactttgccattaaaggcctcttgcattaaaaagcgaaaagaatctaacgtaaggatgtataatgtaagtaytgaacatctcatcagggtcttctttcagt

SEQ ID NO: 185063 - DNA, 596 bp, Homo sapiens
gcaatcacacttctgagtatgtatccaaggaaattaatatctggactttgaagagatatttgcactcccttgttcatcacattattcacaataggcattacatggcacaaacctaagtgtctgtcaacagatgaataaagaaaatgtgctatgtayacaatggaatattattcagccaaaaaaaccctttccattttttacaaaatagataaatctggaggacattatgctaagtgaaataagacagacacagaaagaaaaatactgtatgatctcatttatatgtggtatcttacaaaaacaaaaaggttaaattcatataagaagagaggagagtggtagtttccagggtcaggagggtatgaaaaatggggagatggtcaaagggtagcaactttcagttataagatgagtcagttctggggatctaatattcagcatggtgactatcattagtaatactgtattttttacttgaaatttgttaaaagagtacatcttaagtgtcctcaccccaaccgcccacacacaaacacacacaatgataattacatgtggttgtagatgtgcttattaatttggttgtagtagtttta

SEQ ID NO: 185064 - DNA, 549 bp, Homo sapiens
taaatactttaatacgtgattgaacaaataaactgctactattcaaggataacaaaaacaggagtattcttgtttcttctcctggatttctatagaactgcataatgccatgcttaagaatttgggcctaagacaaacctgggtttcagttctagttcctccacttactggctgggtgaacttgagcaactttctttatttctctttcccactgtacaacagatataatttaatcgaaattagmctcaaatttgttgtgggggattaaagaacatacaagaaaaaaaaaatctggcacgtgagaggagaatatgacaatattagctattatttcttccttctaagtttctttcctgaattggcaaaatgaaagttcattatgatcagtgacttttacttttaataagaagacacttatgtagtcataaggagtgaaaatttattattcccaatgcttaaatctgacactcaaagcaaaccacactgactccttctgccttcctgttgacagcaccctattaaacagaaatgctcccatcaggggggatg

SEQ ID NO: 185065 - DNA, 605 bp, Homo sapiens
taaatgtttgacctcttatgttcttcagcttctacccataaatgctgaagattctagctgagaaatcaaatattcagcatgccacggataatacacatctcccaggagggcaatgcaatattctaagacattggaagaggaggttgtaatactgtggctgtgcttgatagataatgagacatatgctggagaactctgaaattacttcctgcaaaatgacagggagttgatatatagtttggaactgtgattccagacctccattgcttaagaggaaagtcccaatgacttaataagaatccttgtgggttgtttcaattatccatgtttggattgtcyatttctacctgaaaatacatgtctgctacttgtgttaatatttattcttctgagattcaaacatttcaataatatagaatattaagtctagctttcaccttttacagctgagatctggagtagtcacatctcataagtgtttggtggatgacctattcaatccagataaaaatccatgatatagtgtgaaataatgcatgcatgcatacatacacaccttagcctacatgcatttattttagcaaacacctacaatataccaagta

SEQ ID NO: 185066 - DNA, 605 bp, Homo sapiens
taaatgtttgacctcttatgttcttcagcttctacccataaatgctgaagattctagctgagaaatcaaatattcagcatgccacggataatacacatctcccaggagggcaatgcaatattctaagacattggaagaggaggttgtaatactgtggctgtgcttgatagataatgagacatatgctggagaactctgaaattacttcctgcaaaatgacagggagttgatatatagtttggaactgtgattccagacctccattgcttaagaggaaagtcccaatgacttaataagaatccttgtgggttgtttcaattatccatgtttggattgtccatytctacctgaaaatacatgtctgctacttgtgttaatatttattcttctgagattcaaacatttcaataatatagaatattaagtctagctttcaccttttacagctgagatctggagtagtcacatctcataagtgtttggtggatgacctattcaatccagataaaaatccatgatatagtgtgaaataatgcatgcatgcatacatacacaccttagcctacatgcatttattttagcaaacacctacaatataccaagta

SEQ ID NO: 185067 - DNA, 605 bp, Homo sapiens
taaatgtttgacctcttatgttcttcagcttctacccataaatgctgaagattctagctgagaaatcaaatattcagcatgccacggataatacacatctcccaggagggcaatgcaatattctaagacattggaagaggaggttgtaatactgtggctgtgcttgatagataatgagacatatgctggagaactctgaaattacttcctgcaaaatgacagggagttgatatatagtttggaactgtgattccagacctccattgcttaagaggaaagtcccaatgacttaataagaatccttgtgggttgtttcaattatccatgtttggattgtccatttctacctgaaaatacatgtctgctacttgtgttaatatttattcttctgagattcaaacatttcaataatatagawtattaagtctagctttcaccttttacagctgagatctggagtagtcacatctcataagtgtttggtggatgacctattcaatccagataaaaatccatgatatagtgtgaaataatgcatgcatgcatacatacacaccttagcctacatgcatttattttagcaaacacctacaatataccaagta

SEQ ID NO: 185068 - DNA, 605 bp, Homo sapiens
taaatgtttgacctcttatgttcttcagcttctacccataaatgctgaagattctagctgagaaatcaaatattcagcatgccacggataatacacatctcccaggagggcaatgcaatattctaagacattggaagaggaggttgtaatactgtggctgtgcttgatagataatgagacatatgctggagaactctgaaattacttcctgcaaaatgacagggagttgatatatagtttggaactgtgattccagacctccattgcttaagaggaaagtcccaatgacttaataagaatccttgtgggttgtttcaattatccatgtttggattgtccatttctacctgaaaatacatgtctgctacttgtgttaatatttattcttctgagattcaaacatttcaataatatagaatattaagtctrgctttcaccttttacagctgagatctggagtagtcacatctcataagtgtttggtggatgacctattcaatccagataaaaatccatgatatagtgtgaaataatgcatgcatgcatacatacacaccttagcctacatgcatttattttagcaaacacctacaatataccaagta

SEQ ID NO: 185069 - DNA, 520 bp, Homo sapiens
tgaaactgggcaatccattcattattaatagatgtgctcacataatggaaggtgtttctgtgggttttttttaaccaacgacacaatagaaatgtttaattaatgacatgtgcaagtcttaagcaaagatttacttgttttatgggcttagcaaattcattcagccacttcctcccagatgctgacaagcctgtttgtttatgctcactggctcttctaaaaaccagccaagtattaggattatttttgaagtagctcagtaatctctgaggtagggactggatgtcttcagtatctcacccactacacataggctctttatgggagcactgcctggccctcaaagcaggcattagataagccagccctaccttgctggaatatagaatgcaattttccattggatagaaactattgactatttacacagacacagttataatttgtttttaraaattcttccagggttttctcttagctttttaaaaaattatttaatcttgatcgaaagctagacctg

SEQ ID NO: 185070 - DNA, 607 bp, Homo sapiens
cattattattttcatgttaattattgttttctgtcattattttgttgcagctggtaagagactcttcactttatgtcaaccaaatagattttgcatcccaaaggccctgcgtgatcttcatgttcatacccttgagaatgatagaagcttctactctatgtggtgtgctctgtgtggccagcagagggagcaaggagttctttataaaagtaacctttctttctgcctcaaattggcagattggagataaagtgctgatctttgggacaagtcagcattacacagactagcttcatgtagaacaagtatttttcatttctaactgtggaatgaaaaagaaaatggtgtttcttctcttctcctaattttatgggccaatgactcctctccatacaaattatagaaaaatgcaattcaccatgaaccactcattgcttccctagcaaattcatccgttgatagcatacagataayttattcatacattcacacggtccatcattcattcacagagatagatacttaacagagacataaggtcctatgtggctgacaatgtgagtcatgtttggatggatagaagattaagaaaaataataagagtata

SEQ ID NO: 185071 - DNA, 633 bp, Homo sapiens
gcatttattgatgtatgactggaatggagaaatggaatagagaaaattcaccagaatgttgacagtggttttctatgaatggagggtcttagcaggtgttgtcaatgctctttccatacccactagcttttgtttttcctatgcaagcttttctgtgctctactggcaatttctggaactctgcctctcatctttctccagccctatatgtggaataatcaggaagtgaggaaaaacgaaggttgggaggacagccctctgggaatgataaatggtatttagagaataaacaatccagcttcktcccccttgggtacagggggttacagctgtgaggaatggtccctgttgtctcccagaggtctccaggagactgaactcctgttgttttcagcagtcaactattcattaaggcaccctcattggattctttccattgtctttattccatactctgctaagagtacttcctgatttcaccttccacataggttagttgcactcaaatctttgccatagctgctgcttaggaaagcataaaaatgagttgtttgaatttttttctttcttcgtactcttttctactgcttacatatttttctctatgtatgtttctatatacacatgtaaata

SEQ ID NO: 185072 - DNA, 332 bp, Homo sapiens
tgaattcaagtcaaaattctataaaagtgcaggtgactggcatccacattaatatcaaattgttcatcaggagtcctgttattagagtaaataccaagaaaatttactatgattgggtcattattttaaagtgtcccaattttaacatttttttttctggacagttgtgttttattaggattgggtaatttacattcattatacagagtcttactgtatcataaattaaggaaayattaagaaaaagcatgtagatttacaagttgacaggcaatcagagctttatgttttagaaatagttgaggtttgaatgaacattaggtctctttact

SEQ ID NO: 185073 - DNA, 584 bp, Homo sapiens
tattggaggatgtatatagattataygcaaatattaaatactacatttttctgtataagggacctgagtgtctataaatgttgggttctatggggcatcatagaaccaattcccccacagatagagaaggatgaccatataaagattggaacatacaaagacacaaagatttacagtacagaagggaaacgaatatacctgtgaaaccactggattcaggtataaaacgcctagagaatagtttacagcattaaaagcatatattaaaaataagaaaggctcagaatcagaaatatagaagttcatctaaaaacatttgaaaaataacagaaaattaaaaccaaataatgtggaaataagaaaatatgtaagtaaatattgcccatgaccttgaagtttatataaaatgaacaaatacaaaggctcaacttcctaaaaccaaaacaagaagaaatagaaggtctgaaaaaggccacatcaaagaatatccaaaaatatgctacgtcaaaaaaaatcctaccaaaaaaagtgaactcagtttggaaagtctttctatagagaaacctaaggcccaaagcgtccat

SEQ ID NO: 185074 - DNA, 584 bp, Homo sapiens
tattggaggatgtatatagattatatgcaaatattaaatactacatttttctrtataagggacctgagtgtctataaatgttgggttctatggggcatcatagaaccaattcccccacagatagagaaggatgaccatataaagattggaacatacaaagacacaaagatttacagtacagaagggaaacgaatatacctgtgaaaccactggattcaggtataaaacgcctagagaatagtttacagcattaaaagcatatattaaaaataagaaaggctcagaatcagaaatatagaagttcatctaaaaacatttgaaaaataacagaaaattaaaaccaaataatgtggaaataagaaaatatgtaagtaaatattgcccatgaccttgaagtttatataaaatgaacaaatacaaaggctcaacttcctaaaaccaaaacaagaagaaatagaaggtctgaaaaaggccacatcaaagaatatccaaaaatatgctacgtcaaaaaaaatcctaccaaaaaaagtgaactcagtttggaaagtctttctatagagaaacctaaggcccaaagcgtccat

SEQ ID NO: 185075 - DNA, 552 bp, Homo sapiens
cattattgcattttctggaagtatactgtaggggcttcttttccacttcaaagttaaagccattaaacttactgttccatgtaataaattaataaacaagaatagattaaccaaatgatatggagcattaccttcttccagttcctctcattctcatctagttcgttgttgtttctctcttgggaagtggggaaaacttctatttaaatttagattgaataaagtgctyggtaagatatttcagaatcccagaagtgtggtatgtggtggagagaggaaaatggctttttttttttttttttcctggagcttttgaatacgttggcctgtgagcaggtctgttgagcatggctgccaaaatatactggcagtcatttaggctcccaccagagctgagaaagcaacccagaaacaatttccctaaataccaactgtcttatgtggcttcatgaactataatattgaccttctttatgagcgtttgtcttcaacttgtaaaaataccacaggcttcgctatgccaaggagagaaagatcaacagcagcaaccac

SEQ ID NO: 185076 - DNA, 556 bp, Homo sapiens
taaaaatcaatggtttacttgtgaaaacatctgtttgtaagcttgtctttgcttctctcaggggccatatttacatgctgggttttaagcatgccaaaatgtgaagcttaagtttcatttggctcattttctttttaaacatgccagcctggctctctacgagagaaaagaaagaaaaaacccccagcagtgtaagcttatacttatccatttgtartgagaacaagttagattttacctgttaaaaattaatgaataacatctctgagcaggtgactagagacatgagtattgattttagatcaagtgatggatgtagaataaatgtcagccaagggaattcaaataaggataactatacagttgttgctgttgttgtcagagaagcctatggaaaatggattacattatatatagagagaccgaggaatttttcacatttaattgactcatcttcattttttaaaaatctcataaaatagtctacaggacagctaaggacttcccattcaaacatctttgacacaagagacaagaatttgaattttaggaaaac

SEQ ID NO: 185077 - DNA, 505 bp, Homo sapiens
atgctgagcattttttcatatatctggtgaccatttgtgtgtgttttctttggggaaatgtatgttcaggacttttgcctattcttaaaatctctctctctctctctctccctctgtgtgtgtgtgtgtgtgtgtgtgtgtgtgtgtgtatttgctactgagttacaggactgtcttatatattttgtatattaaccctttatcagataaatttcactctgttaattgtttcctttgcatagcagatgcttttgagtttgataataagtccctggtctatttttgctttagttgcctgtgcttttggtgtcagatcaaagaaataatttccaagaccattgtcaagatttccccctaaatttttttctaagagtttcaaagactcagatgttacatttcagtctttacccccatttggagttgrtttttgtgtctggtgtcagatagggatccaattacattcttttggatgtggctatctagtattcccagcccaatttgttga

SEQ ID NO: 185078 - DNA, 581 bp, Homo sapiens
attaatgaaatatttcacctttcttttctgctaagtctttaaaatgcagtgcatagtttacattttagtttggacaagctacttacaaatactcaacagctgcatgtgagttaaagctaccgtattgaacagcacagttctggacgtcttaagatagtttataattgccattctgaacagaatatttttattttattatattttcttggaattctttgtttcacatgatagctatttttttgtacactttgtgtttttttatttttktattttgtgggtacatagtagacacatatttttggggtgcatgagatattttggtgtaggcgtacaataatcacatcatagaaaactgggtatctaaccgctcaagcatttatcttttgtgctatcagcaatcccattgactcttttagtcattttaagatacacgactaaattattattgactatagtcaccctatagttgtcatcctatactgtactattgtacaatcaaatactgggtcttattcattctttctgtttgttgtttctacctgttagctatccccacttcttcccccacttcctcactaccc

SEQ ID NO: 185079 - DNA, 545 bp, Homo sapiens
aaaagaaggaagattttaaaatttctaattgtatttttgtaaataagactatgtaattctaaatagatttatgggatacagttttaggtgtgaataaaatgtgaacaaaagcattatccaaagaacagctgttatggaaatttccaagatgggagaacaaaagaaaacaaatctccagaaatgaaatatgtattcaaaacttgcaaatagattttaatatcaggtcataaaaacctcaaaaagaaagtcagtgmgtaaccatgacaagaaaataaaaaaggagtccaagaatctattatacgaccataacaatgaacaaaatcaaattttggtacaaagaaaggacagtacagaaataaagtaattgtagttgtgcacagaaaagttacccaggagatataaacagatctaagtgaggataaaaatcagctatacagatcttaataactcttattgtcaatgaaagtagaatcccaaaagagagactgaaaagttgaacaattcattggctggcaatagaagaaaataaaatgtgaaaacagcta

SEQ ID NO: 185080 - DNA, 623 bp, Homo sapiens
taaggagtcatcgatgcaaattatgtctggatatagttcttcaacttaaagtctttcacttatttagtgggtcttgtgctcggcttttcccttctccagcattttactgtgctttttttttgtctatatgaaaacccaggcttggtctgttattatttgtttgttggcaagtctgcttctcaagttatcacaagcaacttccaacccataattacagtgtcctcctgattactgctaagccagtgccatatattttagggttttgtgagaacagcaggctacttccagtacaaatttctggtttggatwggatatagtccaatcttttataataaagagaccttaaatataacagtttatgcaagatagatagatagatagattttcttttctttctaaaacagtccagaggtagataattcagagcttttagagtaacgtttccatatttaccatgaagtttccattttgagagtcaaagttgtgaaacagttctcactgattccttgatgggggaagtaggaaaaaaatcaggggaggaggtactcactcattttctgggtaatgcacaagaagaaaaacatttgctcccacccatttgattagaattgtgtcacacggat

SEQ ID NO: 185081 - DNA, 396 bp, Homo sapiens
gaaaacatctccaattagcaaaggatatgccagagagaaaattaaatagcttctgtgwtgcactaaatccttgctttattttccaaggtgtccttagctctgcctgaagaagactcaataaaaataatgctgcttcatcatttctaggacccatttcttctgttagacagaatccatagcatccagctgcacaaactcctgagagcaacagagcctccacagtggcccattttgtaaacacatgagaagaaagtgggaaattgtagcagtatgtaatcttcccatgtctcactttagcagaaatcaaccttcctataacaattctactgtaactggaaagcggtcccattccagaccccaagagagggttcttggatcttgtgcaagaaagaattc

SEQ ID NO: 185082 - DNA, 569 bp, Homo sapiens
ctgatgggactgctggaaaatatcccttcccaactgataagcggccacctgaacttttgattcagtgtcagcttacaatgggtaggcctttctctggccttcctgagctcctcaatttctccaccctgccacaggcaatacttttctccctccctttcctttctctctctgtgcaaaacaattgaatgaatggttaaaaaaaaatcattatctcttgcaaagttttgagttattggaaaaaggatttgtgaggccagtcttaggttgtagcaaacctcgtgtgctttttgtgtctttctgtattgttctgtcataaaagaggggtaccataggatagaatgtagtcctaggattccttgtaacctgctgttcaagacagcccagaaaattagtcagttataaactttgctgcaggttcctgaaaaaaaaatctggatgaggctctcctctcctcctgttctaygtccttgggagcttgaccttataaccacatggtggtactttcttttagtctctgccttctggagaacaggaattttggaattcatgtcatagttagctctaaaaat

SEQ ID NO: 185083 - DNA, 574 bp, Homo sapiens
tgtatattttgttgttgggtggagagttctgtatgtctattagggccaattagtcaagtattgaagtgaagtcctgaatatctttattagttatctttcttgatgatctttctactgccatcagtgggatgctgaagtcccccactattattgtgtggttatctaaattgcttcatagatctctaagaacttgttttatgaatataggtgctccaatgttgggtgaatatatatttaagatgtaagtctcttgttagattggatcttttatcattatgtaataatgcccttctttgccctattygatcacactgatttaaactgttttattttatgtaatagccacctctgctcttttttgttttgtttgcctgatagatctttcctctatccctttactttgagcctataagtgttattacttgtgagaaaggtttcttgaagacagcagaaattagatcttgcttctttatccaacttgctactcaatgccttttaagtatggcatgtagcccatttatattcaaggtcagtattcatatgtgaggatttaatcctgttatgctgttagcta

SEQ ID NO: 185084 - DNA, 401 bp, Homo sapiens
gcttctattgtagacatagaatagaaatatcctgagttttatatttctaagttttttaacatctttagcagaataaatttgtgcatgtttctcctgatattctgtattcaggaaagggtctgtagaaaaattttgcttgatttctttgaaaataatttctggtgaaattaaaaaaaattctattaattctaaygtgtatccctattgcagtaatcttttaggaataaataagatcaaatgaacaatccaaggattgattgtctcatataatttattaaactattagcaaatagtgatccatttgactatttcctcattttcttaaaaattcatcctcagaggccaggcacagaggttcacgcctgtaattccagcattttgagaggtcgaggcaggcggat

SEQ ID NO: 185085 - DNA, 589 bp, Homo sapiens
cctcagtgatttacccatgtgtcaaacgtgtatattataccctcacaatctaaaataaaagtagaaggagaaaaaaataaactctatatcactataaggaactacaatctatatgactataaggaactgcaataatgaaccactcctgctccatatttgagtaccatacaacagatcaatggttatgttcatagaaatcatagactaagatattatccagtcactgttccaacctggtgggtcagtgctaatgtgatctgcacaaacagattaggaaggcacagtagtttcatgcctctacttaattgaatattatrtatttccagagtaggatcagataattttaggtttcatgagccatacatgcatcaaaatcccactttaataaaatttttaattttaagggctacaattctcagtaaataattaccctatttatcaaaattatttatacagtggcttgaatgtgaatgaagtgtgccttaaaaggctagcaaattcccacctcataccatgtataaaattaactgaaaatggatcatgacctaaatgaaagatctaagactataaaactcttagactaaaacat

SEQ ID NO: 185086 - DNA, 570 bp, Homo sapiens
tttaaaaagcttgcattttcaaaatggcaatatttatcaaagcaatctaaagacataatgcaatccctattaaaatcccaactgtcttttttgcagaaatggaaaaggtaatcctaaaatccatatggaattgtaagggatttcaagtaactaaaacaatcttctaaaagaaaaatgaagttggaagatgtacttctaaatttcaaaacttatcacaaagatacagtaattaaaacaccatgataccagcataaggatagaaggggtgcaggaagtgctscctgaaaatatggcatattggcatgctgaatattttaagccaaaggaaattgagaaagaccacagaaacagttttgttttcgtttgttatagaagtatcagctatgaactttgtaacaggtaaggaaaacatattactttttctcccctacacagacatataaatcagtagaatagaattaagagtccagaaataaacccatatatctataatactttcatttttgacaatgaggtcagtgccattcttcagagaaaaaatagtctcttcaacaaatggtgcttgaaaaa

SEQ ID NO: 185087 - DNA, 564 bp, Homo sapiens
gaggtcagtgccattcttcagagaaaaaatagtctcttcaacaaatggtgcttgaaaaactgggcattcacacacaaaggaatgaaactggactcaccatataccatctacaaaaattaattcaaaataaatcaagagacctaaatttaagagttaaaactacaatactcttagaataaaatawagggtaatccttgtgaccttagatttagcaatggtttactataatcccaaaagtgcaggcaaaaaaaaaagattaattgggccttatcaatattagaaactactgtgctccaaagaacaacattaagaaagtgtgtagacaatccacgagatgggttaaactattttctaagcatattcctggtgtctgtttagattatcacaggaacacttacaactcggcaacagaaagacatccctatttaaaaatgcactgaagacttgaatagacatgtcctctaaaacgatatctccatgttcagcaaggacactgaaagatgctcgacatcgtttgtcattagggaaatgctgtttagaccctcaatgagatatcgcctcaca

SEQ ID NO: 185088 - DNA, 594 bp, Homo sapiens
aaacaagtaggatcctcacataaaacaaaataaaatgaaattttgaaaaattatcgctctatattttattatcctacatatgatattatgctggttaattgataagcatctttcaagaatatatcaaaagctttattaaagtcattgtagattaaatttatctagtgattaatgatattcaaccagacttgatctttgcaaaagcatactgwttatcataatttttaaaaatttaaaaatagtcttaatagtgtcaatttctcactagaaataggatctttcaatacgtaagatctaactctgtttcttcacccttttcacaattctcaggatggtataaaaggtggtgaatatgttgtaattttaatataaaaaatgtatatgattttaggctggattaagcaaatgaggaatttagtgtcaccttacttagagcttcttaatctttggacactgccccttttcaccagtttcattattcattaaatatgttgccctgccaagggcattctaagaaacatgaactctagcaataacaaagtacatatttgttaggtccaccaccccaaactgaaaaatttaaataaagaaagc

SEQ ID NO: 185089 - DNA, 559 bp, Homo sapiens
acctacttcagcatctacatcagcacttgctgcttcaccttgcacttttatgttatgaagacaacttctttccttacctcatgaactgacctctgctagtttccagcttttcttccgcaactttctcacctctttcaacgttcacagaattggacagttagggccttgytctagattaggctttggcttacggcgatgttgtggctggtatgatcttctaacaagaccactcaaactttctccatatcaataggctgttttatcatttgtgttcactggagtagcattcttaatttcccttaagaatttttcctttgcattagcaacttggctaattgtttggtgcaaaaggactagcttttggcctatctgggcttttgacatgacttgttcactaagcttaatcatttttagcttctgatttaagaggagagatttactactcttccttttgcttaaacacctggaggccactgtaggggtaataatttgggggtattaatcagggccctgatttcaatattgttgtgcctcagggaataccatttgagatggtaaa

SEQ ID NO: 185090 - DNA, 559 bp, Homo sapiens
acctacttcagcatctacatcagcacttgctgcttcaccttgcacttttatgttatgaagacaacttctttccttacctcatgaactgacctctgctagtttccagcttttcttccgcaactttctcacctctttcaacgttcacagaattggacagttagggccttgctctagattaggctttggcttacggcgatgttgtggctggtatgatcttctaacaagaccactcaaactttctccatawcaataggctgttttatcatttgtgttcactggagtagcattcttaatttcccttaagaatttttcctttgcattagcaacttggctaattgtttggtgcaaaaggactagcttttggcctatctgggcttttgacatgacttgttcactaagcttaatcatttttagcttctgatttaagaggagagatttactactcttccttttgcttaaacacctggaggccactgtaggggtaataatttgggggtattaatcagggccctgatttcaatattgttgtgcctcagggaataccatttgagatggtaaa

SEQ ID NO: 185091 - DNA, 404 bp, Homo sapiens
tttggcttacggcgatgttgtggctggtatgatcttctaacaagaccactcaaactttctccatatcaataggctgttttatcatttgtgttcactggagtagcattcttaatttcccttaagaatttttcctttgcattagcaacttggctaattgtttggtgcaaaaggactagcttttggcctatctgggcttttgacatgacttgttcactaagcttaatcatttttagcttctgatttaagaggagagatttactactcttccttttgcttaaacacytggaggccactgtaggggtaataatttgggggtattaatcagggccctgatttcaatattgttgtgcctcagggaataccatttgagatggtaaaagcatcaatgtaaaactaattttaaa

SEQ ID NO: 185092 - DNA, 595 bp, Homo sapiens
agatgacatcaaaaatcatataatcattctttttagggatgttttctaaaagtgtgagctgggcaagtttgcaccgtattaaactatgccataattacaaatccctgaagtgaatacttcagaagcgatctaattcatgtctcttaccatttaagaccattttaaggggctgaatgtaaagggattattcatgattgtcttttgctgtcgtccaaatatgcttaggatgtggttgacaaagtggctcatgatgtggtctttactagcctgttattgtgttgctgtagagaactgcctgagactagatcatttataaagaaaagaggcttaattgactcacagttctgcaggctgtacagaaaatatggagctggtatctgcttggcttctggtgaaacctcagggagctctcaatcatgggagaaggtgaagggggagcaagtgtctcacatggcagaataggagcaacagagagtgggtgtattagtccatttctacactgctataaagaacaacctgagactgggtaacttatgaagaaaagatgtttaatkgactcaaagttccacaggctgtacaggaagtatggatggga

SEQ ID NO: 185093 - DNA, 558 bp, Homo sapiens
gtagacatacttaaaacacaattcatttagcaaatcatctcctttttttcattcacttctcatcagttttttgacaatgatcattgcttcctattgtatcaayatggtctcaatgatatctgcatttattgtatccaccgtttcataatgaaaggtatttttcagttattataatgttacatgctgtcttaaagctttctagaaaccacaaaacttatatagtttatttcaattttatgcttaaaattatctggatgaagtgtggtgctatatgcatggcaaggctcttaatttctcaggcttcatctctttcaatacactcacaatttcaaactgtcttttgatgtatagactttgctaggtctcttaagttgcttggttttgtaacaaagtatttcactattctaaaagttatttttatttcataatgggaagaagacattacaaatgatgcacacacaacatgtttgaatatcaggagaataagctgtatttttttcaaaacggaagtagagattcaactgtgattcctgtatctcatattcccaacaaggcttg

SEQ ID NO: 185094 - DNA, 521 bp, Homo sapiens
aactataacatttgcagtggagtcagctatagtagctaatatttgagagatttctaattataaacccatttacatttatgtcaagtcaaggtagtaacatgatatggtttggctgtgtcctcactcaaatctcatcttgaattgtagtgcccataatccccaaatgtcatgggagagacctggtggaaagtgactggatcatgggggcagttttccccatgccrttcttgtgacagtgagtgagttctcatgagatctgatgttttgtaagtggcttcccctttcactcagcactcatgctgtattctgccaccctgtgaagagatgccttctgccatgtttgtaagtctcctgaggcctcctcagacctgcagaactgtgagtcaattaaaactcctttcttaaaaaattacccagtctcagatattccttcatagcaatatgagaatggactaacataaaacattttatttaaaaaatgcccatttaaatacgtcccatcaatacctaatttattgaga

SEQ ID NO: 185095 - DNA, 579 bp, Homo sapiens
gaatctgtttatcaataatttgttactttttaatgctgattagtattccattgtataaataarccacactatttttatccattcaccttttttgatagaaatttgggtcatttccagtttgggacaattacaaataaaactacaataaacatttgtgtgttttgggggacacatttttcatttctcttgcaacattgtcactcagaaaagacagatatttgcaaagtttctcatgttacagaacactgttaccatattctgaactgccaagtacttttgatgggagatgcttgtctttaaataacattaaacaaataataatatttgaatatccaagaaatatccagattgaaatggtgaaagacagaataatttatagacttggtcatttttcctagaaacatgacctcacaattttaactgttagtataaactgatagtataaacaagcattttaaagatcactttaaatatcattttaaagtaacagtgttccatatggatatctacggaaaaatacataaattgtggtatattcatacaatgcaatattaaataagatgtgaacaaactaaagct

SEQ ID NO: 185096 - DNA, 389 bp, Homo sapiens
taagtttatcaagaacggaggaaacaaaagcacttgttgcctcaacttgaaagtggagtttacaggtggaaaaactggaggcaaacctaacataaatgctaygattagctaaagaactaagaagtcaaacttacatcatctatgtttgcaacacagtgagtgctcatcattatgagaagcaaatttcagtaagtgagaaaatcaaaaccaagtctctttagcatcaaaatcctttatttttagcaattttaccatttgggtaaaaaaatgatttcttatcttaaaatttctagagtagcagtaccagtttgaagctcttattcataggatgcttttaaaaaagcatttcattatccattaatgtttatgtatatacagtgtgttaaatc

SEQ ID NO: 185097 - DNA, 399 bp, Homo sapiens
aatttaggtgtaagtttatcaagaacggaggaaacaaaagcacttgttgcctcaacttgaaagtggagtttacaggtggaaaaactggaggcaaacctaacataaatgctacgattagctaaagaactaagaagtcaaacttacatcatctatgtttgcaacacagtgagtgctcatcattatgagaagcaaatttcagtaagtgagaaaatcaaaaccaagtctctttagcatcaaaatcctttawttttagcaattttaccatttgggtaaaaaaatgatttcttatcttaaaatttctagagtagcagtaccagtttgaagctcttattcataggatgcttttaaaaaagcatttcattatccattaatgtttatgtatatacagtgtgttaaatc

SEQ ID NO: 185098 - DNA, 594 bp, Homo sapiens
gggagtgcagggtctcaaaagcaatatttcacttagtcactaactaccaagatggatatgatgctggaccacccctagaatcacgctctttggtcccagtattgacttctgaatttagaaagagccagcagagactctcaggtaaattctgcaactgctttcccacctctgaatttgggacaaatcctcctcttcctcctggcctcgccccaccccgccccatggatagcacttctgggagggggtgctcccaggctaggaaactagcgagcctctctttctcccatagtctgacatcttgatgccttggctgatggagggagaacccaaacaatcctttttgtttcaccttatttcatatttctgtaaatgaagtaartgtatactgtcgttttttgttaaataaagggtaaaaaataagaatctgagagtttaaggtcaaagtagtggagagtaggaaaggaagcctaggatccaaaatggcactggcttcaagaccacccacatcatattgagggttcggccaagtcaggcctcttaaccctgggtccgcaacggaaactagggctagaacttggatgcagaaaaaaaata

SEQ ID NO: 185099 - DNA, 356 bp, Homo sapiens
ttttaaccagcagaatcacagatatcccaaataccgcttatagtcatcactatgacattacaataattataagacctgccagtagactttttaattaacgttctaataaagaagcacatattactatatcacaaacttgacgtttttaatattyagatcattatatttcattataacctatttttgtaaacctacgtaatttattttatgtgtcttaaatcattattctgttcataggcttcacgagactgctcatgggggcccatgacacagaaaagttgaaatacccctgggctggaggaactcttccctaatccccatcaaacaccacacacacacacacacacacacacaca

SEQ ID NO: 185100 - DNA, 573 bp, Homo sapiens
tttcttgttttctgtttccaagatgggaccgttgcaatagatattcctgcctccagcctctcccctcgtcagtcaattctacatgctcttgccagatagatctttctttaaaaagtggtttatgtataccaccattttttacataattcgtgaattgtctattcctttctaattatttaagccctactggttctgctgagcccaatgagggcccctctatctaccttaagatctcaacagtattgtataacagaaacaatattggttttagagtcatatggacctgggtttagatattaaactatatttttgtagccaagtaattttggtcaaaaacaatgttttctttttcatctattttagtggtagatgtttttataatcaacttaaaaatatagcctagataggcaaattttactctaggtcccagtcttcccccatatcccaagagcagaatctcacatatcttttgtwtttcaattacttattcattgcaatatttattgagcaactactaagtacagggcttgggggatacaaaaaatgaatccaacattcaattctgttttcaaa

SEQ ID NO: 185101 - DNA, 576 bp, Homo sapiens
tgctatattctactttgcttagaatgatcatattagctatatgtgttcactatcacaaatcccttaatagagagtaaaccagagggtaaggatttaggtcctgttcacctctgcatctccaagagyatccagcagagttcctctccttacaagtggttgtgctcagagatgtttattgaactcaactgaattgaattcttggcttcattggatttgctttgagtatggtaacattgatgtctgtgccctagttcccttttggaaaagaaatgctgccttaaaaataaaaagcatcttaagtgattttgggatgaaagacaccatgtaatataagcagtaattgtaattattattaataagcatcattaaaatagtatgaactgataggattacttcctttgcttgcttttgccagcagagttggcaggtttgataaactaactggtcttttccatcttcaatatctatgattctttgaaattttatgtagacaagtgcaaactaatgtacactggaaggaacaattgaaacagctcatactcactgatgggctctgaattactctacttgtaagtg

SEQ ID NO: 185102 - DNA, 576 bp, Homo sapiens
tgctatattctactttgcttagaatgatcatattagctatatgtgttcactatcacaaatcccttaatagagagtaaaccagagggtaaggatttaggtcctgttcacctctgcatctccaagagtatccagcagagttcctctccttacaagtggttgtgctcagagatgtttattgaactcaactgaattgaattcttggcttcattggatttgctttgagtatggtaacattgatgtctgtgccctagttcccttttggaaaagaaatgctgccttaaaaataaaaagcatcttaastgattttgggatgaaagacaccatgtaatataagcagtaattgtaattattattaataagcatcattaaaatagtatgaactgataggattacttcctttgcttgcttttgccagcagagttggcaggtttgataaactaactggtcttttccatcttcaatatctatgattctttgaaattttatgtagacaagtgcaaactaatgtacactggaaggaacaattgaaacagctcatactcactgatgggctctgaattactctacttgtaagtg

SEQ ID NO: 185103 - DNA, 596 bp, Homo sapiens
tgaaattatttctgcttttatcacttttgaaatttgtcttgttagaattgatattttgaaggttttttctttctttcttcttctttttttttttttggcatttgatggtcatctctcctactttttttttcttctttaccaggaaagtcagtgatcttctaattttgtaacatcctcaaatgagatttttaaaagtattttctatagttttagccaaatcattgctatctaaattgagtaggacaggctcaaagacagagctctttgggaggtcataagaaatcttttcattgttctgttaccaatccatcagattcctctgtcatcagcttgtatttctctctcttgtctataaacatagcagttgctttatatgtgccattccatttaaactgcaaaatttcacataccaagtacttttgttcctgtttaggttaggcaagccaaactatagataggtgaagcattttgcacagaatttccctgtttgttaaaagaagarccaggatttgcacccaaactttcatgtcccttctactctgtcgtggttgtacccattgtggattaccttgatgaaatgcagagatggtattttt

SEQ ID NO: 185104 - DNA, 384 bp, Homo sapiens
tgaaaaataatattgcccaggttgacagggaaatgagatggttggggtatgttacaaatggtaaccttttaacctgtgattgctgtatttgtcctgttccaaaattgkactccctgtaagttgccagtttttcagtgacagtgatgagtgggaaacctctagtgacaacttcccactgttaacctcagcagttaacacctgtattattatacaacagtctggagccacaggcaggctgtgagccacggtgaagggcgacattaataagggatgaatgggagatgagaagattcagcccatggagaaataatgtcagaaataatgtgcaaacaggtttgccactcctgtttggacatggctctggttgtgtgcagatctcaaagg

SEQ ID NO: 185105 - DNA, 604 bp, Homo sapiens
gccttttgggcattttatttggcctygcattttttaaacatttgctacgatgtctttgacgctgaccttgtagattgtagacccttttcatctgtagacttaggtttacattgctttgaaaaattttattctatggttttaaaaaaacattagtactattgttctattctgttctttacccttgggactacaattaaatatattttgtatatccttgtatttcctgccacagattatatcatggtcatttttcttatttcttctgtttacttagagaagtagcttgtcttctacttcactgattagatctgtagtatctaatcaatattcaacatcacattgcaccttttaattcaaaaattgtagttttcatcacaattttctttcctggtctcaaacagttgatttttcaatgaatacgtgctctaatctcatacctgcagtgcccttttgaaactgagaacaaagactatgcaatttctttaaaatgccagtttctgataacaactgtagatttcagaagatgacatttgttccccttgatatgaaatacggtggtttcaatggctttctgcttagtcctcccaagggagggaggtccagg

SEQ ID NO: 185106 - DNA, 558 bp, Homo sapiens
aagctttttatttcatcagtcccctcgacaactcagtgagttatacacaattatcctgcaatcacaagccatgggaagggattcttcaggttctaataccatagccaccagccawggatagctatttaaatgttaattgaaattaaataaaattctttcagttcctcaattcctcagtcccactgaccacatctcaagtgctccatagtcacacgtggccagtgactactgttttagacagcagagatataggtcatttctatcattgcagaaatgtctgtcctgtagggctgccagagaggccctccttaatccaatacctggccttccattgtgcttgcccatcattattacttactctgctcctggaagtacatcacagctttgaaattatagaaattacactctttacctgagcccctttgcacacgtattcatgcgtgtgctcgctcaacaagtatttatggaccatctgttctaggcactttggatgaacagggcagaaaagtccttgccaatgagacggttgtatttggaaagggtagacataagcaaatg

SEQ ID NO: 185107 - DNA, 439 bp, Homo sapiens
aataaaattctttcagttcctcaattcctcagtcccactgaccacatctcaagtgctccatagtcacacgtggccagtgactactgttttagacagcagagatataggtcatttctatcattgcagaaatgtctgtcctgtagggctgccagagaggccctccttaatccaatacctggccttccattgtgcytgcccatcattattacttactctgctcctggaagtacatcacagctttgaaattatagaaattacactctttacctgagcccctttgcacacgtattcatgcgtgtgctcgctcaacaagtatttatggaccatctgttctaggcactttggatgaacagggcagaaaagtccttgccaatgagacggttgtatttggaaagggtagacataagcaaatgattgtatcctaaaatgtcaagattaa

SEQ ID NO: 185108 - DNA, 583 bp, Homo sapiens
ctcattactgtaatatatgggatttcttgaattggtgaatttgtctcacgtcagctaaaacttccttgtaactgtgcaacagtctgacacttttccttcccttcttcttcagaaggtgtcaacttggaccatagtctggaggctctccttaccttctgaattagtctgttctcatgctgctaataaagacatacttgagattgggtaatttataaaggaaagaggtttattcgactcacagttccacatggctggggaggcctcacaatcatggttgaaagcaaataagaagcaaggtcaacatcttacatggtggtaagcaagagagcttgtgtagaggaactctcctttataaaccatcagatctcatgagtctcattcaccaccaygagaacagcatgggaaggaccttcccccatgattcaattttctcccactgggtcccttccacgacatgtgggaattatcagagatacaattcaggatgagatttgggtggggacatagccaaaccatataacctttcccagctccctccctccttgcctttacaggcacttcctagtaaatctcttgtatgatg

SEQ ID NO: 185109 - DNA, 540 bp, Homo sapiens
aatttggcaaaagaaaaatttaaaatcagattggaattattaccttccccattaaatagctaaaacaggaagtcttgatttattcaaaccatatttgctaaagacaaatttaactctaaatggagaaaccgcttaaaggtcaagttttgtcttggatactttgaaagagttgctaagcatttttgtcccctatggaggctgggttgacaccaggaagtgttatttgtgttatttcccctcaaacatttttccacctctcagtaatgacaggagaattatggctatagagagcaaacacagccttatgtgggcatgatcacagttgtagcaagccagtcaygatagcaggaataggctggttgcatgagtgcactgggtgaagactacagaggacattaagggcaccagagggaacaggttcaatttctactctgtcacttacttgctgcatgatcctgggccagttacttaaccaccctctaccacagtttcctcaggttggaaatgagaatcaaaatgcccaactgcccccaaatgttc

SEQ ID NO: 185110 - DNA, 574 bp, Homo sapiens
catccctgaactaccaagtgagctgtcgggatttcctccctggggaacaagtactaagaactaagaagtctgtgtcaggcattgatatttttatgcagcacacgagatggtaactatttctgttatcatctctccttcacttttcccttctctccatatccaagaactacagatgacagttctccttttattcctacactttcacccagattttgtcatacataacagatcatactttctgaccaatcttacctgattgttttttaggcgtactttattagttgcattttgtcaaagtcttttcagacagaatatagtatgtgtgggttttttttccatgtccaaacawgtctattctgaacaaacctaattattaacattcgagaattttatttttgtattaataatttgaattacacatgtctctgctttctgaaaaaataggacatggaatgtgtgattaattttcttggctattctgatgattgtctttgttttgaacttcaagtactatggctctgtgcactattttcactataaagccagcaaagcagtgacagattcgcagatagca

SEQ ID NO: 185111 - DNA, 556 bp, Homo sapiens
tgtgcctagtatcgaaccagaatgcccgcaggatacaagggagactgttccttaaggattgttaaatcaggagggagagtataaattagcgtgcatgygcaattcatatatcattacaagctaaattttgatttttcctaaagaatgacagttgctctgtgaaggctgacatagttgaaaaagactttttggaggaagtgaagcttgatctgggattagtgaataagtgggatataagtatcaaaattaggaaattttgacaaggatagctgacaactagaagttggggtaatatggcctttaggggatgagaagccccacgatgaccagtgaaaagtgttcctggtccccttataggaaacgaagtagggcggaattagaaaacaaagaaactccatcttcctccctacccaccctccccattttttgtcaaacaaccaaactctcccacttgagtgtttcatggaagaatggttaaaggcaggaagaagagagaagaaaagaaaaggagctgagctacaatcagaaagaagaaaacaagctagagagtgaagat

SEQ ID NO: 185112 - DNA, 556 bp, Homo sapiens
tgtgcctagtatcgaaccagaatgcccgcaggatacaagggagactgttccttaaggattgttaaatcaggagggagagtataaattagcgtgcatgtgcaattcatatatcattacaagctaaattttgatttttcctaaagaatgacagttgctctgtgaaggctgacatagttgaaaaagactttttggaggaagtgaagcttgatctgggattagtgaataagtgggatataagtatcaaaattaggaaattttgacaaggatagctgacaactagaagttggggtaatatggcctttaggggatgagaagccccacgatgaccagtgaaaagtgttcctggtccccttataggaaacgaagtagggcggrattagaaaacaaagaaactccatcttcctccctacccaccctccccattttttgtcaaacaaccaaactctcccacttgagtgtttcatggaagaatggttaaaggcaggaagaagagagaagaaaagaaaaggagctgagctacaatcagaaagaagaaaacaagctagagagtgaagat

SEQ ID NO: 185113 - DNA, 607 bp, Homo sapiens
aattattgatagatagctacttactattgccaatttattaatttttatgactgttgtgtagttccttttttcctatattacaatgtttctttatgatattttgtagtagtatgctttgatttctttctttatcttctgtgtatctactaaaggtttttgctttgtgattaccatgaagcttacatcaaacatcttatagttgtaacaatctattttaagctaatagcaatttaaattcaatcgcatacaraaacttaccctctaatttctctcccccaacacacgtttgatttattgatatcacaatttacatctttttgtattgtttatttattaattattgtagctatattttaatacttttgtattttaacttttatactagagtaaaagtgagttttatattttcatatgattttaaattacttattagtatccctttatttcaacttgaataactccctttatcatttcttataaggcagtttcatggtgaagaattcccacagcttttgtttctctgggaaagtctttctctctccttcaattctggaggacagctttgttggcagtctttttctttcagcatttttaatatatcactccc

SEQ ID NO: 185114 - DNA, 431 bp, Homo sapiens
tctcaagaagagggaacatgaatgaatacaaaagctttgttaggaaaatctgggcagtttaagaagtaaaaagcactttggcatggctgttaaatgttttcttaccaaatggcagaggccaggtcaggcagacccttgtagtctttggcaagaatgtctttcttagttcctatgcagataaaacctgcctatataaaacaggcttcgtggcacccaacctcactgaacacatgggaaaattagatcagctgctgcatgtgaagctctaggagtttagcacccagtgggcactcataatttactgccatcatcatcgccatactgtcattacttttcactgctggataagtataagtaggkatagcctctccagagagcaatttggcaatacggatcaaaaaccttatgaaatttatattatatgacccaga

SEQ ID NO: 185115 - DNA, 606 bp, Homo sapiens
catgtttctaataagcttgtgatgtttatccaaggacttgaatctagacagtggcatggctttctgaggaggcataatacagactatagatgctcgaggcacrggcttggtggtacctagagcagcagaggcacatagtttagacagatttagggtttgttttctacttagagacataaggggagaaacactaacatgcatacagtgcttcttatgtgtgtaagcccttctcatatgtggtctcattcactctttctttttcttttttttttttaaagtctgggtttcactctgttacccaggctgatggcatgatcacagctcattgcagcctcgacctcccgggctcaagcgattctcctgcctcagcctcctgagaagctgagacaacaggcatgcaccaccatgcctggctaattttttattttttgtagagatgggttttcactatatttcccaggctggtctcaaacccctgagctgaagcaatcctcctggcttagcctcccaaaatgctgggattacagacatgagccactgcacctggccgtgtcatctcctttaatctctgcaacgaccctgtaaggtagatgctatcgtagcatc

SEQ ID NO: 185116 - DNA, 440 bp, Homo sapiens
gatatttctagcattctcagaatagttgttttctttttgtcatttaggtttttaatgaatttggaatttatcttaatatgaaaatgtggaccgagcacaatggcttacgcctgtaatsccagcactttgggaggccgagacgggcggatcacctgaggtcaggagtttgacaccagcctggccaacatggtgaaatcccatctctactaaaaaatataaaacttagctgggcatggtggcaggcgcctataatcccagctgctcggaaggctgaggcagaattgcttgaacccgggaggcagagattgcagtgagtcaagacagtgccactgcactccagcctgggcaacaagaatgaaactaagtctcaaaagaaaagaaaagaaaatgtgaaacgttcttaactttctcttttggctggcctgcatcagttgagagtt

SEQ ID NO: 185117 - DNA, 440 bp, Homo sapiens
gatatttctagcattctcagaatagttgttttctttttgtcatttaggtttttaatgaatttggaatttatcttaatatgaaaatgtggaccgagcacaatggcttacgcctgtaatgccagcactttgggaggccgagacgggcrgatcacctgaggtcaggagtttgacaccagcctggccaacatggtgaaatcccatctctactaaaaaatataaaacttagctgggcatggtggcaggcgcctataatcccagctgctcggaaggctgaggcagaattgcttgaacccgggaggcagagattgcagtgagtcaagacagtgccactgcactccagcctgggcaacaagaatgaaactaagtctcaaaagaaaagaaaagaaaatgtgaaacgttcttaactttctcttttggctggcctgcatcagttgagagtt

SEQ ID NO: 185118 - DNA, 440 bp, Homo sapiens
gatatttctagcattctcagaatagttgttttctttttgtcatttaggtttttaatgaatttggaatttatcttaatatgaaaatgtggaccgagcacaatggcttacgcctgtaatgccagcactttgggaggccgagacgggcggatcacctgaggtcaggagtttgacaccagcctggccaacatggtgaaatcccatctctactaaaaaatataaaacttagctgggcatggtggcaggcgcctataatcccagctgctcggaargctgaggcagaattgcttgaacccgggaggcagagattgcagtgagtcaagacagtgccactgcactccagcctgggcaacaagaatgaaactaagtctcaaaagaaaagaaaagaaaatgtgaaacgttcttaactttctcttttggctggcctgcatcagttgagagtt

SEQ ID NO: 185119 - DNA, 449 bp, Homo sapiens
aatgttcaccgatatttctagcattctcagaatagttgttttctttttgtcatttaggtttttaatgaatttggaatttatcttaatatgaaaatgtggaccgagcacaatggcttacgcctgtaatgccagcactttgggaggccgagacgggcggatcacctgaggtcaggagtttgacaccagcctggccaacatggtgaaatcccatctctactaaaaaatataaaacttagctgggcatggtggcaggcgcctataatcccagctgctcggaaggctgaggcagaattgcttgaacccgggaggcagagattgcagtgagtcaagacagtgccactgcactccagcctgggcaacaagaatgaaactaagtctcaaaagaaaagaaaagaaaatgtgaaacrttcttaactttctcttttggctggcctgcatcagttgagagt

SEQ ID NO: 185120 - DNA, 581 bp, Homo sapiens
atctatgcaccaaaattgcaaaggagtttaaagaactgtcttaaaacacatttgggagtagatttgcttcctgttctttaacaagtcctgggctgaggtaaagaacactcattttattcttatgggtcttgaaatccatgtctttcactttttaagaaataggattaaagcatcaaagaaaagtccttattgaagggctttgcgtgactggtcaagagtgaattcaccagccatctctccaggctgctgtcagctctggccacaggggacaggccaccattgccagatcagggmaactaatgaaccaagaaaaaaggaactacccctttactgaaggcccaccacatgccaggggcataccacttgccaagcactctacacagtctagggatgcatagctaaaaggctaaatgcacacaccctggaaacagcctctctgggtttgaagcccaaatctgggctattggctggaggccttagtcaagtctcttaacctctccatgcctcagtttctcctctgcacaatgagggctgtaacactagcttcttcattgtattgttgtgggttgggatatacagag

SEQ ID NO: 185121 - DNA, 459 bp, Homo sapiens
caattccttaaaagatacaaactaccaaactcatacaaagaaaaagataacctgaatatccctatatttatttaaaaatcaaattaataatgttgctcttaaccttccaaaaaaagaaaacaccaggcttagagagtttcacaagtgaattctaccaaacatttaaggatttaaggaagaaacagtatcaactccctacaatctcttccaggaaacaatttctaactcattctattagcatgaggccagtaccataaccagataaaggcatcacaagacattacgaaaaagaaacactgtagatcaaaatctctcatgaacataagcacaagaatcctcaacaaaatattattaaatcaaatccagcagtgtttagaaagaaatktacatgatgaccatattggatttattccagatatgcaaggctatttcaacattcaaaaatcaatcaatggtctg

SEQ ID NO: 185122 - DNA, 435 bp, Homo sapiens
caagacccccttcttgcctggggtccagtctgtctttacaggactaccaaattagctacaagatcagaaattacagtttaggggtcatgcagtctctggctccaagaatctgaacmtccccaaattgctcctggggctaacatcactgtattgtaaaacctaagatcagtgtttgagatattttgtactttggatcagctgacaccatccagaccagtaatctggcccaaccagttctgccatcgcacccaggaagagaagacattaaaaaaccttgcttcaaccctctatgagtccatctacaacctgaccaaccagcactccccacttcccaagcccctacccaccaaattttcttcaaaaactctgatcaccgaatcagtcggggagactgatttgaataataataaaacaccggtctccctcacagccggc

SEQ ID NO: 185123 - DNA, 413 bp, Homo sapiens
gcacatccacacggcttgcttgctcacttcattagtcatgctcaaactcacctataagaaatttcccatgtctgtatcataaataccttaaaaagggggracaaaatgtaaaaaaatgcttttcagacattggacaatagataggaaaacatttttactcagagtagttaagcaaattagatgagttttattaatgaattagttttctgtctgtagttaatatctggacttcaacatagggagaagaagcccaaacagagactgaaaatcttattgagttgaacactagaggacagagatgactggagtttgtggggaagaataccagaaaagagggagctaagcagagaaaattctccaaaaatctgtgtaaggtcttccgtacctttctttggatagatgctgatttgtat

SEQ ID NO: 185124 - DNA, 415 bp, Homo sapiens
ggctgtgaggtatagatgaaattgagattctgactgacagaagagctaagcagagcctctggggcaagargggtgactaaccctgtgtgacttggagaggcaggcaccctgctgggaacttccccatgctgttctcagaagcagagaagccccactcttcctctaacctgctgcaccttccaaacccaggtctttgcctttcagggcctgttgatcttggggaagccaaagcagctcttcccgtgctatctgcacagtgagtgctttcctttacttggtcaatcaagtccccaaggcaggactttgagggacaccatactgaggggaagcccttaatttgagctcttgttaatgaatttgtgactagaccaggaaacttcattccaaaattggacaaattccaagaaggaaagtt

SEQ ID NO: 185125 - DNA, 408 bp, Homo sapiens
tacagttgaaagtctgtggctgtgaggtatagatgaaattgagattctgactgacagaagagctaagcagagcctctggggcaagaggggtgactaaccctgtgtgacttggagasgcaggcaccctgctgggaacttccccatgctgttctcagaagcagagaagccccactcttcctctaacctgctgcaccttccaaacccaggtctttgcctttcagggcctgttgatcttggggaagccaaagcagctcttcccgtgctatctgcacagtgagtgctttcctttacttggtcaatcaagtccccaaggcaggactttgagggacaccatactgaggggaagcccttaatttgagctcttgttaatgaatttgtgactagaccaggaaacttcattccaaaatt

SEQ ID NO: 185126 - DNA, 480 bp, Homo sapiens
aaaaacatttttgtgattctttttgaatatattatagaaatatgttgcgatgagaaaatattttcagttatgatgagaagatcaaattatctctcattgtttagcactattctacctatacaatacatgacattgttatctctttgtctgcaggttaaatattttaggataaacaaaacttacaagtgtccataattgcagttttattctcttacctttayagaacaatagtatttcaagcctgcaaacaacttttctttgtgactgatgtcactactatttagcccttcgaggttagcatttattgattttgcttttgattggatcttacctacctcggtgcttcagtaaattgaaaccttctgcagttcatggaagaaagctgagagcaaggctatgagaaaatgtacactgacctctatttgtttcagactatattggtaaaatcattgtcgctgtgtaacagaagtgaccttgact

SEQ ID NO: 185127 - DNA, 566 bp, Homo sapiens
ctaatcaatggataatcaggtattcatttgacttgaggtgattccagactagttatatctccagctgattagtcaaagcaaatttaaaatctctcaggaaagagtaaccccatccaaggttgcatattgctccacaatgaaacatatatatatatatatattcaaaaatatatataatataaatataaatataactattgtgaatgagaagcatagtaatatttatggtgagggagaaatatattattgatagttggtacaaaccagaccctatgagggagaagcatatgtaaaaaagacaacttgtgaaagacatagtcaaatgttaagtccatgttaaccctctggatccctgtaaagatactatcaataaattaaacmcctaaatcatcttatttaaacaatagagaagaagtgacagttatcaaatcttagaaaaatctggggtgagagaggataaaattactttcaaaggagcaacagttgtgtgtaacctgacatcctatgagcaacaatagaaaccatgagattatgaaataacatcatttgtgtgctaaaagaaataa

SEQ ID NO: 185128 - DNA, 450 bp, Homo sapiens
tttctgtttatttttatgtaaggataaaactatcctaaaaataacgttcatttcataaaaaagatgaagggaagattcagagaagactgcaaaaaaatagagctttatgtgttttcatcttgctcttggctcagtgcatgatgaatagatataagaactataaggcagtagtgttgctgatgaatatggtaaggaagataataagagaaaaaagagaaaatcttagattgatgtgataagtatcactttaccaaaaaagagcttaccaaacttagaagaataaatgagtacctccattagggttgrgagactgagaacaactatgtagaaagtttttatagaaaaatgccatttaagctgggatttttaaggacaagtaaatttgattagacagagcaggaagtaaagaagcttcccagagtagaaatggcatttgcaaagcaaaagtat

SEQ ID NO: 185129 - DNA, 536 bp, Homo sapiens
gaaaactggcaaatttaggaaaatgactagtaaatatgtcagaagtactaaatgcatgacaagatacagagatgaatttgtaagccaggagtcctttaaagatatactacagattacttggtttatgttctaaaagtttaaacaatgagtattggagttataataattagcaatttgctttcaatattcagattaaaaagttattgaataggattttcagactgcttatccagcaatctagtattcagtatttttgaggttcatgaaaatgcataattttaggtgggattttagatttggggttaaacctaagattaattgccagtagagataaactaaagaacctacagatatttaggtattgaagtacttcagaaaatttttattgattacttcaacatgaaagacaatggtaaaatatgsatttctcattttctccttcaaaaaattttactgagtgagaatgaatgggtgaaattttattactgctgctttgctatgattgaaatgtccccttcaaaactcagttgaaatgt

SEQ ID NO: 185130 - DNA, 371 bp, Homo sapiens
caagttggtcactaaactaaactcacacttgacaagaaggaaaagtagagaaatggtaactgtgaaacacatataaatgttatagctttttctactatattaagaaatcagtgttaattgcttataaaaacttatcttcctagggtacacaggaaagttaacattaccaagagttatcattgctatccgatatcataaaactgctttccactagagaaacatacatcagcagaagaaatattgtttggtagatattgctagaggcagagctgacttaagcacctcaccgtgtcaagtagaccacttcctccaaaaactgattgcatgagtgtcataatactatggaraacacactattttttctcattgtt

SEQ ID NO: 185131 - DNA, 598 bp, Homo sapiens
tagcgcatccttattggaatactaatctgattttaaaaaacttagttatttaaaattataaaagttgtatatgtagcrtaatcaatagactttatgtactccaatgcatatttcacttgtcctgtagcccactagtaccccctttcacgttcaatattctccaagtgtaaatgataagcaatatttccaccttgggtatagaggagcagaaagacactgtaactgctttttgaggagaggctaaaagtattaaaattgtttgtctaataaaactaagccttttgaaattatgactgctgagtctttaataaactaatgggggatgtggataggattagcaaggcatagtcatccaaccaaaaatacattaaaattagaagcacccattgaagcatgaaagagttcaatttggggcaaataagaagcacagaacaaataatttctcagagctgccaaattagataatataaggattaagcaccaaagtctatgcattttactcatagaagagctccttagactctcattcagatatttctgaccttcccaggaaaataatgccaaaaagtttgtctatctagtttattctgattccaca

SEQ ID NO: 185132 - DNA, 561 bp, Homo sapiens
caaaggaaataacattttgtgaatttaataaattttgtgaaaaaattaattacgtaggcactggggtgaagtacacaaaatattaactttaggaataatgtgagacttgataaatggaaaatgcaaaaaaacacaacactcccaaattctcttttcctcctcattcagtagttagcacttttcattgattataattcaacaatattttcttattatttatttatttatttatttatttatttatttacttttgtttttttgagrtgaagtcttgttctgtaacccaggctggagtgcagtggcaagatctcggctcactgcaacctccgcctcccgggtttaagcgagtctcctgcctcagcctcccgagtaactgggactacaggtgagcatcaccatgcttagctaatttttgtatttttagtagagacgaggtttcaccatgttggccaggttggtctcgatctcttgacctcgtgatctgcccaccttggcctcccaaagtgctgggattacaggcatgagacaccgcgcctggtcaatattttcttatttttgaag

SEQ ID NO: 185133 - DNA, 440 bp, Homo sapiens
gcaggaagcatccagcacaggagaaagaggtaggctgggaggctttgtcagtcttttctcttcacgkttttctgcctgctttatattctctggcagctgattagatggtgcccaccagattaagggtgggtctgccttccccagcccactgactcaaatgttaatctcttttggcaataccctcacagacacagcacccagaatcaatactttgtatccttcaatccaatcaagttgacactcagtattaaccatcacatcaggtgaggttttacagaagcttttcttaatggaacgctaaactggcacaaagcaggctgctttgcttttatataatttaaaatttactactcactgtagcctttaggactcctttgtggtagtgatctctgtggaaatcacacctcattgtgcaaatccacaaggtcataggagaaaat

SEQ ID NO: 185134 - DNA, 427 bp, Homo sapiens
atgtttggtgggcacccacataggcatctgattgtcacctggacagacacaagcaaatcctcttccccataaaattatctttaggtggggatcagaggaagtagactcagaggtaaggagaattttggggactaatggtttcctgatgtttcataggtgttcccttggaagttaggaattccctttctctccatattgctgcgtgggcatggaggactaggtaagcatacttagagtctgtatatatatttaccccttttccttctcttaattctggtgtataagacccctgcttttcctaggatgtctctcgctaccaaaggagtggggctttcaggaataattagaaaggcatgtgaaaagagtaaagttcsccagtcacagcttagtggctgggagaagtatctagtgactgcctgtcctagga

SEQ ID NO: 185135 - DNA, 527 bp, Homo sapiens
catcaaattaaacttttcagttaaattcaattagaactgcatttattaagtacttcccctttagctaacactatkctaggctctaaatgtacaaagataagtataaagttccagccttagatactcattatttaatgaagaggtagggacaagcataaaaacagatataaatcgataaaattaatttattaggcagggcatggtggcccatgcctgtaatcctaccactttgggaggccaaagagagaggatcacttgaggccaagagttcaagatcatcctggacaatatagtgagaccctgtctctatattatttttttttaagtagccaggtgtaatggtgcatgcgtgtagtcccagctactcaggaggatgaggtgggcatgagcccaggagtttaaggctgcagtgagttgactgtgccactgcactccagcctgggtgatggagccagatcctgtcactgaaaaacaataaaagtaaaaaattaatttattaaagttttcatggtatataataatagtac

SEQ ID NO: 185136 - DNA, 549 bp, Homo sapiens
tagagaggcatgaggcacccgcatctacgttcaggtgaagctacggagctcagtccctacagacagccggagccttgggctgtgtacctgtcattaaatgttcctgggactaggaacgtgcagagcaagtgtgtrtgtgtgtgtgtgtgtgtgtgtgtgtgtgtgtgtgtgtctgggctattgaaataacgaccttgccccgggaaagataaccccagctgtctaagtgcctaaggagggagacagtgagcctgccttcttcagccatattgggcagaaagccttcatggtagactagacccacaggatgggactaagtgccttcaaccccaagcggaacccggcaccctcaggcctggacatctctctctgctctgtgaagcttccaaaccgtttacattcatgaatgccttcaaacttgaaggtaccccactggggcaatgaggcctagatagtgtccagttacttgcctgaggttacacaggaacagaggcagcacaggaaacctggcctctagccactctgccacaccaacctcttggggaaggg

SEQ ID NO: 185137 - DNA, 607 bp, Homo sapiens
atgtaggccacagattggggattagcatggaaggtttaggtaaaggaaatggatgaggctgaattatttgatcactcttgggaatcagatgagctcagcaccacctgagctgaagccacaactgtcctacaggcaagctcagcaatctttaacagctcccagatctggtgtgtgtaacattgccttctggtttctgtrggattctatggagttgcctttgcattcctgagtcttaccctgggcccagccttcaagagaccaaaggacaaaaaacctgagtaatcctgccctgacttggtattattgcacctagttttgaaatcctcagccctggcagctgcatattttaccatctccagaaacccagtcattggtgatcaaggaggcagctctctagcaaagctggccttcctcatgaagctctgagagggatctggctatctcacaggaactgtgtgacatccaactgtgaccttacaagcttgtttcttatcaagttttaaagctccccatccatcataggactttcaataacttcctgtttctggatagagggaccagtagttctcatctgcagaggggagaaaatggacatgacttccattca

SEQ ID NO: 185138 - DNA, 607 bp, Homo sapiens
atgtaggccacagattggggattagcatggaaggtttaggtaaaggaaatggatgaggctgaattatttgatcactcttgggaatcagatgagctcagcaccacctgagctgaagccacaactgtcctacaggcaagctcagcaatctttaacagctcccagatctggtgtgtgtaacattgccttctggtttctgtaggattctatggagttgcctttgcattcctgagtcttaccctgggcccagccttcaagagaccaaaggacaaaaaacctgagtaatcctgccctgacttggtattattgcacctagttttgaaatcctcagccctggcagctgcatattttaccatctccagaaacccagtcattggtgatcaaggaggcagctctctagcaaagctggccttcctcatgaagctctgagagggatctggctatctcacaggaactgtgtgacatccaactgtgaccttacaagcttgtttcttatcaagttttaaagctccccatccatcataggactttcartaacttcctgtttctggatagagggaccagtagttctcatctgcagaggggagaaaatggacatgacttccattca

SEQ ID NO: 185139 - DNA, 592 bp, Homo sapiens
aatttacccaactaaactaggtattcgatgtcacaaatttgcaactaggctcaaggctttaaagagtgtaatctgaattagccgggtgtgatggygagtgcttgtagtcccagctacttgggaggctgaggcaggagaatggcgtgaacccaggaggcggagcttgcagtgagctgagatcctgccactgcactccagcttgggcaacagagtgagactccatctcaaaaaaaaaaaaaaaaaagagtgtaacctgatattccttatggaacaaactttcagcaaagccaattttaaaaagtttaagattaattctacaatttgtatggaaaataattattcctaatgcactttatgcaaataatcaggccaagcataataaaactaagatttattttgcaagcaaacttgtcctactatgatttgtgtttaataaaagtggggactggagagagaaaaaatgtgtttcaaaaaactatagtatatctgttgttagttgttcttgaatttttattattttctatagtttgaactaaatcctgaattctttgtgggctgcaagtccccaaactaacactctcagatttttgtt

SEQ ID NO: 185140 - DNA, 564 bp, Homo sapiens
tcttttctaagttaaattcctaattctttcaaactccttttttatatgatgtaactttgaatctcttcaccatcaaatttgacatccagaatcactatattgcaacagtttaaaataaaatatgggtatcactcatcttgtcttaactacttacagtattgtaaactaagattacattagttcctttgacaacaatatgtattctcaactttggttgcaagtgatagaaagccaactcaaatgagcttaggcaaaaaaaaaaaagtcactgaaaatatagragattttgaaggataaagagtaaagaaaagaattttggaagaagtttgtacagaggacaataactgagattttaacccatttatgctggaagttgccatattttggtgaaaaatcagaccttggtgatgaacttgagcagcaggatataaatgactcccactagcttagcgttccaataatggatcactaggcataaatggctacatcttattttactgcacagaatgggcaaactgacctgacagttacttgactagaacttgaaaggcataaatccttcca

SEQ ID NO: 185141 - DNA, 566 bp, Homo sapiens
gtggttagtgaggagcacagctctagcaattgacgccagcaaggagggtctttttgttttaatttccactagagggcactatctccttcagcagaagtaagaaccatgtgcatttcaccattttccatctagtagtggaaaacagaactggtggcatatttccaatagcctagagatgtcttagcctctttataggttggtgctccaagccgccattcacttagtctgtcccttcagttatgactttctctagcctcatgtcacgtattcagagcactgttttcagcaagatgtcactaagaacatagaactgaggtatgcytaaaaagcagaaattcataagctaatattcaatggaaaacgtttaaaagtaagtgaagaaaaatgtattctgcacaaataaattcactttcccttaaacaaaatttaagattatattttcatttatgttttttctttcagtcttttaatgtcatgaatttccaaaaagatttctcaagcttattttactatggaacctttattcatggagcactaattaactctgcctgaacaaaacacaaagc

SEQ ID NO: 185142 - DNA, 577 bp, Homo sapiens
aatatcatcctttctccccctggaaattaggaacaatatcacaggggtggtgtacacccctgcaatatttagggtaatattattgtcttctcccctcgatattaggaacaatattacaaggacggtgtaaagtacctgccaaattgggaaaaatactatcctctccctcttgtatattagaaacaataacacagggggaatgtacacccactgccatattgggagtaatatcatactcgccccatcccccagatattaggaacaatatcacagcagrggtgtacacttttacgatattgggagtaatatcatactctctccccctggaaattaggaataatatcacagagatggtgtagaccctctgcaatacttaggataatattatcatctcccccctcgatattaggaacaatattacggggagtgtaaattacctgccaaattggaggtaatcctctcctctctctccctgtattttagaaaatataacacacaggaaatgtacaacactgcgatattcggagtaatatcttcttctccccacctggatattaggaacaataacacggacggg

SEQ ID NO: 185143 - DNA, 620 bp, Homo sapiens
aggtgggcatctgtgtggagggtgagagatccctggttgagcccaaactgaaccccaggtagaagcaagcctcaggacagggaagtagctagcaagggatgatgaggcagctatctcttgaccctggcttcccacccattgaccttagctacttatgcctattaagcagattacggttcccccatcgtgaaatgtgggtaccacmgttccctaatgggcatttctccaccagcccatgatggcctgagtttccttactgcagtctcctccctgagccttggcttctctatgtgtgtcctaactccaggacccacaggcctgtcaacccccagccctgggctgcttccctggcctcttctctgttccctctctgagggcctaactcccttgggtagtgctgcagaatatagagccacaggccctggctgatgatctggtggactgggcaaattggtcgtgacaggtcaggttctggttcaaagccaattcctccgatgccaaggaatgtcgaagaaggtcctttgccatgatgccccatagctgccccacctcagcaatcgtgccgtaacctgggccctcacagtcagacaaccagctgaagaagctcaggcagtgacctg

SEQ ID NO: 185144 - DNA, 620 bp, Homo sapiens
aggtgggcatctgtgtggagggtgagagatccctggttgagcccaaactgaaccccaggtagaagcaagcctcaggacagggaagtagctagcaagggatgatgaggcagctatctcttgaccctggcttcccacccattgaccttagctacttatgcctattaagcagattacggttcccccatcgtgaaatgtgggtaccaccgttccctratgggcatttctccaccagcccatgatggcctgagtttccttactgcagtctcctccctgagccttggcttctctatgtgtgtcctaactccaggacccacaggcctgtcaacccccagccctgggctgcttccctggcctcttctctgttccctctctgagggcctaactcccttgggtagtgctgcagaatatagagccacaggccctggctgatgatctggtggactgggcaaattggtcgtgacaggtcaggttctggttcaaagccaattcctccgatgccaaggaatgtcgaagaaggtcctttgccatgatgccccatagctgccccacctcagcaatcgtgccgtaacctgggccctcacagtcagacaaccagctgaagaagctcaggcagtgacctg

SEQ ID NO: 185145 - DNA, 452 bp, Homo sapiens
acaagaagcagataaactaactcttgggcaaaacatgaacataaaggccccacatgctgtggtgactttactgaataccaaaggatatcattggctaatgaatgctagcctaagcaagtacaaagcttgctctgtgaaaatcccygcacaatcaatgaagtttgtaacaacctgaattttgccaccttgctccctgtataagaaagccctattgagcataactgtgtagaggtgttgaactcagcttactttagcaagcctgacgtgtatgaacagccttgggcatcagtggactgggaggtatatgtgggtgggagcagctttgtcaacccacaaggagtgaggtatgcaggatatggagtggtaaccctggacgctgtcactgaggccaaactattgccatagggtacttcagcccagaaagccaagatcactgctttaatttgggtgtg

SEQ ID NO: 185146 - DNA, 452 bp, Homo sapiens
acaagaagcagataaactaactcttgggcaaaacatgaacataaaggccccacatgctgtggtgactttactgaataccaaaggatatcattggctaatgaatgctagcctaagcaagtacaaagcttgctctgtgaaaatccctrcacaatcaatgaagtttgtaacaacctgaattttgccaccttgctccctgtataagaaagccctattgagcataactgtgtagaggtgttgaactcagcttactttagcaagcctgacgtgtatgaacagccttgggcatcagtggactgggaggtatatgtgggtgggagcagctttgtcaacccacaaggagtgaggtatgcaggatatggagtggtaaccctggacgctgtcactgaggccaaactattgccatagggtacttcagcccagaaagccaagatcactgctttaatttgggtgtg

SEQ ID NO: 185147 - DNA, 452 bp, Homo sapiens
acaagaagcagataaactaactcttgggcaaaacatgaacataaaggccccacatgctgtggtgactttactgaataccaaaggatatcattggctaatgaatgctagcctaagcaagtacaaagcttgctctgtgaaaatccctgcacaatcaatgaagtttgtaacaacctgaattttgccaccttgctccctgtataagaaagccctrttgagcataactgtgtagaggtgttgaactcagcttactttagcaagcctgacgtgtatgaacagccttgggcatcagtggactgggaggtatatgtgggtgggagcagctttgtcaacccacaaggagtgaggtatgcaggatatggagtggtaaccctggacgctgtcactgaggccaaactattgccatagggtacttcagcccagaaagccaagatcactgctttaatttgggtgtg

SEQ ID NO: 185148 - DNA, 520 bp, Homo sapiens
ccgggtgtgtctgccaggatgttgccaaaggagattaacatttgagtcagtggattgggaaaggcagatccacccttaatctgggtaggcaaaatctaatcaactgccagtgcagctagaatataagcaggtagaaaaatgtgaaaagagagactggcctagccwcccagcctacatctttctcccgtgctggatgcttcctgccctcaaatattggacttcaaattcttcagctttggaactcagattggctctccttgctcctcagcctgcagatagcctattgtgggaagttgtgatcatgtgagttaataacttaataaattcccatatatatattccattagttctgtccctgtagagaaccctgactaataaactaacatcgaagttacatttggctattaccaaaacaaacaaacaaacaaaactgcagcaaaagttaaagggaaataattatcagtaaaaattagactaataatgtataaagaactgagatcacactaagaaatacatgaga

SEQ ID NO: 185149 - DNA, 561 bp, Homo sapiens
cagctgtcaccatactttatttcctgctcagagttcaatggtccttgtgttttgctcccaaattctatttaagtatgctgggttttatgtgaaaatgccatgataaataaacataagaataaaaagaataagagytatcattttgtcagtcatatcatgtactaactcgtcatctgattacttaatctaattctgatttttcttaatttatgcatgtggaaactgagcctcagagacattatctaatttggcaaaacacacgtacacacacacacacacacacacacacacacacaaataaattaattaagaaaatacaaaccttcaaaacttatagctattaagttatagagatggaatccaaaccaacatctgagtatgtcactgacttaccacaataaagttggggtaagattgcgaggttatcaactgcaagtaaggctgtaaagacatatctaacctgtcaactgattttacgacctccagccacaagtagtgacaaagccaggctagatgctgagtttttctttattgtttccagccaaaaacagaggccaaatc

SEQ ID NO: 185150 - DNA, 545 bp, Homo sapiens
gtatgaatcacaaaagaccatcttatacttataacaggctattttaagctcataacttagccaaagcagtagccaaagcaatcctgaataagaagaacaaagttgaaggcatcacactacctgacttcttaaatatattatgaagctataatttcaaaaaccagcacgttcctagcataaaggcatattcataagccaatggaatagaacagagaacccagaaataaatccatgcatttacagtcaaatgatttttgacagtggtgccaagaatacacttcaggaaataatagtcttttaaataaatggtcttgggaaaaccagatatacgcatgcataagaatataaacacaaaatgggttaaagacttaaatataaggcctgaagctgtaagaagactactagaagaaaacatggaaaaagctccatcacattagcctgggcaatgatttttttggataygacctcaaaatcataggtagcaaaagcaaaaatagacaaatggaattacatcaaactaaaaaacttccacacagcaaaggaaa

SEQ ID NO: 185151 - DNA, 479 bp, Homo sapiens
gtgcaacttgattataaagtgccatagtgtagtttcctcatatttcttgcgcttgagattaagatttatggatctctgatttatagttttcaccaaatttagactttttagaattttgtaaaagtattcgattaacattattgtcccactctcctttcctttctggattccrattatgtatatattaggcttccaattatgcatatattaggcctcaacttactgatgctttttaaatttttaatgttttttccttgctgtttttgataatttctattgtcttgtgttcaagatcattactcttttcttctataatatctaatttgccattaatgtgtttatttctgtctctgagatagtaattttcatttgcagaagttctatttcagtcttttaatattttccatgtctttacctaacttttgtaacctatgaaatacagttttgtgactattttaaattccttgtctgctaattct

SEQ ID NO: 185152 - DNA, 518 bp, Homo sapiens
ttcctccttctctggctttgtgaagtgctttattttcccttcaatttccaagatgattggaagttccttgaggcctcctcaaaagctgatgccaccatacttcctgtacagcctgcagaaccgtgagtgcattaaacctcttttctttataaattacccagtctcaggtatttctttatagcaatgtgagaattgactaacacaatatactaatatattgtgttatctatctgttttagacttttctaagaataactttctgccccctttcatttgcaagtttcctggactttttaaatctaaatctgcctcttataaatgtacattagrtttctttttcaaccaaattcgaatctctcttagttaacagataaatttagtcagttcaacttattataatttttgatacatttggatgtatttaactctctatatttctggttttctgtttatcatgttatatctatgtttatttcaagcatttgtttaatagaatgttttctgactactctcatttt

SEQ ID NO: 185153 - DNA, 489 bp, Homo sapiens
ggttttataaggggttttttcccrtttttcttgtcacttcccgtcctgccaccccgtgaagaaggacgtgtttgcttccccatctaacatgattgtaagtttccagagcccccagccagacatgctgaactgtgagtcaattaaacctctttctttataaattacccaatcttggggatgtctttattagcagcataagaacggactaacacagtggctctcttaattttgaataaataaccaaacgttattagaattttggaaataaccttttgtgtaaaaggaaaaatgaaacaaaataaaatcatcgtaaatactgaaggtaaagaattctaaaagctatggagaaaaggtcgtggataaggtcataaataaggaaacagtgaaatcagacttctcagtagaaatcctgctattagaaggtaatgaagtattgccttaaaattactgagggaaaattatcttaaatctataattttatttatttag

SEQ ID NO: 185154 - DNA, 486 bp, Homo sapiens
atttattagttctaggagcttttaggataatctttagggctttctaggtatatgatcatgtcatcagcaaagaggaacagtttgacttcctctttaccgatttggatgcctttatatcattctcttgtctgattgctcaggctagggcttccagtactatattgaagagaaatggtgaaaatgtgcatttttgtcttcctccagttctcaggggtaatgttttcaacttttcccaggtcagtataatgaygtctgtgtgtttgtcatagttggcttttattaccttaaggtatgtcccttctatgccaattttgctgagggttttagtcataaagggatgctggattttgtcaaatgctttttctgagtctattgagatgatcatgtgatttttgtttttacttctgtttgtgaggtgtatcacatttattgacttgcatatgttaaaccattcctgcattcctggtctctaacacacttgatcat

SEQ ID NO: 185155 - DNA, 486 bp, Homo sapiens
atttattagttctaggagcttttaggataatctttagggctttctaggtatatgatcatgtcatcagcaaagaggaacagtttgacttcctctttaccgatttggatgcctttatatcattctcttgtctgattgctcaggctagggcttccagtactatattgaagagaaatggtgaaaatgtgcatttttgtcttcctccagttctcaggggtaatgttttcaacttttcccaggtcagtataatgatgtctgtgtgtttgtcatagttggcttttattaccttaaggtatgtcccttctatgccaattttgctgagggttttagtcataaagggatgctggattttgtcaaatgctttttctgagtctattgagatgatcaygtgatttttgtttttacttctgtttgtgaggtgtatcacatttattgacttgcatatgttaaaccattcctgcattcctggtctctaacacacttgatcat

SEQ ID NO: 185156 - DNA, 541 bp, Homo sapiens
agatgcataaaaagcttttgataaaatctaacatccaatcttgttaaaaaccctcagcagactaggcactgaaaaaatatacctcaaaataataagagccatccatgccatacatacccacagccaacaccatagtaaatggaaaaagctagaagcattcttgttgagatctggagaaatgaaaggatgtccactctttccactcctgtataacacagtgctgaaagtcctagccagagcaatccataaagagaaaaaaaataaaaggcatcctaataggaagagaagaagccaaactatctttctttacttacagtgtgrttgtattcatagaaaatcctaaagattctgccaaaaagttcctaaaattgataaatgactttattaaagtttcaggaacaaagtaaatgtacaaaaatcattaacatttctatgcaccagcaatatccaggctgagagtgaaatcaagaacacaatcccacttaaaatagacacagagaaaatgaagtgccagaaatacagctaaccaaggacatgaaag

SEQ ID NO: 185157 - DNA, 603 bp, Homo sapiens
ctagaacaaccttgacaaccaaacaaggtaaggacaacaccaaataggaaaatcatagatctcaattatcaacatagatacagacattctaaataaaattattagcatagagagttcaactgtatgctacccaatagtaattcatgaccaaataatgtttttacyaggaaagcaagagtgaatcaacatttaattacttcgtgtaatttattacatcactatattcacatgatcatctcaatagctgtcctccaaaagcaattgctaaatttcaatggttaaacaactgtcacagttaatggtaagacatctgcagtattgctattaggatcagatatgaagtaacgcatccactaatattcaatattggactaaaaagctaagccaaacatgataagaaaatgatgatatactattagaaagttataaaaaatttattattggacatgatatcactttctatgctttataaaaacagtaaactaaaatgcatttagaattaatataaggtttctaattggtagcatgatacaagattagcacaaataaatcaataggatgactgataactatcagcaatgtctgattgtcaaatagaaatga

SEQ ID NO: 185158 - DNA, 423 bp, Homo sapiens
ttcattaaaacgtgtgcaaaagaaatgaacagacattttcaaaagaagacatacgtgctgctgacaaacatatagaaaaaaagctgaatatcactgattattattaaaatgccaatcaacactacaatgagatatcatctcacacctgtcagaatgactattattaaaaactcataaaacaacagatgttggcaagattgtcaaaaaaagagaaatgcttctacaatgttggtgggagtgtaaattagttcaaccattgtggaagacagtgtggtgattactcaaagacctagaggcagaaataccatttgacccagcaatcccattactgattatatacccaaaggaatagaaatcattctattrtaaagatacatgcatgtgtatgttcactgtagcattattcaaaatagcaaagtcctg

SEQ ID NO: 185159 - DNA, 595 bp, Homo sapiens
tattggtatgtagttgctgatagtaacctctaatgatcctttcaatttatgcagtattaataaaaatgtctccttttgtatttctgattatttgtttcttgtctctttttttcttatttagtctggctaaaggtttataaatttagtttatcttaccaaaaaatcaactttttatgtcattgattcttaaaattctgttcatttcaatttattttactttttgctctcatctttattatttattttcttctattaaatttaggtttggttttctcttgtttttcaaattctttaatatgcattcttatgttgtttatttgaagtcttkcttctttttggatgtacatacttgtagctataaatttccctgttagtactgcttttgctgtataccacaagttttggcatatcgtttttccattctcatttttttcaaaaaatattttaacttacttctaaatcacttcattgactcactggtcattcaagagcttattgcctaatttcccatgtgtttgtatagtttccaaatttcttctttattgatttctgctttttctctcttttttttttgtttttttgccattgtggtctg

SEQ ID NO: 185160 - DNA, 555 bp, Homo sapiens
ataataggtaaattaataaaaacagaaagtagagtaatggctgcctggggatgaaraaattttgggataaaatggaggatgaatgttaagatatatggagtttctttttggagtgaaggaaatgttctaaaatttgttacagctacataggtctgtggatatactaaaaacattaaattgttcactttaaatgagtgaattgtatggtgtgtgaactatatctacataaaagttttatattaaaatcataatttcatttttcatctaaagaaaataaaagaagaacacagattccacaggcaaagcaaaatagccaaagagaagcctgctctgatcaacctcctcacaggaacactaaatttgacaactatctatacacatcaaaacatatgcataaaaaccaaaaatcgtatgaatgatcacattacctagtcttaactgcatataactaaatgaggcactgaaaagagtaggaaaaaccatctcaatttgctgatcccacccctttccaatccttcagcagcagccacttggcacagagagagaacctgtgat

SEQ ID NO: 185161 - DNA, 416 bp, Homo sapiens
atcatgttggggaagctcctttttatttctagactgcagagaggttttaaaaagatatatgatgaataagttttggacttcaaagcagccttgcatacctgaaggaaatcttacttggacataatatgtaattctttttaaacattgtttgattagctgttgtaatattttattgagaattttacctccatgtttataaaagataattggtctgtatttttttttttttttatggtatccttgtctacttttggtagcaagacgatactggccttctagaataaattaggaactatcgtttctgcttctgttttctggaagacattgcagrgatttggtaccattgttttcttaaatgcttggtagaaattaccagtggaaagtatttggccagggtgctttattatgtgagatta

SEQ ID NO: 185162 - DNA, 416 bp, Homo sapiens
atcatgttggggaagctcctttttatttctagactgcagagaggttttaaaaagatatatgatgaataagttttggacttcaaagcagccttgcatacctgaaggaaatcttacttggacataatatgtaattctttttaaacattgtttgattagctgttgtaatattttattgagaattttacctccatgtttataaaagataattggtctgtatttttttttttttttatggtatccttgtctacttttggtagcaagacgatactggccttctagaataaattaggaactatcgtttctgcttctgttttctggaagacattgcagagatttggtamcattgttttcttaaatgcttggtagaaattaccagtggaaagtatttggccagggtgctttattatgtgagatta

SEQ ID NO: 185163 - DNA, 472 bp, Homo sapiens
atttgcctctcagcttggatgttgttagtgtacaggaatgctgctaatttttgtacattgattttgtatcctaaaactttgctgaagttgcttagacgatcaacatgttttggggcagagactatggggttttctaggtataggatcatattttctgcaaacagggatactttgactttctctcctcctatttgcatgcattttattcctgcctcttgccagattacccttgccaggacttccaataaaatagttaaataagactgatgaaagagggcatcctgccttgttccagttttcaaagagaagccttctattttttgccaattcagtatgatgctagctgtgggcttgtaatagatggctctaattattttraattatgtttcttcaatgtctagttgcttcagaattattaacatgaaggaatgttgaattttatataaatcctttttatttatttatttttttt

SEQ ID NO: 185164 - DNA, 472 bp, Homo sapiens
atttgcctctcagcttggatgttgttagtgtacaggaatgctgctaatttttgtacattgattttgtatcctaaaactttgctgaagttgcttagacgatcaacatgttttggggcagagactatggggttttctaggtataggatcatattttctgcaaacagggatactttgactttctctcctcctatttgcatgcattttattcctgcctcttgccagattacccttgccaggacttccaataaaatagttaaataagactgatgaaagagggcatcctgccttgttccagttttcaaagagaagccttctattttttgccaattcagtatgatgctagctgtgggcttgtaatagatggctctaattattttaaattatgtttcttcaatgyctagttgcttcagaattattaacatgaaggaatgttgaattttatataaatcctttttatttatttatttttttt

SEQ ID NO: 185165 - DNA, 324 bp, Homo sapiens
ggtgatctgtgatcagtgatctctgatgttactattgtaattgttttgaggcaccaaaaaacacacctatataaggtggcaaacttaatmagttaatgttatgtattttatgtatttttaactgcttcagcaaccagctgtttctttcgttctctccctctcctcagacctctctattctctgagacacggcaatattaaaattgtgccatttaatatctgcacaatggcctctaagtgctcaagtgaagaaagacttgcatgtctctcactttaaatcaaaagctagaaataattaagctaaatgaggagagcatgtcaaaag

SEQ ID NO: 185166 - DNA, 563 bp, Homo sapiens
aacatcatacagcatccttacacaaacataggtgatatagcctttatgcacctagcctatgtcatatagcctattactagtaggatacaaccctgtataacatattacggtactgaataatacagacaattgtaacacaatggtaagtatttgtgaatctaaacatatataaacatacaaaagtaaagtaaaaatataatattataatcttatgagaccaytgtcatatgtgtggtccatggtccatcattgactaaaacattgttaggtggcatgactgtactttaaaagtcccatatgttgcatctgaaatttaaataatgtcacattctttcttgttgcaggcagtacaagatgagtcaattttttcttcaatttggtggagatatttgtacatgcttcagactatcaaaccccaatattgtttgaggccctaaatttgtgtgggtttttctgccaactcctgttgtgcgtgtgtctcagtaatagctggagagaatgacccattctatgaatgtctgacaatttttcccccagttgtctcagtgcttgtttagtagaat

SEQ ID NO: 185167 - DNA, 518 bp, Homo sapiens
cacacaaataaaattttcaggaatatttgtttgtttcaagagaatttgaagttctgttttgaaaagaaaatttattattacagagtttcaatwctattattttcatcatcacaggggaagcttttatttttatcattgcaatgtagctggtctataagcagcttctggtcatttttatgaacacatcaccaataaatccatatgaatttattaatagcattttgaaaaaaacatattgaaaagagcaagaagaattttaaagcatcagaaattctttcttaaacattgcagattttgataagatgtcagcataggcacaagaaaacaatatgtaagttatcaaaccttaacttgtaaattttatgcagaggaaagcctcataaatcctaagtctaaatcacatcaccatgaaacatggtttgaggcccaaggctactcaaatacatatggtagtgtggtctattagaaagcacaatggactaggaattagaaagcttaggttgtactgttaattcttt

SEQ ID NO: 185168 - DNA, 434 bp, Homo sapiens
gggatatggtgggattgctaagtcttcatatcaggctctaaaagaagggataaatagggactcacttctctgggaaaatgatcaggagcaagcctttaggcggcaaaaaactgccctctcacaagccccagcccttgggctacccatactaacgtaaccattttagcttctcatcactgaaaggaaagatgtagccctaaaagttctaccttacacaatgaggccaattaaacatcctgtaggttacttttcaaagaacctagacccagtatcacaagggtggccacattgcctcaaggtagtggctgcagcagctttcctcatctaggagccctcaaaagcagcatgaggcagtcagtttgactcctgacatctcaccgaatagaccccttattggacataaaaaaamcacaatgtcccactgacaacagact

SEQ ID NO: 185169 - DNA, 604 bp, Homo sapiens
catttcagcttattttattctcttcttgggwattaattgcacttattttctgcaccactcatttggtgccaaatcttctattgccttgtaactacttatttgctattttaaattaataccttatattgacatatttgtcttactaatgatgtcataagtttactgaatacaggaactgttactttgtatcctaaagtacactgcatgcccctgcacagagtaattgcatgaagaacgaatctccattcatcccttctagtgccattagaagaccttaataaaggagtttgatcaattccctttcacactattttattcctcagtggttctgagtgtattgccatcatgctaacaaggacagctggaataaagataagttttgaggtcagagagtagttaagggaggagtctggggacagaggacttgcctgttttctcagttcctctttaagaggcaccagagttacaaaaggtcactaggtgtatttggcaagagactaggtgtactttaaattgatttggcatttcctaggatattttaaaggatgacttgatcaaacttttgaacttacagattttttaaattaaatgaaacaaaaagatt

SEQ ID NO: 185170 - DNA, 604 bp, Homo sapiens
catttcagcttattttattctcttcttgggaattaattgcacttattttctgcaccactcatttggtgccaaatcttctattgccttgtaactacttatttgctattttaaattaataccttatattgacatatttgtcttactaatgatgtcataagtttactgaatacaggaactgttactttgtatcctaaagtacactgcatgcccctgcacagagtaattgcatgaagaacgaatctccattcatcccttctagtgccattagaagaccttaataaaggagtttgatcaattccctttcacactattttattcctcagtggttctgagtgtattgccatcatgctaacaaggacagctggaataaagataagttttgaggtcagagagtagttaagggaggagtctggggacagaggacttgcctgtyttctcagttcctctttaagaggcaccagagttacaaaaggtcactaggtgtatttggcaagagactaggtgtactttaaattgatttggcatttcctaggatattttaaaggatgacttgatcaaacttttgaacttacagattttttaaattaaatgaaacaaaaagatt

SEQ ID NO: 185171 - DNA, 591 bp, Homo sapiens
aatttgtcatagataattgctgttctgggctgctgcttctcttagtaatagtaacagaatttattgtctgccctcacacaaccaaatcctttcaaagaaaattattctrccttaatatctatgggtcatgtttcattcatagtgattagttcagggatggacttgtgacctgaattgatcaatgcataaggaagctgttatttctgtgcaacatttagattagaaaaaaaaatttactcttttatttccatgtgaatgagaaatttgggaagctgctgataacaattttactaccatcaggggaacttctgcccaaaacagaaccaacaccaaaggagctcattcaaaaaggagagagagagagaaaaaaaaaaaaagtcctgaactcatagttttcaccctggctaaactcattccctattctcttcaagatccaatcaattttccattattatttaagccacttgagtaaggttatttgctgccattttcagaaatgttcctaactaaaatacaagagaccaagaaaagatacttcatagtatagtattgattgtattcttcttttgtgtcaagcacaatactaagcac

SEQ ID NO: 185172 - DNA, 591 bp, Homo sapiens
aatttgtcatagataattgctgttctgggctgctgcttctcttagtaatagtaacagaatttattgtctgccctcacacaaccaaatcctttcaaagaaaattattctaccttaatatctatgggtcatgtttcattcatagtgattagttcagggatggacttgtgacctgaattgatcaatgcataaggaagctgttatttctgtgcaacatttagattagaaaaaaaaatttactcttttatttccatgtgaatgagaaatttgggaagctgctgataacaattttactaccatcaggggaacttctgcccaaaacagaaccaacaccaaaggagctcattcaaaaaggagagagagagagaraaaaaaaaaaagtcctgaactcatagttttcaccctggctaaactcattccctattctcttcaagatccaatcaattttccattattatttaagccacttgagtaaggttatttgctgccattttcagaaatgttcctaactaaaatacaagagaccaagaaaagatacttcatagtatagtattgattgtattcttcttttgtgtcaagcacaatactaagcac

SEQ ID NO: 185173 - DNA, 591 bp, Homo sapiens
aatttgtcatagataattgctgttctgggctgctgcttctcttagtaatagtaacagaatttattgtctgccctcacacaaccaaatcctttcaaagaaaattattctaccttaatatctatgggtcatgtttcattcatagtgattagttcagggatggacttgtgacctgaattgatcaatgcataaggaagctgttatttctgtgcaacatttagattagaaaaaaaaatttactcttttatttccatgtgaatgagaaatttgggaagctgctgataacaattttactaccatcaggggaacttctgcccaaaacagaaccaacaccaaaggagctcattcaaaaaggagagagagagagaaaaaaaaaaaaagtcctgaactcatagttttcaccctggctaaactcattccctattctcttcaagatccaatcaattttccattattatttaagccacttgagtaaggttatttgctgccattttcagaaatgttyctaactaaaatacaagagaccaagaaaagatacttcatagtatagtattgattgtattcttcttttgtgtcaagcacaatactaagcac

SEQ ID NO: 185174 - DNA, 546 bp, Homo sapiens
catttttttatggccaaatagtattccattgtgtacatgacatattttctttatctaattatccattgatgatcacttaggttgattgcatatctttgctattatgaatagttttgtgataaacatacaagtgcaggtgcctttttttatagaatgacttcttttcttttgggtagatactcggtagtggaytgctggatttctatgtttagttatttgagaaatctgcctactgttttccatagaggttgtactaatttacatttccatcaacagtatataagcattctcttttctctgcatcctcaccagcatctgttattttttgactttttaaatagtagccattctgactggcacctggtgatgtctcattgtgcttttaatttgcatttctctgataagtagtgatgtgagtattttttcatatgcttgttggccatgtgtatgtcttcttttgaaaaatatctgttcatgtcctttgcctactttttaatggagttggttccaggaaaattgaatttccttatgcagaagaatgaaact

SEQ ID NO: 185175 - DNA, 546 bp, Homo sapiens
catttttttatggccaaatagtattccattgtgtacatgacatattttctttatctaattatccattgatgatcacttaggttgattgcatatctttgctattatgaatagttttgtgataaacatacaagtgcaggtgcctttttttatagaatgacttcttttcttttgggtagatactcggtagtggattgctggatttctatgtttagttatttgagaaatctgcctactgttttccatagaggttgtactaatttacatttccatcaacagtatataagcattctcttttctctgcatcctcaccagcatctgttattttttgactttttaaatagtagccattctgactggcacctggtgatgtctcattgtgcttttaatttgcatttctctgataagtagtgatgtgagtattttttcatatgcttgttggccatgtgtatgtcttcttttgaaaaatatctgttcatgtcctttgcctactttttaatggarttggttccaggaaaattgaatttccttatgcagaagaatgaaact

SEQ ID NO: 185176 - DNA, 618 bp, Homo sapiens
gatatttacatagttatcttgtatctgccatcttattgtattgtcttgttagtgctgatagatttttaataatgtttcctggatttttttaaaaatgtagattctatttttattcaggtatgatgaagccacagattggcrgacaattgctatttaaaagtttatttctgctcgtgcccaagaggaggggtcacactgcacagctgcgggagagaacaccgaggttggtcacaggcagaggacaggggaactgtggttttcgagggaaggaatggatgaggcagggtaaggcggctaagcaggtggagcactagctagttggaatagcgtcagctgattcctgattgtagactgccctcagttttctgatacatgacctcagggtggttattttccaacttttcctgatcacaaattatatagtaataaaaatccttttatatatttttgcatgggtatgtaattctgtaagatacttagaagtataatttctggattaaagagtttacatattttaaatatgtaatttaataaattacaattaaaatttaatttaattcccaaaaagtgaaacattttaatgatctcaccgatagtatatggagagggtcctttttc

SEQ ID NO: 185177 - DNA, 594 bp, Homo sapiens
tcagatgctttttctgcatctattgatataatcatgtgatttttcttctttagccttttgatatgatgaattacattaattgattttcaaatgttgaatcagtcttgtgtgcctcggataaatcctacttggtcatgatatacaaytatttttatatattgtggaatttgacttgctaatattttgttgacaacttgtgcatccatgttcatgagaagtattggtctgtagttctcttttcttgtaatgcctttgtctggttttggcattagtgtaatactggcctcatagaataagttaggaagtattattcctgttgcttctatcatctgaaagatacttttgagaatggatataatttcttcattaactgtttggtagaattccctggtgaaccaatttcggcctggttcttcttgtttgggaaggttattaattatcaattcattttcattaatagataggacttatcagattgtatttttctatttgaattttagcaaagtttgtctttcaaggaattgatccaagattatgaaatttataggcatagagttgtttataatattcctttattatccttttaatgtccac

SEQ ID NO: 185178 - DNA, 525 bp, Homo sapiens
ttcacattgatctcattgcccaacctgactccttcgagatgaaagactragtttgctgcctggccatattgagaggagaagcagaggggcttctccgtccggtggggacttggagaacttttctgtctagctaaaggtttgtaaacgcaccaatcagcactctgtaaaaacggaccaatcagcactctgtaaaatggaccaatcagcaagatgtgggtggggccaaataagggaataaaagctggccactggagccagcagctgcaacccactggggtcccgttccacacactctgggagctttgttctttcactcttcgcaataaatcttgctgctcactctttgggtccgcaccacctttaggagctgtgacacttgctgagaaggtccacggcttcactcctgaagtcagtgagaccacgaacccactggaaggaataaactctggacacacctgaacatgggaaggaagaaactctggacataccatctgtaagaactgttcactcatagtgaaggtccac

SEQ ID NO: 185179 - DNA, 525 bp, Homo sapiens
ttcacattgatctcattgcccaacctgactccttcgagatgaaagactgagtttgctgcctggccatattgagaggagaagcagasgggcttctccgtccggtggggacttggagaacttttctgtctagctaaaggtttgtaaacgcaccaatcagcactctgtaaaaacggaccaatcagcactctgtaaaatggaccaatcagcaagatgtgggtggggccaaataagggaataaaagctggccactggagccagcagctgcaacccactggggtcccgttccacacactctgggagctttgttctttcactcttcgcaataaatcttgctgctcactctttgggtccgcaccacctttaggagctgtgacacttgctgagaaggtccacggcttcactcctgaagtcagtgagaccacgaacccactggaaggaataaactctggacacacctgaacatgggaaggaagaaactctggacataccatctgtaagaactgttcactcatagtgaaggtccac

SEQ ID NO: 185180 - DNA, 525 bp, Homo sapiens
ttcacattgatctcattgcccaacctgactccttcgagatgaaagactgagtttgctgcctggccatattgagaggagaagcagaggggcttctccgtccggtggggacttggagaacttttctgtctagctaaaggtttgtaaacgcaccaatcagcactctgtaaaaacggaccaatcagcactctgtaaaatggaccaatcagcaagatgtgggtggggccaaataagggaataaaagctggccactggagccagcagctgcaacccactggggycccgttccacacactctgggagctttgttctttcactcttcgcaataaatcttgctgctcactctttgggtccgcaccacctttaggagctgtgacacttgctgagaaggtccacggcttcactcctgaagtcagtgagaccacgaacccactggaaggaataaactctggacacacctgaacatgggaaggaagaaactctggacataccatctgtaagaactgttcactcatagtgaaggtccac

SEQ ID NO: 185181 - DNA, 624 bp, Homo sapiens
agttgtgcatatgtatcagtcacgtgatattttgatatatgcgtacaatggtgtaatgatcaaatcggagtatttaggatattcatcatctcaaatatttaatgttttttgtgtgttgggaacatttcagatcttcccttatagctgttttaaaatatacagtaaattattgctaactatagtcaccctactgtgctagaatgtattctatctatctaactgtatgtttgtgcccattttccaaactttcttcattcccccatccccttcctagcctctggtaatattgttctactctctgccttcatgagatcactactttaagcttccacaaatgaataagaacttccaatatttgtctttctcttcctggcctattccatttaacataatgacttccagtttcatccatgttgctgcaaatgataggatcgcattctttttacggatgaatartatcttattgtgtatatatacatctcattttctttatccattcatcctttgagggacacttagattgattccatatcttggctattatgaatagtgccgcaataacgtggcattaacctcatgtagcataatgtttactaaccattcccataactcaggcaagttttc

SEQ ID NO: 185182 - DNA, 623 bp, Homo sapiens
ctttgaaatagcttgaggatttctccaaaataatggctctttcttctagatattaattaagaaggycagttgctgtttaacttagaatcacaaggtccaaactgaaaagcctaacttctctaactccacagagagcaataaaatcctctctgcagagacttaatataagcaaagaaaattcgtctggaaaggtgaggcccatcagtcagcaggaagctacaaatcccacggctggtgcaactcgattattgacctccactgtaatcgtatctgttttctgttgagaatgaactaaattccgtcaggctgggctctcagggtctctgttcactcccagttcatgatgcagtgacctgcgctgaagtctcccagggtaaatctattttttaatcatctcctccatcctgctttccctgtctcttaaatgggagatgcctatccttaccactgctgcttttataattgagaagaaatcaatcaggaatgaccaaaacacaatgtgtctataaaatacaacaaaataatcacagctattacaatgtttaaaatccaccagggccttcaaatcacttgggaaagcattttatgtgtgaatataaatcacaccatctgctgctctcccc

SEQ ID NO: 185183 - DNA, 599 bp, Homo sapiens
actgtcctgtagatatgacccgggtgtgtattataatgtacacatggattgtgtaacytttctatgtaagtaaaatgcatacagacagtccttgacttatgatgcttcaacttaagatttctcaacattgaggtgggtcttttgggaggtagccccattgtaggtagaggagctccttctaaatcatgatagggttacaatttctactgaaaacacatcactccagcactgtcataacatggtaaaagcataaatggaaccattgaaagtcgggaaccatctgctctgttagcagcgttaggtgcatttttgacatatgacatttttgactgatgatggatttattaggacataagtccattgtaagttgaggagcatatacattaagaataaaacggaggagtcacagccatttccctcgccagggtgagagtgcgaagcctagtgatgggtccccatgtgaggccctttgttgtgccatcaatgtgccaagaatgacccacctctgggccttgcgggacattcccatgtcaggaccacctgctgatcacagcctcctcaggcacctaacctgcatcaggtctgcgctacctgagggg

SEQ ID NO: 185184 - DNA, 599 bp, Homo sapiens
actgtcctgtagatatgacccgggtgtgtattataatgtacacatggattgtgtaacctttctatgtaagtaaaatgcatacagacagtccttgacttatgatgcttcaacttaagatttctcaacattgaggtgggtcttttgggaggtagccccattgtaggtagaggagctccttctaaatcatsatagggttacaatttctactgaaaacacatcactccagcactgtcataacatggtaaaagcataaatggaaccattgaaagtcgggaaccatctgctctgttagcagcgttaggtgcatttttgacatatgacatttttgactgatgatggatttattaggacataagtccattgtaagttgaggagcatatacattaagaataaaacggaggagtcacagccatttccctcgccagggtgagagtgcgaagcctagtgatgggtccccatgtgaggccctttgttgtgccatcaatgtgccaagaatgacccacctctgggccttgcgggacattcccatgtcaggaccacctgctgatcacagcctcctcaggcacctaacctgcatcaggtctgcgctacctgagggg

SEQ ID NO: 185185 - DNA, 599 bp, Homo sapiens
actgtcctgtagatatgacccgggtgtgtattataatgtacacatggattgtgtaacctttctatgtaagtaaaatgcatacagacagtccttgacttatgatgcttcaacttaagatttctcaacattgaggtgggtcttttgggaggtagccccattgtaggtagaggagctccttctaaatcatgatagggttacaatttctactgaaaacacatcactccagcactgtcataacatggtaaaagcataaatggaaccattgaaagtcgggaaccatctgctctgttagcagcgttaggtgcatttttgacatatgacatttttgactgatgatggatttattaggacataagtccattgtaagttgaggagcatatacattaagaataaaacggaggagtcacagccatttccctygccagggtgagagtgcgaagcctagtgatgggtccccatgtgaggccctttgttgtgccatcaatgtgccaagaatgacccacctctgggccttgcgggacattcccatgtcaggaccacctgctgatcacagcctcctcaggcacctaacctgcatcaggtctgcgctacctgagggg

SEQ ID NO: 185186 - DNA, 599 bp, Homo sapiens
actgtcctgtagatatgacccgggtgtgtattataatgtacacatggattgtgtaacctttctatgtaagtaaaatgcatacagacagtccttgacttatgatgcttcaacttaagatttctcaacattgaggtgggtcttttgggaggtagccccattgtaggtagaggagctccttctaaatcatgatagggttacaatttctactgaaaacacatcactccagcactgtcataacatggtaaaagcataaatggaaccattgaaagtcgggaaccatctgctctgttagcagcgttaggtgcatttttgacatatgacatttttgactgatgatggatttattaggacataagtccattgtaagttgaggagcatatacattaagaataaaacggaggagtcacagccatttccctcgccagkgtgagagtgcgaagcctagtgatgggtccccatgtgaggccctttgttgtgccatcaatgtgccaagaatgacccacctctgggccttgcgggacattcccatgtcaggaccacctgctgatcacagcctcctcaggcacctaacctgcatcaggtctgcgctacctgagggg

SEQ ID NO: 185187 - DNA, 575 bp, Homo sapiens
aagctaggaagagacaaggaaggatttctcccctacaggtttcagaggaagaatggccctgctgatgctttgattttagacttcaggccaccagaactggagacaataaatttctattgttttcagccacccagcttgtggcacttggtgacagctgccctagaaaactaatatagatagtaggagaagggaataaacattggggaagaaacaagtcgctataagtactaatttaaagatcaaactaataatgtactcaaaagtacattataatcataggcaagtgtttcaaaaggacatgtacatgaggarttcagacatttctcaggaagactttaagctgtagtgttaaactcaggctcagagtcatactggcttgggtgataattctagataggtcattttttttttttagcagctatgtggtcttaaggaagttcattgacttctctgctcctcagtgttcttatttgtgaagcggggacaatggtattcctctgcttagaactgtcaagaagatgatgttaaataacacatttgacatttggcatagggcctagtacacagcaagcact

SEQ ID NO: 185188 - DNA, 533 bp, Homo sapiens
aactgtcaccatcaagaccataaccccaaatctgagtcctcttggaaatctgaactcaagatggaaatgcaggaatcctggccttctctttgccctcctgtatcccatcacaccctctctctcagtccttkcttttcccactcaaagagtgtaacaaagcagattggtaagtttagtggtcaagtaaatatcctaccaggaattaaaatatcaatatgatcttcttacaggcatctttcagcttcactaatcattgtcttgagtcctcgctccctaggttttgaaagagtggtagctcctctttcccttctgtgatggttcatactgagtgtcaacttgattggattgaaggatgcaaagtgttgatcctaagtgtgtctgtgagggtgttgccaaaggagattatacatttgagtcagtggactgggaaaggcagacccacctttaatctgggtgggcaccatctaatcagctgccagaacagccaggatataaagcaggcagaaaaacatgaaaagcctaggctggcctag

SEQ ID NO: 185189 - DNA, 533 bp, Homo sapiens
aactgtcaccatcaagaccataaccccaaatctgagtcctcttggaaatctgaactcaagatggaaatgcaggaatcctggccttctctttgccctcctgtatcccatcacaccctctctctcagtcctttcttttcccactcaaagagtgtaacaaagcagattggtaagtttagtggtcaagtaaatatcctaccaggaattaaaatatcaatatgatcttcttacaggcatctttcagcttcactaatcattgtcttgagtcctcgctccctaggttttgaaagagtggtarctcctctttcccttctgtgatggttcatactgagtgtcaacttgattggattgaaggatgcaaagtgttgatcctaagtgtgtctgtgagggtgttgccaaaggagattatacatttgagtcagtggactgggaaaggcagacccacctttaatctgggtgggcaccatctaatcagctgccagaacagccaggatataaagcaggcagaaaaacatgaaaagcctaggctggcctag

SEQ ID NO: 185190 - DNA, 533 bp, Homo sapiens
aactgtcaccatcaagaccataaccccaaatctgagtcctcttggaaatctgaactcaagatggaaatgcaggaatcctggccttctctttgccctcctgtatcccatcacaccctctctctcagtcctttcttttcccactcaaagagtgtaacaaagcagattggtaagtttagtggtcaagtaaatatcctaccaggaattaaaatatcaatatgatcttcttacaggcatctttcagcttcactaatcattgtcttgagtcctcgctccctaggttttgaaagagtggtagctcctstttcccttctgtgatggttcatactgagtgtcaacttgattggattgaaggatgcaaagtgttgatcctaagtgtgtctgtgagggtgttgccaaaggagattatacatttgagtcagtggactgggaaaggcagacccacctttaatctgggtgggcaccatctaatcagctgccagaacagccaggatataaagcaggcagaaaaacatgaaaagcctaggctggcctag

SEQ ID NO: 185191 - DNA, 416 bp, Homo sapiens
aattactgtgtacctcagtttcatcactgagcaaaagtgggtgacagcagtacttaaccacgtgtcataaggcctaaacacacacaaaggaattagtacatgtaaaacacttagaatgggcacatagcaaatgttaagtaacttttgctsctatactcattttcagagattctacaatcaatttcacttaatttaggctaggaatcaagttttaggttccattcttaattttctttttaacattacataagttgcttgggctgcttctaaataatggtaggaaatttgcaaactttagtcagactaattcttttctatactgttttccaagtaaaacacaccccattttagtaccaaatctcacggcctatgctgaattcagtgaaagtatgacgaaaacgcattcattagaaaca

SEQ ID NO: 185192 - DNA, 450 bp, Homo sapiens
cataggcatgatctgttgccatttcctatttccacctcatttaaaaactattaatagtctttatacaagtcataagtgattattccagaagyactcataatgggcttatgaaaagtttgcttttcacagtaattttggaaaaaggataagtttgggaggcttcttgcattgttaagatctgaccttgccttactggttacctagcctctacatccctggacataaaccttaaaggacttagaaagttagtttacaaggccaacatttaacattctaagtttagaggagaaaggaactttatatggctttttaatgatgaaggtgaacgattgtgacagtctcagccattgtaaatgtagataccaaaatagaacttgtcttaagggacctatgacttcaacgtatgaaatatgcttttccttaaaattctgaaaagtcttggctctagct

SEQ ID NO: 185193 - DNA, 561 bp, Homo sapiens
tttcttctatttctatttaaataagctacattcaccccaaccttttgacataagggacctcaacagcacaatgcctattctcagttaaattacaaaaccaaaaattatagttacttttattccagttctacatacacagagtactgatagcaatatttcttttcagtggaaaacaatttcaataaatttacttttcagtgactgtaatttaatgattttttttkgggggggtggggttggagttttgctcttgtcacctaggctggagtgcagtggcatgatctctgctcactgcaacctccacttactgggttcaagtgattctcatgcctcatcctccccagtagctgggactacagacgcacaccaccacacctggctaattttttttgacatttttaaagtagagacagggttttgccttgttggccaggctggtctcaaactcctggcctcaagtgatccgcttgcctcggcctcccaaagtgctaagtgctgggaatacaggtgtgagccaccacaactggacataattatctattttagatatttataaaataa

SEQ ID NO: 185194 - DNA, 565 bp, Homo sapiens
tgagatagtgagatatggagtcctggggacataatctgaggccttgaatcaagccttacttggaaccaggaatgtatgtaccttgaattttctgtaagccaataaattcgatgattgcttcagccagcttgagttgggtgaaaaaaaagtttgtttttttttgatcacttgcaacaagaggagctctacctgayacaggtgacacaagatggcatagggtggggatgaagaccagaagcctggattcaaaacctgcccttgaccttgggccaggtcttagacctatctaggcatacatttcctcatctgcataatacaagtaatactagtatcttattgttgggaaaattcattgaatatatataacttcggaagtacccatcataagtgctatggaaatgtctgctgctgttgtaattattttttttcctttttgcgaaataaggtttctgaagctagactgtattgagtgacttaccctagtcacacaggaagtcaaagttagagtggaaattaggcaccagaatgctcaaggggtggcctttggcagttactcacctacccc

SEQ ID NO: 185195 - DNA, 630 bp, Homo sapiens
tgttattcaagttggagtacagtgacacggtcatagctcactgcagcttcaaacccctgggctcaagcaattctctcatgtcagcctcctgagagtagctaggattataagtgcacatcaccatgctctgctaatttttaaattttatttttggagagacagagtctcactgtgtttcccagactgtattcttatacttccatgtccaagatccaaggtttacccacagcatttctcacctgttttgcttactgctttcctaagtgatctttttgcctccaactcaactcttccccacaatccattctccacacgatagttgatacgggctgaatttgtctcctcaaattccctgtcatatatgttgaagtcctaaattccagtacctcagaatgtaaccttatttggagatagggtctttatagaggtaatcaagttaaaatgaggttattagcatagacttcaattcaatatgattgatawctttataaaaagagaaaatttggatacagagaaaatgtagagggaagaagatatgaagagacctaggcaaaagagccatctacaaggcaaggagagaggactggaatagatgcttcctgatatggtttggatttgtgtccgtgccca

SEQ ID NO: 185196 - DNA, 302 bp, Homo sapiens
atattttattctgtgtatatatgtaaatattattatttatgctgctgtgttcactaaatctattttattaatctaatacctaaatctcataggatggtatgacatatttaccaatatagtatttcccttctaaatgttgcaagtgactacctgtatgtagttctcaagacacagcttattattatgwtagtgtttggattcacttgggaactgctttaagacataacacacattcctaacctgccccctactttttcttgatgagcgttgataaccaaaagaatgctggaatctaccagcca

SEQ ID NO: 185197 - DNA, 543 bp, Homo sapiens
tttccttcttcccaatgaacctcatgtcctttgagttggcatctcttcagaaatgagggagggatactgtaactgtaagattcttaaggaaaataaagcatcgtttaaagaaatagattttgaaaaccagactccatttgttttgaatcagatgataaaattgttttgakaagtaagggttctcttatttgatttttacattttattgcccactttcttacaactgtaaactctgttaagcttttaaaagtagaggatctctaaaatattcaaggagtaatgtcaagttcaggtttttgttgtccttctttcaaagatggtgtccttgggtttaacttgtttaggttaagtgagattcctcagaatttgattaatgggaacattccaagagtaacaaggtggggttccgtgaggtcggtggggtttcatggctctttttgctgcggggaaaaaaagtatttcaattacagaaagatgccaagaatgaacttgagctactcctatttgtcagtgtagcatttcacttctctctatggtgtactt

SEQ ID NO: 185198 - DNA, 516 bp, Homo sapiens
agtaatttaactgaaaattggaatttttatgcagaatgacaataagatactcaaatatatctgtatttgccatagagcaacatgaaagttaaaataccaactgcttagtgaatcattgttctcaaaaagattcatgatggctatgtagtctttaagagaatactttaaaatatgggttacaaatagctttttataatttgtaaaacataaaatagtaatcaagtaacagctgaatactaaaatataccacatagaaaaataaagaaaattaaatgaagcaatgtctcatatacttagcrtttttgggaaaaccatacaagttaatttttcagggtgagtatgtgtatgttttgaagtaataaaattaaaaatgtaactcttttggtttgtttttctttatctcttaaacattatatgctaaaatcattgtcagatttttattatattcttatataaaataattctatctcctcccaaggtcaatcctctgttgacagtgtgactacttaaggtaac

SEQ ID NO: 185199 - DNA, 297 bp, Homo sapiens
tcaatggaattaagtataaactatgaaatcaatatgttttgattatggtctgaaggctcatrtgagggggctggagcataaggtagaatttggttatgataccattggatatattaaaatatataaatcatttggtttatattcattgagtatacaattttagcaccctgaacttctatcttcccttctactgactcagagatatctcctgacgtgccttctcttttttcttggtacttttctgagctttctaaatctgagttttagacaaccagttgtgtatgaatgtatttatgt

SEQ ID NO: 185200 - DNA, 497 bp, Homo sapiens
atggatcccattacacgtcacagacatgtttatctaaggtaagaggacagcattttctcagactcttccatgcaccactggcagtcctaactcccactttggaaatctcagtctgattaactaagttctaacctgataattggaatgttctcttcttggagtattccttcttgcagtgctgtcactcttggagctctattgccatggtgcaaggacgcccrgactaacctgcatggagagaccacataaataaatcatgtgaagtactttagctgacagcccaactggagtctcatctgacaggtggcatcagtctgaaatgggaggggactcttccacatgattccagccatcgagtctccccacccttctaatcttaccaaatgtgtcccagatgttgtggagcagagagaagccaactttgatatatcctgtctaaactgctgcccacagaatctagtaaccaatgaaatggtaattttactgcactgtttggg

SEQ ID NO: 185201 - DNA, 398 bp, Homo sapiens
aatccttttagcaaactaggaatagaggggggcattctcctccttatgaagagcatatacaaaaaactctatggctaccatcataattaacattttgcttcttctttaagaaaacaagaatgtctacttttaccactttgatttaacatcgtacttgaggtttaactattgcaataaggcaagaaaaagaaataaagggcattcagattggcaaaggagrgtaacactacctttatttgcacatgacatgatcacctctctacaatccaatgacatctacaaaaatgttcccagaattaataagtaagttaaaaaatgttgcagtatacaaaactgatgtaaaacaatcagttgtatttcaacctactagaaacaaaaagtcagaatttgatataaaa

SEQ ID NO: 185202 - DNA, 615 bp, Homo sapiens
taagcttctctaaattttatatgaaatccaggttggtcacatggaaattatttcattaagtgcatacactgtggctttattacagctttgagcaagacaaatagagaaaaggtgtatccctagtgcattcacagaagatataaccacagaggagctagtgtttcactcgcaagttgaaccttctcctaagcaaactcatgattatatatgttcagaagaccacaggctctgacagtcctcrccatgctcactagtcttcctgttttctttcattgcctacaagtttccctttctcaatttcagtagagtcagctatcacggtcatgaaagagaactattaagcatcattctatgattttgtgacacctttaccttggcctctgactataagagaaagagctcactgattttattttccattttatttgattgtggtctaatgtaaaccatagacagcaaccacaggaaatctttggattatgtacctactgtatgtggatcatccacctgtgatccattctgggatggatccatccagggatccgaggttgacccatccttatccttggtagcctgtctgatggggtcatacctctaatcttttagtcaggaatt

SEQ ID NO: 185203 - DNA, 523 bp, Homo sapiens
aattgtctaatttgatatacaagaaataaggacctgacagaggtgggtctgaacaaaaagcaaaaattccaatatcaggccgtagaggarccatcaaaggactcttagaagcagaaagtcatgaagagtgtcactgcagaatccaaaaaaggtgactagttcaataagaaagaaatgtaagtgagagaaagccagacctctactcagtactagtgttaattatattcttctgacctgtaaacaactcgtgttgtataaaaaagggaactgaggaactttttgaatgttcagtgctatgtatgaccagcatgcagaaggagagatgattggcgatatcacttcctttaagaaaaaaaaaaaaactctctaagaggagtaagagtcaaatccttccagaaaattcttaatagattagagaaaatgtccttgttaatcactgcaacattaagactgttgagttaaactacataaatagtaatactaataatagagatcttttcacctattgattttgttaaagtat

SEQ ID NO: 185204 - DNA, 561 bp, Homo sapiens
agaaattttacacaacaattttgygtttgtgtatatttgcgtttacttaaaggattagtcacagttttaatcagatactcaaaagcctgacatctagaaaaaggttcatattgatcatgcaataaaatcagacccacacagctcattaaccctttgcctttgtggcctattccctttgcctctgtagctgtatttgcctctccttccacttgctgcagcctctccctttccttgctgtccacacagctgaaagattcctcagcctatagcatggaagacacatggccctcatttttctctggcatacataggcttccaaaaggattattgctaatttagcctgaaattgtattttgataattcaatatagggcaattatgacttaaaggggctagctctgtagaacaatacatttggttgattagtaaaatcgggtgacaagacatccagtgaacacattctgggaggaagcacagtctttgttattatatgcattacacaaaagcctacataatatccccaaaattagaaataagaaatagctctcaaatacacattcag

SEQ ID NO: 185205 - DNA, 618 bp, Homo sapiens
tggaaagtttcagcaatagactagagcaagtaaaagaaggaacttcagagctcaaagacaaggcttttgaattagcccaaatcagacaaagaaaaaagaattttaaaaaatgaacaaagtctccaagaaatatgggattatgtaaaatggccaaacctaagaataattggtgttcctgagggagaagagatgtctaaaagtttggaaaatttatttaaggaaaaaaataaggaaaacttccctggccttgctatatagatctagacatccaaatacaagaagctcaaagaacttctgggaaattcatcaaaaaagatcatcaccaaggcacrtagtcatcaggctttttaaagtcaagatgaaggaaagagtcttaagagctatgttacaaaagcatcaggcaacctataaaggaaatcctatcagattaacagcggatttctcaggagaaactgtataagccagaagggattggggtcctatgtttagcctctttaaacaaaataattgtcagccccaaattttgtatccagcaaaactaagcttcataaattaatgagagatagtctttttcaaacaaatgctgagagaattcgccactaccaagccacaactaca

SEQ ID NO: 185206 - DNA, 473 bp, Homo sapiens
aagattaaccaagaaaagaagagagaaagtccaaataaccttattaagaaacgaaacaggagatattacaactgacaccactgaaatacaaaagatcattcaaggctgctatgaatacctttacacacawaaactagaaaacctagatgagatggataaattcctggaaaaatataacccttctagcttaaatcaggaagaattagataccctgaacagaccaataacaagcagcaagattgaaatggtaagttaaaaattaccagcaaaaaaaaaaaaaaaaagtccaggaccagacggatttatagcagaattctacgagatgttcaaagaagaattggtaccatccttctgacagtatctcacaagatagagaaagaaagaacactccataattcattctatgaagtcagcatcaccctaataccaaaaccaggaagggacatgaccaaaaaagaaaactatagaccaat

SEQ ID NO: 185207 - DNA, 473 bp, Homo sapiens
aagattaaccaagaaaagaagagagaaagtccaaataaccttattaagaaacgaaacaggagatattacaactgacaccactgaaatacaaaagatcattcaaggctgctatgaatacctttacacacaaaaactagaaaacctagatgagatggataaattcctggaaaaatataacccttctagcttaaatcaggaagaattagataccctgaacagaccaataacaagcagcaagattgaratggtaagttaaaaattaccagcaaaaaaaaaaaaaaaaagtccaggaccagacggatttatagcagaattctacgagatgttcaaagaagaattggtaccatccttctgacagtatctcacaagatagagaaagaaagaacactccataattcattctatgaagtcagcatcaccctaataccaaaaccaggaagggacatgaccaaaaaagaaaactatagaccaat

SEQ ID NO: 185208 - DNA, 473 bp, Homo sapiens
aagattaaccaagaaaagaagagagaaagtccaaataaccttattaagaaacgaaacaggagatattacaactgacaccactgaaatacaaaagatcattcaaggctgctatgaatacctttacacacaaaaactagaaaacctagatgagatggataaattcctggaaaaatataacccttctagcttaaatcaggaagaattagataccctgaacagaccaataacaagcagcaagattgaaatggtaagttaaaaattaccagcaaaaaaaaaaaaaaaaagtccaggaccagacggatttayagcagaattctacgagatgttcaaagaagaattggtaccatccttctgacagtatctcacaagatagagaaagaaagaacactccataattcattctatgaagtcagcatcaccctaataccaaaaccaggaagggacatgaccaaaaaagaaaactatagaccaat

SEQ ID NO: 185209 - DNA, 473 bp, Homo sapiens
aagattaaccaagaaaagaagagagaaagtccaaataaccttattaagaaacgaaacaggagatattacaactgacaccactgaaatacaaaagatcattcaaggctgctatgaatacctttacacacaaaaactagaaaacctagatgagatggataaattcctggaaaaatataacccttctagcttaaatcaggaagaattagataccctgaacagaccaataacaagcagcaagattgaaatggtaagttaaaaattaccagcaaaaaaaaaaaaaaaaagtccaggaccagacggatttatagcagaattctaygagatgttcaaagaagaattggtaccatccttctgacagtatctcacaagatagagaaagaaagaacactccataattcattctatgaagtcagcatcaccctaataccaaaaccaggaagggacatgaccaaaaaagaaaactatagaccaat

SEQ ID NO: 185210 - DNA, 437 bp, Homo sapiens
tttactgcactgatgcaactcgggtcagatctgtagcttagaaaactgtggaatagtttttatcaggataaagccaactggctcaactcacatacttagtctaatagtatcttaaccagctaaatttgtagaccccaatttcatattttagtcagagcagaaaggaaacaatttaatatcccaaatatcataatttgagtccaggaacaaaaccagcttgtcwctcttaaaagggtagaactggagactacaccagttatactgcagctgaaacaacataagagatggattttatgcgaggagagaaggaaagaatgaaagtgatacagttgtacttgaccctgctttatattcttttttttttctggataaagctatgcactgtgtttgtcaggtggaagatgagcagcaaacaattattttacttatgtggtgag

SEQ ID NO: 185211 - DNA, 384 bp, Homo sapiens
atagtttttatcaggataaagccaactggctcaactcacatacttagtctaatagtatcttaaccagctaaatttgtagaccccaatttcatattttagtcagagcagaaaggaaacaatttaatatcccaaatatcataatttgagtccaggaacaaaaccagcttgtcactcttaaaagggtagaactggagactacaccagttatactgcagctgaaacaacrtaagagatggattttatgcgaggagagaaggaaagaatgaaagtgatacagttgtacttgaccctgctttatattcttttttttttctggataaagctatgcactgtgtttgtcaggtggaagatgagcagcaaacaattattttacttatgtggtga

SEQ ID NO: 185212 - DNA, 450 bp, Homo sapiens
aagtcatctgccctttactgcactgatgcaactcgggtcagatctgtagcttagaaaactgtggaatagtttttatcaggataaagccaactggctcaactcacatacttagtctaatagtatcttaaccagctaaatttgtagaccccaatttcatattttagtcagagcagaaaggaaacaatttaatatcccaaatatcataatttgagtccaggaacaaaaccagcttgtcactcttaaaagggtagaactggagactacaccagttatactgcagctgaaacaacataagagatggattttatgcgaggagagaaggaaagaatgaaagtgatacagttgtacttgaccctgctttatattcttttttttttctggataaagctatgyactgtgtttgtcaggtggaagatgagcagcaaacaattattttacttatgtggtgag

SEQ ID NO: 185213 - DNA, 583 bp, Homo sapiens
ggcatgggttcaaggactaagaccttattctaattggctaaaagtttgcattattaggaagctaaacatgctaatcaaatatttaggtaactccatatatgttttcatttcaggaaagcaaatactatatattttctaactaaatatgaacatatgtttcagtattgtgttaagaattattttaaaaaaggaagaagaggaaattggacattgcatctgcagcactattttagtatataagtagttgttacattccagactatttcctgggcctagaatatcyagaatattttaacatgcccacaatgaaggctccagagttaattttttattctgtcatacaacaaattaacaatgtgtagagtgataatacagttttaagcccaagctagctaaggctatgagtcagctccaaagaactagtgcctcagctgattctgaaaaatcaaagttaaatgaatgcataatttctaaatccactactcagatgattattttttgtatcaagaaaatctcacaagattggggcaacatcaaaatgataaacataaatttaaaataaaaggaatacctgaaacatttg

SEQ ID NO: 185214 - DNA, 632 bp, Homo sapiens
ggtatctgaacccacctacattattgaacgtctcttaaatttacttagccaatttctaagtctcaattacttagactttataggcacctaagggtctggtcttttcycaagaaaataccccagccaaaatctttcacagcaggaaacagaagacatttcaaagtaggtacctgtacttcagcttgtctgtaagacttttccttatgattatctatgctttcaattgatcaatcatgcctaaaatagtgtctttttttggttattactaagtaatttaaaagttttagcaagcaaatgctaatatatctgaaactacccatgaatacttgtcttttggataaaaatttacagcatacaaatagtctactaaggacttgttttggtttcagtcctctgaaaggagagagtggtgtaccactctctggtgtaggtccttctacaccattttctaaagatttccatgtctataaaccttcagcaggataaagcccagcacctcttgcctgtctgtttactccacagcatagcgacaccacagttttcagggtaatttccccagcagccatgtgaactgtgactcactgagattacacaaaattggaatttggactcctttcaagttttacattcat

SEQ ID NO: 185215 - DNA, 448 bp, Homo sapiens
gttatagattttttgatactagagagaaaatataaatacagcttgttaacaagaaacatgcatacactatctcaattcaaaaatgtttttgttttctttttgagagggagttttgctcttgtcgcccaggctggagtgcattggagtcatcttggctcactgcaacctccgcctcctgggttcaagcgattctcctgcctcagcctcccgagtagctggaattacaggtgcccgccaccatgcccagctaacttttgtatttttagtagagacggggtttcaccatgttggccaggctggtctcaaactgctgacctcagataattcgtccgccttggcytcccaaagtgctaggattacaggcatgagccaccatgcccagcccaagaatgtttatagcaatatttttgaagatatatttgattaaaaaaatggatctcactgcaaa

SEQ ID NO: 185216 - DNA, 490 bp, Homo sapiens
gaggtacttctttgccttaagttttctttattgtttttataataaaaatgcctcatttaaaaatgtaatttagattttataaaagaacatcctactggaaaaagatgaggtaatagaaatgaaaacacaggtgcrgtggctcacacctgtaatctcagcactttgggaggccaaagcaggtggataatttgaggtcaggagtttgagaccagcctggtcaacatggtgaaaccccatctctactaaaaatacaaaaaaaaaaaaaaaaatagctgggtatggcagcaggtgcctgtagtaccagctactcaggaggctgaggcaggagaattgcttgaactagggaggcagaggttgcagtgagccaaggtcgtgccactgcactccagcctaggtgacagagggagactccatcacaacaacaaaaaggaaatacataaatcacagttgattcatttttaaacttatcccccaaaatctgtagaaaatt

SEQ ID NO: 185217 - DNA, 596 bp, Homo sapiens
agtttaccatgcagctttcactcacaccctgtaattcctgcctttgcatctacctgtttttcaaacataccaccatctctaaattctcattgtcacctttatttctctaattctctcacaccctacatctaatccagtagcatatccaattggttctacgttaaaataagttcagagtctgaacgtttctcataactccacagctttatctcagtctcctggaatattgcaatatctttttaactgctctctctccttctgtctttgctcccaacagtctcatgcagagtaatctttgtagaacctgagtcagattatatatttgtaaaatgaatatagtattcatttgctcaaaccttcccatgactgtgcatctcatttagartgaaaaccagttttatcatggtctgaaagacctcaggtgacctgcagccctcaccctcccactctgctctctttgactccatcagcaccctccacctcactctggtcacatggcctctttagtcttttttggacacattgaacctaccctgaatctacatcttggcctttgcatctgctgttgcctctgcctagaacacttttcttccggt

SEQ ID NO: 185218 - DNA, 578 bp, Homo sapiens
atcctgctgttttggttactgtagccttatagtatagtttgaaattgggtaatgtgatgcctccagctttgttctttttgcttaggattgctttggctatttgggctttttatttatttatttatttatttattttggttctatataaattttagaatagttttttctagttctgtggaaaatgatattggttgtttgatatttgatagtaatggcattgagtctgtagattgctttgagcagtatggccattttaatgatattgattcttccaatctctaagcatgaartattttcccatttctttgtatcatctgtgatttcttttagcagtgtctgtagttctacttgtagagatctttcaccaccttggttagatgtattcctaagtactttttgtatgtggctattttaaaaacaggaacacagttaaactttattatcattaaacagatgatttgactttggtgccctggcttgggcactgctggctggtctcttatgaggtgcagtatcacatgtgatcaaagggaagaacgccaattccatgttggtgctggttggctgacagtcccaag

SEQ ID NO: 185219 - DNA, 508 bp, Homo sapiens
gatattggtatatacgtgtgtgctaatgtgcatatgcaattatttcctacacttctttattctctacaatgtcttacttgttaagcaaattcaggttgggtagttaatagacgataattttacatatttcttcttttaatatgtttgcaattcaattgaaccttttagtaacacaaacagggaagaataaaaagaaatggatatttcaaacagtatgaaatactggtaaagtcagagaatgtagctgaaatagaactgtttgcacacattaaatgacatggattaattactttcttctggttttcccaagtattgggctatggtatagtctgatctgtggaatgtaataagtagagaaaggaattatggatgcaaaagggataaaaataatgcactggagctagcacagtggtgggcatttctacagtgcagcscctggaaaggtgagaatgtattcctgtgtatttttagaactatgctgacaaagtttataatggagggtgataga

SEQ ID NO: 185220 - DNA, 221 bp, Homo sapiens
gcttcctttactattcctttgcacscttaatcccagcctctctttgctttcacttggactgaccctggcacccatcaagctcagcaaattacctaggctgtactgcagcaaagcttcacagacagcccccattacttcaatcaagcccaaatttcttcctcatctgttacctatctcggcataattctcataaaaacacatgtgctctccctgccaatcgt

SEQ ID NO: 185221 - DNA, 221 bp, Homo sapiens
gcttcctttactattcctttgcacccttaatcccagcctctctttgctttcacttggactgaccctggcacccatcaagctcagcaaattacctaggctgtactgcmgcaaagcttcacagacagcccccattacttcaatcaagcccaaatttcttcctcatctgttacctatctcggcataattctcataaaaacacatgtgctctccctgccaatcgt

SEQ ID NO: 185222 - DNA, 221 bp, Homo sapiens
gcttcctttactattcctttgcacccttaatcccagcctctctttgctttcacttggactgaccctggcacccatcaagctcagcaaattacctaggctgtactgcagcaaagcttcacagacagcccccattacttcaatsaagcccaaatttcttcctcatctgttacctatctcggcataattctcataaaaacacatgtgctctccctgccaatcgt

SEQ ID NO: 185223 - DNA, 632 bp, Homo sapiens
aatctcattttttaaatattttatgtgattagcctattatgttttatgttttatctatcctgagaatgtatgttccctgaaggaagatctttgaaataccttaagaacatagaacatgaaatgagtacttgtagaatcactaaattcagcaaccaagacaggtaagatggtaggtcaaatattacatggaagattactygtatttggagcttttaagaaatacaaatgtcctagactgtctataacactaatagataatataaacattaaatgattgtcattaagaagtcatcagtaatagaattcttaaatagtaagcctaaggggaacactcaagaaagaaaaaaactttctaaagtcactgcttggtaaataaaaatattcttttggaacagaaaaaataaattgtgagatgctaataactgattaaaaacattttagctttcagcgtatgtatttttgaatgatcttttttcagtaggagcaaggcataattaaacctaaagaatacaaggtaataataaagttcctaagatgtgatgacacagatactcgttaatgagctgtagaaaattttgcttatgacagtgcgtgtgatggtgataataaatgaatgtcttcaagtggcacct

SEQ ID NO: 185224 - DNA, 407 bp, Homo sapiens
catgtcctccccacatttcaaaacacaagtatgccttccccaaagcccctcaaagtcttaactcattccagcattaacttaaaagtccaagtccaaagtgtcatgtgagacaargcaaatccttccacctatgagcctataaaaccacaagtaagttacttccaagacacaataggggtacgagcattgggtgaatgctcccattccaaaaggcagaaactggccaaaaccaaggggctacaggccccatgcaagtctgaaacccagcagggcagtcactacatcttaaagctactcttctttgactccgtgtctcaaattcaagctgcactgatgcaaggggtgagctcccaagacctttgatagcttggcctctgtggctctgcagggtacagctccagctgctc

SEQ ID NO: 185225 - DNA, 550 bp, Homo sapiens
tgagtcatctcccacctggcccctcatacaacacatggggattacaatttgacatgagatttgggtagggacatagagccaaactgtatcattccacccttggctcctcccaaatctcatgtcctccccacatttcaaaacacaagtatgccttccccaaagcccctcaaagtcttaactcattccagcattaacttaaaagtccaagtccaaagtgtcatgtgagacaaggcaaatccttccacctatgagcctrtaaaaccacaagtaagttacttccaagacacaataggggtacgagcattgggtgaatgctcccattccaaaaggcagaaactggccaaaaccaaggggctacaggccccatgcaagtctgaaacccagcagggcagtcactacatcttaaagctactcttctttgactccgtgtctcaaattcaagctgcactgatgcaaggggtgagctcccaagacctttgatagcttggcctctgtggctctgcagggtacagctccagctgctcctttcatgagctggcattgagtgtct

SEQ ID NO: 185226 - DNA, 465 bp, Homo sapiens
aagtcgagcagatgccagcaccatgctttctgcatggtctgcagaaccatgagccagttaaacctcttttatttataaattacccagtctcaggtatttctttatagcaatacaataatggcctaatacagaggttatggytaatgtttggtttaacattgatccatcggtctgaagatccaccttgtgattacatcctccaggccctgaatgtataatttcaattaaagtatttggcagttagatgatactcctactgagtccttgatctgtatattaagggctttgaggagaatggaggaggccaagcttcaaacacttcccccagcttcaccttgaaagtaaatgaaaaccactattgcatctctagagggacacaagatggcagtatgttgtgctacctttaaagatctaaatgaggcaaaacggtgactcctgtcatatttctgtttaacccactagtgt

SEQ ID NO: 185227 - DNA, 582 bp, Homo sapiens
tggccatagaataccacagtttcaatcacgtcatggtctcaatcatagatgccataataaatatgcttcagtggataaatacgtctccagctatacagtatgtgataatcaatttgacaaatataagtctaatacggaaaaatgatcagaaagttttcttatttccatgaattggactaatatttatttgttatatatgttagtccatatatatataatatatacatacgtatattatacatatgtattatatatacatacatatataatatayatatattcagtttaacccaggggtctattaactgtcattttctctgtcataacagagaccccaaaatatctgaattatttagccatcccagagaacattgcattgactgttccttcatgcatttcactatattaccttaggttatgtatgatgaggccagatacagatcaagacagagaactgaaaaagtttacaggtttgttatattcacagttcctgcaaacaacaagggggaagaggcctctgagtaatactttattatggtttctgcaagaacaaaaggacaaggcaggaaaagtatgtctagg

SEQ ID NO: 185228 - DNA, 468 bp, Homo sapiens
tccttttctctgcatcttcaccaccatttgttaatttaggttgttttttttttcttctaatattagccatcctaaatggggagagatgatacttcttgtggttttaagttgcatttgcctgttaattaatgatgttgagcattttttcatatattttttggtcacttgyaggtcttctttagagaaatatctattatgatcatttgccatttttaaatcagatttctttctttctctattttttttttttttttttttactgttgagatgcttcagtttcttgtatattctgtatattctggatattaagtccctgttaaatgagtgcacaaaagtttcctcacactctgttgatgattgttttcttttttgtccagaagctgttttgtctgatataatcccatttgtttattgttgcttttgtttgtgctttaaaaattttccccaacctcctatcctaaagaatta

SEQ ID NO: 185229 - DNA, 468 bp, Homo sapiens
tccttttctctgcatcttcaccaccatttgttaatttaggttgttttttttttcttctaatattagccatcctaaatggggagagatgatacttcttgtggttttaagttgcatttgcctgttaattaatgatgttgagcattttttcatatattttttggtcacttgcaggtcttctttagagaaatatctattatgatcatttgccatttttaaatcagatttctttctttctctattttttttttttttttttttactgttgagatgcttcagtttcttgtatattctgtatattctggatattaagyccctgttaaatgagtgcacaaaagtttcctcacactctgttgatgattgttttcttttttgtccagaagctgttttgtctgatataatcccatttgtttattgttgcttttgtttgtgctttaaaaattttccccaacctcctatcctaaagaatta

SEQ ID NO: 185230 - DNA, 543 bp, Homo sapiens
ataccaaccattacctgtccaccccccacctacccctatgttttcattttagaccagtgctttttaatcctccctgaacagctgaagagcatttattttatttatttgttttttccacctttattttagtttcacggtgtacrtgtgcaggtttgttacatggacaaattacatgttgttgaggcttgcatcacccaagtagtaactaatgcttcttattaatcaagggaaaggcgtaccttggtaatggagtgttttcacagaaaccacctgaatcaagtaattcattttgggaaaatgacaatatttactgatttaaccatggaatggatattaaaaacacaagttctacagcattcttgcaaaaacaaaacaaaacactgagttgtatcaaaacaattattagaaaatactaatagtggaagatactagtaaacaactcacccagattactcaaatatgtcaataatctaaaacataaacacagacaggaaaatgctctgattaaggagactaaagaagcgtaaaacctcagtaccatat

SEQ ID NO: 185231 - DNA, 435 bp, Homo sapiens
gtcccagctactcaggagactgaggcaggagaatcacttcaactcgggaggyggagcttgcagtgagctgagatcgtgccactgcactccaacctgggcgacagagtgagactctgtctcaaaaaaaaaaaaaaaatagaaataatacctcttactacactggatggtttgaattccaacctaaagcaaaaagaggaaggctttgatctcattctattgtttatcctaacatttttgcctgacagtctggataaaacaaacttttattttgttatttatttattttttttcagatccaggctggagtgcagtggagtgatcatggctacggccttaacctcctgggctcaagcaatcctgccacctctgcctcccaagtagctgggactacaaggcgtgaaccaccacacttggctaatttttgtattttttttt

SEQ ID NO: 185232 - DNA, 641 bp, Homo sapiens
tgtttagttggaaacatagactttaaccttctatttgccactttctagctctatgactttggctgttgamtttcaatgtcctcacaaattattatgaaaaatattcaaatttgaaaagtatgtaaatgtatgtaaattagatatacagtgtctagcacaaaataactaacagaatggtaacttttattattattattcctatattatgatggcattcctctaacacagagttcaacaaactatggcctttgggccaaatctgaccaactaatggtttttgtaaataaatttttatcaaaatacagcacaaccattcatttgtatattgtctatggctgttttcatgctatgagggcaattgagtagttgaggcagacactctgacttataaagccgaaatatgtactagctgccttttttcagaaaagttagccaaccctgctctaacataattgcaattatttttttatagtttcgtctcccctatttggctgagagacactcaaggatcttcatggcagactcctgttcatccttttaaactaagtctttctcatctttgtatctctaacatttggtatataattagggcttggtatatgttaaattgaagtgaataattctttaacccagtttaaatg

SEQ ID NO: 185233 - DNA, 641 bp, Homo sapiens
tgtttagttggaaacatagactttaaccttctatttgccactttctagctctatgactttggctgttgactttcaatgtcctcacaaattattatgaaaaatattcaaatttgaaaagtatgtaaatgtatgtaaattagatatacagtgtctagcacaaaataactaacagaatggtaacttttattattattattcctatattatgatggcattcctctaacacagagttcaacaaactatggcctttgggccaaatctgaccaactaatggtttttgtaaataaatttttatcaaaatacagcacaaccattcatttgtatattgtctatggctgttttcatgctatgagggcaattgagtagttgaggcagacactctgacttataaagccgaaatatgtactagctgccttttttcagaaaagttagccaaccctgctctaacataattgcaattatttttttatagtttcgtctcccctatttggctgagagacactcaargatcttcatggcagactcctgttcatccttttaaactaagtctttctcatctttgtatctctaacatttggtatataattagggcttggtatatgttaaattgaagtgaataattctttaacccagtttaaatg

SEQ ID NO: 185234 - DNA, 565 bp, Homo sapiens
gtcatgcaaaaccatgcacaaggatcctttagcttagtgaaaataggcagtgctttctaattctggccataggtcactgtcatttggtggtcacggtgaattggttatttaacaaattctgttttcactagttgcaactaaccagaaatcagatctctcaaaggaaaaccaagaaggctattgctatgggcttaattgtgccccccaatactcctcctagttcttatgtcaaaatcctaacccccagtacataataatgtgactgtatttggagacagggcctttaaagaggtgattaagtttaaatgaggccawtagaatagaccctaatccaatctgactggtgtccttataagaagaggaaatttggatgtagaggcaccaaggatgtgcctatacagaagaaagaccatatgaggacacagagagaaggtggccatctataagcaaggagagaggccgcagaagaaaccagacctgctgataccttgatctgggacttccttagaactgttagaaaataaatttccattgtttaagccacctggcttgtgatattttaata

SEQ ID NO: 185235 - DNA, 559 bp, Homo sapiens
ctacaccccaaaagaaagacagactcactgggatgaatgtgcmgattactcatctgttcttccatttaacaaatatttacagagcgcctaccaagtgccaagctctgtgcagtagtaaaccaggtagaccagggcactgagctcagaggtaagagacatagcagtaagcaggcaatttgcaagcaagcacagagagcgagagctgggatgcagtaattcaagatgctccagaagtgcacagatgcaacatacaccccacaccacactccacatgcacaaatgtcccaaaggtagactcatttttgtagggagcgccattcctcatctgaggcatttagagttctgctagcaaagacattcaaataaacgggtttttacaagtatgggcacaaatgggggtgacacctttcagttctcaccctgaagtctctataaaatgaggctgaaggacaggattcatccctcactccagagcttcccagtactctttccccctcatcgggagggactggctttggaaacagagaggaatgtgacctattacagccacaccagcacc

SEQ ID NO: 185236 - DNA, 504 bp, Homo sapiens
tgatttataacgtgccttccatctctgaaattgctgaggatacataatgtaagaaaacaggttgagggaaagagatagattatgtgtctaggatgggctcgtgtgaggagaaatgaaggaggaggcaacaataagaagactaagagaaatagagatgaagggacagggacacgggctcagagagacagacagagacatggagacaagactacaccccaaaagaaagacagactcactgggatgaatgtgcagattactcatctgttcttccatttaacaaatatttacagagcgcctaccaagtgccaagctctgtgcagtagtaaaccaggtagaccagggcactgagctcagaggtaagagacatagcagtaagcaggcaatttgcaagcaagcacagagagcgagagctgggatgcagtaattcaagatgctccagaagtgcacagatgcaacayacaccccacaccacactccacatgcacaaatgtcccaaaggtagac

SEQ ID NO: 185237 - DNA, 653 bp, Homo sapiens
ggattgctttggcggtcagtattcatgtagcaaatattttttatttgttgactaggaaaatatgtagtttctgttttcagatatagtaatagccagcttggctgcatggtagattagttataccatgtgtatggaagttaattgtgttaataatttatggaacaataaggccgttttcctaaatgatatgctgctctactggtgaattagtatatgttggtaaaggcaaaattcatttaagtagtactctatattgaatattttattatttagtgcttgttcagtgaaggctggcttatggtttatagataagctgaaaagaagcgaagtgcttctgtgtgaacattgctgcttaacattgtttcctataacaacaaaacayttcccttaaaatattctagaatgtgattaggttctgggaaaatcacttcacccaaaatcacaaaagttcttttgggtgaagtttatctcagacttatgttttttgtcctatttagtctccttcaatgtgaatcttactggagattctcaagaaaatccaatcagaaaccctaaaattctatatcctctacttgccagcatcagctgcataatgatgttttctttttataggaataggtaatataaatgttacagtcattattcctaagtag

SEQ ID NO: 185238 - DNA, 653 bp, Homo sapiens
ggattgctttggcggtcagtattcatgtagcaaatattttttatttgttgactaggaaaatatgtagtttctgttttcagatatagtaatagccagcttggctgcatggtagattagttataccatgtgtatggaagttaattgtgttaataatttatggaacaataaggccgttttcctaaatgatatgctgctctactggtgaattagtatatgttggtaaaggcaaaattcatttaagtagtactctatattgaatattttattatttagtgcttgttcagtgaaggctggcttatggtttatagataagctgaaaagaagcgaagtgcttctgtgtgaacattgctgcttaacattgtttcctataacaacaaaacacttcccttaaaatattctagaatgtgattagrttctgggaaaatcacttcacccaaaatcacaaaagttcttttgggtgaagtttatctcagacttatgttttttgtcctatttagtctccttcaatgtgaatcttactggagattctcaagaaaatccaatcagaaaccctaaaattctatatcctctacttgccagcatcagctgcataatgatgttttctttttataggaataggtaatataaatgttacagtcattattcctaagtag

SEQ ID NO: 185239 - DNA, 490 bp, Homo sapiens
aaggacccagaagcaagaactccctaacagcaacatgcatagcttatacctagatcttggtctttacttcccactaaaaggaaaaggatttcttgaataaattgctgatttcagggattgaacagcatggctacaaggtaagctacaaagaaagaaagtgccaaataagtaaaaacaagttgggggcctatcacaaggagagaggaaccaactaagaggctttcgctggcccaatatggacattatgagcatcaaaatactcaaaaactgcaatgaattatgacctcttgaagaaaacagaaattggtgaatttgtactgacgataamtaaatatatactactatatggatatggaaaggatatataaaagcagaatgctgagggttgactggtaacattaatggatagttgagattagaatattatcatgttaaaactggagcaggaatgaaccctcactagatgataagaccagtaggaagtttcaac

SEQ ID NO: 185240 - DNA, 490 bp, Homo sapiens
aaggacccagaagcaagaactccctaacagcaacatgcatagcttatacctagatcttggtctttacttcccactaaaaggaaaaggatttcttgaataaattgctgatttcagggattgaacagcatggctacaaggtaagctacaaagaaagaaagtgccaaataagtaaaaacaagttgggggcctatcacaaggagagaggaaccaactaagaggctttcgctggcccaatatggacattatgagcatcaaaatactcaaaaactgcaatgaattatgacctcttgaagaaaacagaaattggtgaatttgtactgacgataaayaaatatatactactatatggatatggaaaggatatataaaagcagaatgctgagggttgactggtaacattaatggatagttgagattagaatattatcatgttaaaactggagcaggaatgaaccctcactagatgataagaccagtaggaagtttcaac

SEQ ID NO: 185241 - DNA, 519 bp, Homo sapiens
gcatctagcctaattgtgtattttaaagtgtttctgtttcatgctttaatggtgatgaattttaaggacagtttctcatgacatagacaaactgttttgtttcagtagttaggaatagcaagtccyatagaatatctaaaaaacgtggtacaatccctttattttaataggtggcaaaagtaggtccagagatgtaatgtgactgacacaaactggtgtaacttttttaaaaaaaatgcagtattgagacaaataacttgttttgaactgaaaaagtgtggacatgtaattttgagataaagtacatatataaatgtcatagactttttcatagacagaagcactagtaatcatcattacttaaattgcatataagtaacctgggccccagtgatgactggctccaagttgcccagatggttaattccagagatttacagggaccaccaagttttctaacttcccatatataactgttctattatatgtaaatttttattgattctggacaactaacag

SEQ ID NO: 185242 - DNA, 519 bp, Homo sapiens
gcatctagcctaattgtgtattttaaagtgtttctgtttcatgctttaatggtgatgaattttaaggacagtttctcatgacatagacaaactgttttgtttcagtagttaggaatagcaagtcccatagaatmtctaaaaaacgtggtacaatccctttattttaataggtggcaaaagtaggtccagagatgtaatgtgactgacacaaactggtgtaacttttttaaaaaaaatgcagtattgagacaaataacttgttttgaactgaaaaagtgtggacatgtaattttgagataaagtacatatataaatgtcatagactttttcatagacagaagcactagtaatcatcattacttaaattgcatataagtaacctgggccccagtgatgactggctccaagttgcccagatggttaattccagagatttacagggaccaccaagttttctaacttcccatatataactgttctattatatgtaaatttttattgattctggacaactaacag

SEQ ID NO: 185243 - DNA, 519 bp, Homo sapiens
gcatctagcctaattgtgtattttaaagtgtttctgtttcatgctttaatggtgatgaattttaaggacagtttctcatgacatagacaaactgttttgtttcagtagttaggaatagcaagtcccatagaatatctaaaaaacgtggtacaatccctttattttaataggtggcaaaagtaggtccagagatgtaatgtgactgacacaaactggtgtaacttttttaaaaaaaatgcagtattgagacaaataacttgttttgaactgaaaaagtgtggacatgtawttttgagataaagtacatatataaatgtcatagactttttcatagacagaagcactagtaatcatcattacttaaattgcatataagtaacctgggccccagtgatgactggctccaagttgcccagatggttaattccagagatttacagggaccaccaagttttctaacttcccatatataactgttctattatatgtaaatttttattgattctggacaactaacag

SEQ ID NO: 185244 - DNA, 612 bp, Homo sapiens
tggatttgtcaaatctttgtagatgtggtcaattttggagatgtccactctggaaaaaaaaaaaaaaaaaaaaaaattaaagagccacactaaacaagaaacatcagaggttctgaagaatgactcacaggagctttgtcctaattttgaaaactcaagttgatataaagtaaattttgcatccacaaggcttcctagcatattaccctcctaaattgtggctatagcagttaaacatcattctgaagtaattatataatgctgcggtttgaatgttggtctcctccaaaatggatgttaaaatttaattgcttttgtaacagtattatattaagaggtgagaccattaattgttgattaggctgcgagggctccaccatcatggctgcagttgtaaaagggtgmgttcaaccccttcttactctctcaccctcttgccttcctccatgtgatgatgcagcaagaatgcccctgctggatgctggcatcttgaagttgaactttccagcctttagaactgtgagccaatacagttctgtttattttaagtgggctattctcagatatgttgttataatagcccaaaacagactaagacatgcactaatctaa

SEQ ID NO: 185245 - DNA, 500 bp, Homo sapiens
caacctccctaaagcacaaatttcacatgacctataaaataaaaacccaataatctcttttaaaaaaaggtattcagacatcaaatagcacaatgaatagaatagtacctcacatctcaatactaacattgaatgtaaatggcctaaatgctccaattaaaagatacagaatggtagaatggataagaattcaccaaccaagtatctgctgtcttcccaagactcacttgatacataaggactcacataaacttaaggtaaagcagtagaaagtgatattccaggcaaatagacaccaaaagcaaggrggaatagctattcttacattacacaaaacaaacttcaaagaaagagcagttaaaaaagacaaagagggacattatataatgccaaaaggacttgtccaacaagaaaatatcacagtcctaatacatatgcacctaacactggagctcccagttttgtaaaacaattactactagacctaagaaatgagataa

SEQ ID NO: 185246 - DNA, 632 bp, Homo sapiens
tgcctaaacccctaattttatagtcatattatcttttacattcagagggatcttttaatagtcatattatcttttacattcagagggatctcccttttttactctcttcaacaactttgcacctttaattactttacctgtgtctacagataaagtctgaacatatatcaggccacgtataaaaggataaactcatctgaagtcatgaagtacattaaagtgatctattcttccatgagttcctgtaaagcgttcattaacaaagttccagttacgaggtgtgtcacggtcatttaagaaaatgtttagagagtgcaagctctattctaacctgttactgagaatgcctttgggcattttgtctgagattgcaaggctatctatgtcccttacactgactgacatgtycctctgtatttactgcagaagaaacttcatccagcaatgagagtcactctgcaaaaggtaactctgaggggtctcacctgaggggtctcactgaacactcctttcccgggggctcctttctcccagggcacaatggctgctttttccttgaaaagcccaaacaagtttctacctttgcacctaattttattttttgccgagaagcatttctcttgtcatatgag

SEQ ID NO: 185247 - DNA, 497 bp, Homo sapiens
agatacatgtcatgatttaagttaatgttatgtgcatactgagataagttttaacttggttttttcatgtgaattgtcagttgttctaacatcagttttagaagagactatcctttctccatgaaatttccttggcatttttgtgaaaaacatcatgatttggcaaatatccatgaaactatatgcaaactcattattctgttatattgatctacatatctatccttttgtcaataattctatatcttgattactgtagtgttttggtaagttttgaaattaagtagtgtcttgtaattttagccttttcaatgtcattttgactattctaggtacattgcgtttccataaaatttttgaatgagcttatcmatttctactaaaaatgccaatatttgtattggaatttcattacattacagatttcataacaatattgaatatttcaaattatgagcaaagtatatatctacatttatttaagtattatttatatt

SEQ ID NO: 185248 - DNA, 602 bp, Homo sapiens
cttgctggcaggaaagggtcctacattacaattaaacatgctatgaagaggtatcaggctcaatactaagtgtgtagtgtgaatttatttccctggcagcatgcactgtatttagcaaccgtagatctgctaatcctggcatggtagttgtgctctggacatgtagctaaaagaacagaggctgaacactggagtgtaaacagagaaacaggagacaccactacccccgcagaatggacagatgagcaagaacaaccctgacagcgggcatttaggacacactatattgtagaaggagcattaaacaaacaaacaacaacaacaaaaaaagcaggrcaagctactggggtgattagatattgtagaactcttgccaactgctgtttgcaaaccagtttataaatcctttcaaagtggaaatgtggattctgtgccatattataggaatgtggaggcttaattaattggatctgaaaaaaataaaattggcagaaggggaaatgattatttaaaaatattgaatttgtctaaatatacttattctattaatatacccaggagctagattactaacatttttcattgcagtagtagcaataaaa

SEQ ID NO: 185249 - DNA, 575 bp, Homo sapiens
acaaagttatagacaacgagctttgtcttattcatttcagccttccagatgggtatgtagtgtcatagcctgtgtatttgttttaatagaaggggaagagttacttttattatttgtgtttgttttaaaatatttttatatttttaactggtttcttgcataaattttagccagaaataagtggcaaaaatagtacaatgcatttttctatatcgtcactcagcatctccaaattttcactttccatgcaacaacaacaaaattactataatcaggaaatccacatcaatgggatactactaaatagtctaaaaatcacatccacatttctgattgttcmctaacgtccttttcccgggccagaatccaattcagaaacaacattgcacattgatgtgctaactccacagcctcccccaacttgatcccgttcctcagtcttcccttacgctgttgaagagaattggccagttatcttacagattgagcttcagactgggctttaataatgtttcctcatgataaaattcaggttattaattttggggcaagaaaaccacaaagtagcattgcct

SEQ ID NO: 185250 - DNA, 374 bp, Homo sapiens
gccctacctctgccaagggatcaaggtcaccatcaccagtaagtagttttgttgatagcctgtgttctggataaaatgtgataaggatggcacttcacatttgtggtcttcatccagaaaaccataaaccrtatttaaaagtaagaagaaaaatacatgaagccaaagggagggtcattcttcaaaacagtggaccaacgctcctcagcactgtcacggtcataaaaaacaagaaaaatctgaaaaactgtcacagccaagaggaacctaagacatggtgaacaaatgtaatgtggtgtcttggatgggatcctggaacataacaagaatagtagataaaaaccaagaaaatctgaattaaaataaaggcttta

SEQ ID NO: 185251 - DNA, 374 bp, Homo sapiens
gccctacctctgccaagggatcaaggtcaccatcaccagtaagtagttttgttgatagcctgtgttctggataaaatgtgataaggatggcacttcacatttgtggtcttcatccagaaaaccataaaccatatttaaaagtaagaagaaaaatacatgaagccaaagggagggtcattcttcaaaacagtggaccaaygctcctcagcactgtcacggtcataaaaaacaagaaaaatctgaaaaactgtcacagccaagaggaacctaagacatggtgaacaaatgtaatgtggtgtcttggatgggatcctggaacataacaagaatagtagataaaaaccaagaaaatctgaattaaaataaaggcttta

SEQ ID NO: 185252 - DNA, 593 bp, Homo sapiens
tatacgatgaatatacaaaatatgtatgcaacaaaagaatctcayaatacaaaaaaaaatctgcaatggctgaaaaaatagctgaattcacattatagttggtttattaacacttctctctcaatagctgacctagtagacatggaaactccaaagatataaaatatctaaaccatataataaaccaacaggatctaactggaatatgtaggacactgcccccccccaaaaaagatgaaaacacattttcccaagaccatgtggaattttcactaacatatgacatatccctaagtcataaaataaatatcaacaaatttaaaataagctaatttattaaagtatgactataataaaatcaagcaagaaataaaaaaatcatcaggaaaacctgtaaacatatggaaagtaaacagcttacatttatggaatccatggggcacagatacagtctctagggttttagaaaatacatagaactgaatgaaaatgaaaatatgatatatcaaactatgtgggatgcaactaaagcagtgttgaggggtaaatttatagcattaagtactaaatacaaagacaaggtcaaactctcc

SEQ ID NO: 185253 - DNA, 593 bp, Homo sapiens
tatacgatgaatatacaaaatatgtatgcaacaaaagaatctcataatacaaaaaaaaatctgcaatggctgaaaaaatagctgaattcacattatagttggtttattaacacttctctctcaatagctgacctagtagacatggaaactccaaagatataaaatatctaaaccatataataaaccaacaggatctaactggaatatgtaggacactgcccccccccaaaaaagatgaaaacacattttcccaagaccatgtggaattttcactaacatatgacatatccctaagtcataaaataaatatcaacaaatttaaaataagctaatttattaaagtatgactataataaaatcaagcaagaaatmaaaaaatcatcaggaaaacctgtaaacatatggaaagtaaacagcttacatttatggaatccatggggcacagatacagtctctagggttttagaaaatacatagaactgaatgaaaatgaaaatatgatatatcaaactatgtgggatgcaactaaagcagtgttgaggggtaaatttatagcattaagtactaaatacaaagacaaggtcaaactctcc

SEQ ID NO: 185254 - DNA, 593 bp, Homo sapiens
tatacgatgaatatacaaaatatgtatgcaacaaaagaatctcataatacaaaaaaaaatctgcaatggctgaaaaaatagctgaattcacattatagttggtttattaacacttctctctcaatagctgacctagtagacatggaaactccaaagatataaaatatctaaaccatataataaaccaacaggatctaactggaatatgtaggacactgcccccccccaaaaaagatgaaaacacattttcccaagaccatgtggaattttcactaacatatgacatatccctaagtcataaaataaatatcaacaaatttaaaataagctaatttattaaagtatgactataataaaatcaagcaagaaataaaaaaatcatcaggaaaacctgtaaacatatggaaagtaaacagcttacatttatggaatccatggggcacagatacagtctctagggttktagaaaatacatagaactgaatgaaaatgaaaatatgatatatcaaactatgtgggatgcaactaaagcagtgttgaggggtaaatttatagcattaagtactaaatacaaagacaaggtcaaactctcc

SEQ ID NO: 185255 - DNA, 642 bp, Homo sapiens
aaaacatggcatattatgctattccaattccaaaattatatatattatattgtatrtatattatggtattccaatctgaaatatagtgaattaactcagaggtcatttaaacacattaggtgagtataaaacttcctttttatggattagtaactaattgtttttgttagatcttaccgtaggtttgtcataattcagtcattttgcacaggcaaaagaagtccagtgctccccttttactgtttactttagcattattactgacatgcacatttcattcagtgggattttgaatttgaactgtgtaccttggcagtgaactgaactgattaggagcacgggctgtagggcccacaatcttgactctcctctcttccctgccactttctgtgcctgggtctaggtttaacgttactttctttacctgtgaaactaccttatagcattatgaaaagagatgaaataatgcatagagagaggctggcatagaactcaggccagataatccacccaacaagcaaatgctgttattaatagtatacatctcagcattgttggtagagtttcaccattgcactcatatgagagaaaaggactaaagaaaaaagatttaaatttagaagagtttagatacttcaaaaa

SEQ ID NO: 185256 - DNA, 642 bp, Homo sapiens
aaaacatggcatattatgctattccaattccaaaattatatatattatattgtatatatattatggtattccaatctgaaatatagtgaattaactcagaggtcatttaaacacattaggtgagtataaaacttcctttttatggattagtaactaattgtttttgttagatcttaccrtaggtttgtcataattcagtcattttgcacaggcaaaagaagtccagtgctccccttttactgtttactttagcattattactgacatgcacatttcattcagtgggattttgaatttgaactgtgtaccttggcagtgaactgaactgattaggagcacgggctgtagggcccacaatcttgactctcctctcttccctgccactttctgtgcctgggtctaggtttaacgttactttctttacctgtgaaactaccttatagcattatgaaaagagatgaaataatgcatagagagaggctggcatagaactcaggccagataatccacccaacaagcaaatgctgttattaatagtatacatctcagcattgttggtagagtttcaccattgcactcatatgagagaaaaggactaaagaaaaaagatttaaatttagaagagtttagatacttcaaaaa

SEQ ID NO: 185257 - DNA, 414 bp, Homo sapiens
tctctaaacttgcaactatttcacctagtatgttctcgtatttaatttcaaaattaatgaaattaattcatcattgtatagcaaaaggaaggaactctttcttcacacttttcttagagttcagagtttcagacatgaataaggctgtcaggctcacgctctgacaaactgggtcttagaaacagctttgcagtttggcttgttatgcgctctaattgcattgaaacagcatcttgcattttttaartcatgtctacttatttatctagcaggtttttccatattcaggccacttccagttcagtgcttcactactctacccagcataacacaaagtagaaagtgaaatgattctgggtgcaaatatagacctgtatttcacctcatgactggaaccttcggttcagggaattc

SEQ ID NO: 185258 - DNA, 410 bp, Homo sapiens
gaattcatattgagatatttctctaaacttgcaactatttcacctagtatgttctcgtatttaatttcaaaattaatgaaattaattcatcattgtatagcaaaaggaaggaactctttcttcacacttttcttagagttcagagtttcagacatgaataaggctgtcaggctcacgctctgacaaactgggtcttagaaacagctttgcagtttggcttgttatgcgctctaattgcattgaaacagcatcttgcattttttaaatcatgtctacttatttmtctagcaggtttttccatattcaggccacttccagttcagtgcttcactactctacccagcataacacaaagtagaaagtgaaatgattctgggtgcaaatatagacctgtatttcacctcatgact

SEQ ID NO: 185259 - DNA, 410 bp, Homo sapiens
gaattcatattgagatatttctctaaacttgcaactatttcacctagtatgttctcgtatttaatttcaaaattaatgaaattaattcatcattgtatagcaaaaggaaggaactctttcttcacacttttcttagagttcagagtttcagacatgaataaggctgtcaggctcacgctctgacaaactgggtcttagaaacagctttgcagtttggcttgttatgcgctctaattgcattgaaacagcatcttgcattttttaaatcatgtctacttatttatctagcaggtttttccatattcaggccacttccagttcagtgcttcactacyctacccagcataacacaaagtagaaagtgaaatgattctgggtgcaaatatagacctgtatttcacctcatgact

SEQ ID NO: 185260 - DNA, 581 bp, Homo sapiens
aactgataaaaataaataaattttttacatgacatttttcttgataaaataaacataaagcatatacatatatacccacacaacgtgaaatatctatccaaatctgcatctggatatcaatatatggygaagtgaagtcaacctgtgctaactcaccaccaactgaagaactagaatgttaccatttacttacactttccctatttatttcaggtctcaatcttggttttatgtttattattccctttgttaaaacatattttaaacacgtatgagaatattctaaaacatacattattcagtttagcttgtgattgagcattatcaaattactatcatattgaatgtagctttctataactttcatttttctttcaatatcatgatgctaaacaattatctatgtattttttgtacttgaatatcattcataatttttcctgtaatatttacttctctgttatatatacacagctctgatgattgacatttgggttattctccttcttggtgtttatgaacagtacaattaagaatatttttgcacatgttttaaaaattgttccaaattgctttataaa

SEQ ID NO: 185261 - DNA, 581 bp, Homo sapiens
aactgataaaaataaataaattttttacatgacatttttcttgataaaataaacataaagcatatacatatatacccacacaacgtgaaatatctatccaaatctgcatctggatatcaatatatggtgaagtgaagtcaacctgtgctaactcaccaccaactgaagaactagaatgttaccatttacttacactttccctatttatttcaggtctcaatcttggttttatgtttattattccctttgttaaaacatattttaaacacgtatgagaatattctaaaacatacattattcagtttagcttgtgattgagcattatcaaattactatcayattgaatgtagctttctataactttcatttttctttcaatatcatgatgctaaacaattatctatgtattttttgtacttgaatatcattcataatttttcctgtaatatttacttctctgttatatatacacagctctgatgattgacatttgggttattctccttcttggtgtttatgaacagtacaattaagaatatttttgcacatgttttaaaaattgttccaaattgctttataaa

SEQ ID NO: 185262 - DNA, 581 bp, Homo sapiens
aactgataaaaataaataaattttttacatgacatttttcttgataaaataaacataaagcatatacatatatacccacacaacgtgaaatatctatccaaatctgcatctggatatcaatatatggtgaagtgaagtcaacctgtgctaactcaccaccaactgaagaactagaatgttaccatttacttacactttccctatttatttcaggtctcaatcttggttttatgtttattattccctttgttaaaacatattttaaacacgtatgagaatattctaaaacatacattattcagtttagcttgtgattgagcattatcaaattactatcatattgaatgtagctttctataactttcatttttctttcaatatcatgatgctaaacaattatctatgtattttttgtacttgaatatyattcataatttttcctgtaatatttacttctctgttatatatacacagctctgatgattgacatttgggttattctccttcttggtgtttatgaacagtacaattaagaatatttttgcacatgttttaaaaattgttccaaattgctttataaa

SEQ ID NO: 185263 - DNA, 594 bp, Homo sapiens
cacacaacgagcctcaacaaattaagaaaaytgaaattgtatcaagcactctctcagaccacagtagaatgaaaccagaaatcaactccaaaaggaaccttcaaaaccatgcaaatacacagaaattaaataacctgctcctgaatgatcgccgcgtcaaaaatgaaattcaagatggaaatttaaaaattatttgaactgaatgacaacagtgacacaacctatcaaaacctctaggacacagcaaaggcagtgctaagagaaaagtctatagcactaaatgcctacatcaaaaagtctgaaagagcacagagaatctaaggtcacacctcaagaaactagagaaccaagaacaaaccaaacccaaacccagcagaagaaagaaaataaccaagatcaaagcagagctaaatgaaatttaaagaaaaaaaaatacaaaagataaatgaaacaaaaagctggttctttgaaaagataaataaaattgatagaccattagcaagattaaccaagaagagaagagagaaaatctaaataagctcaataagaaacaaaacaggagctactacaactgacaccacagaaatacaaaag

SEQ ID NO: 185264 - DNA, 608 bp, Homo sapiens
tcacatcttttcacacatcctttccttagaataaggaatctcagcttcagagatactcctttttagttcatatgccaactctcaatcttagttgccaccattaggtttaatttctcccacagcttttttatggcctctggactaagcacctcttgaattatctctgaactctcagcagctttatagaaataatctggaagctgaccagcagctctagtttctgggcacgtctgatttacagatttcctagacatggggcagatactggccattgctgacggctccatagtttgtatgggtagtgtaagcatctaataggagatggaatcttttttctcttggcctacttctatcctcctcctcccttctctcttcttcctctctctctctctctctcgctctctgtcatctttcttgctctctctctggaaaagacagattggcataacctgagtcagatactcacatctggatctgtaaaccataggccagataaggtgggttacactgaagaaatatagcracttctataaccctatgcataatgagaagaagaagaaattcttagaaaatagtgactgggcaaacaagtcaacagggtccaaaac

SEQ ID NO: 185265 - DNA, 443 bp, Homo sapiens
agatagatgaagtttgagtcactcttccattcctaactgcccactttctcctgaatttcccagaaccctctgcctccacgccccttcaccggattccttaccatggtccactccttagaatcctcaagagcggtcctcctattttccagttggatcagctaaagctggagacagcaaagccccactgctaatttgtggcaaagttggtttggagtccatcatcccggccacctctctatgttgcctcctcccgcgcccactccctcaggaccctgcactctgccatgtgtgacagtggatagcaactctcttgggtgatgaccgttaatcctgtgggagtcctrctcaccctgaggctttgactcacctggccagtcccaaaaaggataccccttttaatcagtacctatgatatcagacccaaattcttaggcagttaaaga

SEQ ID NO: 185266 - DNA, 602 bp, Homo sapiens
ctacctgggcatttggttgcctcctgtcactatcactgtcctcattcttgttcttgtggtgaaataggtgattaacaagaarttattactgatgagtacccaaaacaatttcagaaagtgctaagttcaatgcagactataaagcaacgtatgtgatagtgggggcttacctcctagaaagggtggttaggaaagacctctctgaggaggcatttgagctgagatgtgaagaatgagaaagaagtggctattctggggagtgagaggtaggagggatgagtattccaggcagagggaggacaaaaggccccaaggtaggagagaatgagtgtgaatattcaagtaagctagtagggtaatgacatgtaaaatttgcagctcagtcaaatgcaaggcttcccacccatcacagaaagaccctagggttggggttttatttctgattcatccgtggtgtacagctggggcatcactttccacgtatgcaggcttgggcatatcaccttgcctctcatggtttctccttccctgccctgcctggctgccagtgttaggagggggtcaaatgtggccatgtgggtaaaggcactttgaaaatatga

SEQ ID NO: 185267 - DNA, 602 bp, Homo sapiens
ctacctgggcatttggttgcctcctgtcactatcactgtcctcattcttgttcttgtggtgaaataggtgattaacaagaaattattactgatgagtacccaaaacaatttcagaaagtgctaagttcaatgcagactataaagcaacgtatgtgatagtgggggcttacctcctrgaaagggtggttaggaaagacctctctgaggaggcatttgagctgagatgtgaagaatgagaaagaagtggctattctggggagtgagaggtaggagggatgagtattccaggcagagggaggacaaaaggccccaaggtaggagagaatgagtgtgaatattcaagtaagctagtagggtaatgacatgtaaaatttgcagctcagtcaaatgcaaggcttcccacccatcacagaaagaccctagggttggggttttatttctgattcatccgtggtgtacagctggggcatcactttccacgtatgcaggcttgggcatatcaccttgcctctcatggtttctccttccctgccctgcctggctgccagtgttaggagggggtcaaatgtggccatgtgggtaaaggcactttgaaaatatga

SEQ ID NO: 185268 - DNA, 602 bp, Homo sapiens
ctacctgggcatttggttgcctcctgtcactatcactgtcctcattcttgttcttgtggtgaaataggtgattaacaagaaattattactgatgagtacccaaaacaatttcagaaagtgctaagttcaatgcagactataaagcaacgtatgtgatagtgggggcttacctcctagaaagggtggttaggaaagacctctctgaggaggcatttgagctgagatgtgaagaatgagaaagaagtggctattctggggagtgagaggtaggagggatgagtattccaggcagagggaggacaaaaggccccaaggtaggagagaatgagtgtgaatattcaagtaagctagtagggtaatgacatgtaaaatttgcagctcagtcaaatgcaaggcttcccacccatcacagaaagaccctagggttggggttttatttctgattcatccgtggtgtacagctggggcatcacttyccacgtatgcaggcttgggcatatcaccttgcctctcatggtttctccttccctgccctgcctggctgccagtgttaggagggggtcaaatgtggccatgtgggtaaaggcactttgaaaatatga

SEQ ID NO: 185269 - DNA, 602 bp, Homo sapiens
ctacctgggcatttggttgcctcctgtcactatcactgtcctcattcttgttcttgtggtgaaataggtgattaacaagaaattattactgatgagtacccaaaacaatttcagaaagtgctaagttcaatgcagactataaagcaacgtatgtgatagtgggggcttacctcctagaaagggtggttaggaaagacctctctgaggaggcatttgagctgagatgtgaagaatgagaaagaagtggctattctggggagtgagaggtaggagggatgagtattccaggcagagggaggacaaaaggccccaaggtaggagagaatgagtgtgaatattcaagtaagctagtagggtaatgacatgtaaaatttgcagctcagtcaaatgcaaggcttcccacccatcacagaaagaccctagggttggggttttatttctgattcatccgtggtgtacagctggggcatcactttccacgtatgcaggcttgggcatatcacyttgcctctcatggtttctccttccctgccctgcctggctgccagtgttaggagggggtcaaatgtggccatgtgggtaaaggcactttgaaaatatga

SEQ ID NO: 185270 - DNA, 556 bp, Homo sapiens
aaacacatatcccatcatcatggctagagatttttaaaaacagaaatctgagatgtgctgagggaattggggagtgggaagtggtrtcagaatttaggcttcaaatgcttctctaaagagcaataggaaatgtttgtcttaaaggcctagagaatggaactgtatgatacatttggggtcatgataaatttgggatcacaactttgaaacctttcctgtctcctcatcctttctactggaaagagtcgttcacattcttccttgtttcttgctttgccctcacacaagttgcagggtgagctccttcttttctcttgtccttcctgaattctcaaaattctcagcagaagaaaacaagaaaagcacacagccaaacatccagtcctctgtgagaaaagaaatcctcacacatctcagaaattgaaagatattcttttatcccacatcagatcagatatgttttcagttgcagaagagaacaaccaataacttaggacctatcaacaaagagagtcaaactccggaaaatatgtaaagagatttattcttagccaaa

SEQ ID NO: 185271 - DNA, 470 bp, Homo sapiens
tttaaggcctgataagagacatttaccatctgttctatatagtaaaaaccttggtctccacaaccccttaccttaacccagacactactttctaatgattctttgtctttggataatgacttaacaatttcaaacaattgccaatcagaaaatctttgaatccacctttgacytgtaagaccctactttgagttgtcccacctttatgaactgaaccaatgcatgctttacatctattgactggtgtcttatgtctctctagaatgtaaaaaatcaagctgtaattcaatcagcttaagcacatgttctcaagacctcctggggctgtgttacaagccttgatcactcatatttggctcagtagaaatctctttaaatattttacggagcttgactcttttcatcgacactgctggggctcaggaaacaataccgcaaaatgaaggccttagcagcagcatcagaagcaa

SEQ ID NO: 185272 - DNA, 425 bp, Homo sapiens
ctgtaattcaatcagcttaagcacatgttctcaagacctcctggggctgtgttacaagccttgatcactcatatttggctcagtagaaatctctttaaatattttacggagcttgactcttttcatcgacactgctggggctcaggaaacaataccgcaaaatgaaggccttagcagcagcatcagaagcaagatttttccttgccttctcctgccctcytgtctttcagttccattttccctttaggctaggcgtagaaactagaatccctcttccccaaggcaggtcataaaaatgagcatctctcttctccaaagccagccataagacctaaaattattactctaattttcctctggccaatctatataaaaactggccacaaagaaattatcagatctaccttgcttgactgtaagtcatg

SEQ ID NO: 185273 - DNA, 444 bp, Homo sapiens
gaattcaccttcagaaattgtacaggagggtgtttggagaatttttagactcctgttttattctctagcaacctattaaggaataaaagacatttccacctttataaattttccaaagtttataaatcggttaatwtcctgaaatcccaaagtgtttctctacaggatgactctgtattctgattagtaattataaggaagctcagtttgcattatttacattttctataaaaacaaaacttacctatcataagaatagctaaaaagatacatcaattttaatctttaaaaatttttgtttcaaagttactttaaagtcaatttagatctttagagaatttaagaatatctaactaagtcaacattgcctttacgttagagcatgcctttgtaaatccagcaagtgataatatttcatacttagggcatttgtgggccatgtct

SEQ ID NO: 185274 - DNA, 603 bp, Homo sapiens
tcagcagtcacgtcaaatgcataattacttctaattctggattgtcttttctgtttgacccactttcaaattgacctattttcttattctgacactaaaaacctattaacctcgttgcctttattttagaatgttctgatcatgtgctaagagtcctgcccactattctcattttcattgtttttctagatattttcttgaatttattttatttcaacatgaattttattctacctaattgcaaaagaagaaaaaccaaaaaaataagagagtgttagaattctagctggaatttatataatttggttgtgggggagggttgtttgttttttgttgctgaatgacatttttgacattcagtcttcccatcacagaatggaatttatttccatytgttcaggtctatttatcttcaattaagattttagagtattcgtcatataattcttgggccttcctcattgcatttattccaaagtattctacagaatattgaatgctgttctaaagttaaagtatccaagtgtttatggagttaaacctaaataatatgcatgcacttgtgtgcgtgtgtgtgtgtgcatgtgtgtgtatgtatgtgtt

SEQ ID NO: 185275 - DNA, 475 bp, Homo sapiens
gcccggccagcatggcaaaaacccgactctactaaaaaaaaaaaaaaaattagcggggcgtggtggcgcgcctgtagtccaagctattggagaggctgaggcacgagaatcgcttgaacccgggagacagaggctgcagtgaactaaggtcccgccactgcactccagcctgggcgacagagcaagactccgtctcaaaaaaaaaaaaaaaaaaaatcaaatcaggaattatttcctccaggaagtggggatgcggggtgtaragtgtgggcagaagagaaatagagggatgatggggagtgggaggaggatcatgtggtctttttactaggagaactgaaagcggctggcaggcatctttgaaacagagaacatactataaacaaacagcagcatttagaaggtataatttccaagatttttgattcaactcaacatgtactacgtgcctataggtacccatcatcatgacctg

SEQ ID NO: 185276 - DNA, 450 bp, Homo sapiens
taagatcgaggttgtaatatgcagttgaaaaataatacctaagttgaacaaatcatcgtatattactacagcagatgtcactgcttgagcccaggagtttgagaccagcctgtgtaacatagggagaccctgtctctactacaaaacaaaaacaaaccaatacacactacmaactgcctccactctgtcatgggcagaactatagaattatttccaaataacagaaatagtgatcctatctaatataaaattacgggaaattttagttttagttttaatataatgctgcataaataagtacatcaaagcactccttcagatataaataacatagaatcacttactcctggtaggtgaaagccaaataatattctcccttcactttcatgtactaaatgttatatttggtatagtcttgttgatattttaaacgataaaccaaagaattcc

SEQ ID NO: 185277 - DNA, 386 bp, Homo sapiens
tttgggcataagttaaccacagaatgggacaatataatcatgcttctggatgacatttcacaaatctatggaaggcttcactgcaaatgaggcagtaaatcattagtctactttcagaagcagaactgatatgcccaggtttctgagtgcagatgggctctggaaaatcaggaagtgaaacaccataggaaagaacactgaacagacacagaagtaaatggatgcaacctttcctgaccaaaatggaactttccagaacattccatcaaagcttcaacccatgttacttgacatttctcagcctggttctgagaatgtcctgaataatgcagtgacaactatcaaatacctgtacttatttgkatacatgtggatgagtgcacaac

SEQ ID NO: 185278 - DNA, 484 bp, Homo sapiens
gaggggatgagagcttggatggctttgtggtggtggagaaatggaggagaaakgacaactctggaaaataccaggaagagtcaaaattaatccagggcattggaagggcacaggcatcagggactgatgaagtggactttccaggagttaacagtatcctctgccacttgcagtcttcatttgtccagcctggcctgcttacttcttcctgagccactcaaatgtcccttactgtgcaatgcctagcctgctgaaattggattattcatcaagcccaattcagattctattcctctcttgaagcatttactgatcaccctagtggatgtgatgtttcctcctgaactccttaaggaattgcttatttgtactatttatttggcatctatgatatccttcttagcgtgatggttatattttcatataaacatatcctggctcctaagttggattagataaaaagtcctagaaggcaggtaaattc

SEQ ID NO: 185279 - DNA, 532 bp, Homo sapiens
gaggggatgagagcttggatggctttgtggtggtggagaaatggaggagaaatgacaactctggaaaataccaggaagagtcaaaattaatccagggcattggaagggcacaggcatcagggactgatgaagtggactttccaggagttaacagtatcctctgccacttgcagtcttcatttgtccakcctggcctgcttacttcttcctgagccactcaaatgtcccttactgtgcaatgcctagcctgctgaaattggattattcatcaagcccaattcagattctattcctctcttgaagcatttactgatcaccctagtggatgtgatgtttcctcctgaactccttaaggaattgcttatttgtactatttatttggcatctatgatatccttcttagcgtgatggttatattttcatataaacatatcctggctcctaagttggattagataaaaagtcctagaaggcaggtaaattctcttatactatttgttattaaaacatcttttattttgtatttttgttg

SEQ ID NO: 185280 - DNA, 532 bp, Homo sapiens
gaggggatgagagcttggatggctttgtggtggtggagaaatggaggagaaatgacaactctggaaaataccaggaagagtcaaaattaatccagggcattggaagggcacaggcatcagggactgatgaagtggactttccaggagttaacagtatcctctgccacttgcagtcttcatttgtccagcctggcctgcttacttcttcctgagccactcaaatgtcccttactgtgcaatgcctagcctgctgaaattggattattcatcaagcccaattcagattctattcctctcttgaagcatttactgatcaccctagtggatgtgatgtttcctcctgaactccttaargaattgcttatttgtactatttatttggcatctatgatatccttcttagcgtgatggttatattttcatataaacatatcctggctcctaagttggattagataaaaagtcctagaaggcaggtaaattctcttatactatttgttattaaaacatcttttattttgtatttttgttg

SEQ ID NO: 185281 - DNA, 484 bp, Homo sapiens
gaggggatgagagcttggatggctttgtggtggtggagaaatggaggagaaatgacaactctggaaaataccaggaagagtcaaaattaatccagggcattggaagggcacaggcatcagggactgatgaagtggactttccaggagttaacagtatcctctgccacttgcagtcttcatttgtccagcctggcctgcttacttcttcctgagccactcaaatgtcccttactgtgcaatgcctagcctgctgaaattggattattcatcaagcccaattcagattctattcctctcttgaagcatttactgatcaccctagtggatgtgatgtttcctcctgaactccttaaggaattgcttatttgtactatttatttggcatctatgatatccttcttagcrtgatggttatattttcatataaacatatcctggctcctaagttggattagataaaaagtcctagaaggcaggtaaattc

SEQ ID NO: 185282 - DNA, 504 bp, Homo sapiens
ttgtggtggtggagaaatggaggagaaatgacaactctggaaaataccaggaagagtcaaaattaatccagggcattggaagggcacaggcatcagggactgatgaagtggactttccaggagttaacagtatcctctgccacttgcagtcttcatttgtccagcctggcctgcttacttcttcctgagccactcaaatgtcccttactgtgcaatgcctagcctgctgaaattggattattcatcaagcccaattcagattctattcctctcttgaagcatttactgatcaccctagtggatgtgatgtttcctcctgaactccttaaggaattgcttatttgtactatttatttggcatctatgatatccttcttagcgtgatggttatattttcatataaacatatcctggctcctaagytggattagataaaaagtcctagaaggcaggtaaattctcttatactatttgttattaaaacatcttttattttgtattttt

SEQ ID NO: 185283 - DNA, 554 bp, Homo sapiens
acttgtcccaggttgcactgtgagccagatggaattaggactaagctgggatttttaattaagccgggtattgctctgctgtagtattctgtcccacaaattcaattttcaaatcaatattttgaatgcatttactgtatttactttatttgggtatttatatgctattgtttttattaatgattcatattttactgcttttaaacatcttttatgctttataaaagattctaaatatgtacatctgtgataaygtgctttaaagaaatcacctacaattttaatattttaaaaatgtgtatatattttgccaaactgaaaatatataaaaatagaaaagatttcctgcttctattaaaattatttaaatgttaaatcatttaaatgtttgaaaatagacattattttttaaatgtaagaatttattctctgtatttatacacataatttatttctaacatttcagttgttctgagggaaataatagttgtaaaattatgtcttcctttgtaatatgatttcaaaaggtaaaatacgatattttaattaaatga

SEQ ID NO: 185284 - DNA, 550 bp, Homo sapiens
ttatttgtttatatggctataaaccaagttagtctgtgaactcattgagatgagggccttgatttattcatctctgttccaattgtgcttgtcctattgtttgtcttcaataaatctgcttttccccattctgtcctttcattccatattyaagtgcaattttaattgcataagtgcagggagaaggagtaggtgaccttttaagaacttccaggagctgtaattctgaatgtccaatcaaactgctgttaactcaaactacattttagtatgtagcagcaggctcagttaattgaaagattgtccttaaattcaaaaaaggctgatgcagaaagatgcttataattctcagccaaatgtactttctctaaaatgtgctttaacatgcctaatgaagttgtttactcttatactccatccacattgaaaagagttggaactgtatatttttaaagaggagataatgttgcaagacttttatggttatttatctgggttctaatccatctgaaatgattccatcctcaggcctgcctcaggccaaaacaat

SEQ ID NO: 185285 - DNA, 560 bp, Homo sapiens
ctgtcctttcattccatattcaagtgcaattttaattgcataagtgcagggagaaggagtaggtgaccttttaagaacttccaggagctgtaattctgaatgtccaatcaaactgctgttaactcaaactacattttagtatgtagcagcaggctcagttaattgaaagattgtccttaaattcaaaaaaggctgatgcagaaagatgcttataattctcagccaaatgtactttctctaaaatgtgctttaacatgcctaatgaagttgtttactcttatactccatccacattgaaaagagttggaactgtatatttttaaagaggagataatgttgcaagacttttatggttatttatctgggttctaatccatctgaaatgattccatcctcaggcctgcctcaggccaaaacaatgtgagaagrgctagggctgaccacaacccccagttcactatatccttctatttataaaactaacatcataaagagatgttgcaaaatattgaggttaaaaattagttgcactaaaataaatcctaaacatataatagggt

SEQ ID NO: 185286 - DNA, 606 bp, Homo sapiens
attgtcctcggaagtagtgtgctttggtgtgttttcatatgttccatgagtttacagcatcagatatcagaagacaaggataggtgaagatgctatctctgcacagrtgaggtacaccatgtgtatatctactagaaaatgcctcctaattgtgcaaccaagaaagaaattcatcaatatcccaagacaataaagattccacatactctgacttttgaggaagtatggctcaatcatataccttatgggaataaatggagaaaattaaaatgaggactgtggaaagaaaattaccaattaagaggaatgaaaaattgccctttttcgctagatgcagcaatgtctacagttttgaagagaacaatttagtattcaacaattttattcacaaatggtccttcttgtgtgaaggtagcataaatacatccttgggtatattagaccttagaaaatatgccaaacgtgtgctcttcttttaaaaatcactcattaataaaagaggaaggaagcaaaattaaaagataaaaatggggaaaatcatgaaataaatggtctggcaacaagcattgaaatcagctcaatgtggagtttatgctaaaccattat

SEQ ID NO: 185287 - DNA, 539 bp, Homo sapiens
attcttcactatgttacagcgcttttgatgtctggcatttctttttttttctttcttagaattttcatctttcrcttaaattatttatctttttttgcatacatctacttttttcattaaatctcttagcattttgatcatagctttttttaaaaaataaatgttatctgctaactataacatttatatcatatctgactctagttctgatgcttgtccagtctcttcaaattgtcatttttgccttttactgtgccttgtaattttttattgacaggtagacatgatgtactacacaaggacactatagtaagttggtctgtagaaatgtagcagtaaagtgtacctgtggtggcgaagaaagggtgctatagttctactattaagtttcagtctcttggtgggcctgtgaccccggcctgtgaacttcactaatgctttttagattacgtgggacaggatggctggaggaggctagagttatgtatttccctgctttcacatggaaggctagagctagatggctttaaatattcccc

SEQ ID NO: 185288 - DNA, 539 bp, Homo sapiens
attcttcactatgttacagcgcttttgatgtctggcatttctttttttttctttcttagaattttcatctttcacttaaattatttatcttttwttgcatacatctacttttttcattaaatctcttagcattttgatcatagctttttttaaaaaataaatgttatctgctaactataacatttatatcatatctgactctagttctgatgcttgtccagtctcttcaaattgtcatttttgccttttactgtgccttgtaattttttattgacaggtagacatgatgtactacacaaggacactatagtaagttggtctgtagaaatgtagcagtaaagtgtacctgtggtggcgaagaaagggtgctatagttctactattaagtttcagtctcttggtgggcctgtgaccccggcctgtgaacttcactaatgctttttagattacgtgggacaggatggctggaggaggctagagttatgtatttccctgctttcacatggaaggctagagctagatggctttaaatattcccc

SEQ ID NO: 185289 - DNA, 558 bp, Homo sapiens
gttataatctaagctttatctactttagggggcacccaagcccactaacactgtggttcttgcagactcatagaggtaccaccttgatgatctggattatcaggcacaaactcttgttctgtttttttactttctcccaaacatacagcgactttttctctgttctgagccacctaaagctgggggtgkagtgacacaagcacccctgtgaccaccattactatgactgtgctgggtcaaacctgaagccagcacagcactgggtgtcacccaaggcctgctgtaaccactccctgactactgcctatgtttactcaaggccctggggctctacaatcagcaggtggcaaagccagccaggtttgtgtccttcccttcaggatggagaggtcccccaggccctggatgggtccagcagtgctgtctgggagtcagggactagagtcaaaacacttagaagtccaccttgtgttctattgtgctgctgctaagctggcattcaaaccacaagatgcagttagcaggcgatgaatactcccaggacagggcccttccctt

SEQ ID NO: 185290 - DNA, 558 bp, Homo sapiens
gttataatctaagctttatctactttagggggcacccaagcccactaacactgtggttcttgcagactcatagaggtaccaccttgatgatctggattatcaggcacaaactcttgttctgtttttttactttctcccaaacatacagcgactttttctctgttctgagccacctaaagctgggggtggagtgacacaagcacccctgtgaccaccattactatgactgtgctgggtcaaacctgaagccagcacagcactgggtgtcacccaaggcctgcygtaaccactccctgactactgcctatgtttactcaaggccctggggctctacaatcagcaggtggcaaagccagccaggtttgtgtccttcccttcaggatggagaggtcccccaggccctggatgggtccagcagtgctgtctgggagtcagggactagagtcaaaacacttagaagtccaccttgtgttctattgtgctgctgctaagctggcattcaaaccacaagatgcagttagcaggcgatgaatactcccaggacagggcccttccctt

SEQ ID NO: 185291 - DNA, 593 bp, Homo sapiens
aagctttcacttttccaggtgaaaattcattttctgaataactggcataaagtggtcccaacagactgaggtactcccttcggactcctctaagaggctggagggctgctttgcaccagcaaatggtcaattatattgcctgcctggccatcaccaaggtcacccctggggttgagccagatcattgagtaagatctccctttcttttcaaagaatcgctcctgtgctcttctcacccagactccctaagaacagaagacgaattttcccagctgtgccgtgacctctgctccttgaactatccatgccccagatgtttactttttttggctccagggcctgcattgattcctargagtgagattaaaaagacgtcgaaagcctaggccagacagttccctaccccagatatggaaattctgggagacaaacatttcttatgctgcagcgatgtgaaggaatgcagaggattcctactacatggagacaaaggaagagctttggtatccttgagagctacagaaaaatgtaaagcgatgcaaaaagttctaaatgactgagtattgttttaatgtttttgctagatgattttg

SEQ ID NO: 185292 - DNA, 593 bp, Homo sapiens
aagctttcacttttccaggtgaaaattcattttctgaataactggcataaagtggtcccaacagactgaggtactcccttcggactcctctaagaggctggagggctgctttgcaccagcaaatggtcaattatattgcctgcctggccatcaccaaggtcacccctggggttgagccagatcattgagtaagatctccctttcttttcaaagaatcgctcctgtgctcttctcacccagactccctaagaacagaagacgaattttcccagctgtgccgtgacctctgctccttgaactatccatgccccagatgtttactttttttggctccagggcctgcattgattcctaagagtgagatkaaaaagacgtcgaaagcctaggccagacagttccctaccccagatatggaaattctgggagacaaacatttcttatgctgcagcgatgtgaaggaatgcagaggattcctactacatggagacaaaggaagagctttggtatccttgagagctacagaaaaatgtaaagcgatgcaaaaagttctaaatgactgagtattgttttaatgtttttgctagatgattttg

SEQ ID NO: 185293 - DNA, 593 bp, Homo sapiens
aagctttcacttttccaggtgaaaattcattttctgaataactggcataaagtggtcccaacagactgaggtactcccttcggactcctctaagaggctggagggctgctttgcaccagcaaatggtcaattatattgcctgcctggccatcaccaaggtcacccctggggttgagccagatcattgagtaagatctccctttcttttcaaagaatcgctcctgtgctcttctcacccagactccctaagaacagaagacgaattttcccagctgtgccgtgacctctgctccttgaactatccatgccccagatgtttactttttttggctccagggcctgcattgattcctaagagtgagattaaaaagacgtcgaaagcctaggccagayagttccctaccccagatatggaaattctgggagacaaacatttcttatgctgcagcgatgtgaaggaatgcagaggattcctactacatggagacaaaggaagagctttggtatccttgagagctacagaaaaatgtaaagcgatgcaaaaagttctaaatgactgagtattgttttaatgtttttgctagatgattttg

SEQ ID NO: 185294 - DNA, 628 bp, Homo sapiens
acaaaggtgttttttatttgcttggttttggtttttcaggcaagtgttgaaagataattctccaggagtctcctgttttcttcatgtcttgtgagcagggactttaactgtcacttgttcctaattatattttcaagtatgtttgtatgattcccatggggagcctatttccatgacagcatctcctgctatcaacctggtccctatcaaggatgccatcatcagacttctcaaagatgtcagtgcctccctcacctgtacccttgctactctactgacaggaatattctctccaccttcctgaggaatatagcacagtggtggctcctatggttttgtataaatccactctaacattcccacatatctgaactttctgaacccttcatgaatactatgctgaggcaatatcagcgttttcacctcatttcttttgggccattgttagcagaaactttaaggagctattctagccgtctattaggacaggttctaggtgtctkttccctgatgttaaacttcaagtcatgagagagggctcctatatcaataaattgcactctatcccatcttatttatattctactcttgccagtaatacacacttgccaccccccatccacacaca

SEQ ID NO: 185295 - DNA, 589 bp, Homo sapiens
atctgctctggtctgcaaggggagagaattcagagaagcatgagagcttgcatctcagattcgtgcatccaaatatccytaaatcaagtctcagagtctctctttttctatcagggccctgacttttaccataaaagacttgttggcatttccacccttttggctgtctgagcagcaccatgatggttggcaagaacaggtgccttacaaaggcagcaaaaaggaagccaagaagaaagtggtggatccattttcttttttttttccatgtgccactttattttttgtttctttttttaaaatttgtgatgagaacacttaacatgagctccattcttgtcctgtttttttaaaattttttaaaaattttattattattatacttttaagttttaggatacatgtgcacaacgtgcagatttgttacatatgtatacatgtgccatgttggtgtgctacacccattaactcgtcatttagcattaggtatatctcctaatgctatccctccccctccccccaccccacaacagtccccagggtgtgatggtccccttcctgtgtccatgtgttctcattgttcaattcc

SEQ ID NO: 185296 - DNA, 589 bp, Homo sapiens
atctgctctggtctgcaaggggagagaattcagagaagcatgagagcttgcatctcagattcgtgcatccaaatatccctaaatcaagtctcagagtctctctttttctatcagggccctgacttttaccataaaagacttgttggcatttccacccttttggctgtctgagcagcaccatgatggttggcaagaacaggtgcyttacaaaggcagcaaaaaggaagccaagaagaaagtggtggatccattttcttttttttttccatgtgccactttattttttgtttctttttttaaaatttgtgatgagaacacttaacatgagctccattcttgtcctgtttttttaaaattttttaaaaattttattattattatacttttaagttttaggatacatgtgcacaacgtgcagatttgttacatatgtatacatgtgccatgttggtgtgctacacccattaactcgtcatttagcattaggtatatctcctaatgctatccctccccctccccccaccccacaacagtccccagggtgtgatggtccccttcctgtgtccatgtgttctcattgttcaattcc

SEQ ID NO: 185297 - DNA, 589 bp, Homo sapiens
atctgctctggtctgcaaggggagagaattcagagaagcatgagagcttgcatctcagattcgtgcatccaaatatccctaaatcaagtctcagagtctctctttttctatcagggccctgacttttaccataaaagacttgttggcatttccacccttttggctgtctgagcagcaccatgatggttggcaagaacaggtgccttacaaaggcagcaaaaaggaagccaagaagaaagtggtggatccattttcttttttttttccatgtgccactttattttttgtttctttttttaaaatttgtgatgagaacacttaacatgagctccattcttgtcctgtttttttaaaattttttaaaaattttattattattatacttttaagttttaggatacatgtgcacaacgtgcagatttgttacatatgtatacatgtgccatgttggtgtgctacacccattaactcgtcatttagcattaggtatatctcytaatgctatccctccccctccccccaccccacaacagtccccagggtgtgatggtccccttcctgtgtccatgtgttctcattgttcaattcc

SEQ ID NO: 185298 - DNA, 495 bp, Homo sapiens
gaaaatagtttggtagtttcttcccgaagtgagcattacgatattacccagcaattgcattcttggaatttttgtcctagagaaataaaaacattcacatgaaaggctgtgtgtgagttttcataacagatttattcataatagcaaaatactggaaacagcccaaatgtcattcaattggtgaatggctgaacaaactcaggtataagcataaaatagartattcatcggcaataaaaaggaatcacctattgatgcgtataacaatttagatggacttcaagggtattatttttagtgaaaggagacagtctcaaaaggttacatgttgtgtgatctcaattacataacgtttttgaaatgacaaaactttaatatggagaatagttagtggctgtcaggggacaggaatgtatgtgtgttggaggttgggagtagcaaggagtgggaagcaggggtagaagtgaatgcaaatacaaagaggtagcatgatgg

SEQ ID NO: 185299 - DNA, 482 bp, Homo sapiens
tatcactcagtttataacatacagaatcacagcctctgagcagaggagaccttgcagccccatgcactacactggggctggtgcctgggactagggcmatttcaggctatggcgcctccccccaccattcttccctctgtatttctgcagattcctgctgggaaccaatgcctattaatgaggtttctacttctagcctatgagttaacattctttttgtaaattaattttttaatattttatctaaacaaatataaaccaaattgtatttaaaggctcatgaaggaggactgcattcctctacttcacgctttagtctcatgcctcagaggcagaactttgaacttcagctatttcttctgatatttgccatatttacactgccattacagacacatcaattttagatgttatctcttgactttctaacaaatggcagaatggggatttagctctctttctctaacatccccacttgcctt

SEQ ID NO: 185300 - DNA, 482 bp, Homo sapiens
tatcactcagtttataacatacagaatcacagcctctgagcagaggagaccttgcagccccatgcactacactggggctggtgcctgggactagggccatttcaggctatggcgcctccccccaccattcttccctctgtatttctgcagattcctgctgggaaccaatgcctattaatgaggtttctacttctagcctatgagttaacattctttttgtaaattaattttttaatattttatctaaacaaatataaaccaaattgtatttaaaggctcatgaaggaggactgcattcctctacttcacrctttagtctcatgcctcagaggcagaactttgaacttcagctatttcttctgatatttgccatatttacactgccattacagacacatcaattttagatgttatctcttgactttctaacaaatggcagaatggggatttagctctctttctctaacatccccacttgcctt

SEQ ID NO: 185301 - DNA, 569 bp, Homo sapiens
gaattctatatctctttgacttataattttggtagctctattgtcttttaagttctgatgttgctgttgataaatccgatagtattctgtttcctactctttaaattttcacttttttcccgcactattttgctttctctggaaatttttaggatctactctttattttcagtgtaatttccatcataatttaaaataatgtgacttggtgaaccttgttcattcattaggttgggcatacarttctcatgttcaatctggagaatgatttcattaaatactgagaaatatcttttattatatatttaataatttcctttatttttttctggtctctctttcttgactcctattagtcagatatagaactttctagattgactctaacttttttgatattttctctcctattgcctattttttgtctttttcatcaactctctgggagatattttatcttccaatctttctgttgaatttttatttcagctatcaagggcactttttcaatactcaaattgttttttcataacaccctattcttgtttcatgttttctcccattttttg

SEQ ID NO: 185302 - DNA, 552 bp, Homo sapiens
ctaaataacaactttaaaattgacatcacctgatatccaattctgtgagtagaaaataatyataagcaataggataggcaaatcctttgcctgaaaacaggtgcatgttttaacttccccggagaccaaggatctggctggtttgtctcccccaacttctcccttaccccatgatcttcaggagatcacctcatgatcttcggtagcttattctagtattttggccaactaattgtcagaaagttcctccttaagtttaatctgtgtttcttctattttaatttaaacattatttggatttattttagctggtaaataaatatctgtctgagatttcttagcccgacataacaaagtacaatagacttggtggcttaaacaacagaaatttaccttctcacagttctggaagccggactttcaagatcagagcaccagtagggttggtttctggtgagtgctgacacagccttttctctgtgcaagcaggcggagagcaggagatcaagctttctggtgtctctcttcacatgggcccgctaattctgccag

SEQ ID NO: 185303 - DNA, 552 bp, Homo sapiens
ctaaataacaactttaaaattgacatcacctgatatccaattctgtgagtagaaaataatcataagcaataggataggcaaatcctttgcctgaaaacaggtgcatgttttaacttccccggagaccaaggatctggctggtttgtctcccccaacttctcccttaccccatgatcttcaggagatcacctcatgatcttcggtagcttattctagtattttggccaactaattgtcagaaagttcctccttaagtttaatctgtgtttcttctattttaatttaaacattatttggatttattttagctggtaaataaatatctgtctgagatttcttagcccgacataacaaagtacaatagacttggtggcttaaacaacagaaatttaccttctcacagttctggaagccggactttcaagatcagagcaccagtagggttggtttctggtgagtgctgacacagccttttctctgtgcaagcaggyggagagcaggagatcaagctttctggtgtctctcttcacatgggcccgctaattctgccag

SEQ ID NO: 185304 - DNA, 555 bp, Homo sapiens
ctactgtaggccccaacctccattgtaaatacttaaacaatggaatacttaaaagattctgtagagatgggaatttgtatgtgtttgttgtgtatgggagaaatgaagaccaagaaagatttggtttctctaaacatattataaaatactaactggttcttgatgcataatcaaccaaaaatattcaaatgtggccayagagatttcttggtaactccttcctagtgctggataggatgtagggctatgaagaaggacactgcacatctctctgcatgaaatgggagaatctctcgtggggtcagaacagaaaagcttccttctggggaactaggtcctttgcacccggtggacctgacaaattgacaccaccgtttaatggaataggctggactctgcaggctacaatcctggaaacaaataatttttgcaaataggcttagccagttctccctgtgctgtgtatgaaagataccttggatggattccgaagattttgggttcctttcgggtattagaacagtctcattatcagatatcataacattaataaaa

SEQ ID NO: 185305 - DNA, 654 bp, Homo sapiens
tttacattcctaaataacaaaacaacatataaaactatagtgataaaaatgttgcctcttgctacaggattggacagagacatcagtgaaagatagcagagccccatacagaccccgatacagtggacaagtttagtacatgatggacagggcatctcaaaccagtagataacaaacggaccattcagtgaatggcatcatctgatcatctatccattcaggagaaaattaagctagtgcccagcttcccaacagacacaaaaataawctccaaatacaaataaagggcttaggataaaatatgtgtcttaattcgaacagaaatgagaaagtatgtttacaatgttttggtgaggaaaagcatttctaagtaagtcacaaagcccagcaagcacaaaagaaaaggctgtctaagatatgaaaattgaaaaaaaaattggatgacaaagatgacattccaggtttaaaagataaccttggaaaaaaatattggcacttacggggaaataagttattagttatttaactgatactcaaaatacagaaagagggtctatgtacttttaagtcaaaggccttcaaactaagagaagtccctgctcatagctgaccttttctgggaggctttggagaatgtcctcagttgatagaagc

SEQ ID NO: 185306 - DNA, 654 bp, Homo sapiens
tttacattcctaaataacaaaacaacatataaaactatagtgataaaaatgttgcctcttgctacaggattggacagagacatcagtgaaagatagcagagccccatacagaccccgatacagtggacaagtttagtacatgatggacagggcatctcaaaccagtagataacaaacggaccattcagtgaatggcatcatctgatcatctatccattcaggagaaaattaagctagtgcccagcttcccaacagacacaaaaataatctccaaatacaaataaagggcttaggataaaatatgtgtcttaattcgaacagaaatgagaaagtatgtttacaatgttttggtgaggaaaagcatttctaagtaagtcacaaagcccagcaagcacaaaagaaaaggctgtctaagatatgaaaattgaaaaaaaaattggatgacaaagatgacattccaggtttaaaagataaccttggaaaaaaatattggcacttacggggaaataagttattagttatttaactgatactcaaaatacagaaagagggtctatgtacttttaagtcaaaggccttcaaactaagagaagtccctgctcatmgctgaccttttctgggaggctttggagaatgtcctcagttgatagaagc

SEQ ID NO: 185307 - DNA, 471 bp, Homo sapiens
tgcccaggttgggtactaaatagcataatctaaagtagagcccaattggggatttttcttgcctggatgagttacacatcacagtagaaacttctaggaaacataaaaccaggcaaggtaaatcactcccatcctaattcagtacactgagcctgtcagtactaggctggcacagtaaatcacctggatttgtgatataaactattagtggtcatttggcaaatggctctaaagatgttttgtctttcttagcaaaasagaaatatgagtctattgtcttcggcataatagtctgacttttatagttctacagagaaattcttttagagaaaaggaaagctgttgtgtaggtcaaagattattctcaagagatgatgaactagcagtgagccgcagcctcagagggagctaagtcttacttttcaaaaatgtgacaatgaaatcaagcatgatcaggaagctgatgatatc

SEQ ID NO: 185308 - DNA, 445 bp, Homo sapiens
acaaacaagtgaaaaaaggaaaagaccctgaaccagagcccgccaattaagctgttcccaaattcttgatctgtagaaactctgagataataaatgcaaatggttctaagccactaagttttgaaatatttgttaacagcaatagataactaatacaacaaacctcacagagtatatatgaatatttggtgtgataatgtctatgaaaatccctgggatagaaatatttagtaatttaaggctttacataaatcttcagtaatcaagatcatctatatatggtggtagctgyagtgacagtagaacagctttaatgctctaggaaatgcgcctataccaagtttttaacccatgaaggcgcagggctgtataaatcctccctcagttccttcagcactgatgccatttctgaaacagagtagcttattactaaagatttgttaag

SEQ ID NO: 185309 - DNA, 582 bp, Homo sapiens
gatagcaatatagctgccttggttgacttaaggaaagaactccattttttacatttctctttttattggtataaatacaataaatgctcattgtagagttggaaaggaaatgcaagtgatttagatgctaaagtgtattttatatacgttaacaaaataattgagagggaagagaagtcagattcttcctctgttctttttgccaacgttctagcagagcagagtgactgtgctctttgtggatggatggacaaaaaagtacatgagaaagtggactcttgctgmtcccctagccatccttatgagtctcaagaacattggagagtaatagtagtcccttacagagcaagtgcagccttaaattggctatgcagttccaagccttgtgtccggtggcctctgtgtcatggctgacctttcatatccaggtacacgggcgtcctctctgctcttccaacctgctgcagtctttcccgcctcttcttcctccctgcaatgtctgtccccagctctcccagcagcagcttcctcatctcttacgtcacctccacaggactccattcagtacccttgcaggagtca

SEQ ID NO: 185310 - DNA, 432 bp, Homo sapiens
agcagcaggtctatgtttgttgtttcaatctggaagctggtggattcttagaaaggaaaaaaagaaaatgcccctccctttgttttgcatactgtgcagaatttttgagattgtttattaagctcttctcagygcctgtagaaggcatctcactgcatccagatgcagatcccacaccttgcatgtgatttttccagcttccagacctttgacttattattcccttttgctcagatatattctccagatctttacagagctacctctttctcaaaattcaggactttctgcctatttcatctactcaaagagacccttcctagtctctctaaataaaacggccctcaaccactcacccatccagttactctgctaggttttcttcagagcacttgttcactactgtgactacctatgtctttatctttttcc

SEQ ID NO: 185311 - DNA, 566 bp, Homo sapiens
tgtttgtctcagcttcatcatttattaattgtgctcttggctgagtcatttgtcctctccatgctctccctcatggacgtggatgggatgaaaatgtccccttagtcccatttgcatgggtgtcatagagataacgtgatctttacacagaaaaattaaaagtatgatataagcgaaactgctggatttcacttcatttctctggctgcagaggccatcactttcttgtaagttaggtagtaaaatgcttgagattttttttaaaaattgggtcmctttagaatccttagaataaatctgcattaaaggacctctcaaaaaaatgctggttcttcattcaacctctgtcaccttagcccacccacatgtctctaaaattaccttcagctattctagtgatttattggaaagtaaggctaatggtaagcaattttcagtgaccacagggtgttataaaatgcaatttccttgaattcagcctgaccatgggaggtaacacaaaattgtgctgatttgttcagaggcatattttgagtaacttgaaacttcagcccgagttgtgctag

SEQ ID NO: 185312 - DNA, 632 bp, Homo sapiens
aaacctgtgtttcaaattggactgagttggtcttataaaaaacccctagggagcttgttaaaattataaattcttgagttgcacaattgaaaacctgaatttattaaacctggccagtggcccaggaatctatttgtaacatatttcttcagggattctgaaaggaagttggttttagggctcctggcaggcatcctgtgagtttatgtgggaatataccactggtgggtcactattgtatattattctatttatacagtaacatcccagaataataactggagttacttctragatatggaactaggggtgctttttgccttatttttcacatctgtcttgatttcaggttaataataagcaatggctagttcataatcagaaaagtgtatattatatataataatgtggctagagtctacaaagaaacagaaaacctaaaatatagtaaacaaaatgatgtttagcatactttcaaacacaggctcaatatagatggtatgaaatggttatttggtgtgggaaatatattttttaaattcatgttatgagcctgtttactaaaacatatatgctgagaaatataagatccttaatcgaatgttactgattcctgaggaaaagtacctgcc

SEQ ID NO: 185313 - DNA, 530 bp, Homo sapiens
ttccgtcatgattgaaagtttcctgaggactcccagccttgtttcttgtacagcctgtgaaaccatgagccaattaaacctcttttctttataaattgtttataaattttaaaatacccagtctcagatatttatagcagtgcaaaaacagacaaatatagataactaggctttgatttacactaccatctgctctggggcaactttgagctagtgattaggagaggccatttatacttttaggtaagaacatattagggatgttgcatggggtatgttactaaactggaataaaagaagataatagtaaaggacataaactctatcacattaaaaacaaagaggcagcagaatttccacgtcatcttgtcatgcttaaaaacaaagcaatgtaacagctgggtaaatatgtataataaccatgactccaaatttgtatgtttacaagagttaatagaaatggtagagaaaaaagcaagcttcctctaccttcccaaaaaragaaaggacataaatgcaatttgcaggag

SEQ ID NO: 185314 - DNA, 523 bp, Homo sapiens
atgaaatcgtgttctttgcagcaacatggtggcaggtgaaggccattatcctaagcaaattaaagcagaaacagaaaaccaaatastgcatgttctcacctacaagtgagagctaaacattgggcacatctgggcataaagatgataacaaaagaaactgtggactagtagagtgggaaggcggggagggaacaggttgaaaaactaactattgggtactatgctcagtacctgagtgatgaaatcatttatattccaaacttcagcatcatacaactgcacatgtactccctgaatctaaataagagtttaaaaaaattaataaagtagtcaaaaaataaaaaatgaaataaaaataaataaaataaaaaacaaaagcaacaaaatagacagaagttagacaaagaacagacaatgattttcacaaagaggctgtctcaggaaaacatgttatggtatttttcatgttcttctatgtatcctctgcatttttttttgttataatgaatacttattgtgaaac

SEQ ID NO: 185315 - DNA, 615 bp, Homo sapiens
  misc_feature (1)...(615): n = A,T,C or G
catgaaacnnttaatgttaaaagtcagggtgattgttccctttgtattgaagagttgggtagtgattgagcagagcataaagggaatgtctggagtgctttaccttgtttgtggtaggtgacatttctaagatggttttagtttgtgataattcttcaagttgtagactcttaatttgtttatgagaagatgtttttccataaatgccttttactttgctagaaagtttattaagtactcattcattaataaaatttagacattttctgattcatatgctagtgaataattgagcnacatctgtgtatatttgagagaaatcgttatcatcacttaaaataatttggcatgcaaatagaattggattcaarcttaattcacatgatcagtgaatttctactaagagcgttcataagacatttgtgtaataaaattagaaggtattaaaataatggtaacaatctcaagtgtatctattgtttgtgtgagtttttaacatttctttcacccaataagacatttggaaaatgcacctatgttgttttatgtgtcagtacttttatcatttttattaccgagtattccattatatgaatatattgatttatccttttg

SEQ ID NO: 185316 - DNA, 581 bp, Homo sapiens
ggtaactggagggactaccagacaatgaccagccatatgtttatactgtaatgtaagttttctgcatggggagccataatagctttgaatagcagcacattcttcttagattgggaagctaaactttccctgtaataactagaatactaattaattcttgttgacaatataagccaaactaaaggaaaacttgtttttactttagttatagacaaatacaaacagacaaaggtttttttggtcctctgtgtttagaacattgctaggaatttttcaggcaacagcaggggatatttccaagtgcaatcagaagagaatgattagaaaatcaaacctgaaattctcttatctcagtgcttaatgaggcgagggaagttggtattttgtaatgaaaccctctaggttttttttttctcttctctctrtaggggcagaggaaaagcttcccctttgcttcagaaggtccaatgaaaaatcaactcacaaaagcagattaataggaaaaaaagcatacacatgtatttgatgatagtttttcatgacacaggagccttcagaatgaagaacccaataccccaata

SEQ ID NO: 185317 - DNA, 614 bp, Homo sapiens
gagaacctggtcaaaacataggattagcattcaggaaagaagctcagaatttattggggctttatgatcttgccagagaaattttagcgagcacartggtggggtatagtaggaagggaagaaagtgagcaagagaaaaagagagaagagaggaatttgtagtatgttaaaagcacacagtgagttgtggagatgatattggtaaagcagtgtttcccaaactttcctatgcataaaattcaactgcacccaggtgaaaatacatttctccagttttcatcccaggtatgatccccagaacaagaaatttgaacttttaacaaccaccgtgggtgacttttttgatgaggcaaatatgagaggggtgcattcttagagggtcctcagagggtgtgtgtgtgtgtatttatgtgcatagatgctagtacttagctgttaaacaaagataatggacatggagaatttgggttctaacagtttcttggagctccatggatctttggaccacacagacttacctgtggcttgaatggttaattgtctgataagtgtgtcccttaggtgttcctttcggtgtttaaagctggcatctgtggttgttgtatcagcaatca

SEQ ID NO: 185318 - DNA, 614 bp, Homo sapiens
gagaacctggtcaaaacataggattagcattcaggaaagaagctcagaatttattggggctttatgatcttgccagagaaattttagcgagcacagtggtggggtatagtaggaagggaagaaagtgagcaagagaaaaagagagaagagaggaatttgtwgtatgttaaaagcacacagtgagttgtggagatgatattggtaaagcagtgtttcccaaactttcctatgcataaaattcaactgcacccaggtgaaaatacatttctccagttttcatcccaggtatgatccccagaacaagaaatttgaacttttaacaaccaccgtgggtgacttttttgatgaggcaaatatgagaggggtgcattcttagagggtcctcagagggtgtgtgtgtgtgtatttatgtgcatagatgctagtacttagctgttaaacaaagataatggacatggagaatttgggttctaacagtttcttggagctccatggatctttggaccacacagacttacctgtggcttgaatggttaattgtctgataagtgtgtcccttaggtgttcctttcggtgtttaaagctggcatctgtggttgttgtatcagcaatca

SEQ ID NO: 185319 - DNA, 468 bp, Homo sapiens
tccttacttcaaaatgcggacttagttgctccttcatccatgttcctactgcagcttgttcatcccttcatcatagcttgtacaatgtcattttttcataggtcaggttttctcctgagtgcctgtctccccagctggtccacattactgttattgtttcagtcttgtgactcagtmccggatcatggaatgagagcagaagagaggtctccatcttccagatcgctttcttcttgtccacaggctgggtcatggcatgatggtgaaatgctatcttcatccactggtgtggccaaagccaagggcatatcctagaggatgctcagtccctgatttaatcacccatctgccctgggcagtgcatagaaccccttgagttagaacagctgggtttgtgccacaagcaacataaattatagactacttcacttttcttcatgagcttcgctaatcgttactataagtcag

SEQ ID NO: 185320 - DNA, 481 bp, Homo sapiens
aatatcaaggatgagtaataaaagggaatcttcatctctatattccttctttaactttatattcaagatcttcttcagatttctttttctttgtattttttctcctccctacctttggacatttatcatgttgtctctgtaatgcccttaaatgtttaaaaaaaaaaatccatggtgagagggaaggggctgtgaagctctttaaaataacccactctttcattttgcaatttgcaaaacataaggacatctatttgaaatacaacacttctgcgtctttcaatttattaratcttgcctctggcctgtaacaaaagtcgaagacactggagaaaccatgaaagacccctccactgtaaagtcaataaaattgttccagagcagggaattatgtgtcaaggcaagctggcggtggcatctgctgctgtattgactgtccgcatttgctcaaatgctctggccagctgaacagtctctcctt

SEQ ID NO: 185321 - DNA, 557 bp, Homo sapiens
ctaaaagacacttatttccatttttaaaagatttatttgagaaacataaaaacacaacggaacagttcataggcccctttacacaataaaataggcactaataacatatttttgcaagcataaatactcaggtatactaacaaccattgcatgggtataataggaacagagaaaatgtattcatgaagaaatagattaaaaagcaaaatggataaacacrtatcactatggttggtaatcaggtgcacccagattcataactgcggtcatctgaaataccagacaacctgaatcttctgacaagatcgatcaaaaactgcaatgggtcactaccgtttgcacaaaaactgcaatagagtcacccaaagagccaagatcttgagaaattttatctttcacaaatacagatgaacaaaacggacatctcttcatttactgagcaagtttcaacatttttatgtacatgcacaatgcttacacattacgtcacattgtgataatgcactttcatggagtcaaatatgcaaaaaaaaagtgcataaaatgaattagaattc

SEQ ID NO: 185322 - DNA, 606 bp, Homo sapiens
atagctcacagttgtttctcttatgattggtgatgttaggatctttttatatgcttgttggccatttgaatattttatttaaagaaatgtgtattcaaatcccttgcccattttttaattgggttatttgttattttgttgttgctgagttgtagaagttgcttagatattctgaatattaactcctttttatatattatttgaaaatattttctcttctcatttaggttgttttttcaatgtttattgtttcctttgatatgcaaatgattatgtatttgataaagttccttttttctattttgacttttgttaactgtccatttagtatcatatccaagaatacattgacaaatccaattctctgaagctttctccctctgtttgtttctaggagtttcataattttaggtcttacatttatatatttaatatattttgagttaacattgtagttgatgcaaacaaaataagggcctaacttcattcttttacatgtagatattcagttttctcaayaccatttattggagaggctctcctttttctgctgtgcagtctcagcacccttgtctatatattatttgtgcaagcatttatttctag

SEQ ID NO: 185323 - DNA, 537 bp, Homo sapiens
tttttaggaggaaggctacagagttagagtgacattttcttcacaacatatcaargggatataccgtcacgatgactttcacttttgaaattaaccttaatcacctatctgggtcatatttgtcagatttctctgtaataaagttattattttattcctcttttcctacattgtactttttggaaaaagtcattctgtataacagcctacatgtaaaaaatgaatagtggtatgccacctcttcacaggttagatggtgtacataaattattttcaattattgtgcataaggcatttgtatcttgttcctatatatttatcattcaagcctgtgtttatgtcaatatggactttaggatattgatactttgggttataatctaaaaccattttggtgctcaaattgtttcagctttggccattggaagctctttcagttggctttcagttgtgcccctttcagatatgtccatcaatatgacttgttttattttgcttgttttatggtactttcttattttttggcattatgaagta

SEQ ID NO: 185324 - DNA, 537 bp, Homo sapiens
tttttaggaggaaggctacagagttagagtgacattttcttcacaacatatcaaagggatataccgtcaygatgactttcacttttgaaattaaccttaatcacctatctgggtcatatttgtcagatttctctgtaataaagttattattttattcctcttttcctacattgtactttttggaaaaagtcattctgtataacagcctacatgtaaaaaatgaatagtggtatgccacctcttcacaggttagatggtgtacataaattattttcaattattgtgcataaggcatttgtatcttgttcctatatatttatcattcaagcctgtgtttatgtcaatatggactttaggatattgatactttgggttataatctaaaaccattttggtgctcaaattgtttcagctttggccattggaagctctttcagttggctttcagttgtgcccctttcagatatgtccatcaatatgacttgttttattttgcttgttttatggtactttcttattttttggcattatgaagta

SEQ ID NO: 185325 - DNA, 537 bp, Homo sapiens
ttgtgtcttagtcttgttttggtatcagggtaatatgggccaagtagaatgagactggaaatatttctttctcttcaattttttgaaaagtttgggtggaactgctattagttcttctttaaatgtctagtagaaatcagaagtgaagccttcagatcctgggcttttctttgatggaagactttttattactgcttctgtatcactacttgttatgggtttatcaaggttttccatttcttcatggatcaatatctgtaggttatatgtgtccagaaatgtacacaattcctctaagtgttccaattagttggtgtattatgatcaaatgcttctaataatctgtagtgattctttgtatgtctgtttttatatcttctttttcaactcagatgttatttttttgggtccttcctttttttttagtctaactgaaggtttgttaawtttttttattttttcaaagaaaccatatttgttttgcttatcttctggaatttgtagtctcacttttatttatttttgctttgatcattt

SEQ ID NO: 185326 - DNA, 617 bp, Homo sapiens
tgctaaatctgtcctattactaataaatatgtgttaaaatttctaactacagtagtagatttatttattttttattgaagttctgtcagttttttcctcacatattttgacactgttagtcacataaacaataaagattgttatatatttttgatatatatgaacaataaagattgttatatctttatatatgaggttcttctagaacctcttcattattatgtcatacccctctttatccccaataatttcagcctgaagtctgcttttctcaaattaattcagctattccagcttttttgttattaatgtcaacatagtatatctttattcctcttttactcttaatctatcagtgttttcaatttaaagtgaatttcttgtagtcaacatgtagtttagaatttttgctttttccactctgacagtgtcttctgtaggttattttaaagatacttttcttttattttgagtgatggctttggtgtttacaacatacatttacaactaatcgaaatccactttyaaataacattattctccaccaaagagagtgcagatacattataacagagtattcccaatttctcttctctatcttctatatcattgttgta

SEQ ID NO: 185327 - DNA, 551 bp, Homo sapiens
taaaataaaagggcaagagagaatggaagagaccataggcaaggaaagaaaaaaacatagccaaaaagtaaatatgatttttctttaatttttcaataaattagaaatgaaatctactgcagttgaggtagtctatggtgttaaggttgtggatttgagattattaatttttatgaaactgtgtaatgaagttcatgtgaataaaattataactgaaaaagggatatcttacaatttattcaattgtgaagttttactggagacagaaagcagggctgtatactttgcactagagctcatgcaactttgcaaataggaatgaagaaataagacaktgatagttacccagagtaaggaccaataagggggagggaagagacttcaatgataatatgaagcaattattaattagtatattataaatatcatatgtttttactaattttaatacccaagatgtttccaagagaagtcctcataaagtttaatacatttatatgcctgctctattttctagaatcacattaaacgatggtatgtgagcatgatta

SEQ ID NO: 185328 - DNA, 518 bp, Homo sapiens
gaattcccagaaacacctgacaggctctctaccattgctgctgcagcagtaccaacccttgctaccctcaggcgggggaacaaagaccctgatcacttgcacctcaagcacacttcagctgctagacagagaagatcccagtctctcctctctgtgagcccccaaccccctgctctttaccacttaggtctcctgacttgggcctgcagcatagctgcttcacccttggctgaacattcccattggcagtggctctgtgtctctctggggtggaagtcccataggcaattgacagcccgtatgccattgccatygtgatggtattgctcttgctgcccttggactggggaacagacaaggaccttggtcagtttgcatacctccagcatatcacagctaccctaaggagaagaggctagtttctcttccctgtgcacccctgacttcctgcttttcaccaggcaggacccctagcttgggcccatagtgcagtcaccctatccctaggtgaacattct

SEQ ID NO: 185329 - DNA, 507 bp, Homo sapiens
taccaacccttgctaccctcaggcgggggaacaaagaccctgatcacttgcacctcaagcacacttcagctgctagacagagaagatcccagtctctcctctctgtgagcccccaaccccctgctctttaccacttaggtctcctgacttgggcctgcagcatagctgcttcacccttggctgaacattcccattggcagtggctctgtgtctctctggggtggaagtcccataggcaattgacagcccgtatgccattgccatcgtgatggtattgctcttgctgcccttggactggggaacagacaaggaccttggtcagtttgcatacctccagcatatcacagctaccctaaggagaagaggctagtttctcttccctgtgcacccctgacttcctgcttttcaccaggcaggacccctagcttgggcccatagtgcagtcaccctatccctaggtgaacattctcattggcagtggccytgtgtttctctgggatggaattc

SEQ ID NO: 185330 - DNA, 403 bp, Homo sapiens
accataaaacagcatttaactagcatttgtgtgctgtttatttgtagaatattaatcttcataaactattctgctgtataaatggccattagattattcctcactgccccaatataaatgaaatgcacattcaaatatgagtatattacaatggtttaccaaggacccatgtaaaaatgtgtggcataatgtagcaataataagatagattacaaagcaagatgatagtaattgaatcctgaaagagaaaaatctgttaaaaaaaaaggggggggctttcttgagatgactatgaccttcagatgacagamagtgccagcctggtgatcttgcaaagacaggagtaaatatgatgaccttatcctttaatcttctgcctgtaggtccaactctatgagaattc

SEQ ID NO: 185331 - DNA, 454 bp, Homo sapiens
ctgatataactttttcaagcctttcaagacataaggagttttaaatttagagacagtaaagaaagyagacaaaaggagagataaaatatgtaataaattgtcatttgggaaaatcatttcagaatttagagactactaaattcaatatccttcaatgtagaaaggctgtctgaagtacagctgtcaaataaatatgcagattcttcagaattttctcagcaatagggaatatagagttttctaaagtgtacttttctttcatttgtcttggatattttcaacaattaaaatgattattgttcaaaaatgaactgtgtgtctatacactggcaataaaaaatcaagaagaaaaagaaattaagagagtaatttcatttataacttcctatagaataataaaataggaataaatttaaccaaggatattagagactctgacaactacaaaacattg

SEQ ID NO: 185332 - DNA, 469 bp, Homo sapiens
taatcatatatagtttgatttctttgactagcacttaaaatttttattttcattgccttttggcctgcataatttctgatctaagacatgatcttcttgacgactgtasctaatgccccacatacggtgaaatctcttcatctggtaagaaagcaacttatttccagcctgtatgaactctgaaaattgttctgcctatatatttttgccattgccaagatttctgtctctgtaaatcatgtaaaaactgtattataatatttgattccaattatacaaaagcatggcatttgacccacttctttctttgaaaattattttattctctacttccttcttcatattttcttctctgtgtctatgatgctctctgggtacttctctctctttctcttcttatctccctgtatccttttctctctgtctccctgtctccgaacaaatattttcttagacaagcctctttatc

SEQ ID NO: 185333 - DNA, 510 bp, Homo sapiens
ggaattttgctcatatgaaggagcacatgatgtaatcccagcactttgggaggccgaggcgggaagatcatgaggtcaggagtttgagatgaatctggccaacacagtgaaaccccaactctattaaaaagacaaaaattacctgggcatggtggagggcgcctgtaatcctggctactcgggaggctgaggcaggagaatcgcttgagcccgggaagcagaggttgctgtgagccgagatcacgtcactgcactccagcctgggagacagagctagactccgccaaaaaaaaaaaaaaaaaaaaaaaaaagaaagaaagagaaaaagaaaaagcgcatgaaaaccctagaccactgtcattattactctctaagattaactttaatagkcaattacaaatggttgaaactctagagagaaaatatgtttccattaatagtgcaattatattttgaaagtaaatatggtgttaggaagatcacaacaaggattcaaaaacagaagctatt

SEQ ID NO: 185334 - DNA, 606 bp, Homo sapiens
aattgctgtggcattacctggtatcttctctaggaccactcagcttgcattatagataattcaataaaatgaatacagtaagtttgtttaataagctgaaaagaaagaagctaattattgttgttattttgcaacgactatttttacaatatttctgtcaratcttatcttgccactcttgattgcaatcctagaaatatccttcagtgtctcttgtcactttcaattcttcacaatgtcatttttcagacaataacagaatctgatcctgttaatgttaaagcattgatttactttccaattatatgtctttgctctccagctcagtcctaatctgatgaaaatctttagggaggaagaagaatatagcatgtttaatttcttctctttttcagccattgcttgacatattcactaccctttgttcttttctttcacatcaaggttcagagaatctaaaacctttctcattttcttgaagaatcctaagatttattgagatgggcgactttcttatctatcactttaaatttcagcttccataaagttttgatcatgttgttttatcaacttgactcctattctttataaccacgctttactttc

SEQ ID NO: 185335 - DNA, 606 bp, Homo sapiens
aattgctgtggcattacctggtatcttctctaggaccactcagcttgcattatagataattcaataaaatgaatacagtaagtttgtttaataagctgaaaagaaagaagctaattattgttgttattttgcaacgactatttttacaatatttctgtcagatcttatcttgccactcttgattgcaatcctagaaatatccttcagtgtctcttgtcactttcaattcttcacaatgtcatttttcagacaataacagaatctgatcctgttaatgttaaagcattgatttactttccaattatatgtctttgctctccagctcagtcctaatctgatgaaaatctttagggaggaagaagaatatagcatgtttaatttcttctctttttcagccattgcytgacatattcactaccctttgttcttttctttcacatcaaggttcagagaatctaaaacctttctcattttcttgaagaatcctaagatttattgagatgggcgactttcttatctatcactttaaatttcagcttccataaagttttgatcatgttgttttatcaacttgactcctattctttataaccacgctttactttc

SEQ ID NO: 185336 - DNA, 606 bp, Homo sapiens
aattgctgtggcattacctggtatcttctctaggaccactcagcttgcattatagataattcaataaaatgaatacagtaagtttgtttaataagctgaaaagaaagaagctaattattgttgttattttgcaacgactatttttacaatatttctgtcagatcttatcttgccactcttgattgcaatcctagaaatatccttcagtgtctcttgtcactttcaattcttcacaatgtcatttttcagacaataacagaatctgatcctgttaatgttaaagcattgatttactttccaattatatgtctttgctctccagctcagtcctaatctgatgaaaatctttagggaggaagaagaatatagcatgtttaatttcttctctttttcagccattgcttgacatattcactaccctttgttcttttctttcacatcaaggttcagagaatctaaarcctttctcattttcttgaagaatcctaagatttattgagatgggcgactttcttatctatcactttaaatttcagcttccataaagttttgatcatgttgttttatcaacttgactcctattctttataaccacgctttactttc

SEQ ID NO: 185337 - DNA, 451 bp, Homo sapiens
aaaagaattcttgttaatatttggtggagttaatgaaagcactacagctggttggactatttgagacctctattggacacagtgtgtaagattactctcagaatcactaatttcagacaaaggaaaaaagtttaaagaagtaagtcaagattgacattttggtatcccaaatacttagtaatttaaactttaatgctctctattttaaactgtattatacaaagagaatgttggcaactaatcagtaacaatgcatttgcatcaacctatactacttttacttgtaaacccaatgaaattttgggccattaaaggatatatatgaggagcccatacagagatctcaagtattatattggcaaatattaatatcaaataaaaatttattgaaatatatagcatggttatggttatattaattataaaatrtgatggttaaacagctttcaag

SEQ ID NO: 185338 - DNA, 585 bp, Homo sapiens
gtaaaatggagaattgtggacactgggattctgactgaagccatggaaacggcagacatttttaagggagaataatgccaagattccagatctgggaaaatcttatgttaaagcatcctgtaaaggagataaggcattcataagaracagatagaaacatctacaggatttggaagaagtccaagaaaatgttattaaggccaaataaacaggtatatccacattaaaaattaatgagatcttaatataaagaccaaataataataccttttgcaatgaacttacgaagaaacctatttatcttccaaataaaattctagacagaaatgcacaaacataattaaaaaattaatccctggatactgagaatgagggtgatgtttttcttcttttcagttttccatatttaatgtttatatatcaattatgtgataaatctggaattatttcttccataactgtttagatatgatctttttttacttttccctgtatagaagaggtattttaacagtatctactaaagtaaagccaatgaaaatgattagtgttttcaagcagttaccaaggaattgctcattttaa

SEQ ID NO: 185339 - DNA, 511 bp, Homo sapiens
tgagaatgagggtgatgtttttcttcttttcagttttccatatttaatgtttatatatcaattatgtgataaatctggaattatttcttccataactgtttagatatgatctttttttacttttccctgtatagaagaggtattttaacagtatctactaaagtaaagccaatgaaaatgattagtgttttcaagcagttaccaaggaattgctcattttaaacaagttctaggcaaataagtgaagataaaaaatgaaatcagcatatttgaatattcataaatgtttattaaatgagaacaacaaaaagggaatttttttaaagaaaaagtaaaatatttttrtattaaggaaaagacaaagtatgcaaaatacaaaagaactgttttttaaaagaggaatttttagatatacaatccttataaatccaactacattattaaaattaccaaaaataagcatagaaaataaaggtattattgacccttaatattataaaattacagaagg

SEQ ID NO: 185340 - DNA, 603 bp, Homo sapiens
ttataagcgttacagaagcaaaattatctttatattcatttgaatccattcttaaatttcaaattaatatggcataaaaattttgtacatgtagaataaacttaatctctattcatgtatttggttttagcaaatgtaaaagagtgcrtatgtgtgaattatttgtgtattctatagaataaattcaaatgtgtgttataaaaatatccagacaggctgggcatggtggctcatgcctgtaatcccagcactttgggcggccgaggtgggcagatcacctgaggtcagaagttcgaggccagcctaaccaacatggagaaaccccgtctctactaaaaatacaaaattagctgggcatggtggcgcatgtcttaatcccaggtattcgggaggctgagacaggagaatcgcttgaacccaggaggcagaggttgaggtaagccaagatcgtgccactgcactccatcctgggcaacaagagtgaaactctgtctctctctctctctctctctctcgatctctctctctttctctctctctatatatgtgtgtgtgtgtgtgtgtttgtgtatatatatatctccagccaacataattaaaaat

SEQ ID NO: 185341 - DNA, 578 bp, Homo sapiens
ttcccccacagtatagggtggtagattctcaatggagggtcttaagaccagcaattagaaaggcagggtaacattaaagtcttgccttggggcagatgaatgtcagaggagggtcggagaaggtcacaggagggcagaacaaggtcagaggcccattctgaggctaacacacccaacattatagcaaaagactggtatatatagcaaaagggctttggtagttataagccagaaaccatagatgaaaatcaatatatatcataacaccacagaaatatcatccccactgatctrgacctgtgtattatcacctttctgccttgagtgagagtgagatctgtgtttgtttctagcaaacagtgtggcaagggaaatgggatttcactttcttgacaatgtttcattacataagtctccatattaaccaagtgtattagtccatttcacactgcttttaagaaataaccaagactgggtaatttatgaaggaaataagtttaattgtcttacagttcagcatgtctggggaggcctcaggaaacttacaatcatggtggaaagtgaaggggagcaagctt

SEQ ID NO: 185342 - DNA, 422 bp, Homo sapiens
cacacagcagtgaatcagctacatgcaggccatggggacatgttggcattttcttaatattaacaaagcatcgggaaacaaagaagcctcattaatttggattttgctaacatagaatttgtagtgttaaggggatgtgataaaatgtagctttacactctatgcagaatgcactatgcaaattcatagcayaaataatctacctaagaaaatcaactgctttcaagtaccctcaagtacttttgaagcactgattacataaaaacagtgattaattttcttcattaacaagtgaccaagtatgttctctataaacatatcatcagtctattgttggttaacttatttcaaattataaatatatctgtaagtaacaggaccaattttcttcaaaaatattcttttttttcttcaaatgcaac

SEQ ID NO: 185343 - DNA, 563 bp, Homo sapiens
caacttctttaaattaccttaattttatcccagtcatttagggtggataacttggattcctaattgatatcactcttcctatccagtaatgcagcaatcaagatttcttcacatgttttgtgggttcaattctttctatttccaaaacttctgccatatttaaagcacttattatttcacaccttaattaagaaataatctgctgattctgggccagtctttttaccaacccataatggattagttattattttattatttcccttctcaaattaagaaagctaacctcctagagacctccccagagaactctgacccacgatgtggaatctactccatatgctgatgtgtgtgtgtgtgtgtgtgtgtgtgtgtgtgtgtgtgtgtgtgtgtgtataargctctggctgttgccaactgtgtaactcttggtaggttacttaacttctctgagcctcaggctctttgtctaaaaaatggggataagtccagtagaaagtgggcaaagaacgtggatagacaattcatagaatacaaatgaaaagtgtatatatagatatata

SEQ ID NO: 185344 - DNA, 598 bp, Homo sapiens
ggagaaaattttcgcaacctactcatctgacaaagggctaatatccagaatctacaatgaactcaaacaaatttacaagaaaaaaacaaacaaccccatcaaaaagtgggcgaaggagatgaagtttttttcccaagctcctgtggtctgaaaaaagacatgcttctaagaaaatgtgtttgtgtgtgggatgggtgtttgtgtgcgtgttcacaagcttgaaattcaacaaacatgggaaagcaattgttgtaggccataagaaaaaaataggcaatttttattaaaaagtgatgctggaaatagatttaattgattagatttgaaatacattttgtggctgagtatgacctctggtgttaatctagggaaattctctcacttatatgctttaatggaacaaaaagaaggaaatttaattttctgaaagcttatcactggaagtcatagcccttgatctgcgtctttttttttcccccaatgtttcttcatttccttcctctctccttctctctgtactcacaartataaataagtatctactatgtgcaaactactatccacgtggaagaatattgcctttgttgcttcatttaac

SEQ ID NO: 185345 - DNA, 583 bp, Homo sapiens
cttcttttttaacttttattataggtttgagggtacatgtaaaggtgtgttacataggtaaactcatgtcacagaaggtattgtacagattatttcatcacccaggtattaagcccaatacccaatagttatcttttctgctcctgtcctcttcccactctccccgtcaagtagactccagtgtcttttgtttccttctttgtgttcataagtkcttatcatttagctcctgctaataagtgagagcatgcagtatttggttttctgtttctgcattagtttgctaaaaataaaatgcctatgcttcttttaagtgaatccatgctcctcctggaaaaagaggaaccccggtttacattacaggtacctaatttcaaagctaccataaacagtaaagctcctcagtaggaaactgcaaagcacagtggttaagagcatcgtctctggagtcacatttccggagtttaaacctgtgttagttactacccagctgtgaaacttcaataaagttgcttgatgtctctgtgccagtgttttctcatctataaattagaaataataagagtgtactcatttcattttg

SEQ ID NO: 185346 - DNA, 583 bp, Homo sapiens
cttcttttttaacttttattataggtttgagggtacatgtaaaggtgtgttacataggtaaactcatgtcacagaaggtattgtacagattatttcatcacccaggtattaagcccaatacccaatagttatcttttctgctcctgtcctcttcccactctccccgtcaagtagactccagtgtcttttgtttccttctttgtgttcataagtgcttatcatttagctcctgctaataagtgagagcatgcagtatttggttttctgtttctgcattagtttgctaaaaataaaatgcctatgcttcttttaagtgaatccatgctcctcctggaaaaagaggaaccccrgtttacattacaggtacctaatttcaaagctaccataaacagtaaagctcctcagtaggaaactgcaaagcacagtggttaagagcatcgtctctggagtcacatttccggagtttaaacctgtgttagttactacccagctgtgaaacttcaataaagttgcttgatgtctctgtgccagtgttttctcatctataaattagaaataataagagtgtactcatttcattttg

SEQ ID NO: 185347 - DNA, 583 bp, Homo sapiens
cttcttttttaacttttattataggtttgagggtacatgtaaaggtgtgttacataggtaaactcatgtcacagaaggtattgtacagattatttcatcacccaggtattaagcccaatacccaatagttatcttttctgctcctgtcctcttcccactctccccgtcaagtagactccagtgtcttttgtttccttctttgtgttcataagtgcttatcatttagctcctgctaataagtgagagcatgcagtatttggttttctgtttctgcattagtttgctaaaaataaaatgcctatgcttcttttaagtgaatccatgctcctcctggaaaaagaggaaccccggtttacattacaggtacctaatttcaaagctaccataaacartaaagctcctcagtaggaaactgcaaagcacagtggttaagagcatcgtctctggagtcacatttccggagtttaaacctgtgttagttactacccagctgtgaaacttcaataaagttgcttgatgtctctgtgccagtgttttctcatctataaattagaaataataagagtgtactcatttcattttg

SEQ ID NO: 185348 - DNA, 374 bp, Homo sapiens
ttgaatgaatcgtctgagaccaatataatttaaatttttcaagayttctctaatttatatacagtaacaaattaatacctttaacaatttggggaatatacttctcatttctacaaaaataagctccaggatagtgcgttactctgaagttccaatcattttatattattccatcaaagaaataatgtcttgattagttaattctatagttggacaatcataaaatttagtgaggaaggaagataaccttgccataccaataaagttgaaggagcaattattttccttttgatgccaattggagctctaggaatagaaggaatgctaactccaaattaaattttgtgagtatgaaaaaagtaaaattgcacgca

SEQ ID NO: 185349 - DNA, 381 bp, Homo sapiens
attttttttagtagagatggggtttctccatgttggtcaggatggcctcgaactcccaacctcaggtgatctgcctgccttggcctcccaaagtgctgggattacaggcgtaagccaccrcgcccagccaaatttccctcttttctaatgttgattttactcaatcatgaacatgtttatgccaccaaagtatattcatatatatgaaaaagtataagacagggattttgatttaaaattcagtctttcaaaatcttttcttggtctgattcagtcacaatttagtttttaactttactaaaagcagtaagcttctcacacctactcttcccactctcatcccacttgtcagatgaaatcatcatgcatcgattttgtaaa

SEQ ID NO: 185350 - DNA, 381 bp, Homo sapiens
attttttttagtagagatggggtttctccatgttggtcaggatggcctcgaactcccaacctcaggtgatctgcctgccttggcctcccaaagtgctgggattacaggcgtaagccaccacgcccagccaaatttccctcttttctaatgttgattttactcaatcatgaacatgtttatgccmccaaagtatattcatatatatgaaaaagtataagacagggattttgatttaaaattcagtctttcaaaatcttttcttggtctgattcagtcacaatttagtttttaactttactaaaagcagtaagcttctcacacctactcttcccactctcatcccacttgtcagatgaaatcatcatgcatcgattttgtaaa

SEQ ID NO: 185351 - DNA, 492 bp, Homo sapiens
cctggcttccctatattgtgtgttgcacagagtattaaatgtgaaaagcaaataagataatgttgaatcttagctacttagtgcaaaccttccagtgatttccccaagtttaaacaaaacctgaagtmttttccattccccacaatggtctattttacgcaatttggcctccacttccttacagcccttctctctcaccagaaggctgtagtcactctcctcctcttgctcctctgcaagtattcaggatcttctcaccttagggtttttgccatttgctaatcacctggctggtagtttttatcctgcagatatgcacgtcattgtcttcctcagtcattttagattcctttttctaaagaatgtcttctcctaccacactacgcaaaaccaatctctccctctttctgcttatcacccacacattattaacacaagcatgcgtgttcaatcacactcatacacatacacaaactcactcacaaatagctc

SEQ ID NO: 185352 - DNA, 586 bp, Homo sapiens
aagagtgtgatgtgcacagagttgtccctctgtttgaaattccttccctcttggctggctgtttctctgaccatccaatttgaagcagccccctaatccctgtctgccatattgctcttctattattatttgccaagtatgtatttttttgtttgtgatttcttctcttttccatgttttattttcaatctatttttctatttagaatgaaggccattaggarcaaagacatttctttttacaaggtaccccagagcctagtacagagcctgatatgttgtagatgcttggtaaataattgtggatccccaagaggtattggcaaaatttttattattcattctgatgagataagacccagtttgggattaaatgtctaaccactataaaatccccttttttgaaatggaaataagatctcaagcttaaagtcttcagcagcaaatgtgtctagtaagaatttaataaagttattttctttccatgtatttatttgtacagttatcttccatgccatgagaaagtttgcataacaataatacaatgtttcctcttaaatacatttgtttagatacacatgagttat

SEQ ID NO: 185353 - DNA, 349 bp, Homo sapiens
tcttgtaacaatttttgggcagaagtgacagtaattttattgacctaaatgatagtttctcatgaatgtaattctcatatattcattcaaaaggtatgccttcaagtcttcacatttaaatgctgaaatcctatttatgttttagaatgacaactcggaggcaaacaagtaattgaagaaaaaatgaaacaaaaaatcaatttacaacatgcctgaagaatgttaaaaaycaatttaacaaaaagggacctcctagcttaaaaatttctagttgtataggtcaaaataaccaagaattagcaatttcaatgtaataatgataataatcataaataacaaaagagaaaaa

SEQ ID NO: 185354 - DNA, 241 bp, Homo sapiens
gctcagcataagggcaggggcttaataaatgctggttcctttcctccctttcttcctttgcatcayataacatcctatgccttttgtttaggtgctaaccaaaaccgccttttctctcttactagactgttcaaactctgagaacaaggacacccatttttcttcctctgaatttttcctgctgctgtcactatacttttcatgtggtaggcactcaatacatgtttgttaatttcttatg

SEQ ID NO: 185355 - DNA, 525 bp, Homo sapiens
tatttacgcattcttgttgaataaacaaaactcttaactcatcttcttaattacctgctgtggaccaggccatgttctgtgttacagcagtgagcagcaaagaaaaggtccccgccttcatagactttatattttgtgaatgattaccatatgacaggtactgtacaaagtacacacattgtctctttttctcttggcactctccctttgagactggtcctagggtttttccctttttctttctttttttttttgagwtggagtcttgctctgttgcccaggctgaagtgcagtggtgcgatcttagctcactgcaacctccacctcctgggttcaagcaattcttctgcctcagcctcccgagtagctgggattacaggcacacgccaccatgccaggctaatttttgtatatttttttagtagaaactgggtttcaccatgttggccagtctggtctcaaactcctgaccctgtgatcttcccacctcagccttccaaagtgctggattacaggtgtgagcca

SEQ ID NO: 185356 - DNA, 372 bp, Homo sapiens
tttgttaatttctttggaggtgccctgattctttgtaatctttgagtttttgcattggtctcctcatttgtggagacagccacgtcttccaggtgttctttggcagggacagaatttcactgtttagtgatcactgggagatcactgcttgtgattctgtatgggctggtaatgactccaagcaggtagagcttgctttctgttactctgtatggctgggctgctamctttgcattgattttggagaggggattgtgctggctgggctctgctgttagataaaaccactggctgagctctgcaatcaggcagagctgcaggctaggcactgcaattgtctccagttgggccaggctcagggtgtattccatg

SEQ ID NO: 185357 - DNA, 568 bp, Homo sapiens
gttaatagaagggattacccaatgtatagatagagtcatcccttgctgtcacaggatattggtttcaggacctttgtggatactgaaatctgcacataatcaagtcctgcagttgcttcttcagaacctgcacttataggaaaagtcagccctccacatacgaaggttttacatcctgtgaatactgtatttttaaaggtttttcttttagaggtaattgtaaaattttcccttactactagggaaaaaaatttccttcactactgaaggcaatagaaaataattaatacaataactaataagatacrgtcatacatatcatcctctttgaactacataatctcattcagcagcaagggcaggaattatctttattttacaggtgaggaaattaaaacttcttagtaggccgggtgctgtggctcacacctgtaattccagcactttcagaggccgaggcctcccaaatacagaatactgtatttaattgcagttgtagaacctatggacgtgaagggtaggctgcatttattggaaaaaaattcatgtgtaagtggacccatgcagt

SEQ ID NO: 185358 - DNA, 568 bp, Homo sapiens
gttaatagaagggattacccaatgtatagatagagtcatcccttgctgtcacaggatattggtttcaggacctttgtggatactgaaatctgcacataatcaagtcctgcagttgcttcttcagaacctgcacttataggaaaagtcagccctccacatacgaaggttttacatcctgtgaatactgtatttttaaaggtttttcttttagaggtaattgtaaaattttcccttactactagggaaaaaaatttccttcactactgaaggcaatagaaaataattaatacaataactaataagatacaktcatacatatcatcctctttgaactacataatctcattcagcagcaagggcaggaattatctttattttacaggtgaggaaattaaaacttcttagtaggccgggtgctgtggctcacacctgtaattccagcactttcagaggccgaggcctcccaaatacagaatactgtatttaattgcagttgtagaacctatggacgtgaagggtaggctgcatttattggaaaaaaattcatgtgtaagtggacccatgcagt

SEQ ID NO: 185359 - DNA, 628 bp, Homo sapiens
ggttctgttaaatttcaccctgacaatgtacattattaacagcttatcttcacaggcatagggcaaaggacagaacaaaaagtcctctctctgctcaactgagacaaatscgtacctgactgcttcctatactctatgattattttatcttatgttaaaaacgcagattcacggaaccagaagaatgcataattgacttttccttagccggcttctttcacatgaaaaatgtggactcagtgaaaataatcaaaatactgaaaggaatgcaactgctcgccttacctaccctccctttttttctctcttcctctttcacctactgcctgctgttttccctataaataatgaagcccccagaccctgtgtggaaaaagcacagaccgcagatgtttcctgtgggtacgtgttcctttctcctgggcgtgtctttcacctcggcaaaatatacttctaaaaaggttgagacttgcctccatcattttcttggatttacgggtggtttccgacaattcattttcttccctgaagaagttgtattttctggtgtctttgtacgccttgtgatttttgttgtcgttgttgagaattaagaatttgaaaaaacagccacttctcctagtatttg

SEQ ID NO: 185360 - DNA, 628 bp, Homo sapiens
ggttctgttaaatttcaccctgacaatgtacattattaacagcttatcttcacaggcatagggcaaaggacagaacaaaaagtcctctctctgctcaactgagacaaatgcgtacctgactgcttcctatactctatgattattttatcttatgttaaaaacgcagattcacggaaccagaagaatgcataattgacttttccttagccggcttctttcacatgaaaaatgtggactcagtgaaaataatcaaaakactgaaaggaatgcaactgctcgccttacctaccctccctttttttctctcttcctctttcacctactgcctgctgttttccctataaataatgaagcccccagaccctgtgtggaaaaagcacagaccgcagatgtttcctgtgggtacgtgttcctttctcctgggcgtgtctttcacctcggcaaaatatacttctaaaaaggttgagacttgcctccatcattttcttggatttacgggtggtttccgacaattcattttcttccctgaagaagttgtattttctggtgtctttgtacgccttgtgatttttgttgtcgttgttgagaattaagaatttgaaaaaacagccacttctcctagtatttg

SEQ ID NO: 185361 - DNA, 469 bp, Homo sapiens
tcaggttttttctgagtatgcatctcgtctgagccttcatgtggctttaactatttccccataaacatggctccttttagacatcttaattttccaaaagtcttgttccagcttctttgtgtgcccttagagggtttattacatgcttccatttgaaatctcttgcccaggcatcttcagtctctgtagcctccctgcagtttttaagagcagttcctgctgctttccatagctttttctcagcctgcaatctgaattaaactgcttctcttattctgagctctgagttgaacaaagcaggactaatccttcaagccatccccagacaggttagactctgctcrctaacattagagggaaggaactgggagctgggctgccacctcctccaaaccaacactgctcagtgccagggaagggtgcagaaagggggagtacaaatccacaaaatctcctgcattttgaatgt

SEQ ID NO: 185362 - DNA, 469 bp, Homo sapiens
tcaggttttttctgagtatgcatctcgtctgagccttcatgtggctttaactatttccccataaacatggctccttttagacatcttaattttccaaaagtcttgttccagcttctttgtgtgcccttagagggtttattacatgcttccatttgaaatctcttgcccaggcatcttcagtctctgtagcctccctgcagtttttaagagcagttcctgctgctttccatagctttttctcagcctgcaatctgaattaaactgcttctcttattctgagctctgagttgaacaaagcaggactaatccttcaagccatccccagacaggttagactctgctcgctaacattagagggaargaactgggagctgggctgccacctcctccaaaccaacactgctcagtgccagggaagggtgcagaaagggggagtacaaatccacaaaatctcctgcattttgaatgt

SEQ ID NO: 185363 - DNA, 515 bp, Homo sapiens
tgttcaggtgggaagaaactggaaacaagaatagcctagaagagcagaggyccccttggctgcaggatgggtgtgaggaaaaacttccctctcttttctttttccatgtgaacagttctgagactcctttcataagctcctcagatgatcgcactggcgtggtgcacccacatgggggctcacacatagaagatcaacctctttcttgtctcagctccttgtcctgtacttctgccctctagggtccagttcccaaataaattacccaggcgcaagccttgccttagattacacacacacacacgcacgcgcacacacacaccacacacacacaggagattacacacacgcacgcacgcacacacacacacaggagattacatacacacacacacaggagattacacacacacatgcacgcgcacacacacacaggagattacacacatgcacgcacacacacacaggagattacacacacaggaaattacacgcacacacaggagattacacac

SEQ ID NO: 185364 - DNA, 603 bp, Homo sapiens
gtaaccaatcttcaaaagacgatttcaaggttctataacatagctgcttcaggatggcaatttccatgagcgtgggtccttggccacacttcattggttgtgaagtgagttccttgattagaagcaatgttgtgtggaatatcatgatggtggataaggcattctgtaattccataaatgacagttttgcctgaagtactgtattcagggaaacagatccctatccaaactaagtgtctattccattaagtataaaataccacccttttgttgacagaagcggtccaatgtaatctacctgccacgaggtatctgactgatcaccccagagaatgrcgccttattaggggctcagtgttggtctctccctgctcctggcagattacaaactcagtagtagctgtgaggaggtcagccatggtgagtggaagtccatgttgctgatcccatgcataacatccctccctgccaccatagccactttattcctgagctcattgggtgatgacagggatggctaaaaaaagaggctgactggtatgtacagagaaagttatcctactccatttattaaagttatcctatcacatttattaaaattgt

SEQ ID NO: 185365 - DNA, 447 bp, Homo sapiens
gttccaatcagtataatattatcaatgtattggaccagagtgatatcttgtgaaatggaaaggtaaccaaagtccctgtgaactaaatgatgacatagggctgcagagttgatacacccctgaggtaggacagtgaagatgtattgctagcctcaggagctaaatgcaaactgcttctggtggtctttatttgcagggatggacataaatacatttgccagatcaatagcagcataccaggtacctcaggatgtgttaatttccttaartagtgaaatcacatctgatacagaagctgcaattggagtcaacatctaattaagcttaaaataatccactgccattctccaagatctgtcttatgcactggccaaataggtgagttggagatgcagtgaaaattaatgcccctgcatttttgaagtccttgatggtggtgctaattat

SEQ ID NO: 185366 - DNA, 505 bp, Homo sapiens
agagtttctatttcagaaaagtaatcaacttcgaattgacaactgggcattcctagcctaaacaactgccttagccacctcaccaccacaaaccctcattcatccagtgaaagtaaataatccatctttaaacacaggtgacatttatattgacaaatgttgccattttccaattgagaaactgaggcccagagccatgaaatgattgaaagaaaaccacgaacttaaacggcagaattagttgcttcttcttcccagctcaatgccctctctgttgagcagcgggagcccagctctcctgaacacatgcaggtcaggcagatcgtctggcgggcactgtgggggcatcaggatgtgcaggtgtactaacatcagacaccaggacccgaggatgcctcatttgcaatgggtcagcctgaatcatatttgcaacatgtctatcacaggcttatcaagactttgtgaactgagcaaacamcagacagctcagcatgaagtaaagcat

SEQ ID NO: 185367 - DNA, 452 bp, Homo sapiens
attcaagacgacataagtccaatgttaagcatggactcatggagaaccaggacagcttccctgcccttcctaagttcttatagcttttktagttaaaagttccacattacatgatacatcctggaaaagataaaataaacgaaattaaatacatattggtatggtgacttctaaattgctaaagtagtttatgaccaatatttggtttgtcaaatccgtattcctgggaagacaatgaaagcttcagaaacattcagctacttgatgagccatttaaacatttatagaggaatttcattccattgtcattttcaatgcatgttttctggttgtataaaagctttcccattagcaagaaggctaatgctataacagtagattattatgccacagtctattttcaccaggtaaagaaagctttttatggttcacagactgaggacaatcaaccc

SEQ ID NO: 185368 - DNA, 452 bp, Homo sapiens
attcaagacgacataagtccaatgttaagcatggactcatggagaaccaggacagcttccctgcccttcctaagttcttatagcttttttagttaaaagttccacattacatgatacatcctggaaaagataaaataaacgaaattaaatacatattggtatggtgacttctaaattgctaaagtagtttatgaccaatrtttggtttgtcaaatccgtattcctgggaagacaatgaaagcttcagaaacattcagctacttgatgagccatttaaacatttatagaggaatttcattccattgtcattttcaatgcatgttttctggttgtataaaagctttcccattagcaagaaggctaatgctataacagtagattattatgccacagtctattttcaccaggtaaagaaagctttttatggttcacagactgaggacaatcaaccc

SEQ ID NO: 185369 - DNA, 566 bp, Homo sapiens
ctcaattccttccccctccattagatggtaccccatggctgctggggtattcccctttctccaggacacttaggctcttataaaacgtcatcacgttaggctctggttgaatagtttctcctgagggcagaccttgttaagaaaacagaatgctttgggatagtttaaaatgattccttttcacctcttcctgccagaagcatgagggagtttttctgtgatattcactgtgaggctctaataaagctccagaagttaaaactcacacaagggtggtgtcttagtccacttgtattgctataacagagtacctgagactgggtaaattatacataagagaaattaatttctcacagttctggaagctgggaagtccacagtcaaggtgccagcaggtttggttgcctgttgacgacctgggctctgcttttgagatggtgcctcaaataasacatcctccagagaggagaaacagcatgtcctcatatggtggaaagcagaagggcaagtgcactgaacactgcccgtagcctctttaataaaggcattaatctcattcacaggga

SEQ ID NO: 185370 - DNA, 463 bp, Homo sapiens
cagaggacagaaaacagacagtgggcaggggacatgtgtgagtggccctgaactcccatctctcctgctctgtgtacttagttcccctttctggatttggttttcctgccagtggaaagggagtgtttgggaagagaagatcacattcgagggtgagttaagtctcctttaagaatgattcctgctttgtcaggggctactactattagcaggcagagggaacagtsgcagaagagattggggtaaactccagtattaggcacagaggcagatcctggggtgggtgtgagtggagaagggatgagtagccctcctgtccttccctcagggaaattcttccttagtaaacaggacagttaccctttggtgagcatggtcgtatacgggaagattaagtctaggtgtgtatgatctggttgaatctttgtaacaatgaggttggttcatcatgatcatcctcatt

SEQ ID NO: 185371 - DNA, 554 bp, Homo sapiens
gacaataataataatgatagaaatgtactactttgatgcactgatgtattacagaaagaaaaaaaggcaaattttgtctttaaactctcagtttaaatcagtaaactagataccttttttttttttttttgagacaacatgtccctctattgcccaggccagagtgcaatggcatgatcataactcaatgcagccttgatctcctgggctcaggggattctcctgtgtcagcctccccagtagctgggattacaggtgcacatcatcatgaccagttaatttttaaattttctgtagaggcgagatctcactatgttgctcaggttggtcttgaactgctggcctcaagcaatcctactaccttggcctcccaaagtgcttggattacagctgcaagtcacygtgcctggctgaactagagtgcttctatctaatcctataggaatcccttatttcttattgctgcaggatgaaaattaaacacagattttaattgtgtggattgaagaattatatcagaagttgaaatcacatcctcaccaagtcttatatgt

SEQ ID NO: 185372 - DNA, 480 bp, Homo sapiens
gaattctaagatttgcaaagtctgtgtttctgagagtctatcttttagaagtcataagkttctatgtgaatctggctataggattagttgcttttagccctattaaaggagacagacagactcaccttcatgaaagactgaaacgtagcatcagttcgaacttgcagcaggtgccccaggaaaagaattggtgtaggacctgggggcagctttcctgccttatccattcgtttccaggcaatgaggatgagcaggcaagacaagcggagtgccagaaagatggtgacagcccctcccagctccatggtgccaggtcaacaggttctgtcctgggcaccagatcctgcctaagtaggtcctgggagatcagcttataccaaaatctgaacaccctgggattcaagttttccgggtttgagtgtcatcggggaagagattgctttatattgggggtggttatataacctataatctcccacc

SEQ ID NO: 185373 - DNA, 484 bp, Homo sapiens
catgtgccaacccggtacttatagggaggttccttatggaatcccacaggagtccaatccttgagcacttttctcgctttggtttctgtgaacccctacctgtccatggtatattctctcatctgtctgcttgtaattttcccagggggaccattgggtgaattaagtagctattatccamataggttagtgggtttgttttaaataggtttattgttttgtttgtcacattctacagcattgaattgtaatgtaatcttgtcctacaggcagaggctcacctaacatgaaaggttttaatttttgccatttaagcactactgtggactggatttcagtagatgggctccttaaatcagatgatgctattagtccacagactcctagggttagagaaggtggtaaaggggtctcctgaaaaatttgatggatatttccaatgagtaacagccaagtataaagaggtccccagagaacctctgcc

SEQ ID NO: 185374 - DNA, 530 bp, Homo sapiens
ggtatttatgaagcttcattaggtgtttaatatctgtgagtatctgtaggggaactatttgctatacattgctgtttggagtaaataagaaaacaaataaaagtgctttgtaaattgaaagactccatcattttcataaccttcatggttaacatatcctaagagccaaactcccagaaattgtgtgattttcctcaccgggctgaagcayggcttttagctaagaagactgcctgggttcacattccgcctgttactccctagctccaccccttcaggacctgagttagccctgtgagcctctgtttttcctcctaacagacggacataacaaaccatccctacttcttctggggttgttgccaagattaaataatttaaataaactagcaaaaactgtatagtgcctggtataaatctcattacctacccatgctggttatcattattagtacgactatattcttgaatttcaggcatttctgcaggagagatttttggatattggtccttctttagacatttcaaac

SEQ ID NO: 185375 - DNA, 540 bp, Homo sapiens
ggggtagaagcagcttggaaggagccgcccagtcagcctccgtggaaactcagcctttaacttgtgcctggaaggaggaggagacggagaaggaaatactcttctgggagggaggagcatgcaggatgaacgaaggcagcacagctaacctctaacgctcctaaatgccaaccccaggaagttgcatgagaatgaaaaatcatcttctgcctgtaacgagttgaatggcacccccagaaaagatagttccaagtcctaaaccccatatctaacgatatgaccttatttagatatagggtctttgcagatgtaattaaattaaggatattgggatgagatcatcctggatttagggttcaccctaaatgacctgtgtccttataagaaaargaagaggagattcaacacagagacacaggggaaagcccacatgaacacagaggcagaaattggagggacgcagccaaaaaccagggactgtggaggacggccggcagccaccaggagttgagagaggggcctgggacagattctcactca

SEQ ID NO: 185376 - DNA, 239 bp, Homo sapiens
ctacccaaaagtattaagtgttcaggtttgtgagaataawgtcttgttaattattaactcctctaaaacattctcaccccctagaactattccctccttaatccacacacatgcaccagaagcaaaagcaagctcaaacgttcatcatcaaatcagctcacttcaacttgacttctatagtcaaatattgtggtcttctgtagcaactgaaagaggctgtcttgttaattctgagagtt

SEQ ID NO: 185377 - DNA, 628 bp, Homo sapiens
gttgcattgcccataattttttagttttattgaggtataattgatatacccctaaagcaaagacttaatgtacacatcttgaatcatttgaacaaatgcatatacctgtgataccaccaccacaaccaaagtactagacatatccgtcacctccaaaaatgtccttgtcttctttgttgattttctgtttggttggttggttggctggttggttggttaattgtttggttggttggttggtaagttgtttggtaaaatcacttaacatgagatctagcctcttaacatattttaaaatgcaaaatactgtattcttagctataggtactattttgtaaatcagatctctactctttactcataacaaactttatagcctttcaagaacaattcatttcaccctccctccagaacataattttttatttttaaaatttttttwaattttatttatttattttactttaggttctgggatacatgtgctgaatgtgcaggtctgttacataagtatacttgtgccacggtggtttgctgtacctattaacccgtcatctaggttttaagccctgcatgcattaggtatttgtcctaatgctctccctcctctttcccccgacccctcaac

SEQ ID NO: 185378 - DNA, 628 bp, Homo sapiens
gttgcattgcccataattttttagttttattgaggtataattgatatacccctaaagcaaagacttaatgtacacatcttgaatcatttgaacaaatgcatatacctgtgataccaccaccacaaccaaagtactagacatatccgtcacctccaaaaatgtccttgtcttctttgttgattttctgtttggttggttggttggctggttggttggttaattgtttggttggttggttggtaagttgtttggtaaaatcacttaacatgagatctagcctcttaacatattttaaaatgcaaaatactgtattcttagctataggtactattttgtaaatcagatctctactctttactcataacaaactttatagcctttcaagaacaattcatttcaccctccctccagaacataattttttatttttaaaattttttttaattttatttatttattttactttargttctgggatacatgtgctgaatgtgcaggtctgttacataagtatacttgtgccacggtggtttgctgtacctattaacccgtcatctaggttttaagccctgcatgcattaggtatttgtcctaatgctctccctcctctttcccccgacccctcaac

SEQ ID NO: 185379 - DNA, 598 bp, Homo sapiens
  misc_feature (1)...(598): n = A,T,C or G
gaataattgagttgaaatagtttttctctcttcatattatgaattttagtgctctaacctttcactggcataataatttggttgaactgtagtcaattatacttaacataaacctcccaataataagtatttatgaaatcagttttataaaacaaacacattattcttggtagtacatgctttccaggaacacgtcttgcacaaaatccttacccttcacagaaccaaatatatttacatattgattgtctctctctgtrtgtttgaatataataaaaacagattgtacttatcagttaataagaaactcaacttttattctcaatatgttaagtttggaatttctnccgttaacccaaccgtttaaggcacatgatcacatatctttgaaattgggtaatgcttcttgcatctcatgaagagtgttctaatgagataatccagcttgggttttgatgaataacagatacggcacgtatgcatatcatattctttgtacttgtagttcttaacactagactcacactctatcttggtcatactccagggtaagtggacccttcctattttttccactttagggccagcagtgcagctg

SEQ ID NO: 185380 - DNA, 510 bp, Homo sapiens
ctctcattcccgtacaggggtacwggggacagagttccttctggtttattccattggacgtgactcttcaaagttcaccatttatttatttgttcactcattcactcaacaaccttatgtagaatatatgctaagcatggaaagataagtgcgctgatggacactgaaagagtcctggggaagcatgaagagctgacttagaaatggattttgattctacagtagaaggtgagcaggaacaatgaggagagaggaggtggcgtattcaaaaatggagaggggagaaaacgcacaggaggcatgtgggctgagagccaagggctaagaactggcttcctggcatatgactcccgtagtcccacagggccgccctgcacttagaaggccccaggcttggcttaatactctgctgtcaccatcttgaaattcatcatttgtgagcaagggtccctgccttttaatttttgcaccaggccttgaaaattatgcagcccatcctgatgaagagtg

SEQ ID NO: 185381 - DNA, 510 bp, Homo sapiens
ctctcattcccgtacaggggtactggggacagagttccttctggtttattccaytggacgtgactcttcaaagttcaccatttatttatttgttcactcattcactcaacaaccttatgtagaatatatgctaagcatggaaagataagtgcgctgatggacactgaaagagtcctggggaagcatgaagagctgacttagaaatggattttgattctacagtagaaggtgagcaggaacaatgaggagagaggaggtggcgtattcaaaaatggagaggggagaaaacgcacaggaggcatgtgggctgagagccaagggctaagaactggcttcctggcatatgactcccgtagtcccacagggccgccctgcacttagaaggccccaggcttggcttaatactctgctgtcaccatcttgaaattcatcatttgtgagcaagggtccctgccttttaatttttgcaccaggccttgaaaattatgcagcccatcctgatgaagagtg

SEQ ID NO: 185382 - DNA, 510 bp, Homo sapiens
ctctcattcccgtacaggggtactggggacagagttccttctggtttattccattggacgtgactcttcaaagttcaccatttatttatttgttcactcattcactcaacaaccttatgtagaatatatgctaagcatggaaagataagtgcgctgatggacactgaaagagtcctggggaagcatgaagagctgacttagaaatggattttgattctacagtagaaggtgagcaggaacmatgaggagagaggaggtggcgtattcaaaaatggagaggggagaaaacgcacaggaggcatgtgggctgagagccaagggctaagaactggcttcctggcatatgactcccgtagtcccacagggccgccctgcacttagaaggccccaggcttggcttaatactctgctgtcaccatcttgaaattcatcatttgtgagcaagggtccctgccttttaatttttgcaccaggccttgaaaattatgcagcccatcctgatgaagagtg

SEQ ID NO: 185383 - DNA, 510 bp, Homo sapiens
ctctcattcccgtacaggggtactggggacagagttccttctggtttattccattggacgtgactcttcaaagttcaccatttatttatttgttcactcattcactcaacaaccttatgtagaatatatgctaagcatggaaagataagtgcgctgatggacactgaaagagtcctggggaagcatgaagagctgacttagaaatggattttgattctacagtagaaggtgagcaggaacaatgaggagagaggaggtggcgtattcaaaaatggagaggggagaaaacgcacaggaggcatgtgggctgagagccaagggctaagaactggcttcctggcatatgactccygtagtcccacagggccgccctgcacttagaaggccccaggcttggcttaatactctgctgtcaccatcttgaaattcatcatttgtgagcaagggtccctgccttttaatttttgcaccaggccttgaaaattatgcagcccatcctgatgaagagtg

SEQ ID NO: 185384 - DNA, 410 bp, Homo sapiens
cctaagagttctcctagtcaatgcatttggaatacatatagctctacatttctgttataaaatttcaaatgctaaatataacaagaccagaaagtgaatatggttcaaatgtttcattttctttcacactcttggtaagactagcatctttcatcatcattaacccatctttcagagagtaattggaagccaatatttaggagtgggttggtagatgatgtacggtcctgaacaaggatgcaaccaacataaaatacacagcattaagaaaattcagagacaattagtastaaatagtttcaatacaaagaaatctgtggagccatacagttatgagtcatacagaattgctacatattccactgggatgagagagaggaatttttccagtaacagcacacttaacagtg

SEQ ID NO: 185385 - DNA, 574 bp, Homo sapiens
aattcattaattagatagatgtttttatttattttttaaatctgtccagttaatcagttttgtttataacagtgttctttattttattgtattgcatttagagaatgtggtctttaccattactgtctttgagaattaattcaaattaatttatctaaactcagagacatgtgctctctgaagtaggtaaccacattttaaaattattattttctactattatatgtatgaataaagtgtccrtatatgtatgatatatatcatctctctaatatatgggtacttatctggtaaatcttaagctaatgtatccctctcaagataaaagtttatcaagtttgccttgctcagttctacctttttaatgcagaagattaattgttcttattgtttattagtatctagctacaatgaaaatgtgaatacatgctgcctagtgtaggttcactggtcatgaaaaggaattttttcctctagtattttgaagttagaatttgatgatatgtcttaataaacactgttgaaaatattattaggatattatgctggatgtgactcaccaatatctatttga

SEQ ID NO: 185386 - DNA, 574 bp, Homo sapiens
aattcattaattagatagatgtttttatttattttttaaatctgtccagttaatcagttttgtttataacagtgttctttattttattgtattgcatttagagaatgtggtctttaccattactgtctttgagaattaattcaaattaatttatctaaactcagagacatgtgctctctgaagtaggtaaccacattttaaaattattattttctactattatatgtatgaataaagtgtccatatatgtatgatatatatcatctctctaatatatgggtacttatctggtaaatcttaagctaatgtatccctctcaagataaaagtttatcaagtttgccttgctcagttctacctttttaatgcagaagattaattgttcttattgtttattagtatctagctacaatgaaaatgtgaatacatgctgcctagtgtaggttcactggtcatgaaaaggaattttttcctctagtattttgaagttagaatttgatgatatgtcttaataaayactgttgaaaatattattaggatattatgctggatgtgactcaccaatatctatttga

SEQ ID NO: 185387 - DNA, 584 bp, Homo sapiens
gaatcccctgaagggctcataaaagaaaatgctatacatagtctagtggttaagattccattcctttactattgtggccagtgtttgattcttggtcagggaactagttctctggtggaagaaaaaataaggcctttataagactaattttatagaaccaattatcaaaacttcggaaggatgggaaaggaaattctctttacttctacatgtataatayatttaatttcccttagctaatctctggggaaatggatcttcactctgccctgatttgccttgagtacagcatttttgtacaaatgtgcgtccaaaaatagtactatttacctccagttattagaacatgtgctttggctttatgaattattttgactgatagatgtatcccattcttttatcatttcatctttcttatgatgaaaaaataatgttttttaagttttatagaatgaggaggataatgaattagttaaatgatctactgcacacctaaactcttaagtctcatcaatgacctgagtacaaaggtaacttagcagtaacttgtagacaaatacaactgtagtcattatcatggcaat

SEQ ID NO: 185388 - DNA, 584 bp, Homo sapiens
gaatcccctgaagggctcataaaagaaaatgctatacatagtctagtggttaagattccattcctttactattgtggccagtgtttgattcttggtcagggaactagttctctggtggaagaaaaaataaggcctttataagactaattttatagaaccaattatcaaaacttcggaaggatgggaaaggaaattctctttacttctacatgtataatacatttaatttcccttagctaatctctggggaaatggatcttcactctgccctgatttgccttgagtacagcatttttgtacaaatgtgcgtccaaaaatagtactatttacctccagttattagaacatgtgctttggctttatgaattattttgactgatagatgtatcccattmttttatcatttcatctttcttatgatgaaaaaataatgttttttaagttttatagaatgaggaggataatgaattagttaaatgatctactgcacacctaaactcttaagtctcatcaatgacctgagtacaaaggtaacttagcagtaacttgtagacaaatacaactgtagtcattatcatggcaat

SEQ ID NO: 185389 - DNA, 448 bp, Homo sapiens
gattatacagccttctaatggaaggagatgaccatcttctcagagccagcaaggagaagtcaatgcctgccttcaaagcttcaaagaacaagctgactatcttgctagaagctaatgcagctagtgacttgaagcagaagccactgctcatttacctgtcaggaaatcctagggctttaagaattatgctaaacctattctgcctgtactctgtaaatggaagaataaggcctggatcacagcacatctgtttacaacatggtttaccgaaaattttaagcccactataaagatctactgctcaggaaaaaaaaaaaaarccctttttaaaatattactgtttgctgacaatgcacttgacacccaatcactccaatatccaaggatattaacattgtttacaagcctgctaacacaacattcattcctaatggatcaaagagtaatt

SEQ ID NO: 185390 - DNA, 448 bp, Homo sapiens
gattatacagccttctaatggaaggagatgaccatcttctcagagccagcaaggagaagtcaatgcctgccttcaaagcttcaaagaacaagctgactatcttgctagaagctaatgcagctagtgacttgaagcagaagccactgctcatttacctgtcaggaaatcctagggctttaagaattatgctaaacctattctgcctgtactctgtaaatggaagaataaggcctggatcacagcacatctgtttacaacatggtttaccgaaaattttaagcccactataaagatctactgctcaggaaaaaaaaaaaaagscctttttaaaatattactgtttgctgacaatgcacttgacacccaatcactccaatatccaaggatattaacattgtttacaagcctgctaacacaacattcattcctaatggatcaaagagtaatt

SEQ ID NO: 185391 - DNA, 471 bp, Homo sapiens
ataacaatgccttctcctggaatacctcctgaaggacttgcctgaggttgtcttacagttaccttttttttaagtagaaggagtatactctaaaataataaaaaaaaatgtggtaagatgtataaactagtaacattgttgttttatcattataaagtattatgtaatataaatarttgtatatgttatacttatatgcaactggcagggcagtatgtttgtttacacaaaaaacacaagtactgcattgcactaggcaataggaatttttcagctcaattataatctcatgggactgccaccatatatgcggcacatgactgtattgaaatttgtgcctaatctagtattcttaagtttgtatttttttaagtgtgcttctaaaattatataaacttcaagccctctaaaacctagatcatacatggctggtggtatgtcagttgactccaagattcaaaggggcccacc

SEQ ID NO: 185392 - DNA, 471 bp, Homo sapiens
ataacaatgccttctcctggaatacctcctgaaggacttgcctgaggttgtcttacagttaccttttttttaagtagaaggagtatactctaaaataataaaaaaaaatgtggtaagatgtataaactagtaacattgttgttttatcattataaagtattatgtaatataaataattgtatatgttatacttatatgcaactggcagggcagtaygtttgtttacacaaaaaacacaagtactgcattgcactaggcaataggaatttttcagctcaattataatctcatgggactgccaccatatatgcggcacatgactgtattgaaatttgtgcctaatctagtattcttaagtttgtatttttttaagtgtgcttctaaaattatataaacttcaagccctctaaaacctagatcatacatggctggtggtatgtcagttgactccaagattcaaaggggcccacc

SEQ ID NO: 185393 - DNA, 648 bp, Homo sapiens
tcaggttttctgttatagcagcataaaatggactaaaacagacactatcttgatttatagctctttgcaattatgtttaattattttggaaattttgttgcattcactggtttaccctagtgtattagtccattctcacaatgctatgaaacattgaactgcctgtgactctgtaatttataaagaaaagaggttaaattgaatcacagttctgtagggctggggaggcctcaggaaacttacaatcrtggcagaaggggaagcaaacatgttatttttcacatggcagcaggaaggagaaatgccaaacaaagagggaaaagtcccttataaaaccatcagatctcctgagaactcactcactatcataataacagcagcatgggagtaactgccccagtgattcaattatcttccactgagtccctcccaggacacgtgggaattacgggaacctcagttcaagatgagatttcagttaggacacagtgaaaccataccattctgcccctggcccttcctaaatctcatgtcctcacatttcaaaacacaatcatgccttcccaagagtctcccaaagtcttaattcatttcagcattaactaaaaagttcatagtccaaagtccattctgagacaaggcaagtcc

SEQ ID NO: 185394 - DNA, 648 bp, Homo sapiens
tcaggttttctgttatagcagcataaaatggactaaaacagacactatcttgatttatagctctttgcaattatgtttaattattttggaaattttgttgcattcactggtttaccctagtgtattagtccattctcacaatgctatgaaacattgaactgcctgtgactctgtaatttataaagaaaagaggttaaattgaatcacagttctgtagggctggggaggcctcaggaaacttacaatcgtggcagaaggggaagcaaacatgttatttttcacatggcagcaggaaggagaaatgccaaacaaagagggaaaagtcccttataaaaccatcagatctcctgagaactcactcactatcataataacagcagcatgggagtaactgccccagtgattcaattatcttccactgagtccctcccaggacacgtgggaattacgggaacctcagttcaagatgagatttcagttaggacacagtgaaaccataccattctgcccctggcccytcctaaatctcatgtcctcacatttcaaaacacaatcatgccttcccaagagtctcccaaagtcttaattcatttcagcattaactaaaaagttcatagtccaaagtccattctgagacaaggcaagtcc

SEQ ID NO: 185395 - DNA, 517 bp, Homo sapiens
gcctaatctagtattcttaagtttgtatttttttaagtgtgcttctaaaattatataaacttcaagccctctaaaacctagatcatacatggctggtggtatgtcagttgactccaagattcaaaggggcccaccaactttttacttctttcttcaakgtgggtagtttgaggagaacactttgtctcttacttaaaaatggagttaatgggtgcagcagaccaacatggcacatgtatacatatgtaacaaacctgcacgttgtgcacatgtaccctaaaactaaagtataataataataaaataaaataaaaataaaaagatatgatttaaaaaaaaataaaaaataataaaaaagaaataaaaatggatgcccagattactagattcctagaaagcttaccaatgttctaggtctcaattttctgaggtatacctactatcttttggcatgtatctgaattacttagtcatctacaattcttactactccaggcttaccatggaataattatca

SEQ ID NO: 185396 - DNA, 610 bp, Homo sapiens
tctaccaacaacagcaaaatgttggggtgaggaaaaaacttcccctttggcctctgaaggctcactgaaaaatcartgggtgagaagcatacaagcaaaggcatatacatatatgattgtacacaaccagaatcatggttaattacccccaacctcaatggggtgcagaaacttatatacattttcccataggggagggaggagatggaaaatgtagaggattctgttgaggtgcaggaaataattattaggaagaatgaatagacgagagagatagaaactaacttgtaaataattggaatgaccccaagaggcagatattatcttgtgaaaataagttccatccaggtgtggttgcattctttactcttctttagtgaaataatgagatttcaaggaggggatagaagaaaattgtgtttctcttggtaaaagatttcttggtcaaataaagacattccagaaaaagtgtccctccttgagcttgtgggggaagagagggaaaaaagtcaaagttagagggatcctgagatttatttctgaggccttttgatgttcaaaagcgctcaacatgcccaagtgccatattctgagtaatcattttatggac

SEQ ID NO: 185397 - DNA, 610 bp, Homo sapiens
tctaccaacaacagcaaaatgttggggtgaggaaaaaacttcccctttggcctctgaaggctcactgaaaaatcagtgggtgagaagcatacaagcaaaggcatatacatatatgawtgtacacaaccagaatcatggttaattacccccaacctcaatggggtgcagaaacttatatacattttcccataggggagggaggagatggaaaatgtagaggattctgttgaggtgcaggaaataattattaggaagaatgaatagacgagagagatagaaactaacttgtaaataattggaatgaccccaagaggcagatattatcttgtgaaaataagttccatccaggtgtggttgcattctttactcttctttagtgaaataatgagatttcaaggaggggatagaagaaaattgtgtttctcttggtaaaagatttcttggtcaaataaagacattccagaaaaagtgtccctccttgagcttgtgggggaagagagggaaaaaagtcaaagttagagggatcctgagatttatttctgaggccttttgatgttcaaaagcgctcaacatgcccaagtgccatattctgagtaatcattttatggac

SEQ ID NO: 185398 - DNA, 431 bp, Homo sapiens
gacaagtagtatcatatttactcttagttctgcctaccgtaataatctacatattatagtacctatgcacagattctamctgtcatgaggcatactattccactgtgttagagatatgtgagaaaagaaaaaaaataaaaataaaaacaggagaggtccacagttccactagacttattgtcagacagacttgagccaagattctctctactacctgaagttccgagttcttactttgttcaatgttcttcaaattaactaccacataaccctttctgaattctactgtatgaattaatgagggcttggccgtcagtgtatagactatacctttatggtctaagctgtaaacacttctggctcaagacatattggaattcaacttaatttgggcctgtaagcaatgacatgggaagtggagaggaggtcct

SEQ ID NO: 185399 - DNA, 431 bp, Homo sapiens
gacaagtagtatcatatttactcttagttctgcctaccgtaataatctacatattatagtacctatgcacagattctacctgtcatgaggcatactattccactgtgttagagatatgtgagaaaagaaaaaaaataaaaataaaaacaggagaggtccacagttccactagacttattgtcagacagacttgagccaagattctctctactacctgaagttccgagttcttactttgttcaatgttcttcaaattaactacyacataaccctttctgaattctactgtatgaattaatgagggcttggccgtcagtgtatagactatacctttatggtctaagctgtaaacacttctggctcaagacatattggaattcaacttaatttgggcctgtaagcaatgacatgggaagtggagaggaggtcct

SEQ ID NO: 185400 - DNA, 424 bp, Homo sapiens
gagtaaattcacaataattcactgtcattctccaggatcaatttcttttctgcacaggccaaataggcaagttaaataggtaagttgaaaatattgtgggaataaccacctctgcatctttcaagtccttaatgcactagtttctataatccattcagaatgtggtgttgcttttcacttactgttttttgtttgtttgtttgttttaggcagagataattctgggagttcccacacaacatttcccaccatagtagccctctgtacaagtctgggaatgaaagtggtgcttctgccagttgctgagtatgtttatttcaattatgcaytctgacactgggaaaataatcatgtgatgggtttggggacataatctaaaactccattaatcacctgactttcataaacctttattctgaatact

SEQ ID NO: 185401 - DNA, 526 bp, Homo sapiens
gaattcgcttccatgacttaaattcctcattttaggtcccacctccaacattggggatcaaattttaacatcagatatggaagggattaaatatcygaacaatatcactcaccttgtgcccatgtaacagacaacaacccaaatggttagagcccttctaattcttcaacttacaaaatttattaatatggggtccattattgggaacccatattaataaatttaggttgaatctactttaaattcggtccacgttaatcccccattcttaaaatctatttctagatatattctccagattctgtctgtataatttggcaaaatcatgtaatcctgtcagtgtgtagtataccttgttctttggagactgcctagacttgagtgtagttataggtctcaaagcaaagaggtatgatggagtgtgatatggtttgcctctgtgtccacatccaaatctcatattgaattggaatccccatgtgtctagggagggaactggtgggaggtgactggatcatgggggtgg

SEQ ID NO: 185402 - DNA, 527 bp, Homo sapiens
ggaattcgcttccatgacttaaattcctcattttaggtcccacctccaacattggggatcaaattttaacatcagatatggaagggattaaatatctgaacaatatcactcaccttgtgcccatgtaacagacaacaacccaaatggttagagcccttctaattcttcaacttacaaaatttattaatatggggtccattattgggaacccatattaataaatttaggttgaatctactttaaattcggtccackttaatcccccattcttaaaatctatttctagatatattctccagattctgtctgtataatttggcaaaatcatgtaatcctgtcagtgtgtagtataccttgttctttggagactgcctagacttgagtgtagttataggtctcaaagcaaagaggtatgatggagtgtgatatggtttgcctctgtgtccacatccaaatctcatattgaattggaatccccatgtgtctagggagggaactggtgggaggtgactggatcatgggggtgg

SEQ ID NO: 185403 - DNA, 582 bp, Homo sapiens
cctggtcaatatggtgaaatttcatctctactaaaaatacaaaaattagctgggtgtagtgtgcgtgcctgtaatcccagctactcaggagggcgaagcaggagaattgctggaacccaggaggcagaggttgccgtgagctgagattgcactactgcactccagcctgggcaacatagtgagactccatctcaaaaaaatgaatraataaataaataaataaataaataaataaataaataaataaatggtaatttgttaactgggaaaacagttttattagaaacgtagagggtagaagttctactatagtaagttgaggagttaatggaagatcagaaaaatgactaacatttgcagactctagaaacttggctttaaaacaaatttatattagatggttagaggagaatggagacatgggttgtttttgttttgtttatggatggtaatagagcacattttaggctggggaaaattaatctagtggtttggaagacattaacagagcaataaatgatctgttttccagaacataagagccaaaaggaaaaagaatttctatttgtttggtttgctgtt

SEQ ID NO: 185404 - DNA, 582 bp, Homo sapiens
cctggtcaatatggtgaaatttcatctctactaaaaatacaaaaattagctgggtgtagtgtgcgtgcctgtaatcccagctactcaggagggcgaagcaggagaattgctggaacccaggaggcagaggttgccgtgagctgagattgcactactgcactccagcctgggcaacatagtgagactccatctcaaaaaaatgaatgaataaataaataaataaataaataaataaataaataaataaatggtaatttgttaactgggaaaacagttttattagaaacgtagagggtagaagttctactatagtaagttgaggagttaatggaagatcagaaaaatgactaacatttgcagactctagaaacttggctttaaaacaaatttatattagatggttagakgagaatggagacatgggttgtttttgttttgtttatggatggtaatagagcacattttaggctggggaaaattaatctagtggtttggaagacattaacagagcaataaatgatctgttttccagaacataagagccaaaaggaaaaagaatttctatttgtttggtttgctgtt

SEQ ID NO: 185405 - DNA, 480 bp, Homo sapiens
catctatgattactttcagcaacgttttatagctttccttgtagatctttcacctcttgagttagatatattcctgaatattttatggttttttttgcaggtgttataaaagggtttgagttcttgatttgattctcagctttgtcactcctagtgtatagcagtgctaccaatttgtgtacattgattttatatcctaaagcttaactgaatgcatttatcagatctagaagctttttggatgagcttttagggttctctaagtataggatcatatcattgatgaacagccacagtttgacttcctctttactgatttggatgcccttcattttttttcccttttctgattgctctggctagggcatccagyactgtgttaaatagaaatggtgaaaatgggcatcctgtcttcttccagttctcagggaaaatggtttcaacttttccttattcaatataatgttggttgtttgtttg

SEQ ID NO: 185406 - DNA, 340 bp, Homo sapiens
ctgaaagatgcagaaagaagaagtttggagaaaaaacaggaaatagaggtttgaacacagataacgggattaacctctaaaaagagagggattctattcctcagagatataagacaatgatctgaagttggcttcatatgatggagataagattamtatgatcaggccaggaattccaggggtttcctataagaaaacctcaattttctctgaaaatactgcttcatagggtaaggatatttttaaaaattagtctttttaaaaacagcaagaattaaaagtaattttaatttcttagatacagtatgaaacagtggtaaatgagaatctacctggaatt

SEQ ID NO: 185407 - DNA, 340 bp, Homo sapiens
ctgaaagatgcagaaagaagaagtttggagaaaaaacaggaaatagaggtttgaacacagataacgggattaacctctaaaaagagagggattctattcctcagagatataagacaatgatctgaagttggcttcatatgatggagataagattactatgatcaggccaggaattccaggggtttcctataagaaaacctcaattttctctgaaaatactgcttcatagggtaaggatatttttaaaaattagtctttttaaaaacagcaagaattaaaagtaattttaatttcttagatacrgtatgaaacagtggtaaatgagaatctacctggaatt

SEQ ID NO: 185408 - DNA, 604 bp, Homo sapiens
tacagcctatccttcctctgactgagaaggtaacaacatgatctcccaagcaggtcttaagctttcctggacatgtggcaagcattctascacaaattagaatgttcttttcacctactccatgcactcctagtttgttctgcatgcagatagaaacatgtggaaggtaatgatgtggtcagtattgaaagagatcacattctagaagtgtaatgattgtggcctaagagttctcctagtcaatgcatttggaatacatatagctctacatttctgttataaaatttcaaatgctaaatataacaagaccagaaagtgaatatggttcaaatgtttcattttctttcacactcttggtaagactagcatctttcatcatcattaacccatctttcagagagtaattggaagccaatatttaggagtgggttggtagatgatgtacggtcctgaacaaggatgcaaccaacataaaatacacagcattaagaaaattcagagacaattagtagtaaatagtttcaatacaaagaaatctgtggagccatacagttatgagtcatacagaattgctacatattccactgggatgagagagaggaat

SEQ ID NO: 185409 - DNA, 570 bp, Homo sapiens
gggatataatcttgccctacattggccaggataagttttcaggttactcaggcaatggccagggccatagagctcccaagaatttatgtcttttgtctttggctgccagagacggtagagaaaaaccattaggtgcaggtagggtgaggtggatctgagctcagactcttcttgggcaggacttgctgcaggccctgtgagggatgggggtgtggtggtcaggccaatggagttatgtccccagggggattatggttgcctctgctgagtcatatcagttacttgggaaactggggaaagctggmagtgacaggcctcacccagctcccaggcagccagcaagtccagtctcactcctgctgtgcacccccaaccacactgaatttatatccaggcagccagggagcagggtagaaatcttgcccaaagctacaagcctccctactgagaaagcaagcagggctacagctttatctctctccccacctccctgcaccttcagctgtggcttctatgctcctatctgcacttccttttcacccttctggattctgttcaggaaacttcatg

SEQ ID NO: 185410 - DNA, 406 bp, Homo sapiens
tatgccttcttgaaaaagtttaattatgtctagcttttkatttaaagtgagagacaagaattttttttttcacttgaagattcagaagtcaccgtagagttattggcctaatttcaatattattgtgtctcagggactaggaggtgcccgagaagagggagagagatggaacaatggccagtgggtggagcagtaaggacacacacatttacctattaagtttgccatcttatatgggggtgatttgtggtgcttcaaaatcatcacaatagtaacatcaaagatcactgatcacagatcaccataaagatataataataaagaaaaagtttgaaatattgaaagaattacaaaaatttgacacagaagcaaaaagtgatcatacattgttggaaaaatggcactg

SEQ ID NO: 185411 - DNA, 609 bp, Homo sapiens
tacatcttcaaaaattctataattattctaactccattgaaagcatctaattaattgtgcatcatgaaaatgttgatattgtaaaaagcaataaaatctacgaaaagcattaatgtcaatgatcactttacctacatttccctgtaataataaattggtttaattactgaataaacacagatagtttatacctcagtttttaaaagtcacttttacttcagaagatagattgctaactagtattcctgacacagaaacaaggcttttattcaccgttcttctttacaatatttttgctgctgtrtttactaaacagatgggtaaaattatttgctttttaaaaactactcatcttaccaatatcttttgtttagtttttcaaggacaggtgttaagaatgtgcttgtaaaatttttgttcaaaatcttacttttaaaaaatgtttgccttcgtgaatactaaacataatttaggctatatgggaggctgttccttttttaaaaattaaaatatatgaggacatacttttaagatgtgtggcaataaaatctagaagctaaatatgtctttgttacagactttctactgatgtttaaactaactaaaagt

SEQ ID NO: 185412 - DNA, 615 bp, Homo sapiens
ggatataaaatcaacatacaaaaatcagttgcatttctatacaccaataacaatatattcttcaaacataacaaatattgaggaataaaaggaagtaaaatacttgtacactgaaaactataaaatgttgatgaaaaaaattaaggaagacacaaaaaatagaaagatattttgtgttcatggattggaaggtttaatattgttaaaatgttcattctacccaaagcactttacatagtcaatgaaatttttattaaaattccatggccttttcacataaatagaaaaaaaatttaaattttatatggaagtkcaatagaacccaaatagggaaagcatcttgagaaaaaaacaaactcatcacacttcctgatttcaaattatattatgcagttataattaaaacattatggtactttaattaaatagatgcatagaccagtggaacagaatagagatcccagaaataaatccaagcatgtgtggtcaactaatgttcaacaaggccaccaaaagacacaatgaggaaaggactgtcttgtcaataaatggttttagaagaactggatagcaacatgcaaaagaatgaaactggactcgtttcttataccatat

SEQ ID NO: 185413 - DNA, 539 bp, Homo sapiens
taacagttggactaagttggcttggtgtggtataggtattaagaataggtggttgtaggaataaacttcaaaatgtggacaaatgtgcttccagcttcagaatttctcaaaataatgactccaactcaagtagaaatctccaaggtcaaatcttgattcaacaattcatctttgattcaacaattacttargcagcatctatctggcctgccagataccatggcgataccatgtgaatatgatattaacattgccctcaagaattagaagtctaagtggggcataagacaagcttacaaatagttgtcaagtaagtcatcaagccctggttcaaactgactttgcaattctaagtaagagcattagaattggttcctaagatttctttcaaatggttccattagtgcaatgggcctcccagtagaacagaaagtccgggttgtggttaacactttacctacccataagcaatggcgtctgttagttggattctttgttaaaaacaaagggagctttcttatcaatagagttgaaggtaa

SEQ ID NO: 185414 - DNA, 543 bp, Homo sapiens
tgcaaacagaagacagatagtggcagatcttgcagaccayggtaaagggcttgcatgttgtcccaacgcgattaattttttccttcagatccagctaccagaatttggtaccaacatctccattgcaggagaagtcagggcaaaaggtccaaacttgggagttatccacatttgaaacctagaacatcagagtttcaagggttattagagattgtcttattcatcctaccaccacccactttaaaaatggagaagctgagttccaggaaggggaaggaccttatcaagattacaacagatctctgggatccttttccagatggtttcttccttttagtggaaggttttccatttgaatgatcaaataagggaactgactacgtaagcagaggagggttagcctaagtggagaaatgaatggcttacaacaacgatttctagacttcaggcattctcctcagcattcataaattttaccatgatcaatgacttgatatttttaactgactccattttttttgctttaatgcattattcaaaaga

SEQ ID NO: 185415 - DNA, 592 bp, Homo sapiens
tggtaatgtgaataacagtaacataatcatcacagttccggaggctgggacattcaagagcaaggcactgacagattctgtgtctagtgaggccccgtatcctggttcacagagggcacctcctcactgtgtcctcccgtggtgggaggggcaggagagctctctgagtctctttgataacagcacccatcccattcctgagggttccactctcatgacctaatctcctaccaaatgcccacctccttgataccatcacatcgtgggtgatgacttcaacacatgaattttaagaggacacaaacataaagtctagagcaaaccttatgcattaaaaggagatatgagaataaggaaatccagagtaatgtctacttgagttcttcctgtgcttcccaaatcatggaatagccagggatcagcatcttcaaggacattcctgatccatagccagggatcagcatcgtcaaggacattcttgatcttcaagctccagatgttattattcaaatcttgctrcaaacacttgccggtaaggagacctgaccacatcctgagtggctccaagtccctcatgcaagtgcagtgatgt

SEQ ID NO: 185416 - DNA, 592 bp, Homo sapiens
tggtaatgtgaataacagtaacataatcatcacagttccggaggctgggacattcaagagcaaggcactgacagattctgtgtctagtgaggccccgtatcctggttcacagagggcacctcctcactgtgtcctcccgtggtgggaggggcaggagagctctctgagtctctttgataacagcacccatcccattcctgagggttccactctcatgacctaatctcctaccaaatgcccacctccttgataccatcacatcgtgggtgatgacttcaacacatgaattttaagaggacacaaacataaagtctagagcaaaccttatgcattaaaaggagatatgagaataaggaaatccagagtaatgtctacttgagttcttcctgtgcttcccaaatcatggaatagccagggatcagcatcttcaaggacattcctgatccatagccagggatcagcatcgtcaaggacattcttgatcttcaagctccagatgttattattcaaatcttgctacaaacacttgccrgtaaggagacctgaccacatcctgagtggctccaagtccctcatgcaagtgcagtgatgt

SEQ ID NO: 185417 - DNA, 515 bp, Homo sapiens
gaattccgagggcggtcatggcctgctcccacccatgctgggtgaagccttaggtctgcatgtctgggagcagtgcattctagccccacctaggccagtgggattggccatgtggccataatccaggtgatctgaatttcactatgttttaatctgtaatatggaatgatttctatttgccaagcttagtacatagggttagggtgaggagtgacaggatctaaacacactttgagaaaggaaagtgttatgcttctccaccctgccagagtcagaggggtgatcrgggctgctccgccacaagctgaaggtttcactgtgctataaaggaaacttccatccaaaggaatcgttctgctagcaaaacacagacatgcacacagctgaaacaacttccacgcacagtgtatgatttcctattctgcgcacagagagaaaggacagatgtgttagcagaggattactgttggaataattatgttagctaagacacaaatgggctcccatgccagctc

SEQ ID NO: 185418 - DNA, 498 bp, Homo sapiens
gccttaggtctgcatgtctgggagcagtgcattctagccccacctaggccagtgggattggccatgtggccataatccaggtgatctgaatttcactatgttttaatctgtaatatggaatgatttctatttgccaagcttagtacatagggttagggtgaggagtgacaggatctaaacacactttgagaaaggaaagtgttatgcttctccaccctgccagagtcagaggggtgatcagggctgctccgccacaagctgaaggtttcactgtgctataaaggaaacttccatccaaaggaatcgttctgctagcaaaacacagacatgcacacagctgaaacaacttccacrcacagtgtatgatttcctattctgcgcacagagagaaaggacagatgtgttagcagaggattactgttggaataattatgttagctaagacacaaatgggctcccatgccagctccagttttgggttctcactgaattgaattc

SEQ ID NO: 185419 - DNA, 583 bp, Homo sapiens
ccttagagattctgagaacattcctcaatcccagggatctccttttgcacaccatgatggcccgaatttctgagatggaagatggcctaactagctagaggagaaaaacatctgtccacggaccaggaacatctccagcatgggagccatcggagccagaggtatgatgtggtttggctgtgtccccacccaaatsccatcttgaattgtatctcccacaattcccacatggttgggagggacccggtgggaggtgattgaatcatggtggtgggtctttcctgtgctgttcttgtaacagtaagtctcacgagatctgatggttttataatggggggttcccctgcacaagctctctctctttgcctgccgccatccatgtaagacatgacttgttcctccttgcctttcaccatgattgtgaggtctccccagccaggtagaactgtaagtccattaaacctctttcttttgtaaatcgcccagtctctggtatgtctttatcaggagtgtgaaaacagactaatacaaggtgcaaagggaaagtcagtcaaagagccccagagaagcagaggggcagaaa

SEQ ID NO: 185420 - DNA, 464 bp, Homo sapiens
cttggcttgcctttaatacccaccacttacacttcttccagmacccagtgtctgttccccgcaggcaggggcctggctggtccccaaactccccagagtaaattccccaccttagagtcatctctacttatctgaattttagtcatccttcagaacccaattcaagctcaacttccaccaaaaagttttcttcaatcataatataatttacaatttgaaataaaatgctaactaaaagactaacatttgcaaagcatattactgttctcaaaacatctttgcgcatattatcttgtttgtctctgaaaatgtcaaaacgcttattaccttatcacgtccattgaaaggtgatgcaggtgagactcagagtggctaaggcccttgctcaagatcaaggaggtgagtgcagccaagccagtcatggttattttgtgattcctaaccccaagctcagcccatgctag

SEQ ID NO: 185421 - DNA, 596 bp, Homo sapiens
tgttggctgtggggttgtcatagatggcttttattatattgaggtatgtcccttgtatgccaattttgctgagagttttaaccacaaaagaatactggattttgttgaatgcttttactgtatctattgacatgataaagtgatttttgtttttaattctgtttatgtggtgtatcacatttattgacttgcatatgttaaaccatccctgcatccctggtatgaaacccccttgatcatggtggattctataagataacatcagaaaaacctttctttcttttcttttctattttattttattttattttttattttattttattttttgagacagagtctcactctgtcgyccagactggagctcagtggtgctatctctgctcactgcaagctctgcttccccggttctcctgcctcagcctcccaagtagctgggactacaggcacacgccaccatacctggctaattttttgtatttttagtagagatggggtttcactgtgttagccagcatgaactcgatctcctgacctcgtgatccacccatctcggcctccctaagtgctgtgattataggcgtgagccactgcgc

SEQ ID NO: 185422 - DNA, 394 bp, Homo sapiens
tcacatgtcaatgaggctattataaaaactaatgaaataagttagctgggcggggtggtgggtacttgtaatcccagctaattgggaggctgaggcaggagaatcacttgaacccaggaggtggaggttgcagtgagctgagatcgtgccactgcattccagcctgggcaaaaaaaaagccaaattccatytaaaaaaaaaaaaaaaaaaaacctaatgaaataccttgtaagtgaattaaattcagtgtcaagttggaagccgccggtgtaatacacccttggttcctcacgggggcactcacgccattcttacaatgctcacccgtgacatgggacctggttcacccagtcagaatgttaaaggagtgggccgaggtcacctctgtgaattc

SEQ ID NO: 185423 - DNA, 596 bp, Homo sapiens
taaagagggaaatggtgcaattctggcttaagtaaggtggaaatgccagcagaaggaaaaacaacaccattgcccagagataaacaagacagtattgaattcacaaggtttctctagaagcccataaataactgaaattactttcccttataactgagtcggctcgctccagggmaaactgctcttcttgatagttttcagcaaatcagtttgccaagggaggggaaaataaaacaaaacaaatttgtacatgtttttcttttccattgacttttttgttcatttgtaactctccatttccctttgaagaaatctacatgtgactaatttctcttatgtatgactaattcagttgtaggtttaactaaattaaacatctatttcttcttaatactacttggaaaaataaaaattttattttttattgtcatctgagaaatcagatcttgaatttttccttaataaaaaggctcttagtagactttataataatcaatagtcttacaacatatataataaaaatctctatatgcaatttactatattcctcaagtagctcatttgtgcaactacaaaatatatttccaaaaagcagt

SEQ ID NO: 185424 - DNA, 513 bp, Homo sapiens
ccatgcatattgtcacatattcctgcttagagaaatagattctctacccaagactccactgggagagtagaaagggaagcttcatagctaggtatttcctggactttcgtctatgtgcttcttccctctgctgattgccatttgtgtcttttttgctgcaataaaccataatcatgagttgaacctgagagcagtcttggagatgtgggaacctggacttaaaagtgagagtgttcttggggaccrtaccaagttaaataatgtcccgtaaaaattcatgtccacttagaacctgtgaatatggccttatttggtaataaggtattgggaaatacaatcaagtcaaaatgaaggaaacctaaatccaatgttattgatgacctcataagaagagggaaattttgacacaaagatgcaaacacacaggaataatgccatgtcaaaatggaggcaaagactgtaaggatgcattgacaagcccagaaactcctagattgcctgtgatcacaagaa

SEQ ID NO: 185425 - DNA, 466 bp, Homo sapiens
atgtttgttaatgctacagcatcttcaccagccctatcatcttctgatttagactgctgcctacaaatcatggactattcgtgtaagaatacatagtagattagattctaaacacaggtrtaccccattttattgtgtttcactttattgccactttgcagatttttttttcttttttttttcttacaaatggaaggtctatagtatccttgcatcaaacaagtctatcagagccattttaccaatcatatgtatctactttgtgtctttctgtcacattttggtaattctcacaatatttcaaacttttacattattattatattggtttgggtgacctttcgtcagtgatctttgatatttctattgtaattattttgaggcatcacaaaccacacccatataacacagtgaacgcgttgataaaagttgtctgggttttgactgctccaccgaccagctcatc

SEQ ID NO: 185426 - DNA, 466 bp, Homo sapiens
atgtttgttaatgctacagcatcttcaccagccctatcatcttctgatttagactgctgcctacaaatcatggactattcgtgtaagaatacatagtagattagattctaaacacaggtgtaccccattttattgtgtttcactttattgccactttgcagatttttttttcttttttttttcttacaaatggaaggtctatagtatccttgcatcaaacaagtctatcagagccattttaccaatcatatgtayctactttgtgtctttctgtcacattttggtaattctcacaatatttcaaacttttacattattattatattggtttgggtgacctttcgtcagtgatctttgatatttctattgtaattattttgaggcatcacaaaccacacccatataacacagtgaacgcgttgataaaagttgtctgggttttgactgctccaccgaccagctcatc

SEQ ID NO: 185427 - DNA, 466 bp, Homo sapiens
atgtttgttaatgctacagcatcttcaccagccctatcatcttctgatttagactgctgcctacaaatcatggactattcgtgtaagaatacatagtagattagattctaaacacaggtgtaccccattttattgtgtttcactttattgccactttgcagatttttttttcttttttttttcttacaaatggaaggtctatagtatccttgcatcaaacaagtctatcagagccattttaccaatcatatgtatctactttgtgtctttctgtcacattttggtaattctcacaatatttcaaacttttacattattattatattggtttgggtgacctttcrtcagtgatctttgatatttctattgtaattattttgaggcatcacaaaccacacccatataacacagtgaacgcgttgataaaagttgtctgggttttgactgctccaccgaccagctcatc

SEQ ID NO: 185428 - DNA, 466 bp, Homo sapiens
atgtttgttaatgctacagcatcttcaccagccctatcatcttctgatttagactgctgcctacaaatcatggactattcgtgtaagaatacatagtagattagattctaaacacaggtgtaccccattttattgtgtttcactttattgccactttgcagatttttttttcttttttttttcttacaaatggaaggtctatagtatccttgcatcaaacaagtctatcagagccattttaccaatcatatgtatctactttgtgtctttctgtcacattttggtaattctcacaatatttcaaacttttacattattattatattggtttgggtgacctttcgtcagtgatctttgatatttctattgtaattattttgaggcatcacaaaccacacccatataacacagtgaacgygttgataaaagttgtctgggttttgactgctccaccgaccagctcatc

SEQ ID NO: 185429 - DNA, 622 bp, Homo sapiens
aagaagtaaagaaggtaaaggtaaagaggatgtaaaagttatcatttcaggaccttttccaaaagttttcacataacgccactgtttacatctgactttccattatgtggacacatgaacacatctagttgtaaaaaaatcctattatttgtcattgtcaccattacatgtgcccatgtacctaggaagaaatcaatgtccaaatgtagggggattggcactgggataggcaaacagcagcctttacccatagtctgctcctttggttaccaatatatccatggatatccattttcctgtatatagaacacatttgtctgctccccaaggagaagagttagtatgccatccattactcacatctatttgcagccaagtgttcacaatcactgagtaacacgcagttctttctactagatgcagataagagattgcagtatcctgaaacyagatgcagataagaggttgcagtatcctgaaacctgcaaactgagacactagttacttgcaccatacacatgtaataaaatgatgatataagaatacatatttcattgagaaaacctgggaaacacattagctgatagccagttggaattagcaaataatgttcagcataaaa

SEQ ID NO: 185430 - DNA, 555 bp, Homo sapiens
gaataatttgtcagagggactctaaacaaagaattgcctratatcataaaaacagtgaagaagaaaatgtggtttcctgtaagaaaacaagtcccctgtagtccttttacttttttccctttctagtctgcatttttacaatatcagctcattaagcatcatttcagtgacttgtgttcatacaccatttcaaatctaggtagctaatgaaacaataaagtatttacatagaaagaaaaagcaatatacatccccactctatattgaagtgtcttggaaatgggggagactacaatttgactataagcctttcccttgaagttaattgaccgtttattcagactgcttttgaattcagaaggtccgctgagcatatatgcatattaccatagtcctcattctttgaaggcctggctaattcacacctcatttgtttatttatttttggaaatatagatatgcttatcatatacttcctttactactgtttgtccaaagtctgtttcctttaagttgtcatttgtcaactgggaatttggcaattgtaacgttaat

SEQ ID NO: 185431 - DNA, 551 bp, Homo sapiens
ataagaataatttgtcagagggactctaaacaaagaattgcctaatatcataaaaacagtgaagaagaaaatgtggtttcctgtaagaaaacaagtcccctgtagtccttttacttttttccctttctagtctgcatttttacaatatcagcycattaagcatcatttcagtgacttgtgttcatacaccatttcaaatctaggtagctaatgaaacaataaagtatttacatagaaagaaaaagcaatatacatccccactctatattgaagtgtcttggaaatgggggagactacaatttgactataagcctttcccttgaagttaattgaccgtttattcagactgcttttgaattcagaaggtccgctgagcatatatgcatattaccatagtcctcattctttgaaggcctggctaattcacacctcatttgtttatttatttttggaaatatagatatgcttatcatatacttcctttactactgtttgtccaaagtctgtttcctttaagttgtcatttgtcaactgggaatttggcaattgta

SEQ ID NO: 185432 - DNA, 555 bp, Homo sapiens
gaataatttgtcagagggactctaaacaaagaattgcctaatatcataaaaacagtgaagaagaaaatgtggtttcctgtaagaaaacaagtcccctgtagtccttttacttttttccctttctagtctgcatttttacaatatcagctcattaagcatcatttcagtgacttgtgttcatacaccatttcaaatctaggtagctaatgaaacaataaagtatttacatagaaagaaaaagcaatatacatccccactctatattgaagtgtcttggaaatgggggagactacaatttgactataagcctttcccttgaagttaattgaccgtttattcagactgcttttgaattcagaaggtccgctgagcatatatgsatattaccatagtcctcattctttgaaggcctggctaattcacacctcatttgtttatttatttttggaaatatagatatgcttatcatatacttcctttactactgtttgtccaaagtctgtttcctttaagttgtcatttgtcaactgggaatttggcaattgtaacgttaat

SEQ ID NO: 185433 - DNA, 580 bp, Homo sapiens
cttgacttctgtgcactggcaggctcaacaccacatggaagctgccaaggcttgaggcttgcaccctctgaagccacctccccagctctatgttggcccctttcagccatggctggagaggctgggacacagggcaccaagtccctaggctgcacacagtacaggacccctgggcccacaaaaccactttttcctcctaggcttctgggcctgtgayggaaggagctgcggtaaagacctctgacctgccctggagacattttccccattgtcttggggattaacatttgtctcctcgttacttttgcaaatttctgcacccagcttgtatttctcctcagaaaatgaaattttcttttctattgcatcatcaggctacaaattttcctaatatttatgctgtgtttcccttttaaaactaacacagcactgaagtcacctcttgaatgctttgctgcttagaaatttcttctaccagataccctaaatcatctctctcaagttcataattccacacacctctagggcaggggcaaaatgcctccagtctcttggctaaaacataacaagattcaccctt

SEQ ID NO: 185434 - DNA, 562 bp, Homo sapiens
aagcttgcattcctcattggaagcaagtaaaactcccaaaaaagaggggttgtacagcaaaataaactttagatattgataaaatgttggaagatcagagattttctggaggggtgttctcagatctcagcaaattgtcctattggtgtgagccataaaatctcatgctggtaccaagcaccaatagaagatttgtcaaaggtcagagtcatcttcactcagaatccctctgtggttaccaaaaaggtgaacccagaaaatctgagacaggtctcagctaatttagaaagtttattttgccaaggtttaggacacgcacccatgatgcaggctcaggaagtcctgacaacatgtgtccaaggtggtttcggtgcagcttggttttatacatttaagggaggcatgagacatcagccaagtatatttaagaaatacrttggcttaatccagaaagctggtgcaattcaaagtgggggcttccaggctacaggtaaatttaaacattttctggttgacaattggttgagtttgtctaaagacctgggatcagtagaaaggaata

SEQ ID NO: 185435 - DNA, 566 bp, Homo sapiens
gaattcaagctcatttgctacagaagtttgatcttctattaaaatgtgatggataataaataatgcatacctcagggattaagaagttttccaaggaattgaagaaatttactttaacaaaattttaattccaaagcctacaatatataagcatttaggaatgttaactctggtacaattattatttttattactcatttatttattttaagcaggatcttgstctgtagccctggctggagtgaagtggtgtaatcatagctcactgcaactccacctcctctgagctcaagtgattctcatgcctcagcctcccaagtagctgggactacagatgtgcaccaccatactcatctaatttatgtagtttgtttttagagaggggggtttgccatgttgcccaggctggtcttgaactctttagctcaagtgatccacctgcctcagcctcccaaagtgctgggattacaggaatgagccaccactcctggcccaattattatttataaatacaaataaaagttaaatgaataaggatatttatctagttacaaaactagttttac

SEQ ID NO: 185436 - DNA, 592 bp, Homo sapiens
tatcttcatataagtgcatgacttaaattccatagcaagagaaggaaagttatttgttatctagggagaaatatgaccgcatgccaagtttacagccacatattttaattaacaagctattgacctgttaaaaatactaaatwcaaataatgtaaaaaatttagtcttcccattgcaaaacctgttattcaaagaaatccacagaatcattaataagcccttaacacaattagctttatcaagcagccgataatttttctagagacaaatttttagattataaagttctgtataacttttagctacatgtcagcacttaatgatatttacttcccaaattttattaatttttagatataaatgagttgacagaattgtacaatagacacccataagtcttccacctagattcaacaactattatttttgtatatttgctttctcttattctctctctctctcaatctgaatttgtttcagaaaaatcatgacaattcatctctaaatatttattaaatatttcataagaataaagaaatgctacatccctacatctataatataattaccacaattgactaaattaaaataa

SEQ ID NO: 185437 - DNA, 592 bp, Homo sapiens
tatcttcatataagtgcatgacttaaattccatagcaagagaaggaaagttatttgttatctagggagaaatatgaccgcatgccaagtttacagccacatattttaattaacaagctattgacctgttaaaaatactaaattcaaataatgtaaaaaatttagtcttcccattgcaaaacctgttattcaaagaaatccacagaatcattaataagcccttaacacaattagctttatcaagcagccgataatttttctagagacaaatttttagattataaagttctgtataacttttagytacatgtcagcacttaatgatatttacttcccaaattttattaatttttagatataaatgagttgacagaattgtacaatagacacccataagtcttccacctagattcaacaactattatttttgtatatttgctttctcttattctctctctctctcaatctgaatttgtttcagaaaaatcatgacaattcatctctaaatatttattaaatatttcataagaataaagaaatgctacatccctacatctataatataattaccacaattgactaaattaaaataa

SEQ ID NO: 185438 - DNA, 589 bp, Homo sapiens
ttcaatcattaacgaatatcataattgagggcctgtgctgggtgccagaaatctaccagtgagcaaawcagcacggatctttgtccacagtaaatttacagatcagaggaaacagaaaaacaatcagttaaataaaacaggtctgaaaattgcgtatgagaacccaaagcagaggtacctaatcaggtcaaaaaaaaaaaaaaaatggagcaaattgtgcctaataacttggtatttttctgcatccatttgatgttctagctacatttcttcacatgtcccattactaaggtcgacactttcatgcagttgcatatgttgttcccagtattactttcctgttgctgccctaacaaattgtcacacttttgcagcttaaaacaacacaagtagattatgttacaattctggaagagagaagttctaaaatcaaggttttcacagggccagattcttctggaggctgcaggagaaaacctgtttccttgcctttttctgcttctagaggcttcctgcattcttgcccttgtaagccttccttcctcccagcagtccagcctctgcttttgtcatcatatctttttctctc

SEQ ID NO: 185439 - DNA, 490 bp, Homo sapiens
ttaagaggaaattagacacttttattgcaagagaatgttacaccgaaaatggattaagagaacaaggagtagggaagcaggtgaagctgatttattatgtgggcacaggagcatgggggaagtggccattttytaccacgtagttacttatgtctcactggaagaacccacatcaaaagataattatatacagtcatggaaatggtgacagctgcattttggcaagttggcatgcaaattactggctctattcaggttacgtaagcatgaatcgctgagaaatttgagatgaaaagattgtcaacggtttctggttggaagacctaatgaacattgtgaaacttagtgcaaaagacagcactgtcttcaaaagtcctagagttctgaattcaaataaatctggacttttatatcatattcataaaatagttcagaggatatacatttacagagaacaggacattgttaaatatcccaatttctcaatttc

SEQ ID NO: 185440 - DNA, 307 bp, Homo sapiens
aatttcaggtttttcgtttttaaaaatctattgggagactgcgtttccatggcaccatatgcaaccaattattatttctgagagagcttaacaactgcctgaccatcacctaatgatcacctgtaattcctgatgggtagtggagggctctcctgccctgctcatgtctgactactaagtacmttctgtaacaaaaggactgaaaatactacagagtttgtagcatagatataaactttagggcctaggtgcctgtttttatagttatagggagttatttttgctcttcaatcttgtccttgccttt

SEQ ID NO: 185441 - DNA, 492 bp, Homo sapiens
aggtcaacctggccagcatcctgcttttgggcaggatatacataaaagacactggaaaagtgaccatcctatggcagatatccctcaaaaaggcatatttaactttaatgaaataacagttcagggctgaacttacattgaaattgacaaatgtaattttgaatctcattaaggctgtcaaatttttgwgttagacataaagtaaaagaatgctgcaattcccaacttcctgttcataaagtaaaaactaaaaattgtaaatttctgatttatattttacctttttgatacaaaatgcaacgacctagctccataacacacattttaaaattttgttcctttccttcttaattgaccacctaagagtaaaattaatccttctggggttaaaagtagttcgcattaggcatgcctaataacttctttcaaacttacggttttcattaattttcaacacacttgatcattagaatcagtactcttgctttccaa

SEQ ID NO: 185442 - DNA, 472 bp, Homo sapiens
tccatgtgataatctataggattgcacaactcctcttaggacagtaatgaaaggaaaagtaacatttgttctgccaaagtatgtggacttgctgacatttgctgaaatatagatagcatctgagtgaacaggatgttttcctgaaggtgctttggagaggcagtaggttacatatcttttccatacatatataaggcagcttgaatttctggtaattgtgagggcttgacccttgtaactatttccaataragacctggtggcttttggactttgtcaagatcatctgatgatatacacaatctggtgagaaacttgcctttgtgattttcagcaatgtttgtctatttctccccattcctcattggaatgatgatttaagggagacagaatctggaattactggtggggaggggagtcagcagactttaaatcaagtgtacctgtcatttaaattgcctgattttagattg

SEQ ID NO: 185443 - DNA, 564 bp, Homo sapiens
atgacaacaagggtttaaagatcatgtatagtagggtcagttgtagggaaaggaattataagtaattgaaaatattgtgctagaaagggcctttgatattacaatgatgtaaagtcttaagagttaaactggaatgtagcagtcacacagtcatgtttggatgggtagtttggatagtgtagttgtcatcgaatccaatctaatagtcatcaaatgaagtccaattcagattgatgaatacacgtatgatgctcactgtgtaccatgtactgtgttagttgtggtgaagtcaaaaatgaatgttagagcacctgtttctaagaaacttatagtccactgaaggcacagggtagasgtggaagatattataagtagtaaactgtggaaagtgacagggtagaatgtatgtaaggagacatatgcatttgtagaacatgtatgaggtacagaaataacatcataagagaacagtaacattgtcttctgagtatgacttttcttaggttgaggggttagggaaaatgggaaattttaggaaagaatttccacctgagctttttaaag

SEQ ID NO: 185444 - DNA, 538 bp, Homo sapiens
agttgaatgacgacataacaaaaatataattgttaggagatactgcatatgcggtagatcatagcatttattcaaaatagtcactgatcctctctttcagacccattcctctcaggccaccaacaatagtaccaagagaagtggggcacttctataagacacctgaacatgtgaatgtaactttggatgacaggaagaggttagaatgctttggagrgctcagaagaagaaaggaggatgtgggaaagtttggaacttcttagagacctgttgaatggttttgaccaaaatcctgatagagatatggacaatgaaatccaggtgaaggtggtctcagatggaaatgaggaacttacttggaactggagtaaaggtcactcttcctatgctttagcaaagagacttgtggcattttgcttcttccccacagatccctagagatctgtggaactttgaacttgagagagatgatttagggtatctggtggaagaaatttctaagcagcaaagcctttgagatgtgacctgtcggtttcca

SEQ ID NO: 185445 - DNA, 635 bp, Homo sapiens
gtagaatttcaggcaaagtagtagagctattttatagcaggtggccattcttaatcttccttaagtgtacctaacccaagggtctattatcttcttgtacataagacttggtgataagattgtcatctttctaaataaggtcaagtttaagagatttcatacacgtttgctacaaartcaagtttaagatatttcatatatgtttgccacatctgagatttttaaaaatacttctagtttaacataattttatgtacattcttccaaatactttttgctttgcccttcactatgttgaggtaaacctgagccacatttttacctttcattcctaagaaacacatcaaaatattagacccatcaaacatttattgaagtgtcagacgatattttcaataaaaagggggtttcaagggctaaaattcaggaagttaatgtgccagacttaaacatactatgatctcaaaaagtttaggtttgcttcagaatgtaaaattaatcaatacaagatgggtctacaatttagaaaaacatatccctctttcctttaattctttttctgtcactactatttgtgagaaaacaacagaaatgttacagagtgaaatggacctgtttgcttttaaagttttgtt

SEQ ID NO: 185446 - DNA, 635 bp, Homo sapiens
gtagaatttcaggcaaagtagtagagctattttatagcaggtggccattcttaatcttccttaagtgtacctaacccaagggtctattatcttcttgtacataagacttggtgataagattgtcatctttctaaataaggtcaagtttaagagatttcatacacgtttgctacaaagtcaagtttaagatatttcatatatgtttgccacatctgagatttttaaaaatacttctagtttaacataattttatgtacattcttccaaatactttttgctttkcccttcactatgttgaggtaaacctgagccacatttttacctttcattcctaagaaacacatcaaaatattagacccatcaaacatttattgaagtgtcagacgatattttcaataaaaagggggtttcaagggctaaaattcaggaagttaatgtgccagacttaaacatactatgatctcaaaaagtttaggtttgcttcagaatgtaaaattaatcaatacaagatgggtctacaatttagaaaaacatatccctctttcctttaattctttttctgtcactactatttgtgagaaaacaacagaaatgttacagagtgaaatggacctgtttgcttttaaagttttgtt

SEQ ID NO: 185447 - DNA, 572 bp, Homo sapiens
ttgttcgttataatttaccagtcttgagtgattttgtagcagccccaaatagactaccatcatttcatatgatcccatttaaaacataagaaaagtaatctatggaggtggaggtcagagttaggataattgaaatgaggcaaaaggcagctgttggttgctgaaaaattcagtatcttggtctgagttttggttatatatataataagccataagctgaataggtttcatgcgttttattttatataaatgaaggcttaaatttaaatataagaaaaaaaaaaaagaaggttctcctagatacttcctatcctccagtacattctctcttttccttagggttgttttgttttgttttgttgagacggagtctcactctgtcgcatcctgaagattattaggacttygatggactggatagtagagtgagtctaagcgccacatccctccattgcttcctctggatatgagggaagagaggtacgtttcttgtccctagggaggtaggctcgaccaggagggacctggttcatttcggccaggctgtcacggcttccagagcacctcgccgc

SEQ ID NO: 185448 - DNA, 468 bp, Homo sapiens
ttaactgtttatatctttatttaaagaacttacagtaacagtagacataactactggccaaattctcagggacttctgagcattcataatgctcagcacttataatgcactaggaattgtgctgagaattttcacatcagtcaattcacacattgccttcaaagctcccaaacgtggggtcgacatcctaaactgagttcaacctgaggaatccatcaacctgactcattctaaggtcacatcatatasagtggtttggagtttggaatttgttcccacaggattaactgtagtgaaaatatcccgatgttatagaagaatgaacaagaagagaaggaggaagaggaagatgagatctaatgtgaatctgactcaatttcttgcagaactatttgagtaaaactagcagtggaaatgtccacagataaatcaagatgtttctgacataggaataagaaactgcagttt

SEQ ID NO: 185449 - DNA, 604 bp, Homo sapiens
ctttgcatggtttaaaatattatagttatttctcaaggtagagggaatcaatttttcttgtagtgagttcattcctttcacagatgtccatacaattaatagactccatgtgggtatctatgaatctgacctggaaaggccatgaatggctgtctcatttttccccagctgttcttaaatctaaaacataatactacccagcagagtttagatgcacatcgaggctttatttgtagggaactaaaataatatttggttctcaaatccaaatgatctagcagactctgaaaggcagaactgaaaagtcatacatgagactgaaccctcacatctgtacagcatttcacaatttaccaagcatatttaaccctattatctccttggattgttacaagaaactcttgaaataaacagagtaaaagcccattgtctgcattaatgaaagaaagaaagaaagaaagaagaaagaaagaaagaaagaaagaaagaaagaaagaaagaaagaaagaragaaagaaaagaaagaaagaaaagaaactgatggctctgtggctgatccaacatgtccaagttctgacagccagcagggcagggatagaaatct

SEQ ID NO: 185450 - DNA, 597 bp, Homo sapiens
tatgtggaacacaagcaactataacatcagagccgtgggttcttctagtataacacatgctaagaatctccagcagggagaaaaatatcccattcctcttgataaactgacattggtaaaatgatattttcagatggatgaaaactttggcattatatagcccatatttcttagacttgatttcatggatctcttgtggagaggggtagtcaggggttgaggtttttggcatcattggacatcatgaaatatgtaaataagatggcatgtttgtgtgtatatgagattttattgtgcagaagtatccgaraaagataaagaaccatctgttttctcccacggactcattttacagatgggagtactaaggaccaggctgacttccacagtgtcccacagcaagtaactgacaggactggctctaaatctttgaattatggctaatagatgggagcctgcttgaggcacagggtcaggggctataaattgaaaaccctagcatgaaattaacctgcagttcagttttgtttgatctgcatagttttttatccattaggaaaagtcacacaaatatccacattcttctgaaaaattgca

SEQ ID NO: 185451 - DNA, 432 bp, Homo sapiens
  misc_feature (1)...(432): n = A,T,C or G
nnngaattcctctggcttcagtgaacaggctgaagtgagcaagcctagaagtcaggaagacaactggaggcccttacaataaaccagtgtaaaagagaataaggccaggcatggtggctcctgcctgtaatctcaaaactttggaagtccaaggggggtggacagcttgatcccaggagtttgataccagcctgagcaatgtggtgaaaccacatctctacaaaaaacacaaaaattagctgggtgtggtagcttatacctgtggtcccagctaccccagaggctgaggtggggggatagcttgagcctgggaggtttagactgcagtgagctgagatcacacaactgagctccagcytgggcaacagaaggagactgtctcaaaaaaaaaaaaaatcccattcttcacctattactgccctaatgttctca

SEQ ID NO: 185452 - DNA, 553 bp, Homo sapiens
acccagcctctttcttttctttggaagttacttttgtgggggctatgcttataactatgaatctgactttggattttkccacgaagattttacctggcaggcagccacttacaactttctataagaatgaagggaggaggcaggaagataagtcatacaaatctatcatgctgtttcttgtgattggctctggtaaaagggttaggaaaagagacataacacgcaggctaaaatgcaacttagggattctccatagattccaagtgtctacattctccttgtcacctattagcaaagaaaacccaatgctggctggtttgctgtataaaataatctaagagattcacggaatttgctcaggatgatttcaccaatagaatggaaattgttccttctagaagaatttccattagccctttgaaatccttcaacattcattaaagccaaagagttttcacctaatttaatctgatgggtatgtgaccagagtccttctagggaatacagactcccagactattcagctggaaagtgaggagggaatttactactc

SEQ ID NO: 185453 - DNA, 591 bp, Homo sapiens
ccggttcccgcttgctcctctccctacacacctccctgcaagctgagggagccggctccggccttggccagcccagaaaggggctcccacagtacagcggtgggctgaagggctcctcatgtgcctccaaagtgggagcccaggcagaggaggtgyggagagccagcgagggctgtgaggactgccagcacgctgtcacctctcactagtaccattcttataactctcctatgagtttgaaattatgtcacaataaagttacccaagaaaagcctcagttaagaattcattctgcagtagaacattcactgattagttttgtgacattaacactttagtcaattgaagcttctaaacatcttgcagattgtagttaatggtaaatatatcagactctaaaaaagtctgtacactttcccagagtatgaaagttttataataagttccatcaagctccaaccccatgtttagtcagctgcctttttcttctgaattcttctggcttctgatgttttccagaggcagaggaaaaggaaaagtcactcaccagaagaaggtctcagctgagtcacaactcagaaataggccagc

SEQ ID NO: 185454 - DNA, 578 bp, Homo sapiens
gaaggttttattcagtgattaaaatcagatgacttgcattgcaaattaagagaaaaaggctgactaatagtaccacatgttcaggagtgactcgtgggtatgtcctgaataattatcacaccaggcaaatgtgttggagtaaaccactttcccacaagggcctccctatgccacattaataggtcacttactagacttagcacaataaaatgatagtctatgcaatttagtcatttccaaaagggaagagcatttctctggcacctgagtggatcagatcaaggtgactttagagaaaactgaaggagaaggggcgatggcacaagctatggtttggatcactctgaatygactcaaaaaaaaaaaaaggtacctaattatctcataaatcttttggtacactgtttccagtgaagactctgactgtgttgagcaaataagttgaaccagcaaaataaacagcaagttttggatgaaatccttaaatatagagcttctgattcaggacaggtagtcacatttgctaggggtctatatagactaaatgaagtgttccagaattacataggggagattgg

SEQ ID NO: 185455 - DNA, 508 bp, Homo sapiens
cttctttgggaaggttttattcagtgattaaaatcagatgacttgcattgcaaattaagagaaaaaggctgactaatagtaccacatgttcaggagtgactcgtgggtatgtcctgaataattatcacaccaggcaaatgtgttggagtaaaccactttcccacaagggcctccctatgccacattaataggtcacttactagacttagcacaataaaatgatagtctatgcaatttagtcatttccaaaagggaagagcatttctctggcacctgagtggatcagatcaaggtgactttagagaaaactgaaggagaaggggcgatggcacaagctatggtttggatcactctgaatcgactcaaaaaaaaaaaaaggtacctaattatcwcataaatcttttggtacactgtttccagtgaagactctgactgtgttgagcaaataagttgaaccagcaaaataaacagcaagttttggatgaaatccttaaatatagagcttctg

SEQ ID NO: 185456 - DNA, 275 bp, Homo sapiens
taccaaccaggaggcccgaccaaaagcagatcaaataggagtgacagagttcagagctgcctgggacaaagttttaaattttattttcactgcaacccataggaagataaacattttatatcatgacccagcacacacacacactcacagcaaaacttatcacaaaacactatttctttattgtggatgaactcacatgtttttcattccattaaaaaaaaatgctggttgctrcccactaagttgacttcatagtgggccataacccacagttt

SEQ ID NO: 185457 - DNA, 451 bp, Homo sapiens
gataggaaaaacattatctataaagtaaaaaattgataaatttagaacttctgtatatcaggagatatcatcaagagagtaaaaaggactataaattggttaaataactttggaaagttgtctaatgctgtctaaacatttaaacatctactgaacatattcataacctaattcctagaaattctcctcttaggtggagtagaatttctaacagaaatacatatgtgctcccaaaagacatctacaagaatgttcatggcaacattcttaataattaaaaaaactagaaactactcaaaatcaacaagagaatagataaatggtatcatactcccmcagtgaaatacagtaatgaaaatgaacaaactacacgtgagtacaaataacacggatggatctcataaacataatattgagcaaaagaagccaaacatgaaagaataaactctgt

SEQ ID NO: 185458 - DNA, 535 bp, Homo sapiens
ctattgaattcaatcttgtcaaagttgtcttggacctaaaaaggaataaggaaaaactccaacaaatcagtccgatataagcagtatctaaggcaagtaaaayagaaagacaaagcctcctttggctcccattttaatcaatccaattaaccaacagccatatcctacatatttgctttaggtattacactttcagtggctcaattaagatgttacatttagcatgacactgaaccaacatctgtccatatcactcccttggcacataaaatactgacctctcaaatagttaccgtttcatgtgtacacactatcttcctattaataaacagactaccaatcctagcaccgacctctcaaatagttacagtttcatgtgcatacactatcttcctattaataaacaggctaccaatcctagcacatggaagaaactgagaatgtcaattactcagtatgagccaagtacaggtacattatctttacatacacggtcaaagaagaggctgggcatggtggctcatgcctgtaatcc

SEQ ID NO: 185459 - DNA, 535 bp, Homo sapiens
ctattgaattcaatcttgtcaaagttgtcttggacctaaaaaggaataaggaaaaactccaacaaatcagtccgatataagcagtatctaaggcaagtaaaacagaaagacaaagcctcctttggctcccattttaatcaatccaattaaccaacagccatatcctacatatttgctttaggtattacactttcagtggctcaattaagatgttacatttagcatgacactgaaccaacatctgtccatatcactcccttggcacataaaatactgacctctcaaatagttaccgtttcatgtgtacacactatcttcctattaataaacagactaccaatcctagcacygacctctcaaatagttacagtttcatgtgcatacactatcttcctattaataaacaggctaccaatcctagcacatggaagaaactgagaatgtcaattactcagtatgagccaagtacaggtacattatctttacatacacggtcaaagaagaggctgggcatggtggctcatgcctgtaatcc

SEQ ID NO: 185460 - DNA, 633 bp, Homo sapiens
taaattttaatataactgtataatttaacagtgtataattcaatagaattgttcactcatttgacaaataaaatttagatcataattattatttgccaaagacagtacaaagatactcaacataatactggcctatgttcccaaggaatrtaaagacaattacagcagagtgtgacaagtactgtaatagagataagcagaggattttgtgggagcactgaggagctaacacaatcttgacatctggggaaagattcgcagaaagagtgacaggacaacagagctgagttctcaagcagcatcaagagtcaaacagatcaagaatgggataaagggtattccaggtagaagagaatgtgagaaagccccgaagtggaggcaagcatggttagtttggaagaactgtgagtatttaatgtgaatggggcacctggtgctggagggtggtataactaaggctcttcgtgtaagtgcaagtaacaggaaccaccttgggttcctttaaaaacaaaaggaatttattggaaaaacaatgggtaacctcacagatctaatgcaaaggctagaaaaatctaggctctgaaattaggctggtatcaaggtagagtaggcagccagaactgcggctgaacc

SEQ ID NO: 185461 - DNA, 633 bp, Homo sapiens
taaattttaatataactgtataatttaacagtgtataattcaatagaattgttcactcatttgacaaataaaatttagatcataattattatttgccaaagacagtacaaagatactcaacataatactggcctatgttcccaaggaatataaagacaattacagcagagtgtgacaagtactgtaatagagataagcagaggattttgtgggagcactgaggagctaacacaatcttgacatctggggaaagattcgcagaaagagtgacaggacaacagagctgagttctcaagcagcatcaagagtcaaacagatcaagaatgggataaagggtattccaggtagaasagaatgtgagaaagccccgaagtggaggcaagcatggttagtttggaagaactgtgagtatttaatgtgaatggggcacctggtgctggagggtggtataactaaggctcttcgtgtaagtgcaagtaacaggaaccaccttgggttcctttaaaaacaaaaggaatttattggaaaaacaatgggtaacctcacagatctaatgcaaaggctagaaaaatctaggctctgaaattaggctggtatcaaggtagagtaggcagccagaactgcggctgaacc

SEQ ID NO: 185462 - DNA, 633 bp, Homo sapiens
taaattttaatataactgtataatttaacagtgtataattcaatagaattgttcactcatttgacaaataaaatttagatcataattattatttgccaaagacagtacaaagatactcaacataatactggcctatgttcccaaggaatataaagacaattacagcagagtgtgacaagtactgtaatagagataagcagaggattttgtgggagcactgaggagctaacacaatcttgacatctggggaaagattcgcagaaagagtgacaggacaacagagctgagttctcaagcagcatcaagagtcaaacagatcaagaatgggataaagggtattccaggtagaagagaatgtgagaaagccccgaagtggaggcaagcatggttagtttggaagaactgtgagtatttaatgtgaatggggcacctggtgctggagggtggtataactaaggctcttcgtgtaagtgcaagtaacaggaaccaccttgggttcctttaaaaacaaaaggaatttattggaaaaacaatgggtaacctcacagatctaaygcaaaggctagaaaaatctaggctctgaaattaggctggtatcaaggtagagtaggcagccagaactgcggctgaacc

SEQ ID NO: 185463 - DNA, 633 bp, Homo sapiens
taaattttaatataactgtataatttaacagtgtataattcaatagaattgttcactcatttgacaaataaaatttagatcataattattatttgccaaagacagtacaaagatactcaacataatactggcctatgttcccaaggaatataaagacaattacagcagagtgtgacaagtactgtaatagagataagcagaggattttgtgggagcactgaggagctaacacaatcttgacatctggggaaagattcgcagaaagagtgacaggacaacagagctgagttctcaagcagcatcaagagtcaaacagatcaagaatgggataaagggtattccaggtagaagagaatgtgagaaagccccgaagtggaggcaagcatggttagtttggaagaactgtgagtatttaatgtgaatggggcacctggtgctggagggtggtataactaaggctcttcgtgtaagtgcaagtaacaggaaccaccttgggttcctttaaaaacaaaaggaatttattggaaaaacaatgggtaacctcacagatctaatgcaaaggctagaaaaatctaggctctgaaattaggctggtatcaaggtagagyaggcagccagaactgcggctgaacc

SEQ ID NO: 185464 - DNA, 560 bp, Homo sapiens
tggttgggatgagagtgtgaaccttgtcttttccttagaatgatattttcttaaaagcaaaataaaatatgtggggacatgtctttcctcagctccctcgtcttcttttgtcctaaacagcaacaagtttttgtttctgtaaggtgctgagtatttggcttagaataaaaaaatatatgttctatgaagccagagataatgtacctatattattctgatattttaggagtctctctctctccctctctctttctctctctgtrtatatatatatatagacacacacacacacatacactttattatttagatttgttttaggttcacagcaaagttaggcagaaggtgcaggttcccttatatcccttgtcaccacacatgcacagcctcccccgttatcaacatctcccaccagagtggtacatttgttacaatcaatgaacctacactgacacatcatggtcaccaaaagtccatagtttacattagagttcattcttgatgttatgtattctatgggtttgaccaatgtataatgacatgtatcactattatagtat

SEQ ID NO: 185465 - DNA, 685 bp, Homo sapiens
  misc_feature (1)...(685): n = A,T,C or G
gtttctcttccatttccctgacctctaaatgttggagtacccaaggcctgttccttggacatcttttctttttttacttctgttctattttaattgrtcttagctttttggctatatctctttgtattgggttttgtcgtcatttttctagggattacaatgtaattttaactttcttagtctacgtagagttactattgtacacatcacacaatatataaacatcttgcaatcacataggtctctcaaagtccccactactttttaggttattgtagttgtcatgtgtttgtttgtttgttattgttttttgagggaggttttgagggaggttttcactctgtcacccaggctggagtgcantggttcaggctggaggctgtaaaggcttactgtggcctctacctcctgggctcaagtgatcctcctgccttagcctcccaagtagctgggcccacaggcacatatcaccatgcccaggtaattttttgattttttatagagatggggtcttactttactcctcaggctggtcttgaactctttgggctcaagtgatcctccccacttggcctcccaaagtgctgggattacaggtgtgagacactgtgtctggcctgtcatgcattttatatttacatacactgaaaaccatccaattgtaaacgttttaaaatttaaaaag

SEQ ID NO: 185466 - DNA, 685 bp, Homo sapiens
  misc_feature (1)...(685): n = A,T,C or G
gtttctcttccatttccctgacctctaaatgttggagtacccaaggcctgttccttggacatcttttctttttttacttctgttctattttaattggtcttagctttttggctatatctctttgtattgkgttttgtcgtcatttttctagggattacaatgtaattttaactttcttagtctacgtagagttactattgtacacatcacacaatatataaacatcttgcaatcacataggtctctcaaagtccccactactttttaggttattgtagttgtcatgtgtttgtttgtttgttattgttttttgagggaggttttgagggaggttttcactctgtcacccaggctggagtgcantggttcaggctggaggctgtaaaggcttactgtggcctctacctcctgggctcaagtgatcctcctgccttagcctcccaagtagctgggcccacaggcacatatcaccatgcccaggtaattttttgattttttatagagatggggtcttactttactcctcaggctggtcttgaactctttgggctcaagtgatcctccccacttggcctcccaaagtgctgggattacaggtgtgagacactgtgtctggcctgtcatgcattttatatttacatacactgaaaaccatccaattgtaaacgttttaaaatttaaaaag

SEQ ID NO: 185467 - DNA, 623 bp, Homo sapiens
aatgctgtatttagaaactaatgatgcagaggccgggcgcagtggctcacgcctgtaatcccagcactttgggaggccgaggcgggtggatcacgaggtcaggagatcgagaccatcccagctaacacggtgaaaccccgtctctactaaaaatacaaaaaaattagccgggcatggtagcaggcgcctgtagtcccagctactccagaggctgaggcaggagaatggcgtgaacccgggaggcggagcttgcagtgagccgagatcgcgccactgtactccagcctgggcgacaaagcgagactccgtctcaaaaaaaaaaaagaaagaaactaataatgcagaaagaatcctaaagacttcactgaaaatytggggacacattgtaggtccattccacattgttattacattctaaaccttatagttaaaaacatgtaatttcataaatacttaaacactgtctactccgaaagactccaaagactccaaaaatatttcttaaaaatttttagttatggaaaagcaggcataagtaaatttttcttaaaaggaaaaaatttaagtaattgtaatactttccttaccattataaaactgtgcattgtaagtattactgtatt

SEQ ID NO: 185468 - DNA, 623 bp, Homo sapiens
ttatgtcaccagagaataaacatttgcatttaaatgtattccaattctgtgcccaccaggcaaccacttgatttatgacttaaggttaagtctgggaagacttgcttctgaaagggaagggtcctgattytagatagctacatacctccaatggtaagtgaattggattttggcttacctaccagactcgagcttagttaatgtaagtcagtatccaatgattgctatgtcttgataatagttctggagaagtagatttgaaccagagtggtgaattaaacaatggcgttctctccggaccagatattcttgctctgccattaacttgcagtataattttggtcaagttactcttccccagaagtctggttacttataaaatgaagacattaaacagaggaaactctaatattctttctacctctgtatcattatagttcacgaattaccaaccagagtgacctcagcatggaacttcccaactgggaagctatctggaatcacagccaatcagcctctcaacatgtctgatcatggcaacactaaagtccacagaaagagtacccacgaacacataagaagttagttttctagagcttaacatgcagtgaagcagagcaaca

SEQ ID NO: 185469 - DNA, 623 bp, Homo sapiens
ttatgtcaccagagaataaacatttgcatttaaatgtattccaattctgtgcccaccaggcaaccacttgatttatgacttaaggttaagtctgggaagacttgcttctgaaagggaagggtcctgattttagatagctacatacctccaatggtaagtgaattggattytggcttacctaccagactcgagcttagttaatgtaagtcagtatccaatgattgctatgtcttgataatagttctggagaagtagatttgaaccagagtggtgaattaaacaatggcgttctctccggaccagatattcttgctctgccattaacttgcagtataattttggtcaagttactcttccccagaagtctggttacttataaaatgaagacattaaacagaggaaactctaatattctttctacctctgtatcattatagttcacgaattaccaaccagagtgacctcagcatggaacttcccaactgggaagctatctggaatcacagccaatcagcctctcaacatgtctgatcatggcaacactaaagtccacagaaagagtacccacgaacacataagaagttagttttctagagcttaacatgcagtgaagcagagcaaca

SEQ ID NO: 185470 - DNA, 499 bp, Homo sapiens
atatattttttggagaacaatcatattatagcaaggttacatcaacacgatttatgacttgatgctgaccttgatcacctggctgatgtgacataggtgatataatatttgtcagattttccaccrtaaaaatactcctccccacaccccatactgtactctttggaaggaggtcactatgtgcaccctgcatttgtggggagcagaatgtccacataaattgtttggcattctgcaagggaaatttgtgtcttattccccataacatttatattgtaatgctgtctatctatctatctgtcatctttctataactgctcttttctttttaggttcaataaagcagtaaaaatgatcttgctctgtaaggttcaatattatttctaaatctaaagtgatatgtcttttctttatgccacaattaattaagcagaatgatgttcattttatttgctttcattttgactaatatttggcttttacttaaatgccaaattct

SEQ ID NO: 185471 - DNA, 499 bp, Homo sapiens
atatattttttggagaacaatcatattatagcaaggttacatcaacacgatttatgacttgatgctgaccttgatcacctggctgatgtgacataggtgatataatatttgtcagattttccaccataaaaatactcctccccacaccccatactgtactctttggaaggaggtcactatgtgcaccctgcatttgtggggagcagaatgtccacataaattgtttggcattctgcaagggaaatttgtgtcttattccccataacatttatattgtaatgctgtctatctatctatctgtcatctttctatawctgctcttttctttttaggttcaataaagcagtaaaaatgatcttgctctgtaaggttcaatattatttctaaatctaaagtgatatgtcttttctttatgccacaattaattaagcagaatgatgttcattttatttgctttcattttgactaatatttggcttttacttaaatgccaaattct

SEQ ID NO: 185472 - DNA, 600 bp, Homo sapiens
atatttgtcagattttccaccataaaaatactcctccccacaccccatactgtactctttggaaggaggtcactatgtgcaccctgcatttgtggggagcagaatgtccacataaattgtttggcattctgcaagggaaatttgtgtcttattccccataacatttatattgtaatgctgtctatctatctatctgtcatctttctataactgctcttttctttttaggttcaataaagcagtaaaaatgatcttgctctgtaaggttcaatattatttctaaatctaaagtgatatgtcttttctttrtgccacaattaattaagcagaatgatgttcattttatttgctttcattttgactaatatttggcttttacttaaatgccaaattctctatacttctttgttataaagaagtagtttagcctgtgggctatggccattagccttgttttacagatgaaggaacaaggtggttaagagcccttactaagttcttacagcagatcagtggatgagctgcctctacaattgattcttagctttgatcccacttcactgggccttgttacatttaattatctctttgtaaattgta

SEQ ID NO: 185473 - DNA, 412 bp, Homo sapiens
tgagacagctttctcattgagtgacaaccttatgaagtcagcagtctggataggattctgtactgctctctgcaatggactttggagcgacgagagcctgggctttttcactctgtcctgctctctgcaatggactttggagtgacgagagcctgggctttttcactctgtccttctgtgaaagatgccacagccagacctacaatcaaagtgattatctkgttttaaaaaccaaattcaaagataaatgtctttcttgtaggatcctgcaaagaacaactgaagacccccagcaaaggaatttctgaaacaagtaactctgctctccatttttgcaaggcacctcatgcaatggacagagactggaaagaaagtgttgcctcaaaagggcaggtaggtaaagagaaaaaaa

SEQ ID NO: 185474 - DNA, 540 bp, Homo sapiens
gctctcttgcccactgctatattcactcccayagtgtttgttcttgtgtcttcaccccttaaaaaagtcatttgctgtacttaggttgaaaataggaggcagaggaaataaacttacatggccattcctccaacttgacttgacttacctatgtctctccccttcccatagatcactttagtggcagcatgaagaaacgatttgaacaggaggatgttggtggcaaagactaattgagaggccctctgaatactctatgcaaggctctgttgttgattcttttaagggaacttaaactatgaaacagatcccacataagccaagtaattgctcatcagtggatcacggggacaaatgttatccaaatgctgtgtatataaagcaattctttatgccttgtccatatctaatgactctgaaaccttacagcaggcagcccctgtaaactttcaggtgtacctctttgcccaaagctggtaggaaactttggatggtggtgttgtgagcgttatcagggaagctctgtagccatgcagtggg

SEQ ID NO: 185475 - DNA, 541 bp, Homo sapiens
ggctctcttgcccactgctatattcactcccacagtgtttgttcttgtgtcttcaccccttaaaaaagtcatttgctgtacttaggttgaaaataggaggcagaggaaataaacttacatggccattcctccaacttgacttgacttacctatgtctctccccttcccatagatcactttagtggcagcatgaagaaacgatttgaacaggaggatgttggtggcaaagactaattgagaggcyctctgaatactctatgcaaggctctgttgttgattcttttaagggaacttaaactatgaaacagatcccacataagccaagtaattgctcatcagtggatcacggggacaaatgttatccaaatgctgtgtatataaagcaattctttatgccttgtccatatctaatgactctgaaaccttacagcaggcagcccctgtaaactttcaggtgtacctctttgcccaaagctggtaggaaactttggatggtggtgttgtgagcgttatcagggaagctctgtagccatgcagtggg

SEQ ID NO: 185476 - DNA, 383 bp, Homo sapiens
atgaccattggattatgaatgtagtgagtcaagatcagcaataaaaagtgaaatagaatagtataggatgggaaaatggaaaattaagtagtattttatgaaacttatgttatagttatgtagtacatgtatgtgcctgtgtatggggttgctacataaaatatagttttggctgtggattgtggtcacaaagtttggaacaaaactattctagattctggtcacacctttactaagccgtaccctgttaaccatagtcatgattttttttkgggggaaaatttcagttaaagagacctcacccacctgactacagaagaaaggtaacttatgattattcccacctactcaagagttgtaatttttaagctttaaaataggag

SEQ ID NO: 185477 - DNA, 559 bp, Homo sapiens
ctaaaactaaatgtatacttttggctgtgtttggatcttttaattaatccattggtgtctctctaaacaaattctaagattataatttcaaaataagtgtctgaaaatttagatagctggaggaacaatagtttttgttttctactttctgagtaagtttatgtataaaattacttatatattagtagtagcttgcctttaagtttgccagtgtttttcttttktgtgtgtgtgtgtgtgtgtgtgtgtgtgtgtgtgtgtgtgtgtgtgtgtaatgtttatacttcattaagaattcacagggaaaaataaacatttcctactagcaatgagaattctacagaagtagtaagatatctgcaaatgttaaatgtctccacactttctgagggtttgcaatttttttaaaaaagcatatttttcaaaaccttaaaacagttttatctaggtcaccccttctcctggctggatgttaacagctagccctgcaggaggtataatattgagtagatgggcttggcagagggagctcttcttgctaaaacctgcaacgtaacac

SEQ ID NO: 185478 - DNA, 559 bp, Homo sapiens
ctaaaactaaatgtatacttttggctgtgtttggatcttttaattaatccattggtgtctctctaaacaaattctaagattataatttcaaaataagtgtctgaaaatttagatagctggaggaacaatagtttttgttttctactttctgagtaagtttatgtataaaattacttatatattagtagtagcttgcctttaagtttgccagtgtttttcttttgtktgtgtgtgtgtgtgtgtgtgtgtgtgtgtgtgtgtgtgtgtgtgtgtaatgtttatacttcattaagaattcacagggaaaaataaacatttcctactagcaatgagaattctacagaagtagtaagatatctgcaaatgttaaatgtctccacactttctgagggtttgcaatttttttaaaaaagcatatttttcaaaaccttaaaacagttttatctaggtcaccccttctcctggctggatgttaacagctagccctgcaggaggtataatattgagtagatgggcttggcagagggagctcttcttgctaaaacctgcaacgtaacac

SEQ ID NO: 185479 - DNA, 551 bp, Homo sapiens
aaaatacaattatggcatacataaaacatcataacaatgattagaaaattattttgttccgaaagcaaattagttagtacattactaaccraaatcataatttgaaattagttaacaatgataatcttcctttctgcataagaaggtagattgcaaaagaaatatagtgttgtgttcattctgcactatttcagctatggaaaatggtactagtgtgaattcttttttactgaaagctatttaaactaataaaattgaatgtcataaaagtggtagttgaattttcttttttctaaattctttgagatagctagctagctaaataaaacataaaatggatataaaatcattaacttttagattcagaaagcatcttttaatctattagttgcataaattttcaaacctgacatgagctggaatttaaatgtctcctaaagaaaagaaatttctcaaggttaggtctcaaaatgaaggtacacaggaactctagacttcacctctctcacattcctagacaaagtgcaacctaccaagcaaaaaataaatca

SEQ ID NO: 185480 - DNA, 600 bp, Homo sapiens
ggtccacactatatttatgtacatttagtctatatttatgtacatattaagcagattattttacaggctaagtactttttgcaataaattaaggttttagtaaattaaattgttatatttaattcaagttttctttatttaactaataatactctgttcctttattttattggatgagatatagaccataacaacaacaaactgaagagaagaaaaaaataacagacatgagttcaagggacatcagcgccagccaatggttttcctctccataatagctacaaagctatatttctaacccaaccacatttctaaatcatttcacttccctacagcctttatcagttctcactcagcttgaaatagtttttccctatatgaggtaattttgcacaatagacagactcactatttaatatwttattttttcttttatttagaaacactatatatatatatagagagagagagagagcgctatatacttagtaaatgtagacacgaaaaaataaggaaaatgtactctcattacacatcacaatagatagttgctattaactttctcttgtatgcatacataagttgtaaaaatgacatgat

SEQ ID NO: 185481 - DNA, 457 bp, Homo sapiens
aggcatttacattgtgaaactgtattacaattctttctgctgagatttcaaagttgctttgttcagtaatctactggagttcaaaaacaaaaggaacagtggagcattgttcatactatataccaataagctatgcaaagcaataatcttcctttccttttgtctaatctgagtgactgcatcaatacatgcacacacaagtttacatattggagcatacatatctgcctgtgtgcattaatttatacccttagtcaaaataaagtcttgattcttatacttacagcttccactgcacaagaggaatgtcaaatactatcagttaaattagcaagcacattttcagggaaattgatttttggagtctgaaatccctgaaatcactcmaagtccttgttgcttttcaggtgccccattaatctttataggactctattgacactggtgtcggctgcat

SEQ ID NO: 185482 - DNA, 476 bp, Homo sapiens
atactaggtctactcaggagtgatattgaaagttctatataaaagcattgtttggattaggcttgactgataagtggaaatatttgtaattcgtttaatatctgaacccaaatttctgattacttttgtaaaattgacattattttgacaaagtgctttctgtgaataccattgagtgttcacttttgaatctctaggcctttgagatttctctctgtcgcctttcaccactcacatacacatgtgctcactcctctytcttcctttagctcttggcctatactccttcctgatggccctgttcacaaaaacatctttgccactttattatctaccccttattctgctctccttttatataatgttacccctctgtaaatattaacctgggagtaaaagtcaaaatatgtaacaatcagcatggggatgccaggaccgctagtcagggcaggtgcctgccaagttcctattgagcc

SEQ ID NO: 185483 - DNA, 563 bp, Homo sapiens
atttttttattttttattattattttttgacagagtttagctcttgttgcccaggctggagtccaatggcaaaatctctgctcactgtaacctccaactcccgagttcaagcaattctcctgcctcaaccttctgagtagctgggattacaggtgcccaccaccacacccagctaatttttgtggttttagtagagatggggtttcaccatcttatccaggctagtcttgaactcctgacctcaggtgatccacctgcctcggcttcccaaagtgttgggattacaggcatgagccaccgtgcccagccgagggtgaccttcttaagacatgtcagaccatgccactcctccaactctccacaactttccatgttactaggatacaagcctatggccctgaaatgagctagaaggccctactttttctatctcctacctcaattcagttcctctctgatcasatcttctattattccatatctcctattataccatatctgtgattgatataagattttcaagaatttctgtatttattttgtttattgcttctccaaaagca

SEQ ID NO: 185484 - DNA, 596 bp, Homo sapiens
ttaactttcaaaggtgatgcatttcaatactggataaaatatttgcttttgtataatctcattaagagatctctggagccttctgactgatataatctacatgaatactgatttagtaattgcgagtgctactaagacttaactgggaaaaaatagaaaacatactattttaattataaacatgttcataatcctttagagtttacaaaattttttcaaattcaatctttaatcttcctgaaatagaagaggtatcaatatcctcattttgtagatgaaaaatgtaagcttgagaaaataagagaattacagaaatgtatacaaatagaaggtggtaaaaagaggatttgtgcatttttctaaatttcctaaacttaatgccattttatgatttttaaattaagttttattttgcaataatgtcatactcattttaagtcagggttatttgcaaatacataaataatacaaaaagaattaatataacagtgaagaagactcttacacaatttatttrtttgtctttttgtttttaaataaacagattaggatgagtggacactttgaatttgctatctaagttgggcagtgggtcc

SEQ ID NO: 185485 - DNA, 259 bp, Homo sapiens
aaataacaaaccctgacctcttattgtttatttgttcattttttatyttggtttgaattttcatccttatttaagtggtatattgagagtagtttgtgaaccattcaagaagatacctgagttttcaatgctgtttttaaaaaaaaaaatttttttttgagacagggtttgctttgtcacccaggctgaaatgtgatggtgtgatcttggctcactgcaacctctgcctcctgggctcaagcaatcctctcaccctagg

SEQ ID NO: 185486 - DNA, 259 bp, Homo sapiens
aaataacaaaccctgacctcttattgtttatttgttcattttttattttggtttgaattttcatccttatttaagtggtatattgagagtagtttgtgaaccattcaagaagatacctgagttttcaatgctgtttttaaaaaaaaaawtttttttttgagacagggtttgctttgtcacccaggctgaaatgtgatggtgtgatcttggctcactgcaacctctgcctcctgggctcaagcaatcctctcaccctagg

SEQ ID NO: 185487 - DNA, 574 bp, Homo sapiens
acttgttaagggtagtgagtaaaatttagtggttacagtgggatgagacatgactattttcattgactgtcatcaggtttcctcctaagaatagactactttagaactaagaggcttatttgacacctcccaccagaccccacctccaaaattgcaggtcacatttcaatatgtgatttgaaggagatatatatccaaattatgtcaactggtagaaggtataaactctaaatgagacatgaataggaatgtttgagtagagggaaagcagaggacgtgagataaaagactagagcagagaaattgctaggaaacttggcaaagttaccttctgggtctgttgcytcctttatcaaatggagttaataatattatgtacttcttaggccactaggacaataactgagagtattccttcatttaaatcagttagcatagtgccagtaagttagcattatgcacttacatgataaatgtaggatgagtaatagatattcttattgttttctattgttgttgatgtttttagaggctggaatacgaggagtgagaagaaaacaataccacccatgtc

SEQ ID NO: 185488 - DNA, 650 bp, Homo sapiens
agtgtaaggaaagaacacactggataataatgttcagtgtagaccagacaagcatctgtaacctggcatttatcttttaatgtagatattgaaagagttaaaaaggcttccaatactttatttcaaaatatgcattttatttatatgtcacaaatacttggcagttaatgaaatgtttttgaactccatcagtaagaatcatagttcagtgaatggagaaaacaaaacaaaacaaatagtatgtgtgataatccccagttcaaacttggctttggttctaaaattatagagattatatataataagacagtgctcccttctttttgaagggctttatatataatgactcrcaatttcctcttaggaaaagcttacaggtgttttatctgattgaggaatttcaaactgttcgtaactacttagtttttgatacgtttctgctctcagtataatatgtattatgcaaattctatatattatacatatataatacatatttttcagtctgattaataagaatttaaatgaagtaattcagtttaaggtactaagagtaaaaatatgatatttaattgaaatttatgactcccttccatcttccaccattaatgattctttttgtcctaattaagaacatatctaaaacagtg

SEQ ID NO: 185489 - DNA, 617 bp, Homo sapiens
cctataatttgagtaaattaattttcttattgattcaattagtaaggcctttattttgatatggtattcttatttgtcttctaattattttagtccttatggttttttaaaaattacattaaaaagtaatttaaaatgatatttagaatggtatttgtggtggtgatgtgaagaacaggagatgagcatctattgttctggaataattgtctgcatggtgaagagaagacagtgggagaaaaatgccttatctcagtatctacagatatctcagtaacagaatcacttctagttggttcattagcttgcatgccatgtcaggggcagcgtctttaatactgtctattgttattagcttccagggatgtttttggatatgggaagacagggagattgttttcagtcctgaaaacctaaggcaagataaacacaagcctgatttatgtcatgcttgtctttcaagggtcttttctactgctttctcttcccttgtttcataggtgactgtcctgacttctaccactgagctgctctccactctgtccatgaycctgataaatccagtaattattacagttgctatgagccaggtactctgctaagcccttgatgggcat

SEQ ID NO: 185490 - DNA, 610 bp, Homo sapiens
acacaccagccgtttgttttttctgccacctttccaagggtcatgtctggagtgaggataaacagttctggggaaaaaaatgatgtgaagtacagactttaagaaaattaaacattagaaaaacatttcttaaagagttatacatgtgcctgcatatacatatatatttagagagacagaatatttatacatatacatgcgtgcacacatatgtgtgccaaaattatccaaactctgtaggttttcaggtatgaataagaatagctaagataagcctttgaaatgctgttatgttttttaagcaagatcaaaagtgtctacaaaggcattccaaaaacagcaaarggtgtctgagcaacatttcagttttatttaataagtaaagattaagctgagtgcttttggttattattaacagcatattaatagcatattttattctaggttgcttagaaatgtatttgcaaagtcccaaatagaagacctaggagaaagagagaacttactgggtgccaggaattgtgctatctgctatttatgcaatgtcccatttttccagcacaacaaacataaatggtatcaggttctcaagccaacacagcttgcaggt

SEQ ID NO: 185491 - DNA, 472 bp, Homo sapiens
aagcaatcactggtgttctttaaggtaggtggtaagcatgcagcttagattgtaggaggttgagtgaatgggtgaataaatgaaaggagtgggtgtttatcattcacaagggagatctgactacaaaaggagagaaatggggcagtggcctgcagcccaattctgcagtgctttcacttattaagacagaaaatacaggctgaaatatcatgaaacatattacatctgcacacacmagactaagggattgttgctgtttctggtaccaaaaatgtattaatatatataatgctgactccaccttaccatccaaaacacacttggtttctaaacacttagctttaactaagccagtttcctcaacaactttgagaacagaaaagcaaaactttgaggccaaggcattttcatgttcaagtccatccacgattttgaacatttgtgatgttccttacaaagcacccagattgag

SEQ ID NO: 185492 - DNA, 487 bp, Homo sapiens
tatgacgtaagtcacaataagcaatcactggtgttctttaaggtaggtggtaagcatgcagcttagattgtaggaggttgagtgaatgggtgaataaatgaaaggagtgggtgtttatcattcacaagggagatctgactacaaaaggagagaaatggggcagtggcctgcagcccaattctgcagtgctttcacttattaagacagaaaatacaggctgaaatatcatgaaacatattacatctgcacacacaagactaagggattgttgctgtttctggtaccaaaaatgyattaatatatataatgctgactccaccttaccatccaaaacacacttggtttctaaacacttagctttaactaagccagtttcctcaacaactttgagaacagaaaagcaaaactttgaggccaaggcattttcatgttcaagtccatccacgattttgaacatttgtgatgttccttacaaagcacccagatt

SEQ ID NO: 185493 - DNA, 487 bp, Homo sapiens
tatgacgtaagtcacaataagcaatcactggtgttctttaaggtaggtggtaagcatgcagcttagattgtaggaggttgagtgaatgggtgaataaatgaaaggagtgggtgtttatcattcacaagggagatctgactacaaaaggagagaaatggggcagtggcctgcagcccaattctgcagtgctttcacttattaagacagaaaatacaggctgaaatatcatgaaacatattacatctgcacacacaagactaagggattgttgctgtttctggtaccaaaaatgtattaatatatataatgctractccaccttaccatccaaaacacacttggtttctaaacacttagctttaactaagccagtttcctcaacaactttgagaacagaaaagcaaaactttgaggccaaggcattttcatgttcaagtccatccacgattttgaacatttgtgatgttccttacaaagcacccagatt

SEQ ID NO: 185494 - DNA, 396 bp, Homo sapiens
tgagccctaccctcaggatttgtattcacttgacttgaggtggagctagggtgtcaactttttaaaaaagttttctcagtaagtctagtatgtagagaatcactgggsacagattaacggagaattaaaatattaggaacagaacacttgaagtggaagaagacagttccttgttaaatttgcttaaatatgtaccctctttggatgctatttttctttcattgtaggtagaatggcttcctgttaacaaatcctctattaaaaaggtaactaggttatcactctaattataagtgttgaaataactttattccacctaaaaggttaaagtgtacccattcatcaaatgcatccagctgcaggtgccctcatcagtttcttgcctttcaacagatt

SEQ ID NO: 185495 - DNA, 525 bp, Homo sapiens
aaagagaatcagcaaatggtggtgggattatcattagttcttacaggttttgggataggcggtagagttaggagcaatgttttgtgggcagcggggggatctcacaaagtacattctcaagggtgaggagaattacaaagaaccttcttaagcgtgggggagattaaaaagaaccttcttaagggtaggggagattacaaaatacattgatcagttagggtggggcagaaacaaatcacaatggtagaatgtcatcagttaaggctattttcacttcttttgtggatcttcagttgcttcaggcyatctgatgtgtatgtgcatgtcacgggatatgatggcttagcttgggctcaggggcctgacaggtttcaaaactgcattttctgcaaaatacatgggttcgcatacacagtgagagttaagatctattttatcccaaataattgctgcaagttacattatgcttacctctaagtgagcattgttggtgttattaccagggctattgtttagctgtttatt

SEQ ID NO: 185496 - DNA, 525 bp, Homo sapiens
aaagagaatcagcaaatggtggtgggattatcattagttcttacaggttttgggataggcggtagagttaggagcaatgttttgtgggcagcggggggatctcacaaagtacattctcaagggtgaggagaattacaaagaaccttcttaagcgtgggggagattaaaaagaaccttcttaagggtaggggagattacaaaatacattgatcagttagggtggggcagaaacaaatcacaatggtagaatgtcatcagttaaggctattttcacttcttttgtggatcttcagttgcttcaggctatctgatgtgtatgtgcatgtcacgggatatgatggcttagcttgrgctcaggggcctgacaggtttcaaaactgcattttctgcaaaatacatgggttcgcatacacagtgagagttaagatctattttatcccaaataattgctgcaagttacattatgcttacctctaagtgagcattgttggtgttattaccagggctattgtttagctgtttatt

SEQ ID NO: 185497 - DNA, 525 bp, Homo sapiens
aaagagaatcagcaaatggtggtgggattatcattagttcttacaggttttgggataggcggtagagttaggagcaatgttttgtgggcagcggggggatctcacaaagtacattctcaagggtgaggagaattacaaagaaccttcttaagcgtgggggagattaaaaagaaccttcttaagggtaggggagattacaaaatacattgatcagttagggtggggcagaaacaaatcacaatggtagaatgtcatcagttaaggctattttcacttcttttgtggatcttcagttgcttcaggctatctgatgtgtatgtgcatgtcacgggatatgatggcttagcttgggctcaggrgcctgacaggtttcaaaactgcattttctgcaaaatacatgggttcgcatacacagtgagagttaagatctattttatcccaaataattgctgcaagttacattatgcttacctctaagtgagcattgttggtgttattaccagggctattgtttagctgtttatt

SEQ ID NO: 185498 - DNA, 422 bp, Homo sapiens
taggtggctatcttcattgaaagttttttctcaaaagccttaaaatagaacgtagttcttggcagcaatttgaaagttatttgaggagaaggggagacttamaatgatgattcaaatgaagcaaactaaaaagtaataaagcaagacagaggaaaaagcagtattcacttgagcacatcccaaaagaataacatttcaaatgtaactagaaaaaagtatgctgaagttcgcaatacagaaataattattaataagatagctttaaagccctgctcagcttttcaatgttgggaattgacccagaggtggctgtaacctaagatggttccttcagtaatgaccattttttctttttcaagatgatgattattccccaccttctgagagacaaagaccaacgagccaccacagccaccagtccc

SEQ ID NO: 185499 - DNA, 422 bp, Homo sapiens
taggtggctatcttcattgaaagttttttctcaaaagccttaaaatagaacgtagttcttggcagcaatttgaaagttatttgaggagaaggggagacttaaaatgatgattcaaatgaagsaaactaaaaagtaataaagcaagacagaggaaaaagcagtattcacttgagcacatcccaaaagaataacatttcaaatgtaactagaaaaaagtatgctgaagttcgcaatacagaaataattattaataagatagctttaaagccctgctcagcttttcaatgttgggaattgacccagaggtggctgtaacctaagatggttccttcagtaatgaccattttttctttttcaagatgatgattattccccaccttctgagagacaaagaccaacgagccaccacagccaccagtccc

SEQ ID NO: 185500 - DNA, 422 bp, Homo sapiens
taggtggctatcttcattgaaagttttttctcaaaagccttaaaatagaacgtagttcttggcagcaatttgaaagttatttgaggagaaggggagacttaaaatgatgattcaaatgaagcaaactaaaaagtaatraagcaagacagaggaaaaagcagtattcacttgagcacatcccaaaagaataacatttcaaatgtaactagaaaaaagtatgctgaagttcgcaatacagaaataattattaataagatagctttaaagccctgctcagcttttcaatgttgggaattgacccagaggtggctgtaacctaagatggttccttcagtaatgaccattttttctttttcaagatgatgattattccccaccttctgagagacaaagaccaacgagccaccacagccaccagtccc

SEQ ID NO: 185501 - DNA, 387 bp, Homo sapiens
caaactaaaacagaaactcctgaactgggttctttygaacccaggaagcagcagtaaatcattaaagaacagataggttcttaaggtgagggagagtttcagataaatggaatgctggtagaacacagggcccaaaggagcaaaagttaacctaagcccaggtagaaccttgtttactagagtattaggcatgggttggggcaactattctaaccagagaaactggcttcagtgagggcaagttggcaatccaaggtatagcatgcatagggctggcaaaattcagggtgactgaagcaaaagcttcagaaccagaaagaccacatctgggggtagagcacaaaactcccaagagatgaatcttttgtaagagtgaggcagaactat

SEQ ID NO: 185502 - DNA, 383 bp, Homo sapiens
actgggttcttttgaacccaggaagcagcagtaaatcattaaagaacagatargttcttaaggtgagggagagtttcagataaatggaatgctggtagaacacagggcccaaaggagcaaaagttaacctaagcccaggtagaaccttgtttactagagtattaggcatgggttggggcaactattctaaccagagaaactggcttcagtgagggcaagttggcaatccaaggtatagcatgcatagggctggcaaaattcagggtgactgaagcaaaagcttcagaaccagaaagaccacatctgggggtagagcacaaaactcccaagagatgaatcttttgtaagagtgaggcagaactatatagcagttttaggagatc

SEQ ID NO: 185503 - DNA, 383 bp, Homo sapiens
actgggttcttttgaacccaggaagcagcagtaaatcattaaagaacagataggttcttaaggtgagggagagtttcagataaatggaatgctggtagaacacagggcccaaaggagcaaaagttaacctaagcccaggtagaaccttgtttactagagtattaggcatgggttggggcaactattctaaccagagaaactggcttcagtgagggcaagttggcaatccaaggtatagcatgcatagggctggcaaaattcagggtgactgaagcaaaagcttcagaaccagaaagaccacatctgggggtagagcacaaaactcycaagagatgaatcttttgtaagagtgaggcagaactatatagcagttttaggagatc

SEQ ID NO: 185504 - DNA, 422 bp, Homo sapiens
taaatgctacaaagacaatctcacaggaagatgggatgtagaatgataaggctctcagaatagtaasagaaactattgcttcttacgatgcttgtctttctttgtatcagtgctcagctgagtctgcagtgcttcagaggcagctttcattttataaaaatctatgatttctccttccagttgttttttctcttcctcgagcttccttatctcctcctgttgaatcattttaagatgctcgaacttgtcgtgcagctgtgaaaccaatgtgcagttgtgacaccaaagcacagtgtggctgaacacccaaaagaatatgcttttttctgattatcaaacaaacccaaatcatcacagtagagcatgatcttaataacaatctcaaaaactcaggagtaaacactcagatatggaatttttct

SEQ ID NO: 185505 - DNA, 422 bp, Homo sapiens
taaatgctacaaagacaatctcacaggaagatgggatgtagaatgataaggctctcagaatagtaacagaaactattgcttcttacgatgyttgtctttctttgtatcagtgctcagctgagtctgcagtgcttcagaggcagctttcattttataaaaatctatgatttctccttccagttgttttttctcttcctcgagcttccttatctcctcctgttgaatcattttaagatgctcgaacttgtcgtgcagctgtgaaaccaatgtgcagttgtgacaccaaagcacagtgtggctgaacacccaaaagaatatgcttttttctgattatcaaacaaacccaaatcatcacagtagagcatgatcttaataacaatctcaaaaactcaggagtaaacactcagatatggaatttttct

SEQ ID NO: 185506 - DNA, 422 bp, Homo sapiens
taaatgctacaaagacaatctcacaggaagatgggatgtagaatgataaggctctcagaatagtaacagaaactattgcttcttacgatgcttgtctttctttgtatcagtgctcagctgagtctgcagtgcttcagaggcagctttcattttataaaaatctatgatttctccttccagttgttttttctcttcctcgagcttccttatctcctcctgttgaatcattttaagatgctcgaacttgtcstgcagctgtgaaaccaatgtgcagttgtgacaccaaagcacagtgtggctgaacacccaaaagaatatgcttttttctgattatcaaacaaacccaaatcatcacagtagagcatgatcttaataacaatctcaaaaactcaggagtaaacactcagatatggaatttttct

SEQ ID NO: 185507 - DNA, 422 bp, Homo sapiens
taaatgctacaaagacaatctcacaggaagatgggatgtagaatgataaggctctcagaatagtaacagaaactattgcttcttacgatgcttgtctttctttgtatcagtgctcagctgagtctgcagtgcttcagaggcagctttcattttataaaaatctatgatttctccttccagttgttttttctcttcctcgagcttccttatctcctcctgttgaatcattttaagatgctcgaacttgtcgtgcagctgtgaaaccaatgtgcagttgtgacaccaaagcacagtgtggctgaacacccaaaagaatatgcttttttctgattatcaaacaaacccaaatcatcacagtagagcaygatcttaataacaatctcaaaaactcaggagtaaacactcagatatggaatttttct

SEQ ID NO: 185508 - DNA, 538 bp, Homo sapiens
tcttgtttattattcattcattattgtctattaataaagaaaaactttatttcactgaagcagtgatayataatccaacttggatttttaaataatgactgacttttttctttgggaatacattactgttaaaaatgtagattattagatacattacttttaatgaatataagtggtataattagaaggctgaaaagaatccttggaaacgtgagtttaatttgatagctaagaaactgaggacaagatacttattctttgtagcgtattttctaatgtcatttcattgtctcaccaagaaatacttgcataaagcaagttcaattatagcatctgttgaatatttaaggttgggtaaagtgggtgagtttaacagatattttcccttatttcttttaggtgaatctggactgggaaagttgacattaatcaactcattattcctcacagatttgtattctccagagtatccaggtccttctcagagaattaaaaagactgtacaggtctagatattagtatttttaattgatgataa

SEQ ID NO: 185509 - DNA, 538 bp, Homo sapiens
tcttgtttattattcattcattattgtctattaataaagaaaaactttatttcactgaagcagtgatacataatccaacttggatttttaaataatgactgacttttttctttgggaatacattactgttaaaaatgtagattattagatacattacttttaatgaatataagtggtataattagaaggctgaaaagaatccttggaaacgtgagtttaatttgatagctaagaaactgaggacaagatacttattctttgtagcrtattttctaatgtcatttcattgtctcaccaagaaatacttgcataaagcaagttcaattatagcatctgttgaatatttaaggttgggtaaagtgggtgagtttaacagatattttcccttatttcttttaggtgaatctggactgggaaagttgacattaatcaactcattattcctcacagatttgtattctccagagtatccaggtccttctcagagaattaaaaagactgtacaggtctagatattagtatttttaattgatgataa

SEQ ID NO: 185510 - DNA, 538 bp, Homo sapiens
tcttgtttattattcattcattattgtctattaataaagaaaaactttatttcactgaagcagtgatacataatccaacttggatttttaaataatgactgacttttttctttgggaatacattactgttaaaaatgtagattattagatacattacttttaatgaatataagtggtataattagaaggctgaaaagaatccttggaaacgtgagtttaatttgatagctaagaaactgaggacaagatacttattctttgtagcgtattttctaatgtcatttcattgtctcaccaagaaatacttgcataaagcaagttcaattayagcatctgttgaatatttaaggttgggtaaagtgggtgagtttaacagatattttcccttatttcttttaggtgaatctggactgggaaagttgacattaatcaactcattattcctcacagatttgtattctccagagtatccaggtccttctcagagaattaaaaagactgtacaggtctagatattagtatttttaattgatgataa

SEQ ID NO: 185511 - DNA, 257 bp, Homo sapiens
ccattccttggatcatggcccctgactccatcttcaaagccagaagtgaagcatcttcaaatctccctctcttacctctgctttcatcaccacatctcctgctccaattctgaatctcctactctctttcttttataaagacccttgtrattgctgggcatgggggctcccacccagaatcccaacactttgggaggtcaaggcaggaggaacacttgaggcccgaagtttgaaactagcatgaacaacatagtgag

SEQ ID NO: 185512 - DNA, 257 bp, Homo sapiens
ccattccttggatcatggcccctgactccatcttcaaagccagaagtgaagcatcttcaaatctccctctcttacctctgctttcatcaccacatctcctgctccaattctgaatctcctactctctttcttttataaagacccttgtaattgctgggcatggkggctcccacccagaatcccaacactttgggaggtcaaggcaggaggaacacttgaggcccgaagtttgaaactagcatgaacaacatagtgag

SEQ ID NO: 185513 - DNA, 549 bp, Homo sapiens
cttcttccccatttctcttgatgccatggtttcatctgccaactatttttttttttttttttttgaaaagggtgtctcactctgtcaccgaggctggagtgcagtggcgccatcttggctcaccacaacctccaacctccgcctcccgggttcaagtgattctcctgccttagcctcacttgggccatgcctggctaatttttttgtagagacagggtttcactttttttttcctggctatcatgcagtccttccaatctagggttttgttttgattttaccttttctggcacctgctgaggaaacacagtcgcataactcccctccttctgaataaatacacagtgctcttgaatatgtctttgcttaaaacacttctagaacrccagcggaaagggccaggaaagaaaagtctccttctcatgcctctttaccttcatcctcatttatatcatataggagaagaaaagtgttcacccttggatgacatatgggttgttagatggtctgaggacaagattcccatctcagcatgagagccacagaaat

SEQ ID NO: 185514 - DNA, 500 bp, Homo sapiens
ccaaatttcatccacttgaagggacttggcttttcacagccaagttttaagcatgacaaaattataactggaaacatattgtgtcctctgatctttgaggtggcaacttttcctacaaaactgggtgggagattgatctctttctttgattttctatttttctttttgctgaagaatttaaatttactgtattttaaccaatagtttaaaaaaaattgcacagcytcagttaaaagagcattgcttcataactacataatagcttcatcaacaaataagagtctgtttcctgcaatgaagccacaaatatgttgaaaggccccagctttctgcaggatgtacaaagatgtccttttgagtcacttttggactattttccttctttgtggtggcagtggttgtctggatgcatgggtgtacatttaaaacacatcttacagatttttaataatgcattctttgggaggaaacaagaccaattttttcctatgctgtgagca

SEQ ID NO: 185515 - DNA, 607 bp, Homo sapiens
attttgaaaaggcaatagctcaatggttaaggtgaggcatgtttcttgttgtctagtttatatccaggaattcttcagagattataaaggggtcccttgtttaaatatagtgggatcacaaatttagctagaatttgcacctcagtagttattctaattttgaaagttcaccaactggtgcacttcagcagatattaaaattaattcaggacctatgttgtagaggcacaaaagccaatcactcttattttattgtattattgcataaaatttcttagtaaattttgaattttcaattgagtcagattgtgaaactttattttagattttatttcttcactctgtgtctcagggttttttttcttttctttctttttttttgcyagtttgtttgatcatttatgaatatacttaagggagaaaccaaattcgcatcttcagagttaggaacccttcccatggcaatagatgctttctgggtttaagggctgtgtacttaagtcaggttagaactaattcctttgttgttccatgagcatgtcatgagtgtgttccccataaccctgaaaaatcaggatctttgtcagaggattaggaagcagtagca

SEQ ID NO: 185516 - DNA, 575 bp, Homo sapiens
tgaaacaaacagacacacagggtaagagttgctaccttgagcctggctacagtaacaaaatatgctggcacagaaacacatgaatcaatctaacacacagagaagtctgggccaatacagatgacccagggccattttaaaagggccttaatcccatactcctgtccctaagtgctgattcttgaaacctaatattcmggttagtgaaagctgaaagaggctcagtagcactcagctaatgaagcacaaaacagcacaactcaaagcaaaagcttgagagcatggaggaaatccagtttagaagccaaggccagagaaaaaagattcccagtggtgatggccactatctagacatcctgattgctatgccaaacgttgtggtcacccgtagcaggggagtggaccctccacccaaaatttggttcggacgtcaagacaaacgatgttacacaatccatgaagaaggtttgaaaaggtttattacttacacaatggggctctctggggagagcaaggtagattctcgacagtgcaaaaaaatggcttagaagagggaggataggagactagctctg

SEQ ID NO: 185517 - DNA, 554 bp, Homo sapiens
cttacacaatggggctctctggggagagcaaggtagattctcgacagtgcaaaaaaatggcttagaagagggaggataggagactagctctgaagtttctatagyagttaggggatgaggttcaggagagaggatccccactcaggctgggacttacatggtttaacctttccacagccaaaggagggagaacccaagatttcttatcagctttcacataagcagggccgaaagggaaatgatgggactcaaaagctttcagcagtcgaacatcaaaaatggagtctgatattatattactttattacacagtatgtatgtgggtgtgtgtaggtgtgactgtgtgtgtcatatgcatgttagaaggaaaagtttgattttgaatattataccatattttcacctgagctcaggatgaaataatgatctataaggaatcaagagtggtgtagaaatagcatggattttagagtcaaacagattgaaattcacatgctttttctcgacaagcaacctaatctgctaagtatttattccatgcccttgggaataga

SEQ ID NO: 185518 - DNA, 554 bp, Homo sapiens
cttacacaatggggctctctggggagagcaaggtagattctcgacagtgcaaaaaaatggcttagaagagggaggataggagactagctctgaagtttctatagcagttaggggatgaggttcaggagagaggatccccactcaggctgggacttacatggtttaacctttccacagccaaaggagggagaacccaagatttcttatcagctttcacataagcagggccgaaagggaaatgatgggactcaaaagctttcagcagtcgaacatcaaaaatggagtctgatattatattactttattacacagtatgtatgtgggtgtgtgtaggtgtgactgtgtgtgtcatatgcatgttagaaggaaaagtttgattttgaatattataccatattttcacctgagctcagratgaaataatgatctataaggaatcaagagtggtgtagaaatagcatggattttagagtcaaacagattgaaattcacatgctttttctcgacaagcaacctaatctgctaagtatttattccatgcccttgggaataga

SEQ ID NO: 185519 - DNA, 569 bp, Homo sapiens
cacacacacatacatatacacacatgcacatgcacatcacacacatatagacacaagtgaacactttcaaattaatatattagatatgattttgttagataagccacagtgttacacaaatataatgttttcactatttcytgttttttttctagatatattgtttgaaatatgtccacttcaccagagaagtgataaagatcaaatcaggttaaaagtactctgcctttaattcatagactaataactcaaatttacattttcagtgacttggcaaccattgaatttccaaagcaatgattttagtcacagtgatgtatactttttgcaagagaaagggaaataagaaatgccaaagccatccaagtacatgatagataatatgtttgatttatatgtttgatatatattgactggagtggcagtttggaatagtagttttagatttatctgctacatatgctatactgttaaatgttgatgtacatttgactgttgttgacttgttctgtgtgcaaatggttttggctcacagaaggctgttaggtctctaaactatttctcccatg

SEQ ID NO: 185520 - DNA, 614 bp, Homo sapiens
tgttattttaaaatcattaatgatgatygctttaccaattttaaggaactttttttattatagatccttgtttttagaaaatatattcctcaataatctaaattactcaagtttaaatacatcattattttgtactttaatgtacaaaataagtacatttatttattacttagtattttaaaaaatactaagtaataaataaattttagaattcttaaaccatatactaaaaaataataatttctcaatttttccaatgtttagactcttagcaaaatgctctttttgtgccattttcagtttttctaattttttttcttaatttgtgatcttctgtcctgtgtgatcactagggtaaaaaagacaagttcacagttctcagcacctatactccaatactccaatttatgcatggcagcctcttctacagaacctttagctcactggtttttaagcatcacctttacctcacacctcatatcctggaaaaatctagcaaattgaacaggcaatatcttgcccacccccttggagagtttttataacttaatagagaaaatatataataaaattgatccttgagcttatatatcaagaataaactctcacaaaaa

SEQ ID NO: 185521 - DNA, 614 bp, Homo sapiens
tgttattttaaaatcattaatgatgattgctttaccaattttaaggaactttttttattatagatccttgtttttagaaaatatattcctcaataatctaaattactcaagtttaaatacatcattattttgtactttaatgtacaaaataagtacatttatttattacttagtattttaaaaaatactaagtaataaataaattttagaattcttaaaccatatactaaaaaataataatttctcaatttttccaatgtttagactcttagcaaaatgctctttttgtgccattttcagtttttctaattttttttcttaatttgtgatcttctgtcctgtgtgatcactagggtaaaaaagacaagttcacagttctcagcacctatrctccaatactccaatttatgcatggcagcctcttctacagaacctttagctcactggtttttaagcatcacctttacctcacacctcatatcctggaaaaatctagcaaattgaacaggcaatatcttgcccacccccttggagagtttttataacttaatagagaaaatatataataaaattgatccttgagcttatatatcaagaataaactctcacaaaaa

SEQ ID NO: 185522 - DNA, 544 bp, Homo sapiens
acaatagttattttcttttgttgttgttgttgttgttgttgtttggttggttggtttttttgagactagccaatttattggacatgaggtgrtatctcatggtaattttgatttgcatttccctaatgattggtgttgttgagcatcttatgtccctatttgtagtttgtatgttgtcttttgataagttacaactcaagttctttgtttgtttttacttttttttctttttttttgtcgatgaattttaccaatatatttagaaatatagtctggatattaattccttaccagacatatgatttgcaaatattttgtcccattctgtaggttgcattttgactttgttgatggtgtcttttaatgcacaaaaatttttaagttttcatgaagtcggatttgtgtatatttttgttgtttttgcctgtgtctttggtgtcatatccaaaccattgccaaatccaatgtcatgaagctttttccttacattttcttataggtgttttatagttttagatcttacatttaggtcttcaactcattt

SEQ ID NO: 185523 - DNA, 544 bp, Homo sapiens
acaatagttattttcttttgttgttgttgttgttgttgttgtttggttggttggtttttttgagactagccaatttattggacatgaggtgatatctcatggtaattttgatttgcatttccctaatgattggtgttgttgagcatcttatgtccctatttgtagtttgtatgttgtcttttgataagttacaactcaagttctttgtttgtttttacttttttttctttttttttgtcgatgaattttaccaatatatttagaaatatagtctggatattaattccttaccagacatatgatttgcaaatattttgtcccattctgtaggttgcattttgactttgttgatggtgtcttttaatgcacaaaaatttttaagttttcatgaagtcggatttgtgtatatttttgttgtttttgcctgtgtctttggtgtcatatccaaaccattgccaaatccaatgtcatraagctttttccttacattttcttataggtgttttatagttttagatcttacatttaggtcttcaactcattt

SEQ ID NO: 185524 - DNA, 597 bp, Homo sapiens
tagttcatgaaaatatgttatgtgaagtttatatacgtgtgattactattacaagtcaaaccytgtcataacaaataaacacttgtataaagtattatccaaatcttacttattcgatcacttgtttctcatataaatatttgaaaaaattaacttcctttaaaataaaggaaggcaaatgtctctcttcctaatttcattttaatcaaatcttatctgaataaataataaaaatatgaagcagccaattagtttgcaaacaatgtactatgaatgttttataacttagaaagtatctcatcaacctaacagtctcagctaatggaaagtttttggttgaaacatgaagtcaatactacctaaatgtgcagtttcaccatttcaaacaaagattactatttaaattttattatttgttttaaatattcatctaaataatgttacagatgttaacaaattgtacattttacaaaaggttataaggaattgcaatagcctctcgctctcatctcttcctactaatcctcttatttcacaaatcataagaaaaaatgggttttattccatcaaagtaagtatttttgtttcaatgaagga

SEQ ID NO: 185525 - DNA, 558 bp, Homo sapiens
tggttcccttaagtcatcatatattgttgttacctttttatttcgtgagtatagataggtgactggctgtatgacctagaatgtgtccttaaaattattttcaaggaaagcaaattatgtggttttgagaggaaaaagttttcaatttcaagtagaaaatggattatgtwttaatccataaaattttatatgctagtccccaattatactttgtatagctatagtattacatgttttgagcataggaatgaatctctgtctagtcatcccagtcatttatcttttattttccccatagtataagacaagaagtaagatggatgagctgccacttttccacagagggataccagtgagatacagacattcctgatgtaggttttggcagtagatgtaggttggcataaaactcttcaaaatttccttaaataacactgattaaaggtttatatgccaacctctgctcttgactgcatctcttttgtaaaggttctggataaattttgaatttcgtttgattggtaggcttattcaattgcagaaaaagctgctttttcc

SEQ ID NO: 185526 - DNA, 632 bp, Homo sapiens
atatgatccagttggagaaattttaaaaatgcaggatgagctcttaaagccaatttccagaaaagtacccaaactgtccttgatgaatttaggaaattctaaacagtcttctgtttctgagcaattgtctgttccttcagatggctctagttgaccgaaatctggatggccttctgcatttcagaagcccaaaggacaattgccatatgaacttcaggactatgttgaagatacatcagaatacctagctyctcaggaaggaaattttgtttataatttatttagacttcaagatctgttgtttctcatgtgctgcagtgtccagaggatagagacaagaccacattctcaaagaacagaagaaaatcagaagacaatttccagttgatgtactaccaaaagtagagtatcaagcttgttatggagttgaagctctgattgaaagtgaattttgtcacttaaggactgaaagtttattacattccaacagctcattttatgttgggcatattgatgcatttacttcaaagcattttctactggaagaaactacctcagaagaattaaacgctttcagcactcaagatttccaatttatttaacatcctccaacacattctaaagaaattaag

SEQ ID NO: 185527 - DNA, 564 bp, Homo sapiens
caagaagctattagaactgataacaaattctgtaaagttgcaatatacaaagtcaacaatacaaaattcactagcacttctacatgccaacagtgaacaatccaaaaaagaaaccaagaatgtaatcccatttaaaaycgtaacaaataaaacatccaggagtaaacttaaccaaagaagtgaaagatctctacaacaaaaactaaaaaatcattgatgcaagaaattgaagaggacacaaaaaaatggaaagatgttttatgttcatggattggaagaatcaaaattgttaagatgtccatactacacaaaacaatctacatatttaatgcaatccctatcaaaataacagtggtattcttcacagaaaagaaaaaaaaaatcctaaaattaatatgtaccacaaaaggcccagaatagccaaacctatcctaagcacaaagaacaaaactggaagaatcatgttacctgactttaaattatactataaggctacagtaaacaaaatggtatgttactggaataaaaccagatacccatgtccttggaacataatggagaacc

SEQ ID NO: 185528 - DNA, 537 bp, Homo sapiens
tagaggatggggggcaggcgtgccatgggtgcttttggaaaaggcaacatttcagcaggaaaagaggaatgcctgttctcactttgggccgtggttccatgcttgagggtgaggccctcaccagactcgccctcttctgcccagaattttcctgcctcctgttcctatcacaagtatatcaatccagcttctctgcctccaagggatgttagaagtaattgttcactggtaaaatgatggtgttcaagacaggtgtttagaaaggtgacacgggccttctttttcatataggagtcaaatgctagagcccacttgttcctgcaaagctatgattcttggcagattaattcccctaaaccaaccacaaggctggttgctccaggtcytcagaattgagagtcttctatctcagcatgatgggggaccaagagaggagtttctccatactacaagtagaagctgaatcactttatatatctgagtgcttataggttgccttagtccatttgaactactattacaaaataccttaaactg

SEQ ID NO: 185529 - DNA, 598 bp, Homo sapiens
gaattcattaatgcagtttcatcactcaataaaatatatgatcaattccaacacacatccactagttgatgacatagctcagaaatatttttgtttccatgaaatatgaacaatagtttcagtggtacctagctcaaaaatgyaacttccttcaagttcctctttgaagtagttcctcagaactaccttgcaagtgtccactttggttagccaacaaaacaattgttttgtatatgaaaaaacaaaaattgttttttgtatatatccttttctacttttcaacactagttgcactaattcctacccaagagatcacataggaggtcatttcaagaataacatacacttctaattctttttggttttatatagttcatgaggcctcactccagattctcactcggattgaccttagagttaaatgaataattttggagacactgtgtttttaggaaatactttaaaggatgaaaacgtttagaccttgtggcaaagcaaacagaaactctgtactagctgtttctggctggtctccatctggcttctttgagcccctctttaccttcagttctctcccttatggaaagctagcctaacc

SEQ ID NO: 185530 - DNA, 567 bp, Homo sapiens
tgaattccaccaaacatatatgtaaaaactaataccaatcttcctcaaaccattccaaataattgaagagaagaaaattctccctaactcattctacaaggcaggccagcattaccctgacaccaaagctagacaagtacacaacaagaaaaagaaaagcacagaccaatatccctcatgaacactgatataaaaatcctcaaygaaacactagcgaactgaatccaacaacacaagaaaaagatgacacaacatatgcagataataaatatgatatatcacattaaaagaacaaagaacaaaaatcatagtcatctcaatagacacggaaaaagcatttgataaaattcaacattccatgatgataaaaatgctcaacaaactaggcatggaagtaatataactcaaaataataaaggccatatttaaggactgacagctatcattatattgaatgggaaaaagttaaaagttgttcctttaaaaactgaaagaaagtaaaaaatctctacaagaaaaactacaaaatactgatgaaagaaattgaggaggaaacaaatggaagga

SEQ ID NO: 185531 - DNA, 445 bp, Homo sapiens
aaagaaaagcacagaccaatatccctcatgaacactgatataaaaatcctcaatgaaacactagcgaactgaatccaacaacacaagaaaaagatgacwcaacatatgcagataataaatatgatatatcacattaaaagaacaaagaacaaaaatcatagtcatctcaatagacacggaaaaagcatttgataaaattcaacattccatgatgataaaaatgctcaacaaactaggcatggaagtaatataactcaaaataataaaggccatatttaaggactgacagctatcattatattgaatgggaaaaagttaaaagttgttcctttaaaaactgaaagaaagtaaaaaatctctacaagaaaaactacaaaatactgatgaaagaaattgaggaggaaacaaatggaaggatatcccttgatcatagacaagaagaatt

SEQ ID NO: 185532 - DNA, 624 bp, Homo sapiens
gtcatgaaccctgcaccctccttgtcaatgttgatttctgcacccatctcccaggctggctaaatcaggacttttggtgggtagggccatggactctatgttttctcatgtatcgttgtttgaaaataactaaattaaactaaattaaagctgtttaatgacatgaatcaggtattcattttaataaatatcagggtctcaaaaagtaccgtatatgtagactgaatctcttaattattactacactaaaataacaataaggtaaattataaggttatgatatttaaatgattttatactagcaactataattttgtgcaagttttaggattattatgtaaatgtcacattgtgggtttctgaaacattaggaaattatgaagcttattaataagaatatactgtaagaacttgactgttaaacataaataaatcttagtctaatgcaaaaaaaawtagtgcaaacaaagtctgcaatggagtaagacacagaggtcaggcagagtagcagttagttatagaacatctatataaaaactgcccaacatatattttaagtgatttttaaccaatatttctgatatttccacctaatggcacaaataaatgtctcaccagctgttg

SEQ ID NO: 185533 - DNA, 627 bp, Homo sapiens
tgttcacaacgtagtgggggagattaatgcacaagcaattaactaaaacagacttcattaaaatactcttaactaaaacacaaaggaaataattaaacatagaacattgtggaaaagggaacagggataaaaatggcgaattgcttttttcttagctctggcaagcttttgaaaattttttgtatgtccatattcataaagtgagttagtattatttttgttgcttattctatgtccttatataaaaattgtagatagtatcctgcaaagatataagttattatgttgagggtcatttcaggaagggtcagtttctctttcagctatttaaactgaacctaaggtcttctttgaaattggtgttcaaatcagcatctcagaagtgtaagaaaaacccgagcatgtatcagaattttcctttgatttttttgaaagtgtcattatattagaatggtggcaacacttaagarttttaaaatatattacaccagaaagcttagaacttaatatttattcaaccagaaaatgccattatccaataaaaaattaagaagcagatgtagtattacttttcttataatgtttctacacatttataattgtatttttatgtttatatatgtgagt

SEQ ID NO: 185534 - DNA, 603 bp, Homo sapiens
tataataagggtcctagtcagtgcaacaaaataatgaaagagtacatattatgatagatatcgaaagagcaaaaacaaaactatcattatgtgcagttgatatcatcactaacatccacctgaaaactccagaagaatcatctaaaatacagaatgcataaaagattagcatacaaatatcagtatatttcctacacaccagtaacaatcagaaaagacgataggaataaatagaataaaactraaacaaccaatatgcatgtcaataaagatttttgccattgaaatagaatctggcatcattcctagagaaaaaaataaaagctttatactagaaattaaatatgttttaaagatatagattgtaaaaaagatttttgaatctttgcttatctgcaaccaaatgaagaaggaagacgtcttggtcaaaaacttacatataacacatttttcatctttttttcttctgttgatattattgtttatatccacaaacacgccagtcatgaaatactaaatagtagaaaaatcaatgactcttagctaaaatctctaaataatgtataacaagataatatagcatatatatgtcacatatattca

SEQ ID NO: 185535 - DNA, 328 bp, Homo sapiens
gctcctaagggagtcaccaccgagctaagacccaggtcactgaagatggagcacgggctgattggagttagcctctcagggtaggacgtgggcaattatgaggttggttcttggaatatgggaagaaactcaagactggaatcgactgccccagacagggtgaataatcattcctggggasagcctgacaggcacatggagcaaatgaagaaggaacaagtttctcccctctcccctagccttctcatctccttctagtggccccctattggcagaatctgacagggggccaattggcaatggaggaatgtggttcacacagtcccag

SEQ ID NO: 185536 - DNA, 353 bp, Homo sapiens
gctgcctgttggtgagctgcaatttagctggtgctgctgtgcctgccggtggttgccaagtctctccgtatccacattcctgtgttggaacattaaaaatgatcattgctgactggctaaactccaaagctatacactagtacagctggggcccacyttagaccattaggagtgatgagccacttgagctgcactttgcagggtctgcattccccatgcttctgctcatagcctgtgtttggcagaagcctattccaggagtctgtaacttctttggcagcagtgtttctttattattatggagggcagaatcctgtttgtctgagtgtttcaggtaaactcttgtggaggaa

SEQ ID NO: 185537 - DNA, 353 bp, Homo sapiens
gctgcctgttggtgagctgcaatttagctggtgctgctgtgcctgccggtggttgccaagtctctccgtatccacattcctgtgttggaacattaaaaatgatcattgctgactggctaaactccaaagctatacactagtacagctggggcccaccttagaccattaggagtgatgagccacttgagctgcactttgcagggtctgcattccccatgcttctgctcatagcctgtgtttggcagaagcytattccaggagtctgtaacttctttggcagcagtgtttctttattattatggagggcagaatcctgtttgtctgagtgtttcaggtaaactcttgtggaggaa

SEQ ID NO: 185538 - DNA, 579 bp, Homo sapiens
gctggtgctgctgtgcctgccggtggttgccaagtctctccgtatccacattcctgtgttggaacattaaaaatgatcattgctgactggctaaactccaaagctatacactagtacagctggggcccaccttagaccattaggagtgatgagccacttgagctgcactttgcagggtctgcattccccatgcttctgctcatagcctgtgtttggcagaagcctattccaggagtctgtaacttctttggcagcagtgtttctttattattatggagggcagaatcctgtttgtctgagtgtttcaggtaaactcttgtggaggaaagtgttggttgggctctcccacaatacagaaatggcacccgggtctcattgtcaactggaccaatttaaccaattactataaaggaactataaaggaacatagaaattggttaaattggagggcttcctacagactaatactggagttagagcytcagccatagatatattaattggcaaacaacctgacaccctattaaccatatgcactcaaatcaggccatatgatttaaaacctgtgtacagcagaac

SEQ ID NO: 185539 - DNA, 534 bp, Homo sapiens
gaagttatagaggaccccaggtaaatggaggtaagaaatgtggactggtagaggaagagaggcttggaagaatgggaggcagagcagagacaggatcagtttctcactttaggaaagtaacactggctgcaataaagaggatgaattggagggatccamcctttcccttgtaaacaaatatctgggatggaactctgcctagttatctgtttatttatatcccacttcattccaaaaatgatataataccacaactcttccatagttgttttcaaaaatatatgtatttatgccctgtctacttctaaaaagaatttgaagcagctctatttgaattcttcccaaaggccatcttggaagtatgtcgttgtctgacttaactgagcaaccagtaaatgaaactcccagagcttctagccaaagaatattcctggaggcgaaataaacagaggtgaatttggctgtttgaaaacacatgtaagctctttatttagaactctgattccatggtagctgaagagaaagaaaggtatg

SEQ ID NO: 185540 - DNA, 363 bp, Homo sapiens
ataataaggtggcccataccctgctccgctgatatcayaggacagctgcatataaaactagacttctgatgctgggctccagcttcattctcacaggtcatcatcgtcatctgggagagcagttgtctgaagaacctctaagtcatgcttataatgctctgtcaaagctgggtccatggcaacctccagtggggcaggggcaggcatggcaacaaactccaagttagggtctccaatgagcttcctagcaagccagaggaagggcttttcaaagttgtagtaacgtttggcagaaatgtcttagtactgaacattcttctttcggcagaaacagtcagtgttataatagcaccatcttgtcaa

SEQ ID NO: 185541 - DNA, 384 bp, Homo sapiens
aatactgtgtaaaaggactattataaacaaatattttcagcataattagatccacagaagacattttcaatttctaagttaatacctgtctacacccatgtgcaacacatggaggaatgctgaattgcctttgccattaatgatggattgactaattattaacagatcagagggaagaacaactattagcttatgaaaacagtctttttttwattttgtactgtacaacattattcataataatagttaaaagacaaattgctatttttcttttactaaatgtgctctgcagataacctaaagattaaattttaagcagtgatatatggagtcacataaacactaagctaaataagaatactggtggaccatttagtagaccat

SEQ ID NO: 185542 - DNA, 583 bp, Homo sapiens
aagttactctttcctttatacataaaacaacttttatacatcagttttatggattttattacactgtattgtaattttttgtttgagatctgttttctcctttagagaataaattctttctgctcagggagcctgttttattcctctccttatcttctaagtgtattgcttggtgcatggcctctagtagttgctcaacaagaacgtaattcattctggcacatataggaagggaaaatgatagagacagaaaactccatcattcaggttttgctttagatttaggcgtttccagtgctttttgatattgaagaaaaatcactctgagacacaaacacctacatttatttttcagatgtggtaatgcttgcattaaaccatcacttgatgtcccattttacttgcaactaatgaacaggttaattgtgctgaatcgcaggtcagctgaataagatgggatttaacttagcagtgtgaaaaaagtagttccttttcacaaatacagtcratatgtgttccttttgtgcatgtaatccatggtgcagaataaagtcactgaagaactattatcataaatagcatt

SEQ ID NO: 185543 - DNA, 561 bp, Homo sapiens
gtactttgatcaaaattatttgaaaaacatggttctaggtccaccttccccagagttttgaattttaaagttaaaatgaaaattatgcccagaatgaacagctattattcattagaccctttttgcacctgtttaatattatcatttatgcctagttaaaagtaatgcctaaatatgtattcataaatcagtaacttctgtcctaaaaaatgatgtactgggataaaattgagtcactttgaaataaaaacttatttcaaaaagtaagtagggttttttgttgttgttgtttgtttgtttgtttttggctatccatcaraaaacgttgatgttgcaacttgttcaatattttcatggtaagataatccactctgtaaattcaaggctactgagtttgactgaatttcataagtcaagtctactgttgattactaatgagactcttgaagacagtaatcacaacttggaaagaaagatacaaagatagggtgaacaatatattaaacattattttacttgtaagatgtatttaatattttaaattaattcccaaagaacagt

SEQ ID NO: 185544 - DNA, 538 bp, Homo sapiens
cctctttctcttggagctgggatatactcttctcctgtcctgggacatcagaaatctaggatcttctacacagacactccaggatttacaccagtggccccctgagttctcaggccttcagactcagactgagagttatgtcataggtttccctagttcctggggctttggacttaaactgagtcatgctgccagcatctcagggtttccagcctgcagacaacctatcacgggactttgcctccataaccatgtgagctagtatccctaataaatctctttaaaatatctgtattcacatatatctttttgattctatctctctgaagaacactgaccaatacaatgttatttttttttttgcgatgagggcatttaagagatgaagtgatacaatttacaggaaaaagggcatttgtgagaaaaatgcattgtggatatctttgcaataatactaacaygatttccttggtgttatggttagtttgatgtgtcaactcaactgggctaagagatgcctaaagtgaggttaaaatat

SEQ ID NO: 185545 - DNA, 208 bp, Homo sapiens
catgcacacaaaacagaatgtytaaaggaaatggataaattcctgaaaacatacaatctcccaagattgaattaggaaggaactgaaacccttaacaaaccaatatcaaattctgaaactgaatcattaataaaaagcctactaaccaataaaagccctgaatcagatggattaacagctgaattctaccagacatccaaaaaaagac

SEQ ID NO: 185546 - DNA, 635 bp, Homo sapiens
gcttgaagcttttttttttcctgtggtagacagattttatcatgtgtaagaatcagacttatggaatatttgaacataagagttgttcatatttctctacagtctggaaatgtgtccataacaatattgatctattccttgaaagattgactatatatatatatatttttttttaattatactttaggtatttctcctaatgctatcactaccccagccccctacccccmtacaggccctggtgtgttatgttccctgccctgtgtccatgtgttctcattgttcaactcccacctatgagtgagaacatgcggtgtttggttttctgtccttgggacagtttgcttagaatgatggtttccagcttcatccatgtccctgcaaaggatgtgaactcatccgtttttttatggctgtattccatggtgtatatgtgccacattttcctactccagtctatcattcttggggcctctcctaatatctcttagaggacattaatttttgatcaatggttaatggacagtttgatactgtacctttcttcatctataaatgtttttttattttattttggcaacctatattcccttcagaataacttgtttcacacattttcagatttgtaaaagaat

SEQ ID NO: 185547 - DNA, 426 bp, Homo sapiens
tatgagtccacaacattaaaaaatttactctagaaagtaaagctgggtaaagtgacctcagtgtagaaaacttttattatatggccacaaaaggcactgaaaacgaaatttctagagggccttaggggattaaaagggaaatgtttagaagacattaaacctctggaggtttaattttgcaacttccccaaatacttagacgacttcaaaaataattttgcttttgtctaaactcagaaattatattgttcttttttscccttgctggccctcagaagagtattaattctcattttgggaaggaattattttaatcatgccattaaatgagaggaaaatatcccttttctaaaaaaataaaaaattaaaaataaaaacctcggtgtaaagtggaattctctagagaatgcattgtgcacaaaatga

SEQ ID NO: 185548 - DNA, 496 bp, Homo sapiens
ttcattttgtttttttttcacatcagaatcaataaatgttagccaactctcctgcttaatcgtcccattgagaatatattttatttcttagtgtctgtgcctaatatagcctgtttatatgaccacactagaagcttgagatctagtcctacttattatttcttcatttagatgtatttccagtaaacgtaattaaattcaagctctcagatatttctttcattaaccatttattctccctttctgttatcagatacagattcarcaattaatttcctgattaataacaattgctatgaaagcatcattcagtccactaagttgctgtgtttctagaagatttgattcaaaggtttgttcttatttctggcttcaatatccattgttaagtcttgccctagggtagaccacaagagatttagagcaactaaactatactaaattggttataattcaatgtagtttaatatacaaggaaatggataatctatttacc

SEQ ID NO: 185549 - DNA, 496 bp, Homo sapiens
ttcattttgtttttttttcacatcagaatcaataaatgttagccaactctcctgcttaatcgtcccattgagaatatattttatttcttagtgtctgtgcctaatatagcctgtttatatgaccacactagaagcttgagatctagtcctacttattatttcttcatttagatgtatttccagtaaacgtaattaaattcaagctctcagatatttctttcattaaccatttattctccctttctgttatcagatacagattcagcaattaatttcctgattaataacaattgctatraaagcatcattcagtccactaagttgctgtgtttctagaagatttgattcaaaggtttgttcttatttctggcttcaatatccattgttaagtcttgccctagggtagaccacaagagatttagagcaactaaactatactaaattggttataattcaatgtagtttaatatacaaggaaatggataatctatttacc

SEQ ID NO: 185550 - DNA, 521 bp, Homo sapiens
acttggtacatttaaaatatctttgtgctatgtttttcagctccatccggtcttttatgtttctctctmaactggttattctagttagcagctcctgtagccttttatcgtggtccttagctttttggtattgggttagaacatgcttctttagctcaacagttattactcaccttctgaagcctacatctgttaattcatccatctcatcatccacccagttctgtgtccttgctggagaggtattgtgattgtttggagaagaggcactctggccttttgagtgttcagcatttttttggttgattctttctcatcttcatgagtttgtctggttcagatctttgaggttgctgacctttggatgaggtttttgtggggacttttttgttgatgctgttgttttgtttttctttcaatagtcaggtccctcctctgtaggggtgctgtggtttgctgggggttcacttcagactattcacctgggtccctcccacacttggagatgtcacctaaggagg

SEQ ID NO: 185551 - DNA, 521 bp, Homo sapiens
acttggtacatttaaaatatctttgtgctatgtttttcagctccatccggtcttttatgtttctctctcaactggttattctagttagcagctcctgtagccttttatcgtggtccttagctttttggtattgggttagaacatgcttctttagctcaacagttattactcaccttctgaagcctacatctgttaattcatccatctcatcatccacccagttctgtgtccttgctggagaggtattgtgattgtttggagaagaggcactctggccttttgagtgttcagcatttttttggttgattctttctcatcttcatgagtttgtctggttyagatctttgaggttgctgacctttggatgaggtttttgtggggacttttttgttgatgctgttgttttgtttttctttcaatagtcaggtccctcctctgtaggggtgctgtggtttgctgggggttcacttcagactattcacctgggtccctcccacacttggagatgtcacctaaggagg

SEQ ID NO: 185552 - DNA, 521 bp, Homo sapiens
acttggtacatttaaaatatctttgtgctatgtttttcagctccatccggtcttttatgtttctctctcaactggttattctagttagcagctcctgtagccttttatcgtggtccttagctttttggtattgggttagaacatgcttctttagctcaacagttattactcaccttctgaagcctacatctgttaattcatccatctcatcatccacccagttctgtgtccttgctggagaggtattgtgattgtttggagaagaggcactctggccttttgagtgttcagcatttttttggttgattctttctcatcttcatgagtttgtctggttcagatctttgaggttgctgacctttggatgaggtttttgtggggacttttttgttgatgctgttgttttgtttttctttcaatagtcagrtccctcctctgtaggggtgctgtggtttgctgggggttcacttcagactattcacctgggtccctcccacacttggagatgtcacctaaggagg

SEQ ID NO: 185553 - DNA, 355 bp, Homo sapiens
tcttctcacattttatcttttgttcacttttagtaagtaattttaacttcctggatttcaattgcttcctctataaagyagggataataatttcataccataatgaaataataaggctagaaaaataatttttcttttagactgttccaagttttgtaactgactaatctaaattatgcattggggggaaggtgatatgagatgtgcttttcagtccttggattcgatactaattataataccaaactcatggtagattgatttattctgtcacatatctatcaaacatttgcagtttctgctgttatgtatgctttatgcattttacaaaaaatcatcccaattacacaattac

SEQ ID NO: 185554 - DNA, 583 bp, Homo sapiens
gtgtcttatctaccttcaatgtttgargttgctgatttggagatggagttttgtggggtttgttgttgttgttgttttgtgtttgtttttcttttaatagccctgtagaagtctggccactcatccatagggctattgtggtttgctgggagtccactcgagacactagttgcctctgtttttcctgtacctggaagtataatatcagcaatgaagcctgcaggacagcaaagttggcagcctgctgcttcctctggaagttccatgctagggataactgacctattgctggcccaagtgtgcctggaggaagtggttggagactactgttgggaggtctcattcagtcaggaggaatgaggtcagggattgacttaaaaaagcagtctggctgctttttgatagagccactgtgctgtgttggagatttcttcagcccctaatcggtttgggctctccaaggcccacaggctggactagctgagaagcctgaatgtccaagttggtgacctgccccacccttcaggcactttgtcccgtggagaacacaggcaggggtggccagaggccccagctgggacaa

SEQ ID NO: 185555 - DNA, 590 bp, Homo sapiens
ataaaagtacatcacacatctactgacaatatatatattttgttaaccctttaaaaatgaggaaatacagatttttaatcgttaaatatttgaagaagccatttacctaaatatttgtttggcaggagracatcttcaaataaatattattgatgacctagtgcaagaataatatttcctaaatgtctacctatgcagttgactattgcatttccttaataatttatttgcttttacttcagttaatactgggtggatctttccagaaagaactgccctctttaagtttttaactgaaaccccattcagaagcctcaccactgaaaactaatttttggggaagatgtaacagacaaggtggccttggccttaataaatgtggaattctgtagaatccaaagtaaaactaagttttcctgatcataactccaagttgattatgttactttgcaattcatataaaaagtcttcttttattcttctttcaaattgccctcaccgtcatagggtcctaagaactcagtgcctcaaatggtttgattaaaattgattgttaaaagttgagatcagagattcctctttatgcattc

SEQ ID NO: 185556 - DNA, 590 bp, Homo sapiens
ataaaagtacatcacacatctactgacaatatatatattttgttaaccctttaaaaatgaggaaatacagatttttaatcgttaaatatttgaagaagccatttacctaaatatttgtttggcaggagaacatcttcaaataaatattattgatgacctagtgcaagaataatatttcctaaatgtctacctatgcagttgactattgcatttccttaataatttatttgcttttacttcagttaatactgggtggatctttccagaaagaactgccctctttaagtttttaactgaaaccccattcagaagcctcaccactgaaaactaatttttggggaagatgtaacagacaaggtggccttggccttaataaatgtggaattctgtagaatccaaagtaaaactaagtttycctgatcataactccaagttgattatgttactttgcaattcatataaaaagtcttcttttattcttctttcaaattgccctcaccgtcatagggtcctaagaactcagtgcctcaaatggtttgattaaaattgattgttaaaagttgagatcagagattcctctttatgcattc

SEQ ID NO: 185557 - DNA, 578 bp, Homo sapiens
tgaccctccctctcactcagtcttttgaggaacatgcaagtttctgtctctgtgattggaggttgttgacattctttccctctgctctaagtctgcctatgctgatttcctcctgaattctgcagagaagtaaatcttctttaattcccccaggtgatcttagctgtgtaaaataaattactgcatttcccaagacttagtaaagcatgagatatttctttcaataattaaaattgctcttttagagtgaaggagaatgaagagttaaatatgaacaytaatcttctaacttttttcaggaactctgaaaaactttaactgtaacaaaaatggatgacagaaaacaaattccttccctaagcatttggcctatatgtataaagtagtgctgacggaggaaaatgtggctgatcctgttaatcccactaaatgacacagaaaatatctcatttcacttcattttcagttagttatatatcttcgtttatatgtctcttctgacaaggagcacagacattgtttaggtgtcacttcttaaattcacagcttttttcttttcctctaaatattccatgcat

SEQ ID NO: 185558 - DNA, 460 bp, Homo sapiens
cagactaaatattaagcaaacaaaaatgtggcttaatgcaggggtccccaggccccctgcccacacagcggtgggcaagcattactgcctgatctccacctcctgtaaatcagcagtggcattacattcttataggagyacaaaccctgttgtgaactgggcatgtgagggatctaggttgcacgcttcttgtgagaatctaatgcctgacgatctgaggtggaatagtttcattccaaaatcatcctcctcaccaccccacccccaccctcatctgtggaaaaattatcttccatgaaactggtctctggtgccaaaaaggttggagatggctgatctaattgattacaagaaaagaaaattcacttcatcttgatgctagaaatattctcctactggcttgggacattggacctgagctggcccaagagggaataatatttacaaacttacagataat

SEQ ID NO: 185559 - DNA, 528 bp, Homo sapiens
acattctgcctgttgaaactctactcctcagtcatttcattctgcatgtctacgctagagctgatcctagtccaacttgtgttgtagtcacttgcatatgtgtctttctttcacaccacactctgagtctctggaaggtaggattgttcttttatttagctttatttctcaggcacttaatagagttcaatacatatttagtaaagtatatgggattgaattatttgtgaaggagagtagtggtagctccaaaatgatctcggaggtagaagtgtgagaatctgsgtatctgtgtgtgccataagaagaaatctgaagaggaggttataggttcagtataaatgccagttttgaagggatcacagtggaggtatcccatactgtacacatgggactcaataaatttgagactgagcctgggatacaacatagatgttgatgattagggaatatgatcttggttttccatggaaacttcaaggttttaactttaagaaaaatggttttcttatatttgatttcatgatt

SEQ ID NO: 185560 - DNA, 568 bp, Homo sapiens
accctatggaacacgtcgtatttctggctgaagaagctgaagatgaaagatgcaaaggcatgaaagtgaatgacatagtctaaggaaaaagcaagaagttctgtttggctaaaacacagaattatggagataagccagcatagagagggtggatctatgacaatcctctaggatgtgaggagcctttgaagattgtttaacagagagtttcaatatctagtggcattgaggaagaaaaagttaagagaagagcattaaagatcrgggtgatagttaaaaaaaatctgttgcaagagatagacaagacaggactaaagcagttacaaagacggggctttattttgtttttcttgtgagacattttagagattgtgttgacagaattggatgttaagggtaaatgagagaggaagaattagataatgatgttaaatctgactgggaaatgacaatgttactaatggcgctgctagaaataggaaaagatatgagttcagttttaggtgtactaaatatgatgcaggaaatcaaagttgaggtagtcaattaactgagagaagttgcatcc

SEQ ID NO: 185561 - DNA, 568 bp, Homo sapiens
accctatggaacacgtcgtatttctggctgaagaagctgaagatgaaagatgcaaaggcatgaaagtgaatgacatagtctaaggaaaaagcaagaagttctgtttggctaaaacacagaattatggagataagccagcatagagagggtggatctatgacaatcctctaggatgtgaggagcctttgaagattgtttaacagagagtttcaatatctagtggcattgaggaagaaaaagttaagagaagagcattaaagatcagggtgatagttaaaaaaaatctgttgcaagagatagacaagacaggactaaagcagttacaaagacggggctttattttgtttttcttgtgagacattttagagattgtgttgacagaattggatgttaagggtaaatgagagaggaagaattagataatgatgttaaatctgactgggaaatgacaatgttactaatggcgctgctagaaataggaaaagakatgagttcagttttaggtgtactaaatatgatgcaggaaatcaaagttgaggtagtcaattaactgagagaagttgcatcc

SEQ ID NO: 185562 - DNA, 596 bp, Homo sapiens
tcttatgataaagaaagggggttgcggggaaatctacatcctgaaaggaattgatcattttaaaaaaactagttatgaggaaagcagggtgatacaaaatgatcttttagctgaactaaagacttgctaatgtagcttcttttaataggtattattggaaggttcagggtgttttggttgatttaagattaaaactaagttataatatygagtgttcctgttttgataggagattccattctctgcagcctttatttagttggtgtgcttgggcttgtattgtagaacttatggtgattaggtcatatataaccttataaagaaattaaaaagaatttaggatttttaaaaattagggaaatttccttctctgggctaggtagtgtttaggatctttaaatcatatatagaaaaatgtattttcagatccaaagtgaaaaagatagtaaaagggtttatgtcctcttcttcttggttgtgtgcattgctaagatgtaatatttgttactccatcagtgtgctcaagccctgttgtctgatgatgggaacctccctgtctccctggcatggctcagccataactaagggtgaatgag

SEQ ID NO: 185563 - DNA, 542 bp, Homo sapiens
aataatatttataagacagctagcatgataccaaatacagagtagagcttactagatgttaggtgctctttttaccactgttgacactgttgctgccacaacccacatccactgcctgcaaagttgcttggtgaagtcccttttttgctatgtaggccaatgtacatgcccagggagcaacttctgaaagtttcccgtgtcccatcctcggggtaacagcatgtttattttcatgtctgacaatgagtcaaatctgtgcacatatatatgccctggacctgaagtaacctggcttatactcagaattctaccaagtgccccaagcytgaatagcttctggccttcactcctctaaccaaaggtgctaaaactcttttgataggctcttatcttccattttcctcttcaactttcctggcctttgtttataagcaaatgtcctcttatttttttaggtaggaaaccagagttctcatgcatatgagaaaaaaagagagatacagagacagaattgggatttaggtgtgggagaaggatgtgga

SEQ ID NO: 185564 - DNA, 627 bp, Homo sapiens
agtcctttagtcactatttgaattttgtttacatatttttggaaaaggcttccaacggctaagctccatggactcttctgcagacacacacagtttgggacagggagacatatgtttatgttcagatacagaaatatcacttaagagcttttagatacctgcttcatttacctgcagggaagcgtattaagaaattcttttgggtaaaaattagtcctgtttctaagttttacatacttttgtcaatagttattgctctatctgcagtcttttcaaaagaaaatgtacccagactctcaccactttctgttgatatgttcatagttcaagttcatgytgatagtaagaaggtgaaagtagatttaagcaacatctgttttcttgtacattaggaaaaaaaataataaaaccttccacaagccccaaacaaaatgtagcacttctagctctatgcaataacaatggatccataactactaaatagtttacaaatttcacggtacttggatttggcatcccaaattcattttccaacaactgctacatcttacttctccacatctcttcaggagaagctaagaaggaacccacagatgaaattctggtcccttgaggatactaaaatat

SEQ ID NO: 185565 - DNA, 530 bp, Homo sapiens
gtgttgtctgagcttaaaatagtagcagcaaaatatcccttattttcagctctaaaatcccaggcatataatagacactcaatatttttttaggggtactagccactaatttttcttcttttgtgaattacatatgcaagttgtttacctgttttttatattgcactggttttatttatttcagtctttatgacaatgtaagaaaagaaaaatacgtattttaaatttcctctctgttttacatgagacagcatggttctgcagcttagagtgcttttcatttcagtatataggaaactttctcattttatttaacagctgtatatcattccattgtttgtatatttgtacccaccacaacaaacagaggcttccagtttattgctattgcaaacaatgttgtataatgcatacacaacttcatcaggtacgagtgtatctttgggatgaattctcagaagtaggatttytgagacagatataaatgcattttaaattttgacaaatattactaattgaattccattttg

SEQ ID NO: 185566 - DNA, 385 bp, Homo sapiens
tttttattttcctctttacctctgatttaccaggcttttccaatggttaaacattagctttgcatactatagttttatcatgattaaatataaaagagggaccctccctccttcacagttgggctaacatcagagaatggcaaagaacagctttttagtgttcattccactcattcctaggaagcctctctgttctcactcagatgagaaactttccaggctttgtcccaaaacaaagcttaaatgttttgatttgaaatccaggtctaacctgttttaaatcaactttctgcaaaagaccatttgtgtayctgtctgaatgccaatatttacctaaagcagcttcagggaacatggtttaaaacacacagcagacttgaacagc

SEQ ID NO: 185567 - DNA, 540 bp, Homo sapiens
aggagggtgaggtgccctgatgccacagggagagggcatggaggctctgggtccaggacccttccagagcttgcccatgggtatccctcataatamacttgcattcataaggatagcactttcagtgagttctgtgaatcattctagggaattctttaatttcagagggtcatgaaaactcctaaatttatagccagttggccagaagtgcaggtgattcccgacacttgaactgacatctgaagtgagggcagttttgcagaggactgaacccttaatcctgtggaatctgatgctaatgctgggtagttagtgtcagaactgtattccagtatgcccactaggagtggaaagggagtattttatgtctttagaaatatatatgtgtttaaaatattataaaatattgaaaacaagagtggtcagaaggaatctgattgaggacatgacatctcttttagatggctgaaagaaccattccaatggggagagggggctattgatgtgtaataaaatcaggcccaggaaataggcagaagc

SEQ ID NO: 185568 - DNA, 540 bp, Homo sapiens
aggagggtgaggtgccctgatgccacagggagagggcatggaggctctgggtccaggacccttccagagcttgcccatgggtatccctcataataaacttgcattcataaggatagcactttcagtgagttctgtgaatcattctrgggaattctttaatttcagagggtcatgaaaactcctaaatttatagccagttggccagaagtgcaggtgattcccgacacttgaactgacatctgaagtgagggcagttttgcagaggactgaacccttaatcctgtggaatctgatgctaatgctgggtagttagtgtcagaactgtattccagtatgcccactaggagtggaaagggagtattttatgtctttagaaatatatatgtgtttaaaatattataaaatattgaaaacaagagtggtcagaaggaatctgattgaggacatgacatctcttttagatggctgaaagaaccattccaatggggagagggggctattgatgtgtaataaaatcaggcccaggaaataggcagaagc

SEQ ID NO: 185569 - DNA, 434 bp, Homo sapiens
cactttcccccccgtgggcccagtctcctcgactctgaaatgcaggactgaggtccctccagctccccacccacgcagctgggttggggccgggcgcgggcgccagccgccagccctgcccagggtcgagctgcactcgcgggggaactgggcgaggcgccgcgacctccccaagccacccgtcagcaggcggckgtgggcgaggctcgcggggacgcgccgggaggctgaacttacccaaagcgcggtgggggaaactggtgtgcgagtaaactgcgaacaaactgcgagcgaaggtgtcagccgcgggcgcaggtgctccgcgctggctccgggtccggatcgcgaccgcaccccttcctcctgcccctcctccggcctctcgactccacctgattgcggccccaggccccgggaaagggaagccgcgccct

SEQ ID NO: 185570 - DNA, 536 bp, Homo sapiens
gatctgccagcaagaatggcagaatgttgaagaatccagagatgttgcagtcctccttcttttttttttttttttcaagctttaaagtaracttggtcttaagcttctgttcttctcaccaaactcaccttataaagtgcatctacttttagagtaaatccatccacacctggcatgttactgaccacatggaaatcaggcaactcagaggcaaagtgagcctcaaaaggcacatcatggaagtacttatcagttacctctggctgattgcggtcctaggatttcagaaaaaagaaatgcaagatttagaaagatggttccactatattggtaggtggcagtgactgggaggagaaaagtactcatcactcctggctttaggttgagttgagagagtatgtgctgtgaagccctctccataagtcagtggctgcctgatatggtttggctgtgtccccaccaaatcttatcttgaattacagttcccataatccccatgtgtcatgggagggacccaataggaagtaattgaatca

SEQ ID NO: 185571 - DNA, 562 bp, Homo sapiens
aagaatccagagatgttgcagtcctccttcttttttttttttttttcaagctttaaagtaaacttggtcttaagcttctgttcttctcaccaaactcaccttataaagtgcatctacttttagagtaaatccatccacacctggcatgttactgaccacatggaaatcaggcaactcagaggcaaagtgagcctcaaaaggcacatcatggaagtacttatcagttacctctggctgattgcggtcctaggatttcagaaaaaagaaatgcaagatttagaaagatggttccactatattggtaggtggcagtgactgggaggagaaaagtactcatcactcctggctttaggttgagttgagagagtatgtgctgtgaagccctctccataagtcagtggctgcctgatatggtttggctgtgtccccaccaaatcttatcttgaattacagttcccataatccccatgtgtcatgggagggacccaataggaagtaattgaatcayggtgacagttacctctatgatgttcttgtgatagtgagtgggttctcatgagat

SEQ ID NO: 185572 - DNA, 526 bp, Homo sapiens
agttcttccagaaagggaactgagtcatcaaatgatgactgttgctgccccaagtgagwtaataagacaggctataaagagttactacatgtttttctccagtcaccaatggtaggagagattttgctccttcatgtccttatacaataaagcagccctcctgtacaggttaagaatgggaagaggtggctgggtgttccaggtgatgcagcagggaaccagggctgggagaaccagctatttcagtcagtgctctgcccactggacttggatgctcttttcctatgatgccctggggaagcagagcaggggaagctgaggcacagcttaacttcttgttggttcctttgtgacaggtccagtttgatgagcgagaggacaccaagtcctgcaccattgtcatcaacgatgatgacgtgtttgaaaatgttgagagtttcactgtggagctcagcatgccagcttatgccctgttaggggaattcacccaggcgaaggtcattatcaacgataccgaggatgaacc

SEQ ID NO: 185573 - DNA, 505 bp, Homo sapiens
ctcctctaagctccgaaacacatatctggctgtcaaatggtagctctacatggctgtcagataacccaaactcagtatgctcttcccttgcaaacttgctcttccttctagtgttattatctcagtgaaaggcaaaaaaagaggtgccagcamcttaagtgttctccctggagtcactattagttctgtctaggctattctacatctatcatgcaacgcatgagccagtgtcattttcaaaaactcaaatttgcttaatatccttcagtggtttcccatatcccttagaaggaagagcaatatttttgccatgaccggtaaagctctggcctctgcctatttctacagcctcatctccagctactcttccccttccctccatttctgggatctagccagactggccttctttcagtctctggaccagctctctactccatgatctctagtgccccagggctcatttattcagcaaatattcactgagcatatattatacagtaga

SEQ ID NO: 185574 - DNA, 505 bp, Homo sapiens
ctcctctaagctccgaaacacatatctggctgtcaaatggtagctctacatggctgtcagataacccaaactcagtatgctcttcccttgcaaacttgctcttccttctagtgttattatctcagtgaaaggcaaaaaaagaggtgccagcaccttaagtgttctccctggagtcactattagttctgtctaggctattctacatctatcatgcaacgcatgagccagtgtcattttcaaaaactcaaatttgcttaatatccttcagtggtttcccatatcccttagaaggaagagcaatatttttgccatgaccggtaaagctctggcctctgcctatttctacagcctcatctccagctactcttccccttccctccatttctgggatctagccagactggccttctttcartctctggaccagctctctactccatgatctctagtgccccagggctcatttattcagcaaatattcactgagcatatattatacagtaga

SEQ ID NO: 185575 - DNA, 553 bp, Homo sapiens
gagaacatatttgtaacatgtatctgataaagaacttgtrtccaaaatacataaagaactcttaaaactcaatatgaaaataacaacccaatttaaaaatggttgaaagatctcaacagacatctcaccaaagaagacgcacagatggcacatgaaaagattctcaacattgtatgtcattagataattacaaattaaaacaataagatgccactacacaacctattagaagggcttaaatccaaaacactgacaacaccaaatactggtgagaatgtggagcaacaggaactctcattcactgctgatatgaaagcaaaatggtacagtcactttggaagacagttctgcagttttttaataaagctaaatatctcttactatataatcaagcaattgcacccctcgctatttaactaaaggagttgaaaacatgtccatacaaaaatctgcacatgaatgtttacagaagttttatttataattgccaaacttggaagcaaagaagatgcctttcagcaggtaaaataaatattctatacaatggaatact

SEQ ID NO: 185576 - DNA, 553 bp, Homo sapiens
gagaacatatttgtaacatgtatctgataaagaacttgtatccaaaatacataaagaactcttaaaactcaatatgaaaataacaacccaatttaaaaatggttgaaagatctcaacagacatctcaccaaagaagacgcacagatggcacatgaaaagattctcaacattgtatgtcattagataattacaaattaaaacaataagatgccactacacaacctattagaagggctyaaatccaaaacactgacaacaccaaatactggtgagaatgtggagcaacaggaactctcattcactgctgatatgaaagcaaaatggtacagtcactttggaagacagttctgcagttttttaataaagctaaatatctcttactatataatcaagcaattgcacccctcgctatttaactaaaggagttgaaaacatgtccatacaaaaatctgcacatgaatgtttacagaagttttatttataattgccaaacttggaagcaaagaagatgcctttcagcaggtaaaataaatattctatacaatggaatact

SEQ ID NO: 185577 - DNA, 410 bp, Homo sapiens
ttttcccaatgctatttattaaataaagaatcctttccccattgcttgtattaagtccaaattccctgtatcagtcttgattttgtatgtgtgttgtagttctatcgcatccacatggagctatataggggatccaaggttaagcctgggggagtcaccctgggaataatggggcatctgcaagtaataatctccctgatgtaaagcaaggacccccaactctgaagcctcagtatcctcagcaacattcttcctctgccacytcccacatttatgccacacagggcctgaggacagtgttggtgtcctccttgatccttttagccagtttcaaaccgtcgttcctctctccccttaaaaaatccagaacctaccctggagaaactctacttacacatgtgcaccgagat

SEQ ID NO: 185578 - DNA, 410 bp, Homo sapiens
ttttcccaatgctatttattaaataaagaatcctttccccattgcttgtattaagtccaaattccctgtatcagtcttgattttgtatgtgtgttgtagttctatcgcatccacatggagctatataggggatccaaggttaagcctgggggagtcaccctgggaataatggggcatctgcaagtaataatctccctgatgtaaagcaaggacccccaactctgaagcctcagtatcctcagcaacattcttcctctgccacttcccacatttatgccacacagggcctgaggayagtgttggtgtcctccttgatccttttagccagtttcaaaccgtcgttcctctctccccttaaaaaatccagaacctaccctggagaaactctacttacacatgtgcaccgagat

SEQ ID NO: 185579 - DNA, 494 bp, Homo sapiens
taactacatatacatgtacatattgttatgcatggtctcaaacagcataaaatgaaatcatactgtatacattcttctgcaatatgtttttgtctcttaacattatgtttttgagatttatccatgttgatatggtgagctctagtgcattaattttaactgcatggtagtctattgcatcactatatcagaagatgggaatattgatggaacatttaaattgcctacaattcttttatattgcaatatwaaaatgctgcaatgaatattcctctcatgtctcattgtgcatatttgctagcatttctctagaatatgacaagaactggaatttccacattgatggggatgcttctcttcaaatcaactagaaattttgccatactgctctctgaaatgaatgcagaaattagcattcctttcagcaatgtacaagacttccttttgctccatattctcaccaacacttgctatagtaagactattccattttt

SEQ ID NO: 185580 - DNA, 496 bp, Homo sapiens
aagtataaaggaaagagtaggccctgtttaaaaagttccagtcttctgttgccagatcttattttcaaatgaagccagagatgtggwtttttatgacatagctcctgaattcaaaaatagcaaacaaataaaatagtgaaaagaaattttgtataagccaaaactatttgggacaaacaaagcatgtccacagactaaatttggccagagggttccagtctgtgaccactgctatagatgactcttctttttttttgagacggagtctcgctctgtcactcaggctggagtgcagtggcacaatctcagctcactgcaacctctacctcccgggttcaagcaattttcctgcctcagcctcccaagtagctgggactacaggtaggcgctagatgcctcttcttttataactcaaatcctcctttgacttaaggatgagaccgtagtcaaatcatggttaaaaacaaggacttaggaggaaacagacctgaatttc

SEQ ID NO: 185581 - DNA, 496 bp, Homo sapiens
aagtataaaggaaagagtaggccctgtttaaaaagttccagtcttctgttgccagatcttattttcaaatgaagccagagatgtggttttttatgacatagctcctgaattcaaaaatagcaaacaaataaaatagtgaaaagaaattttgtataagccaaaactatttgggacaaacaaagcatgtccacagactaaatttggccagagggttccagtctgtgaccactgctatagatgactcttctttttttttgagacggagtctcgctctgtcactcaggctrgagtgcagtggcacaatctcagctcactgcaacctctacctcccgggttcaagcaattttcctgcctcagcctcccaagtagctgggactacaggtaggcgctagatgcctcttcttttataactcaaatcctcctttgacttaaggatgagaccgtagtcaaatcatggttaaaaacaaggacttaggaggaaacagacctgaatttc

SEQ ID NO: 185582 - DNA, 495 bp, Homo sapiens
gcaaatctattctagaacactaggtttttactcaaagcctgtgtgacagtgcctgattttttgtagttactttctgtatgcatgtattactgatggtaatgctgaagttcaaagaaaaattttaatattgagctacacaaataaaaataaaagacaatattataaacatattactattctcatctccttttccgtttgtttgtttgtttgtttgtttgtttgtttgttttttgacagagtctgtctctgtygcccgggctgcagtgcagtggtgtgatcttggctcactgcaacctccgcttcccgagttcaaacaattctcatgcagcctccagagtagctggattacaggcatgtgccaccatgcctggctaatttttttggtatttttagtacagacaggatttcatgattttggccaggctggccttgaactgctgacctcaagtggagggcccacctcggcctcccaaaatgctggtattacaggcatga

SEQ ID NO: 185583 - DNA, 622 bp, Homo sapiens
attgttcgtggctacagttttcattaggtctttaattacaatatggttattaaagcctgtaatataaacccctactttcaaatattacaccaaaattatcagataaataaaataagagaaaaatgtgctacatgtgtacatgagaagagaaacccaaatttgtttttgaaaaacattctaagaattagaaatcgtgatattggaatgaagaaaagcaaatgagtgttgatctgcttgtgatttgacatagcctaaagaaggcccatgtgggaccaaagaaaggatttgaatgcatgaaagattaaaaatatattttgttgggggaaggagagaaagagacggaggacagagrgagagagacaaagagagagtggagagagggagacagagagaggtctccttaattttgaaacacttcagaataaaattgctgaaattgaaacatgcctaattacatatgtgctagtgacctggtgacaatatttttcagatgtcagttgcatctagacaatacatatatacatacatgacaatggacctcatttattacacaatctaacaagcctctatctttttttttttgagatgatgtttcactcttgttgtccaggctggagtgcag

SEQ ID NO: 185584 - DNA, 630 bp, Homo sapiens
ctcaatgcttcggttggcactgagcatgtctctcttctgctgaagggaaagccaggtggttctggttttgattaaaataattgggctgccccagggatgtctgtgagggtgtttccagaggagactggcttttgagtcagtggaatgagtggggaaaattcacactcattgtggccaggcacctttcaatcagtgagggctggatggaacaaaaaggtggagaaagaacaaatttactatctttgctggatttctgataccccttttctcctgccgttgtacacagagctccaggttctctggcctttgtactccggtgctcacataagcagcgcctgctcctgcctcttaggcatcagtcttggattgagaattactccatcaggttccctgtgtctgargcttggactgagcgagactaccagatttccttatttggcaggttaaagatggcctattgtgggacttctgagtgtctgtattcaagtgaaccaattctcataatagatttacttttcatctctctctatatatatcctattggttctccctggagaaagctgaccaaaacaatggtccagtgagtttcattgtccacgtattagatatttgggttaaaaaaggaattaa

SEQ ID NO: 185585 - DNA, 361 bp, Homo sapiens
taaaacatcatgatctcatttaaaataactgcctctcccaattttcccctagtggtccacaatctaagttttgattttgcaggcataattttatcaagctgatagacacagcctcaaatccacctattttagattagccactaggcaattaattctttaatatgtatttcttcactcagtgaaaattttcttyatcctcatcaaacatagtcagcacatattcatgtgtcctaaagtgtaatatattctgctttattgccgccaagatcatgcacatatttttcggtggtatagtgttggagaaaataaatctctcttaataaaattcattgtatagttgtaagcttagtcatgaagtatc

SEQ ID NO: 185586 - DNA, 543 bp, Homo sapiens
ggcacaatcttggctcactgcaacttctgcctcccaggttcaaagacgaagtgtttctcgtgcctcagcctccagagtagctgggattacaggcacccgccatcatgcccagctattttttttatttttatttttatttttcgtagagagaggatttcaccatgttggccagactggtctgaaactcccaacctcaagtgattcacccacctaggactcccgaggtgctgtgctgggatcacaggcatgagccactgtacctggccaaaatgtggaatatttcttaatagaaatattaagaaaataaacaatagtttcagcacgattagaatattcagaatataatataaacttaatagtttaattcagaatatattataaacttaatagtttcagaacttcagctttctgagtgatargggtcaccatgattcaacaccttgaatatctgtcttccaaaaaaatgttcaaatctaatataccttttcttcaaataaacaaaaatgccctctctcttttccaatgctaatgtttatcagttat

SEQ ID NO: 185587 - DNA, 581 bp, Homo sapiens
tttccttgtgtgttttaaaccctgggaatcatattctacatgtgagagatagtaaaatagattttaaaaattgaggtaactgaatatgtggagttatgtcaacatgtcagaataaatacctgaaatccttacttttctacatatgaaagggatctgatatctaatgagagggaaggaaaatgcamtttgttagcattctgctttattcttgaaaacatgcatataaggctagttttaaaaatccctctgataagaataagactgtgagaacactgatttccactaggtgatacacatatgtaccatacatatacatacatatgtaagaatacatatatgtacacacaatacacgtatacacgcatataaatatacagtgtatatgtaactgagccaggcagtatacttaaaggcaataatatgatagtatgaaggcaatttgtatcttaccacatattgaaataaaacaccctgcacagcccctaaacctcaaaatccaatacacaaaatgaaacgaattgcactgggaaaaaaaataaagaaatgagaaaatgaactacgatattctcttatttgtttag

SEQ ID NO: 185588 - DNA, 538 bp, Homo sapiens
ggtcacaggttgcaggcctccatggggaatagctaggcccccaggttcccacccctgagcctgacaccttcccctgtccttttggaagacgggaagaggatccaggcaagggccagggtgaacacaaaccaaaacgagggggattgggggaagtttactcttgtacacagtcccccagctcttttctgtctggctyatggtccaggagcagaggtaggtcatgggtcaccttttctttatgtcctacaagaggtatgaattttaacacatgcactggttgtgtaaccagaacttcaatcaggatacagaagagttccatcccctcctgcccccgactccctcatgttaccccttttatagacaaacactccctccaccccttgcccctgggagccactgatctgttctccatcactgcaatgttgtctctttaagaatgtcacataaatggagtcatgtcatatgctaccttttgagactggcttccttcactcggcataatgcctatttatttatttatttatttatttatttattt

SEQ ID NO: 185589 - DNA, 566 bp, Homo sapiens
ctcataaatctaggtaaatctttaattacgccttcagaacgtgacgatattatgaccgtgatatagtcataaagggcacattcaaaattagctcggtatacattttatgaatatgtaaaagggtagaggtggtgagagttcaaaagcaaagaccaaaaaaggatgtattttttcttytttgttgcaatcatctgttaagacgggatcttattttcttttttaagataattgtaggaaaaagctctctttcttgtcttgtatagtttttattaaaatccaaagcaccaactttgtgaagagccctatttcatgttacaaaaactgcgagattaaatagagggagtattttcttctgtgttgaaacaccttttggcctaaaaattgttcgtccttgtattaaatgtgtgtgaaacatttatggagagaggcatttctttgcactgttttactgaggccgtaacaaagcttagagtttgtttcatactctacaatcagggtgattacagcctcatctgtctcccacccctgcatttggttagtagccctatgcaatttatttttatctt

SEQ ID NO: 185590 - DNA, 566 bp, Homo sapiens
ctcataaatctaggtaaatctttaattacgccttcagaacgtgacgatattatgaccgtgatatagtcataaagggcacattcaaaattagctcggtatacattttatgaatatgtaaaagggtagaggtggtgagagttcaaaagcaaagaccaaaaaaggatgtattttttcttttttgttgcaatcatctgttaagacgggatcttattttcttttttaagataattgtaggaaaaagctctctttcttgtcttstatagtttttattaaaatccaaagcaccaactttgtgaagagccctatttcatgttacaaaaactgcgagattaaatagagggagtattttcttctgtgttgaaacaccttttggcctaaaaattgttcgtccttgtattaaatgtgtgtgaaacatttatggagagaggcatttctttgcactgttttactgaggccgtaacaaagcttagagtttgtttcatactctacaatcagggtgattacagcctcatctgtctcccacccctgcatttggttagtagccctatgcaatttatttttatctt

SEQ ID NO: 185591 - DNA, 566 bp, Homo sapiens
ctcataaatctaggtaaatctttaattacgccttcagaacgtgacgatattatgaccgtgatatagtcataaagggcacattcaaaattagctcggtatacattttatgaatatgtaaaagggtagaggtggtgagagttcaaaagcaaagaccaaaaaaggatgtattttttcttttttgttgcaatcatctgttaagacgggatcttattttcttttttaagataattgtaggaaaaagctctctttcttgtcttgtatagtttttattaaaatccaaagcaccractttgtgaagagccctatttcatgttacaaaaactgcgagattaaatagagggagtattttcttctgtgttgaaacaccttttggcctaaaaattgttcgtccttgtattaaatgtgtgtgaaacatttatggagagaggcatttctttgcactgttttactgaggccgtaacaaagcttagagtttgtttcatactctacaatcagggtgattacagcctcatctgtctcccacccctgcatttggttagtagccctatgcaatttatttttatctt

SEQ ID NO: 185592 - DNA, 566 bp, Homo sapiens
ctcataaatctaggtaaatctttaattacgccttcagaacgtgacgatattatgaccgtgatatagtcataaagggcacattcaaaattagctcggtatacattttatgaatatgtaaaagggtagaggtggtgagagttcaaaagcaaagaccaaaaaaggatgtattttttcttttttgttgcaatcatctgttaagacgggatcttattttcttttttaagataattgtaggaaaaagctctctttcttgtcttgtatagtttttattaaaatccaaagcaccaactttgtgaagagccctatttcatgttacaaaaactgcgagattaaatagagggagtattttcttctgtgttgaaacaccttttggcctaaaaattgttcgtccttgtattaaatgtgtgtgaaacatttatggagagaggcatttctttgcactgttttactgaggccgtaacaaagcttagagtttgtttcatwctctacaatcagggtgattacagcctcatctgtctcccacccctgcatttggttagtagccctatgcaatttatttttatctt

SEQ ID NO: 185593 - DNA, 588 bp, Homo sapiens
ctgggtgaccctgcctcaaaaagataaattttatttaaaaaatacatttttcttcttttgtatcttctttataagatatctgactgcttacactgaaatgataacaatttattgggcatataacatataaagtaagatacacaacaataatataatggagatgtggatagaaatgtactattggaatgttcttcattatacatgaagtacatggttttagttcatggagcactgaaacaagttgagaatacrtaatataattcctagatcagcttctaaaataataacccaaagaagcatggctaaaaagaccatggaagaaacaagatgaatattaaatatacacaattaaaccaaagaagacaggaaataagaaaaaggggaacaaaaagcagaaggcacatttagaagaagaataacaacttaataaaagtggccttttgggggtttcaaccacatgcctgtgatgtttattaagaaccaattactcttgggcagaaactgagtaaatggagatctcacctccaatgtatgaaaacagatgctttgtaaatttcttccagttttatagctgtttatagtgggaga

SEQ ID NO: 185594 - DNA, 588 bp, Homo sapiens
ctgggtgaccctgcctcaaaaagataaattttatttaaaaaatacatttttcttcttttgtatcttctttataagatatctgactgcttacactgaaatgataacaatttattgggcatataacatataaagtaagatacacaacaataatataatggagatgtggatagaaatgtactattggaatgttcttcattatacatgaagtacatggttttagttcatggagcactgaaacaagttgagaatacataatataattcctagatcagcttctaaaataataacccaaagaagcatggctaaaaagaccatggaagaaacaagatgaatattaaatatacacaattaaaccaaagaagacaggaaataagaaaaaggggaacaaaaagcagaaggcacatttagaagaagaataacaacttaataaaagtggccttttgggggtttcaaccacatgcctgtgatgtttattaagaaccaattactcttgggcagaaactgagtaaatggagatctcacctccaatgtatraaaacagatgctttgtaaatttcttccagttttatagctgtttatagtgggaga

SEQ ID NO: 185595 - DNA, 462 bp, Homo sapiens
tgggcactcgttcagggcgcctgcgaaataaaccaacattatgaaccgaattgtaccctcatactttgtatgttgaagtcctaacccccaggacctcagaaggtggctgtatttggagataaggcctttaaagaagcaattcaggttaaatgaggtcattggggtgggccctaatccaatctgacaagcgtccttaaaagaaaaggagattaggacacagacagacagagggaggaccatgtgaggtcacagtgagaagagtgccatctgcaagcctagkaaagaagcctcagaggaaaccgcccctgttgattcctctatctcagacttccagcctccaggactctgagaaaatgcatttctgtcttaagccacccaggctatggtattttgttgtggcaaccctagcagaccaacacaagcagtgagcgctctcggcggctgctctggtgtttacatcac

SEQ ID NO: 185596 - DNA, 576 bp, Homo sapiens
gacccagaaacaaaggcgcgggtctagtcctccaagttagtcctccactagaaaggtctagtgcctccaactagaagcaccaaaaattaataatgggagaatgtggtggagtggagggggtatgagtgggagcaaaattctcatccatcatcttggaaagtcaatagataatgtccaaaactgatgaatcaggaaatagtggcagacatgcattatttagagatatggggcactggtgtggagacaagactggaagttaatrtagaggcctctggggagcaggcatgggtggggatgggtggagaaggggtctggcctttgtttaatattttattaaggagcttttgtttatgctcctgactgtgcctccaattcacccattcccatcaccctgaatggttttactgactccctgagaactcggataggagggtttgtctgtgtgtgtgcctatgtgtgtgtgtgtacacatttgcacctctgccatgcatcccataaatcaccactggggggacagtgacccagcctctattccatctgggcctcagattttctaatctgcctaatgagaagctt

SEQ ID NO: 185597 - DNA, 580 bp, Homo sapiens
aataaaattgctaaacctctagtcaggctaaccaggaaaaaaagagcaacaatacagattactaacattagaaatgaaagaggggtcatcactactgatctcayggatattaaaaagatgataaagaaatatgatgaacaactctgtgatctcaaatgtgataacttagataaacagaggcaattccttaaaagaaacaaactaccaaaactcacaaaaagagaaatagataatctgaataggtctattcaggttatatctatatctgtatctttttaaaacattgaatcaataattaactttctaaaaataaataataaattgggtccagacaatttaactgatgaattctatcaaatatttaagcacaaaatgatagcaattctctacaaccttctttagataggtaaagcagagggaacacttcctaagtcattatgttataccagcattactctatagcaaaatcagaatacacgtgcaaaccccattaaaagaaagaaaaactagaaattaatatcgctcgtgaacatgatataaaaagcgtcaacaaaatcttagcaaatcaaatctaataatg

SEQ ID NO: 185598 - DNA, 580 bp, Homo sapiens
aataaaattgctaaacctctagtcaggctaaccaggaaaaaaagagcaacaatacagattactaacattagaaatgaaagaggggtcatcactactgatctcacggatattaaaaagatgataaagaaatatgatgaacaactctgtgatctcaaatktgataacttagataaacagaggcaattccttaaaagaaacaaactaccaaaactcacaaaaagagaaatagataatctgaataggtctattcaggttatatctatatctgtatctttttaaaacattgaatcaataattaactttctaaaaataaataataaattgggtccagacaatttaactgatgaattctatcaaatatttaagcacaaaatgatagcaattctctacaaccttctttagataggtaaagcagagggaacacttcctaagtcattatgttataccagcattactctatagcaaaatcagaatacacgtgcaaaccccattaaaagaaagaaaaactagaaattaatatcgctcgtgaacatgatataaaaagcgtcaacaaaatcttagcaaatcaaatctaataatg

SEQ ID NO: 185599 - DNA, 457 bp, Homo sapiens
cagttccaaacatagtatgtggcagcaggagaactgaagttattaacagataaggtctaatttccaatttatctattgagttaatcctgaaacctatcccacttgcctgtatttacaaggtaggtcatcttagttttaccatgagttttcactattttaagagagaaatcatgttatgaaacatggtactgataagatacttacataaagagctacacttttttaatttatttttctcactttctttgctaatttacacccattgtttcygagtaatctgaagaatgagacattcccatttttttatgtatcataatgtttctaagataacgcatggactttttaaagaatttcatggtagcaaatattatgactcaaagtcaatatgaccctggttaacaaaaatgatcaaaaactaggaaataaagctaacagtagtggtagcaatggtgtatgt

SEQ ID NO: 185600 - DNA, 459 bp, Homo sapiens
aagttcaaacaataaaaatgcactcatacatttcctcagaaattttaaaaacacacattaaatgctaaatatacatcctgtcaattaaaaactgtaagagtaaccttataaaaggaaaaaaaagtttgctctcgggagatgattaaatacccatattgactaaatatawttaaagtggttatgattcaatgtcagactaatatttttgcctctactttaattgctttttaaaaagaagtatcaggaggttccaattagaaatttaactgaaggccactttgaatcaatatgctgtgggaattaaatgatgctgtttttatgttttcctttttgaagatattggtcattctttttttaaatttttatctctaagagttcaaggaaagcttggtttttattggtaaggcaagaaatgcagcttctgactaaatgtttatatcttcagtgtgggatgccctt

SEQ ID NO: 185601 - DNA, 591 bp, Homo sapiens
atatttactttgagtgtgttttaaaaaatgacacctgctacaaatatcatggatctgtatatccttgatgtctcacaggtcataaaacagcaagggcaaatattttatgagctacattgcattgttgttttgttcccaggaaaagaggtattttctcaaatactaagagaccagtctattcctggggtcagctgaagccagtgttgaccctggacaaacactgggagagagctgkttccctactatgatgatccctggagctcagatgctgtctgtgcccagaccctcaaggcaaccatggccaaggtagagaaggtgaggacactgctctttttgagacacatgtggttcggcacacacgtgtactgtgataattgttgctaatgatgctgacagtagccaacatttaccaagggatcactatgcagtgagcactgtgcacagtgccttatgtgctgactcactgaatcctcataatgtcatttggaggtaagtactatcagcaacactacttcgcagataagaggaaaacaacggacagtaatcgtgctgcacagcagcaatcttgggagttgaacttgataaatccat

SEQ ID NO: 185602 - DNA, 591 bp, Homo sapiens
atatttactttgagtgtgttttaaaaaatgacacctgctacaaatatcatggatctgtatatccttgatgtctcacaggtcataaaacagcaagggcaaatattttatgagctacattgcattgttgttttgttcccaggaaaagaggtattttctcaaatactaagagaccagtctattcctggggtcagctgaagccagtgttgaccctggacaaacactgggagagagctgtttccctactatgatgatccctggagctcagatgctgtctgtgcccagacyctcaaggcaaccatggccaaggtagagaaggtgaggacactgctctttttgagacacatgtggttcggcacacacgtgtactgtgataattgttgctaatgatgctgacagtagccaacatttaccaagggatcactatgcagtgagcactgtgcacagtgccttatgtgctgactcactgaatcctcataatgtcatttggaggtaagtactatcagcaacactacttcgcagataagaggaaaacaacggacagtaatcgtgctgcacagcagcaatcttgggagttgaacttgataaatccat

SEQ ID NO: 185603 - DNA, 591 bp, Homo sapiens
atatttactttgagtgtgttttaaaaaatgacacctgctacaaatatcatggatctgtatatccttgatgtctcacaggtcataaaacagcaagggcaaatattttatgagctacattgcattgttgttttgttcccaggaaaagaggtattttctcaaatactaagagaccagtctattcctggggtcagctgaagccagtgttgaccctggacaaacactgggagagagctgtttccctactatgatgatccctggagctcagatgctgtctgtgcccagaccctcaaggcaaccatggccaaggtagagaaggtgaggacactgctctttttgagacacatgtggttcggcacacacgtgtactgtgataattgttgctaatgatgctgacagtagccaacatttaccaagggatcactatgcagtgagcactgtgcacagtgccttatgtgytgactcactgaatcctcataatgtcatttggaggtaagtactatcagcaacactacttcgcagataagaggaaaacaacggacagtaatcgtgctgcacagcagcaatcttgggagttgaacttgataaatccat

SEQ ID NO: 185604 - DNA, 587 bp, Homo sapiens
aaatggatttcatggatttcaggtctccacagagcccatgacctgttatttgaaggcttttgacccaccagtatgtccaaacatctgttgacatctgcctctctgttctgtggtgtttttcaagggatgctaggtgttcttcaaggtcaaaagggaatggtgctctcttaaagaaactggtgctgaaaagaataagggtttagttacctggggcaagaagtagaacaagaattgggtggaggtcaagaaaagcctaaggccaagtgagaaagaccaacagaagcaaaggagacagacaatcaatgataaatttcccccaccctaggcctaggggtcagtactgataaaagaggaacagaccaaaaaggcacaggtgcaggaggtgaccagtccaagcctctccagttggcttctgagagagctaacagctactggggaaaactggagcctccagtccaacctaacctggccttaaaaggcacaacccccaagacaaaagcactctacgtattcctgaaacacacaaggacacagattagaggaaagaaagraaacaaagggctcatttacaaatgaaatttgtaatt

SEQ ID NO: 185605 - DNA, 455 bp, Homo sapiens
ataataataataattataacacttaaaaatgagcccaggtagatgatcttccagtaatttctcccttgattttcttgttcttgctgctattaaaatcaagagggcaccatatttctccctttgctcttctaagatccagtacttatgataagaaaaccatagtccaacacaccctatgtaagttattctgtgtatctgagcttcagatgtaaaggagctctttcagacttcagggttatgagagtttctgaatagccacctggcaaatctgggtagatgttgactttcccagcaggccacgatttattgccaaaagcacartttttttcttttgttttgacttaacatgccagaaaaaaaacacaagactataagaattaaacctaatgcatcacagctaagctctctaaggcatgaaagaggcaagggctgcaccaaaacgaatttatcaatca

SEQ ID NO: 185606 - DNA, 599 bp, Homo sapiens
atgagaagcaaataatcatacagccctatggccttgagaagtgctggttttggagcacgcatctatctgtggacactgatatcccatcttgtctctattgtcacgccacttctctatgtgaatgtgagccattatcttctcctctggctagaacatctatctacctaacgtagtaaatgaatcaaatttaatttaaaggaaaatcaaaagtcatttccatgcactgacataagaaagcacttaatctcaataaactagcagttaggatgatgggaaaatctacaagggctcagaggtatgcagcaaatcaaaattctccccatttgtataatggaacaaagccaaagtaagctttcttcctggcctaaaccacataacctaacacctgttagaaaaatgggctggggcaatgagctgtgaccaccggtgattcaaaggaatcmctaaactctccccaccagtttcacagaactgcattggaaaatgacttttaccaagattcttaataaaatcaacatctttgcctgtttcatacattattagattttatggcatgcatttcagaactctaataccttaactctgtctacaagtgaggt

SEQ ID NO: 185607 - DNA, 551 bp, Homo sapiens
aacctgcatgaattctaatgtggcccacctttatacctatgtgagatgatcttgagctctgtaacctccattgatcttaccagtggctcagctagctctcattttatttgtcttcttgactctcccttaaattccccatcgtgcctattcccaatttatgcctcttaaaagtcattagtaactgaaatgagcaaagtttaagaactggtgcctcttcctggcctccatatgctttaatttcattgcagcattggatatctcatcttcccatgtctcttatcatcaacctcaagctccccaaatttccttgctctcactaaatttacccatttttctcaagccttttaagatttcttagaatccagaactgtaagcaataaatatttgttgtttctaaatcacccaggctaaggtattttgttatagaagcaggaactgactgaggcaaaatgttatcttgcttaattcagaagacagaccctatkgttacgccattttgtagatgagctaactaaggctaagagaggacaggtaacttgcctgaggttaca

SEQ ID NO: 185608 - DNA, 564 bp, Homo sapiens
cagtgataagtatttacaaaaccaagcaaattaaaaaacaagaaaattattacatccagagaaatcaaaagtcaggcaggatagaaagtgtgatggtagtttactccacacttcagctttagatgacatttcaatactgtactaatatgaatattaatttcatcaaatttgcagtaaaattacattgagataagggacagaagaagagcgtgtgcaatagaagtgaagggaagaytagtgatattagttatgttctctgcttccatagtgcaaaatcaatagaaagagcttgaaatgtaaaaaataaaaaagtatacatattacttagagatacagagataaatactaaaataatcagtttaaaagaaatgagggagagggaggagggacaatgtaggggttttgaattattctttagtaacaagccttatagggctacatgaggtcacatatacacacacacacaataaatgggaaatgcttgcaaattgcataatgtaatgaaaattttcaaatactttataaaaataccatggaaaaattatgctattataagaaatgtta

SEQ ID NO: 185609 - DNA, 564 bp, Homo sapiens
cagtgataagtatttacaaaaccaagcaaattaaaaaacaagaaaattattacatccagagaaatcaaaagtcaggcaggatagaaagtgtgatggtagtttactccacacttcagctttagatgacatttcaatactgtactaatatgaatattaatttcatcaaatttgcagtaaaattacattgagataagggacagaagaagagcgtgtgcaatagaagtgaagggaagattagtgatattagttatgttctctgcttccatagtgcaaaatcaatagaaagagcttgaaatgtaaaaaataaaaaagtatacatattacttagagatacagagataaatactaaaataatcagtttaaaagaaatgagggagagggaggagggacaatgtaggggttttgaattattytttagtaacaagccttatagggctacatgaggtcacatatacacacacacacaataaatgggaaatgcttgcaaattgcataatgtaatgaaaattttcaaatactttataaaaataccatggaaaaattatgctattataagaaatgtta

SEQ ID NO: 185610 - DNA, 592 bp, Homo sapiens
attgcctacgtcaaacgatacaacactctattggaaagttctttgttggttctgaatatacatacttggcttttcatggaataatgctgcagccacataacagaactctgtcatcagtgttttaaatcctgagtgattatatgcattaaatgtcattgtaggggctgggcacagtggctcatgcctgtaatcccagcacttagggaggccaaggcgagtggatcacccaaggtcaggagttcaagaccagcctggtcaacatggtgaaacccggtctctattttcaaaaatgcaaaaattagctggatgtggtggtgcacgcctgtagttccagctactcaggaggctgaggyttgagaattgcttgaacccgggaggtggaggttgcagtgagccgagattgcctgggcgacaaagtgagattccgtctccaaaaaaaaaaaaaaaaagccattgtaggatagtagtaattttaaaaacatagaggacaaacaaaaagtactttctacttcaatccaagatgaagaattaaccatgtcagtaacgaaaaggtggaccattgcagcatctgtcattattgtttctcattttg

SEQ ID NO: 185611 - DNA, 592 bp, Homo sapiens
attgcctacgtcaaacgatacaacactctattggaaagttctttgttggttctgaatatacatacttggcttttcatggaataatgctgcagccacataacagaactctgtcatcagtgttttaaatcctgagtgattatatgcattaaatgtcattgtaggggctgggcacagtggctcatgcctgtaatcccagcacttagggaggccaaggcgagtggatcacccaaggtcaggagttcaagaccagcctggtcaacatggtgaaacccggtctctattttcaaaaatgcaaaaattagctggatgtggtggtgcacgcctgtagttccagctactcaggaggctgaggtttgagaattgcttgaacccgggaggtggaggttgcagtgagccgagattgcmtgggcgacaaagtgagattccgtctccaaaaaaaaaaaaaaaaagccattgtaggatagtagtaattttaaaaacatagaggacaaacaaaaagtactttctacttcaatccaagatgaagaattaaccatgtcagtaacgaaaaggtggaccattgcagcatctgtcattattgtttctcattttg

SEQ ID NO: 185612 - DNA, 565 bp, Homo sapiens
aggtgcttcacatcatgaagggatatttttccatcatcttgggatttcattctgggacatagagtatgagccacaataaggtcagagaggagtgaggatacaatcttgtgaggggtgaactgggtccagcaactttgcctgcaaaaataaataaattaattaattaattartaaatgaagacagatgacatagcaggtgcttccaactccatcccagcattcccttaattgcacaagcagtccacaccatggcccagtgttcaggtgggagtacttcattatgtaagcaacatttggaatgaaaattggggccctcctggcaaactcttgatttgaggtttttcatacccagaggcaaatcggagtggaattgattgatgctgggtggcatgtggcatctacacttgcctcttctttttctgacttccatattccacattggcctagggcttccttggtctggctcaacaacttccacactaaatgtttctcagttcccaaagtgtgaccctcatgggaatgcattgcctgagtgttttcttctaaaaactgtcacattttaatg

SEQ ID NO: 185613 - DNA, 550 bp, Homo sapiens
ggctgcacccactttccaaccagtcccaatgaattgaacccagtacctcaggtggaaatgcagaaatcacccatcttctgcattgctcatgctgggagctgtagactggagctgttcctatttggccatcttggaacaatccacctccatcttgatttcattgttgacccaaagatcattcacaagcagaatatttagtttccwtgtatttgtacagttttgaggattcctttagagttaatttccaattttattccactgtattctgagagtgcacttgataaaatttcaattttcttaaatttattgagaattatttcgtggcctatcatatagtttatcttggagaatgttccatgtgctgatgaaaagaatgtatgtttttcagttgttgggtataatattctgtaaatatctgttaagcacattcgttctagcatactctttaagtctagggtatagtttaagtctactgtttctttgttgactttctgtcttgtgacctgtctagtgctgtcagttgagtactgcagtcccccactattattgt

SEQ ID NO: 185614 - DNA, 487 bp, Homo sapiens
ctttttacaatgaatttcctgggtgttttttgagtttcttatgtttggatgtctagataccgagcaagaccagaggagttttcctcgattattgctttaaataagtttttcaagcttttagatttctcatcttcctcaggaacaccaattatttttaggtttggtcatttaatataatcccaaatttcttgaaggctttgttcatttaattttttttctttgtctttgtcraattgggttaattcaaaagcttttcttctagctctgaatttctttcttctacttgtttgattctattgttggagttttccagtgtattttgcatttctctaaatttgtctttcatttccagaagttgtgattgtcttttctttatgaaatgtgtttctctggagacattttcatccatatcctgtattttttaaaatttatttaagttgattttcatgctctctttgagtagcttaatacttcactttctgaattc

SEQ ID NO: 185615 - DNA, 565 bp, Homo sapiens
agaccttgcccctccttgccttccagcactgtcagctgtggcttctttgctaatatctgcacytgcaattcacccctgccctcaaccccagattttgctcagtaaaattcatgctcggttgaaattattacaaagttcagttggaagcttcctttaccctgtgccccttccccaattctcctggctaacttttccaaggacctcttaccccagggatggctatcctggggctttagttggggactggaagtgcctacagggctcttcctactgcttctcctacttttatatttcacccagctccctaaatctgttttagctctaggtaagattaaatccttctccatgatctggatttttcaggtttcccagtgggaatgtgtattagtcttcctgagactgggtaatttataaagaaaagagatttaattgactcacagtttcacacggctagggaggcctcaggacacttccaatcatggtggaaggagaagggaaagcaaggcatgtcttacatggcagcaggagagagagagagagaaagagagagagagagaaagagaga

SEQ ID NO: 185616 - DNA, 561 bp, Homo sapiens
cttgcccctccttgccttccagcactgtcagctgtggcttctttgctaatatctgcacctgcaattcacccctgccctcaaccccagattttgctcagtaaaattcatgctcggttgaaattaytacaaagttcagttggaagcttcctttaccctgtgccccttccccaattctcctggctaacttttccaaggacctcttaccccagggatggctatcctggggctttagttggggactggaagtgcctacagggctcttcctactgcttctcctacttttatatttcacccagctccctaaatctgttttagctctaggtaagattaaatccttctccatgatctggatttttcaggtttcccagtgggaatgtgtattagtcttcctgagactgggtaatttataaagaaaagagatttaattgactcacagtttcacacggctagggaggcctcaggacacttccaatcatggtggaaggagaagggaaagcaaggcatgtcttacatggcagcaggagagagagagagagaaagagagagagagagaaagagaga

SEQ ID NO: 185617 - DNA, 561 bp, Homo sapiens
cttgcccctccttgccttccagcactgtcagctgtggcttctttgctaatatctgcacctgcaattcacccctgccctcaaccccagattttgctcagtaaaattcatgctcggttgaaattattacaaagttcagttggaagcttcctttaccctgtgccccttccccaattctcctggctaacttttccarggacctcttaccccagggatggctatcctggggctttagttggggactggaagtgcctacagggctcttcctactgcttctcctacttttatatttcacccagctccctaaatctgttttagctctaggtaagattaaatccttctccatgatctggatttttcaggtttcccagtgggaatgtgtattagtcttcctgagactgggtaatttataaagaaaagagatttaattgactcacagtttcacacggctagggaggcctcaggacacttccaatcatggtggaaggagaagggaaagcaaggcatgtcttacatggcagcaggagagagagagagagaaagagagagagagagaaagagaga

SEQ ID NO: 185618 - DNA, 564 bp, Homo sapiens
gaccttgcccctccttgccttccagcactgtcagctgtggcttctttgctaatatctgcacctgcaattcacccctgccctcaaccccagattttgctcagtaaaattcatgctcggttgaaattattacaaagttcagttggaagcttcctttaccctgtgccccttccccaattctcctggctaacttttccaaggacctcttaycccagggatggctatcctggggctttagttggggactggaagtgcctacagggctcttcctactgcttctcctacttttatatttcacccagctccctaaatctgttttagctctaggtaagattaaatccttctccatgatctggatttttcaggtttcccagtgggaatgtgtattagtcttcctgagactgggtaatttataaagaaaagagatttaattgactcacagtttcacacggctagggaggcctcaggacacttccaatcatggtggaaggagaagggaaagcaaggcatgtcttacatggcagcaggagagagagagagagaaagagagagagagagaaagagaga

SEQ ID NO: 185619 - DNA, 564 bp, Homo sapiens
gaccttgcccctccttgccttccagcactgtcagctgtggcttctttgctaatatctgcacctgcaattcacccctgccctcaaccccagattttgctcagtaaaattcatgctcggttgaaattattacaaagttcagttggaagcttcctttaccctgtgccccttccccaattctcctggctaacttttccaaggacctcttaccccagggatggctwtcctggggctttagttggggactggaagtgcctacagggctcttcctactgcttctcctacttttatatttcacccagctccctaaatctgttttagctctaggtaagattaaatccttctccatgatctggatttttcaggtttcccagtgggaatgtgtattagtcttcctgagactgggtaatttataaagaaaagagatttaattgactcacagtttcacacggctagggaggcctcaggacacttccaatcatggtggaaggagaagggaaagcaaggcatgtcttacatggcagcaggagagagagagagagaaagagagagagagagaaagagaga

SEQ ID NO: 185620 - DNA, 565 bp, Homo sapiens
agaccttgcccctccttgccttccagcactgtcagctgtggcttctttgctaatatctgcacctgcaattcacccctgccctcaaccccagattttgctcagtaaaattcatgctcggttgaaattattacaaagttcagttggaagcttcctttaccctgtgccccttccccaattctcctggctaacttttccaaggacctcttaccccagggatggctatcctggggctttagttggggactggaagtgcctacagggctcttcctactgcttctyctacttttatatttcacccagctccctaaatctgttttagctctaggtaagattaaatccttctccatgatctggatttttcaggtttcccagtgggaatgtgtattagtcttcctgagactgggtaatttataaagaaaagagatttaattgactcacagtttcacacggctagggaggcctcaggacacttccaatcatggtggaaggagaagggaaagcaaggcatgtcttacatggcagcaggagagagagagagagaaagagagagagagagaaagagaga

SEQ ID NO: 185621 - DNA, 590 bp, Homo sapiens
ttttttctctctcagattgaacaacttccttcagcatttcttttaagataggttgatagtagtgaattctcccagcatttgtttgtctgagaaaggcttatctcttatttaaatttaagtgtggctttgttggatatactatttttgaatggcattttttttctttcaatactttggaattattccattatctcctagcttgcrttgtttctgttgagaagtctgttgccagatgaattggaacacttttacattctatttgcttcttttcttttgctgcctttaagatcctctctttgttcttggcttttgagagtttgtttgttatatgtcttggtgtagtcttatttgggttgaatcaccttggtgttctctaacctttctgtacctggatatttatatcctcaaattttggaaagttttctgttattatctctttgaataaacttcctagcccttgcttttgctcaacttcgtcttgaataccaacatgtcttagatatagtctttttagataattttctttatcttgtgggcaatcctattccttttactcttgtttcttttttctcctctgactgtatattttc

SEQ ID NO: 185622 - DNA, 578 bp, Homo sapiens
tggcaatgaatgttccagctttcttgtactaatctctaaaaagtcttcagaggggcattattgtatagttgagaaatctggtatacaaagggtgacttgacatggctagaagtgatgtaacagagattaaaatccatctatgtaacttcatgagttttcttatcatttcttccatgaacattttcaagattccaccattgggcatttgttgactttttccttctgttaaattgctggagaaaattattgggaagccgtttctgctgatgaagagaattggtgtatatggaaggaccacatggagtccatggggacagctgctggcttacctagtgttggtgaygttattaaaaatccaaattcaagaaatcacacgtttttctgccttcttttggttttcagggagcttccatgtggatgactatgggtgggattatcattgatggagaaatgcatgccttattataagcctctttcaaaccaagctgcttataattttatctgtggttttgcagaggttctgggccttttttgaaagctcagagttcttcaataataccaggtgaaaatggaaagaa

SEQ ID NO: 185623 - DNA, 568 bp, Homo sapiens
atataaacccggcctgtcacagccctcttctttccctccctgttctccttcatgtggggtgggtcctttgaggaatccttctcttcttcactgtgataattagattgattyctaggaattgatgaaaatggacagacatgtgctaatggaggttctgaatcactgcactaatgcactacatcatttattcatctatgcagacctgtatgagtagaaagaaagctgtgcctcctcataataaaacccagatgagcttgcacaatgtagtcgagtccactgggcatttaaattctgaggcacacatcaaggctgctctttgaacaggtgctacagctgagccatggggaaattacatgaaatactgaattcactcagaagacagtgagtgtcccaaaggaggtaaataggaacttctgcatcagaatccagggcttactcctggggcccgtcttctggcttcagatcatgagagtaagaaaggcctggcttgaaatttgcatgaaggcagatagcgtttttttgcgcatttctgtctttcacttattcattctttcaacaagtgttgaga

SEQ ID NO: 185624 - DNA, 419 bp, Homo sapiens
ggtttattgccaaaaagatgttaaacctgatccaactttagtcggtcttcttcctygtgagatgcagcaaagggaaggacataaagaattctgcctgaaggtcaacatcagaaccctttacatacattatcttagcatgtgtgtaatgggtactattaatagccccattttatagatgagtaaactgagtttcaaagagttcaagaaatttgcccaattcataaagttagtaaactctggtcattctaataaaagtctgtcttactcaagctttcaaaaatcagacctcgcaacagttccagtgccaccaattattcattgtgtcccctccagcaaaccagatactgaacaaaaacttgttgaatggataaattccaagaagaaactatctggcttctcagactgaggctaattaatcc

SEQ ID NO: 185625 - DNA, 419 bp, Homo sapiens
ggtttattgccaaaaagatgttaaacctgatccaactttagtcggtcttcttccttgtgagatgcagcaaagggaaggacataaagaattctgcctgaaggtcaacatcagaaccctttacatacattatcttagcatgtgtgtartgggtactattaatagccccattttatagatgagtaaactgagtttcaaagagttcaagaaatttgcccaattcataaagttagtaaactctggtcattctaataaaagtctgtcttactcaagctttcaaaaatcagacctcgcaacagttccagtgccaccaattattcattgtgtcccctccagcaaaccagatactgaacaaaaacttgttgaatggataaattccaagaagaaactatctggcttctcagactgaggctaattaatcc

SEQ ID NO: 185626 - DNA, 419 bp, Homo sapiens
ggtttattgccaaaaagatgttaaacctgatccaactttagtcggtcttcttccttgtgagatgcagcaaagggaaggacataaagaattctgcctgaaggtcaacatcagaaccctttacatacattatcttagcatgtgtgtaatgggtactattaatagccccattttatagatgagtaaactgagtttcaaagagttcaagaaatttgcccaattcataaagttagtaaactctggtcattctaataaaagtctgtcttaytcaagctttcaaaaatcagacctcgcaacagttccagtgccaccaattattcattgtgtcccctccagcaaaccagatactgaacaaaaacttgttgaatggataaattccaagaagaaactatctggcttctcagactgaggctaattaatcc

SEQ ID NO: 185627 - DNA, 419 bp, Homo sapiens
ggtttattgccaaaaagatgttaaacctgatccaactttagtcggtcttcttccttgtgagatgcagcaaagggaaggacataaagaattctgcctgaaggtcaacatcagaaccctttacatacattatcttagcatgtgtgtaatgggtactattaatagccccattttatagatgagtaaactgagtttcaaagagttcaagaaatttgcccaattcataaagttagtaaactctggtcattctaataaaagtctgtcttactcaagctttcaaaaatcagacctcgcaacagttccagtgccaccaattattcattktgtcccctccagcaaaccagatactgaacaaaaacttgttgaatggataaattccaagaagaaactatctggcttctcagactgaggctaattaatcc

SEQ ID NO: 185628 - DNA, 448 bp, Homo sapiens
ttaaaatcctttctaacatggagccctgtctaaacatggatcagaattgttttcgaggtagggatcattggtgctgaaaggtggtggtcaggatgatgagatgctgatgtctgaatttctactttagaatgtgttgtgttggatgtcacaaaacctaaagactcatccattgctaatattcaactataatatgttgatttgaactgtctttscattaaaaacatgtactggcttaggtctgataggcagaaaattacgatttgctcattcagtttgtcttaagtcaattggtatgcatgaaaaaccttttactcatcgctgtatatcttatttctgtcttacattctttatatgtagaatagaataaatatagtgcctactttatgaggctattgtgaagatcagttggagataatgtgcataaattgttgaatgcctgacatttatt

SEQ ID NO: 185629 - DNA, 566 bp, Homo sapiens
gtggagaagaggccacgtagccaatgttattcatttattcatccatccattaattcgtctcatatttgccaaaccatttttctgtggtagmcaatatgctagatgtcctatgataaatacaaagatgaatcagatgcctttcctggccacccccataaagttggagcaagacatactctcaaatgaatgtaatctacagaacttggaatacagaaaaaatatcaattttgatttgcaaagatcatgaaaacattctttgaatagatggtgtatctaggccttggaattgagatggtttaataaaattagttcaaccatttttcactgaatacttaccatatgtcagaaactatcttagtgctagagataacaatttcagatggaatgggattgtgtgccagctctactatttttctaactgtgagctgtaataaaattgaatctctcaaacactcagtttcctccatgcagataaaataagctttgacctgctagtcaacgtgaaataatacatgtaaaggtaattaggtacttagtaaaagttagctattattattacaatattc

SEQ ID NO: 185630 - DNA, 417 bp, Homo sapiens
aagctattgattattgccacaatttcaaagcctgttattggtctattcagagattcaacttcttcctggtttagtcttgggagggtgtatgtgtcaaggaatttatccatttcttctagattttgtattttcataaaaaaaaagtctttacatctccagttatcamtgagcccactggtgtggtaaagactccagaactcctgatggtataatgaagctgcccaagcatcttcaaaacccgttgcctgtgatgcttacctgtagtcattattttggtgatagaggtcaattcaaatctcagaatctactcatcttctctacgttagtatttttttcctgctacgtgggtaaaatgactgaggattctgagcccaggaaagtatgttgggaaaaagaaaaagtctattcctgttttct

SEQ ID NO: 185631 - DNA, 417 bp, Homo sapiens
aagctattgattattgccacaatttcaaagcctgttattggtctattcagagattcaacttcttcctggtttagtcttgggagggtgtatgtgtcaaggaatttatccatttcttctagattttgtattttcataaaaaaaaagtctttacatctccagttatcaatgagcccactggtgtggtaaagactccagaactcctgatggtataatgaagctgcccaagcatcttcaaaacccgttgcctgtgatgcttacctgtagtcattattttggtgatagaggtcaattcaaatctcagaatctactcatcttctctacgttagtatttttttcctgctacrtgggtaaaatgactgaggattctgagcccaggaaagtatgttgggaaaaagaaaaagtctattcctgttttct

SEQ ID NO: 185632 - DNA, 503 bp, Homo sapiens
gcaacatgatgggtgtttgagatgtatcagtaaataacractctaaggactatggcattaagtggctgtcctaagcaacactgattcgtgtaagacagataatgacagtttcagatctagataacaacaatttaagtcaaagtgagtggcagaaaacttccttggaagcttttaaaacgagccctcatctcctgcagagggaaagtacatctgagagtcaaaacaggacttaattagaagagagcagatcttcagagaagcctgaaatccctgcctagctaagtcttctatgccaaaatcgtcttcatggggaaggagtgggactctgagaattgggatggggatagttggtagatgcctttgagaactttgaatcccccaattcccctgaactccctggccctgcagaaatagctttcttcactttgttggcgatagagtactgctacccagcctcctgacttaaatactgtgagatgccataaatgaggccccctgcctgc

SEQ ID NO: 185633 - DNA, 503 bp, Homo sapiens
gcaacatgatgggtgtttgagatgtatcagtaaataacaactctaaggactatggcattaagtggctgtcctaagcaacactgattcgtgtaagacagataatgacagtttcagatctagataacaacaatttaagtcaaagtgagtggcagaaaacttccttggaagcttttaaaacgagccctcatctcctgcagagggaaagtacatctgagagtcaaaacaggacttaattagaagagagcagatcttcagagaagcctgaaatccctgcctagctaagtcttctatgccaaaatcgtcttcatggggaaggagtgggactctgagaattgggrtggggatagttggtagatgcctttgagaactttgaatcccccaattcccctgaactccctggccctgcagaaatagctttcttcactttgttggcgatagagtactgctacccagcctcctgacttaaatactgtgagatgccataaatgaggccccctgcctgc

SEQ ID NO: 185634 - DNA, 454 bp, Homo sapiens
agttggaaggaaatatacacacagtataattcagttcaaactagtctacatatacaaatgtgttctgtatacaaagttgcatgaatatgtttccatggtttatattctaggttttaaaggttgtataccattctaaagtgatacaatattaagaaaatatataaaatagaaaaaaatattaaaatgcttattgttttacatctcaccaaaatatactcactgttaatattttagtgtattttaagtgctttttttaatgtctgaggtttggttcacacacacatttatatatacagttgagtcttgaacaatgtgaaggttaggggcacaactcagtgcagagatgaaatccatgtataattttttactttaaaaaacttaaccactaatagcctastgttgactggaagccttactgataacataaacagtcaatttacatatattatgcatg

SEQ ID NO: 185635 - DNA, 456 bp, Homo sapiens
tgatatagtcattaattttctgtaagatctctactgtttaccttcttctctccaaatatgaagttctaaataaaggcccttaggaaagaagtcacgaatagctgggcaggacaagcagtattttgtgtttctcaatatgaggtgcttgacactcagtatttttgtacttacacagttccatgaagtaggatctattacctccaccctccagataagaaaatgagctcgtatagattgtcagatgtccaaagtgtcccayctagtaggtgaaagatccagaattttgaatccagtgttctttattgaacaaaatactgaatctggagcttggtgacctttatccaaataacaacaataaagctaacattaacttagccctcaccatgtaccatacctgtgctaagccattccaagcactcagttgtgtctacaataacattatctccattgtacctg

SEQ ID NO: 185636 - DNA, 588 bp, Homo sapiens
ttagttgtgattgtggccttgttgtaagacaggaccggacctgcatcctgaaaacatttgtatgcttgcagtacctagaagagtctttgccttcttcaggagcttcctaatggctttgtgcattgaatagaatwgaaggagttttctgggagaaggtagattaaaggggtacagtgtgagctttttctttgagtacattcggaaaaataaatggaggtagggaaatggcttgggcattccaggtcattctctaaagagatcaactaaataccatttgtttggtaccaaccatatactcagacactacaaatttggatattgccacttgttaactgtgtgacaaacttggacaaattaccttctcttcaagtgactcagtttctacatctgtaaaataatatgattattgtgaggacataatgaggtaatacatataaagcactaggcacattctctgacacatcgtaattcctcactaaatgttctttatagtttttttttaaattactctcacagcagtttgagatccatagatattaccattttagagataaaataataacaaaaactatcatttcttgagtgcaa

SEQ ID NO: 185637 - DNA, 450 bp, Homo sapiens
tcattcttttgacagtgacaagctgcttgtaaggaatgattgccacttcaaaattgtgttcagcyttcttaaaatacttctgttcttcaaacaaaatacctcacatcagttctaaatctgtaatacttggggaattagggcctcaccctgtgtaatgctgcagtatgctctctgtgctactgaaacctctggcacaagcgtttcctcacctaaggcatctgcctttcactggtgggtggctgatctttagatcatctatgcggtgcgttgggagccttctggataaaggatgcttgaatatataagtcagggtttctgctcaacacatattcattgcaactactgaatatattaactcattatacctctcccaaataattatacagtatgtgcagcaagcattttaaaatgtgtacatttcaaacacggagctggcattttacaagattt

SEQ ID NO: 185638 - DNA, 438 bp, Homo sapiens
ctgatgaacttgcgagacttcattcttttgacagtgacaagctgcttgtaaggaatgattgccacttcaaaattgtgttcagccttcttaaaatacttctgttcttcaaacraaatacctcacatcagttctaaatctgtaatacttggggaattagggcctcaccctgtgtaatgctgcagtatgctctctgtgctactgaaacctctggcacaagcgtttcctcacctaaggcatctgcctttcactggtgggtggctgatctttagatcatctatgcggtgcgttgggagccttctggataaaggatgcttgaatatataagtcagggtttctgctcaacacatattcattgcaactactgaatatattaactcattatacctctcccaaataattatacagtatgtgcagcaagcattttaaaatgtgtacatt

SEQ ID NO: 185639 - DNA, 605 bp, Homo sapiens
aatgagaaatttttttgttaaaaatggttggttttcaacaagyctttaatttattaatttattgaatgcttactgtatgttgggcccattatggccattagtttatttgatcattggtaataccctgtgagtgcaataccagtaacatacccatttgacagatgaggaaagatatattgaagctgagggaagttaagcatctttcccaaggtcacatagcagataaatttagagactctgattcaacatgaaacacatcatttcaaacagttggaaaagtgggtgaattaggataaaaggaagaggatttcatgttgtatattctagtgatttatgtttgcaacagagctgccactgtctagggatccttccctaatgtggaaaggccattcctgccccagacttgacacttacactatagtgtgcattcttgctatattatttccccatggacatgttcattttccaactacagtcttccttctcagccctgaaactgcacagttgcaggccagcacactaggtttttagattggtgaattccctgtacacttcccttaatttcctcagctttcattttcacacccgtagaatgaggcactgac

SEQ ID NO: 185640 - DNA, 570 bp, Homo sapiens
tatgtattccaacatctaataggccaaccaagaaggaaccagctcaaaggtgaagaaggaatgaccaatgargtaacaagaaaactgtgggagggtggtatcaagaaagacaagaaaagagagcatttccctaagaaggggatggtcagattatctagatactgcttagaagtcctgtacaatgagaacaagaagtagccattgaattcagccagatagaggtcgctggtgatcttgagaagaggagtttcagtcgagtgtttagtgtggaaaactgtattgagtggtttgagcaaggaaggagaaaagaattagatgcaggaagactgcaaaactgttgtgaaagggagcagaaaaatggggcagttctttgagatgaaccaggaatcaagagagaatgcttttaggttagggttttctgagatgagaataaatacacaatggaattggggaacagaatgggacaagaagcagctcagcaaaggtgagatccctggcaaaatcctgctaagagtagctagctccagactgaagccttaaggaaagttactaccagatttcccttacctt

SEQ ID NO: 185641 - DNA, 426 bp, Homo sapiens
gttcccacaccagtaatcaaattattattacttaataagaataatcatcatttaattcaaattaaataattaagagcttggttggcttcaatttaggtgtgtaaataaattttatgaattatccatggtctgcctttccatttttccttgcttttttttattatttatttagtgggtaaaaacaaacaaamaaaaaaaggtgaggtaaatactgatgtagaaaattttaaataattacattttgatgactagttgtggtttcttttaaaagaatcatttggagtaatatggactgtgtgttattactcatccaagttctggctcgtattgacaatttgagtaataaaagtttgtgagactaggagtgaaaaatctggactggaagggaagacctctgcctactctcttgagtatgaagtttaccag

SEQ ID NO: 185642 - DNA, 567 bp, Homo sapiens
gtagtaaaactataaacatattcaggatacaattaccatagaacttatactggtggttgttttgagggaggaacagtcaatggtttgaagcagtcaagagagggccttcgaagcactaatatcccatttcttgacctgggttgtttacctgatagttctttttgtaataaattattgagttatatatcttttgtatgtgtgttatgtgtaggtatgttatacattgcaatgacaatttttttaaagataggcaaaataaataccccattaagagagtgtagagaagaaatggagcatgagaagataattgtgacacttaagagtttacagaagscttcaatccagcctatacagagtttttaaaaatcaatgagaaaaagacaaataatgcaataaaacaggcaatgtgcagtggctcatgactgtaatcccagcattttgggaggctgaggcgggcagatcacttgagtccaggagtttgagaccagcctgggcaacatggcaaaaccatgtctctacaaaaaatacaaaaatcagctgggtgaggtggtgtgcacctgtagttcc

SEQ ID NO: 185643 - DNA, 563 bp, Homo sapiens
gaattctttattaccctaaaattacatgatattatcctgaagtgacatgaaatgtcttacttrttgtcttgcccattcctggaatgaaagtagaatattaaagaaaactaatgcttctgagaattggctgctctaaagggtaccttctttcattactcatgcttcgtaattggcagtccacagcaggaaagcccatataaaatatgctagttatatttagatcatagttctggatttgcctttatgatgaggtgctaaaaattatggcatattgtaacagatgtctgcaatgtgctagagatgccaaagttctgtttgtggtaaaatgttttataccaactgtcagaagaatttttctgtcagtcaagtgctgaaaggctatttgcaaattgtctttaaggaatgaaaaaatggcagtgtaggacaaaacagatactgtcttaaagtttagtattctcattttaaatagtgaatgactaatggaatgtgcaacctatttatactccagtctgtgccatttgtagatagtattattacagatattatcatcaatatttattttt

SEQ ID NO: 185644 - DNA, 544 bp, Homo sapiens
taatatgttcttatttcaaaataacttacttgcaattgaacttttgggagacaacttattccttagtctaggtttgcctttaatataaatgaaatgcattcccytctaaagctcttatttttttaaaaccctagtcttggtaataaatactgtgtgcactttacatgaagtgtaggctctgacccacattaagcagtatatatgctccctggtctttataaagaaatatctatgaaattacttataatgagactttctgaactcaagacagtacgatgtatagggccattttcactgaactcttgacactggccgtaaatgcattagtatctccatttacttcataaaactatcatttacatttatagtatgcttttagaagatatttgttataataaatgggcttcttctctgctatctttaagccaggtatacctacatgaagcttctatacatactgctctttcaccccttctgtaagtatggggaaatgtaaagtttgaacctacaaccgatgccaaatgcagtggctacttgtgaaggt

SEQ ID NO: 185645 - DNA, 579 bp, Homo sapiens
acctattataataattgatgaaattttaacaatgtcagggaaaaagaggagttgcctaatccaaggaccccagtaattaattaaatgccattctccttttactgaggagcaaaaatataaagtaaatatttattacatttacaaagggtatttctaaagatggatcttgcatatagagctctrctataatgaatacttaatgcttaaaagatgaacagaataacaaagagcttggaagaaaaaatatagacgtgaaaataaagactatggaatatgatgccacagaaatgagatcagaaagtatatagaggaaaacagtgcaatgcaatgtagtaaacagttgatacaacttatcacatatgagtttggttctcttagttcagaaagatattttgaccaataagccattttttttctttgtgattgccattaccatcacttggtattaagaatgtgtgtgtaaatgtgtgttttctttgtgttactttaggtgtctgctgaaacaggaaggcaagttattctgtgttctttaattaggcggtgataaagaaagaatacaatttattgtctacaaaaaag

SEQ ID NO: 185646 - DNA, 589 bp, Homo sapiens
cttccaggcgggcctcagtaacaggacaggtttggttcatttcctgcaaaaacaggatttcccaggcattaaaggaaatgtccttgcattcctcttagccctgtccaccaggatggacagggatcaaggacctgggacatccttcctaatttaccagacactttatccctgaacgtgagcaacctacaaaaggctctycaagatccctcatgcccctgtgaatgttcatctagcgcaacttaggcaggagcctaggaaagccgtctgtgtcccccaccaacagaaaataagggaggccaccaagggtcgcctagaatcctgaagctcagctccaacccctggtgcaaagcacccctccagcgtaattctggaggcaattctactaccccccacactagaaactgcttctttcagtagcaaaaaaaaaaaaagaagaagaagaagaagaagaaaaagtaggcggggcgtgagggagctgcagatggtagaagggagagggagtagcgagattaaagttagacaggcctgggttcaagtcctacctccaccactgagtttaccttagatgagccattttgcctctctgaaa

SEQ ID NO: 185647 - DNA, 621 bp, Homo sapiens
attgccttcttgttctaaattaaccttagattaggtaggaataattctagttgtacagtcacaggggtgtacaagctgtaaattggacaccattttggacctcaactctctggagggatttctgagcacctcctacttagagaggaaggcctgggaagaagacacaagccagcttagtaaagggccaggggcaggtaaaatgtgagtaaagtttttagaattagggtcaaagtcagctaggccttttcaaaaataagccatagaaatgtagggcagagaagggccaaaaatggaataaaaatcgrgggacccaagctttctgcatctgcaaggttgttggatgttcttgtcatgtggttgctccgtttcccattagcctggaggccacagatgtgggatcttgaagcggtcttgggacacaggaaaccccagttaccatcccaaccctaaaggctgcttttggatggagtaaacctgaatgttacttgcaggagatccccattatctcatgttttggaaggcagctgacaagaaaccatcattcaccaaccagcacagctgttgaggaatcacattcagctggaaaagagagaactagaattttctggagcccctttctct

SEQ ID NO: 185648 - DNA, 621 bp, Homo sapiens
attgccttcttgttctaaattaaccttagattaggtaggaataattctagttgtacagtcacaggggtgtacaagctgtaaattggacaccattttggacctcaactctctggagggatttctgagcacctcctacttagagaggaaggcctgggaagaagacacaagccagcttagtaaagggccaggggcaggtaaaatgtgagtaaagtttttagaattagggtcaaagtcagctaggccttttcaaaaataagccatagaaatgtagggcagagaagggccaaaaatggaataaaaatcgagggacccaagctttctgcatctgcaaggttgttggatgttcttgtcatgtggttgctccgtttcccattagcctggaggccacagatgtgggatcttgaagcggtcttgggacacaggaarccccagttaccatcccaaccctaaaggctgcttttggatggagtaaacctgaatgttacttgcaggagatccccattatctcatgttttggaaggcagctgacaagaaaccatcattcaccaaccagcacagctgttgaggaatcacattcagctggaaaagagagaactagaattttctggagcccctttctct

SEQ ID NO: 185649 - DNA, 621 bp, Homo sapiens
attgccttcttgttctaaattaaccttagattaggtaggaataattctagttgtacagtcacaggggtgtacaagctgtaaattggacaccattttggacctcaactctctggagggatttctgagcacctcctacttagagaggaaggcctgggaagaagacacaagccagcttagtaaagggccaggggcaggtaaaatgtgagtaaagtttttagaattagggtcaaagtcagctaggccttttcaaaaataagccatagaaatgtagggcagagaagggccaaaaatggaataaaaatcgagggacccaagctttctgcatctgcaaggttgttggatgttcttgtcatgtggttgctccgtttcccattagcctggaggccacagatgtgggatcttgaagcggtcttgggacacaggaaaccccagttaccatcccaaccctaaaggctgcttttggatggagtaaacctgaatgttacttgcaggagatccccattatctcaygttttggaaggcagctgacaagaaaccatcattcaccaaccagcacagctgttgaggaatcacattcagctggaaaagagagaactagaattttctggagcccctttctct

SEQ ID NO: 185650 - DNA, 543 bp, Homo sapiens
gacagtggccattgcatcaagtcagagaacggatctgacccatctagtagaagcttattgttttggcagaagcacaagctcttagaggtgcagctgcagggtgtgacctattggggacattgagctcagtgaccatgggccctgagagtctgaaatcctggaatttctcccaaaacgaagtccatgtagggaagccaaagtgtgagtcttacccggctggtttacaactgactgacatttgctgcctgggcagctgytgtgggtgcctggaaaccctattggactaggactggccccggcaaaaaacaagtgttatagctgcccagtgtcctctgagtggatgctggtgattctggtatggagcccagatgtaaggcagcaggtggtccagaaggcaccagaagaggtctcctgtcaaagtcagggccagagaagaaggcacagggaacctactgcacgagactttcacttgcaacgagcaacccatgatgaggagggaggattcctgggggcattgagtcccccagacacaaggacccaaga

SEQ ID NO: 185651 - DNA, 617 bp, Homo sapiens
gtttctgttttgggacagacgattctggaaagatgttagaaatatagtacattgaaacaaaatcttccagtatcattaacctacacctagtgttaagccytgtcttttttacaatgttgtggtctcagtaaatgtttgataaataacttcagtacattcaccaagttatttttggttgtttctaggtctggaggccaggaaaatgtcaatggaaagcagctagcatgaagaccccacagtgttcctccctctagtagtctggtattatttggagctgagatgctcccaatatggttgggacatttgtcccctccaaatctcatgtgagaatttgatcccccattttggggatggggtctaatgggaggagtttgggtcatgacgggggacccctcaagaatggctttgtgccctgctcaccaggaatgaatgagctctcactctactagttcactggagagctggttttttaaagagcctggcgtctccccaactttctctcttgctcccccttctcactgtgtgatatacctgctcccctttgccatccatcatgagtggaagcttcttgaagcctccacctaaagcagatgccgacactatgcttcctgcacagc

SEQ ID NO: 185652 - DNA, 617 bp, Homo sapiens
gtttctgttttgggacagacgattctggaaagatgttagaaatatagtacattgaaacaaaatcttccagtatcattaacctacacctagtgttaagccctgtcttttttacaatgttgyggtctcagtaaatgtttgataaataacttcagtacattcaccaagttatttttggttgtttctaggtctggaggccaggaaaatgtcaatggaaagcagctagcatgaagaccccacagtgttcctccctctagtagtctggtattatttggagctgagatgctcccaatatggttgggacatttgtcccctccaaatctcatgtgagaatttgatcccccattttggggatggggtctaatgggaggagtttgggtcatgacgggggacccctcaagaatggctttgtgccctgctcaccaggaatgaatgagctctcactctactagttcactggagagctggttttttaaagagcctggcgtctccccaactttctctcttgctcccccttctcactgtgtgatatacctgctcccctttgccatccatcatgagtggaagcttcttgaagcctccacctaaagcagatgccgacactatgcttcctgcacagc

SEQ ID NO: 185653 - DNA, 617 bp, Homo sapiens
gtttctgttttgggacagacgattctggaaagatgttagaaatatagtacattgaaacaaaatcttccagtatcattaacctacacctagtgttaagccctgtcttttttacaatgttgtggtctcagtaaatgtttgataaataacttcagtacattcaccaagttatttttggttgtttctaggtctgraggccaggaaaatgtcaatggaaagcagctagcatgaagaccccacagtgttcctccctctagtagtctggtattatttggagctgagatgctcccaatatggttgggacatttgtcccctccaaatctcatgtgagaatttgatcccccattttggggatggggtctaatgggaggagtttgggtcatgacgggggacccctcaagaatggctttgtgccctgctcaccaggaatgaatgagctctcactctactagttcactggagagctggttttttaaagagcctggcgtctccccaactttctctcttgctcccccttctcactgtgtgatatacctgctcccctttgccatccatcatgagtggaagcttcttgaagcctccacctaaagcagatgccgacactatgcttcctgcacagc

SEQ ID NO: 185654 - DNA, 550 bp, Homo sapiens
gtggctttctgtctgagatggagagccttctgagagtttgggtgacaattgactattggaaataatatcatatgctaaaacagtctgatgttttctaygattaaaaacaagtgaaaatgcatatctttctattgttggtcattcccctacaatatagtggttttttaaacttttttttggttagtaaatacaatatgattattataaaaggtacagaaaatacaaacacaataggaaaataaaaacccattgctttcttaccagtcaatgatagcctttgttatttttagcatattttctatctttacatatgtgttgtattagttcattttcacactgctgataaagacatacctgaaactgggaacaaaaagaggtttaattggacttacagttccatatggctggggaggcctcagaatcatgattggaggcgaaaggcacttcttacatggtggcggcaagagaaaaatgaggaagaagcaaaagcagaaacccctgataaacccatgagatctcatgagacttactcattatcatgagaatacca

SEQ ID NO: 185655 - DNA, 440 bp, Homo sapiens
atacaggaggattgtataagctataggcaaatactacaccattttatatcagggacttgagcacctgtggattttggtatctgcaggggtcctggaaccaattccctgaggaaactgaaagacaactgtatgttatttgagacttttccttcgtaatcatgaaggtatttgcaatgtcattaaaaattcttttaaactacatttccaatggtcccaatgggtttcatcacatgaatgaaccataatttccatatcgcgcacctcactcctttgctctcctatgcagcagcagctctactcacaaaactgataaaattctraagcattaagcccaattattttgtttctaactccaagaccacacaaaattgatggcttgtgtcatccgggatggacaggtccaactggaacagctggtggtggtcggcagtgatttcttc

SEQ ID NO: 185656 - DNA, 366 bp, Homo sapiens
agtgctcaataaatgttgctggactgaatggataagtacctactgccgtagtttatagcaagcaacaggagttgagtgcacrtatttaaagtcagaaggcaagagctggaatcttggctttgccatttactctcagtgtaacttgcactaaattaaaccttaagtctcaatttcctcacctgtaatatgggcataaagatagcagctcacttatcattaggattaaatgagatagcacatgtagagaacttagcataataactggtacgtattaagtcatcaataaacattacatattatgttttttattgttgttctttcctgtcctcatgtgtcacctgtattataacatccttccaaccgttc

SEQ ID NO: 185657 - DNA, 366 bp, Homo sapiens
agtgctcaataaatgttgctggactgaatggataagtacctactgccgtagtttatagcaagcaacaggagttgagtgcacatatttaaagtcagaaggcaagagctggaatcttggctttgccatttactctcagtgtaacttgcactaaattaaaccttaagtctcaatttcctcacctgtaatatgggcataaagatagcagctcacttatcattaggattaaatgagatagcacatgtagagaacttagcataataactggtacgtattaagtcatcaataaacattacatattatgtttyttattgttgttctttcctgtcctcatgtgtcacctgtattataacatccttccaaccgttc

SEQ ID NO: 185658 - DNA, 599 bp, Homo sapiens
actttggacttgattgagttgatgcaggaatgagttaggacgtggagactcttgggaagggatgattgtattttgcaatgtgagaaggacacgagatttgggagccaggggtagaatgatatggtttggatgtttatccccacctaatttcatgttgaaatgtgatccccagtgttggaggtggagcctggtaggagstgtttgagtcatgggggtggatccctcatgaatggcttggtgccctctttgcagtaatgagttcatacacgagttggttgtttaaagaccctggcttctctcttgcgtcctctctcactgtgtgacatgctgctcccccttcaccctccaccatgattgtaagcttcctgaggccccaccagaagcagaaactggaaccgcacttattgtgtattctgcagaaccatgaaccaaagaaacctctttttctttataaattaccaaacctcgggtattcctttatagcaacacaaaacaaactaacacaatctactttcaaaatgtgaataatcttatgaaggatacagaaaattatacaggacaacataaaacactaccactaagtaataacataactacat

SEQ ID NO: 185659 - DNA, 599 bp, Homo sapiens
actttggacttgattgagttgatgcaggaatgagttaggacgtggagactcttgggaagggatgattgtattttgcaatgtgagaaggacacgagatttgggagccaggggtagaatgatatggtttggatgtttatccccacctaatttcatgttgaaatgtgatccccagtgttggaggtggagcctggtaggagctgtttgagtcatgggggtggatccctcatgaatggcttggtgccctctttgcagtaatgagttcatacacgagttggttgtttaaagaccctggcttctctcttgcgtcctctctcactgtgtgacatgctgctcccccttcaccctccaccatgattgtaagcttcctgaggccccaccagaagcagaaactggaaccgcacttattgtgtattctgcagaaccatgaaccaaagaaacctctttttctttataaattaccaaacctcgggtattcctttatagcaacacaaaacaaactaacacaatctactttcaaaatgtgaataatcttatgaaggayacagaaaattatacaggacaacataaaacactaccactaagtaataacataactacat

SEQ ID NO: 185660 - DNA, 471 bp, Homo sapiens
aaataaacatttaaatcagtgaactttgagcaaaaaaattgccctctataaagtgagtgggcctcatctaattagtcgaagatctaaatagagagagaaaaaaaaaaaaaaaaaaacccaggctccctaaacaaggggaaattctccagttgactgcctttgaactttatctgtatcattggctgtcctggatctctgrgttgctggcccgcagagcagattttgtactcactggcttctataatcttgtgaggcaattcctttatacatgcacatctttttggttttgtctctctggaaaacccagtaccgtactcagtttgattatttcaaatattaaatccatccaaaatttagttttgttttttgctatattgaattcacagatgaatagttggttaaaccggcaatctgatagaggcagagcaagatgtcagaaaagaaagctccaccgatcacctccactgcaag

SEQ ID NO: 185661 - DNA, 533 bp, Homo sapiens
tgaataatatgttgcaatatcatattagaactgggcgatagaaatttttcaataccattataatcttatgggactactatcatatgtgcatgttggccaaaatgtcattatggagtggataactgtaaatatgtgcgaagcaaagatttattattgaagatatgaccactattgttttcaaaacaactaagtattttatgagacctaagaaataaaaatttccacagatagataaatatgtgatttagtttgttactacaatacatctgrctcagaatgtaaaataagtaaataaaatatactaagaaaattatttatttacatacgcaaaagttttataagtaaaacaaatctgtatttatataaatttaacatccttcaataagtgtgaaataatacttctgcatgatgcaaaattattgggtaatttaaattgtgctatttatttttgttgttattccttagaggtttattaaataacaaaacctcaaaatcagtggcatgctagattaggtgaagtatgataaatcata

SEQ ID NO: 185662 - DNA, 552 bp, Homo sapiens
ggctaatgtgatcatattaataacttgggcctctaggagataaataagtcatgaggatggagccctaagagatgggattagaacccttatwaaaggattggaggaagtaggttcactctcttctgtctgttctatcatctcattacatcagaggaatgatattagagaaagctataaatttttcagtttgtatacgttgttgaagtactaatgccattgctcactgtctttctactataacagatgaaaagagatttcgttctcttaaagcaactattcaattaaaaatgagacacagtctggagggactgcattcctaaccatgaatggcccacaaaggtgaagatgctatcagtagtaaacagtaattttatttcctagaatcaccagaagttataaaaactaaactgacttttccttccagctattttatataccttttaaattagatcaaacaaattcacttactatttgttaatagtctaaatttcttttcagtagtgaagtccccaagtagaaaaaaaattattattttatcaaatcaattttggc

SEQ ID NO: 185663 - DNA, 596 bp, Homo sapiens
gctccaggctttgtgactccaggaggcctgtacgtgtgggtcacaggggtcataatggctcaatcacggtgtagccctttcagaggaccttacagtatccattgctgaaaaccctgaagaaggatcacatcacaggactctttgcagaccagtaccagcccagagactggtaggtcttctatgtggctagaccaagaagagcaaaaataatcactgsggttgggctctcaggaagccctatccctaggggaagggggagaacaccaaatcaagggagcaccctgtgggacaaaagaatctgaacagcagcccttgagttccatatcttccctcagacataatctatctaaatgagaagaaccagaaaacaattctagtaatatgacaaaacgaggctctttaacagccccagaagatcaaaccagctcaccagcaattgacccaatccaagatgaaatctctgaattgccagaaaaataagtcagaaggttaattattaagctaatcaaggagacaccagagaaaggtgaagtccaacagcaatcccattactaggtatctacccagaggaaaagaggtaattatacagaaaagat

SEQ ID NO: 185664 - DNA, 411 bp, Homo sapiens
ctattttcttgcatgttccagcctctagtggctgcctgttatacttggcccacaactgaccccttccatccatcttcggcaccagcagcagtggagctaatcctcacagaatctttctatactcttattctgcttcttttttttctttttttcaatttttaaagacagtcttgcttacactaggcctactcagataatctasaataatctccttacttcaatgtcagtttattagcaaccttaattgcatctgcaactctaattccactttatcgtgcaagttatgcaaggtaacagattcacaggttccaaggattaagtcagggacagctttgaggagtcgttgctctgtctatcataatggatatttaaaatcaagactaaaataatctgtgaattgtgtctgcagtc

SEQ ID NO: 185665 - DNA, 442 bp, Homo sapiens
tatacgcaaactagccaactgagcatacattttctgcatacaaattccaagaaaaaaaaaagctaggtaagtcaagatttattcaaaaatatttatatagcatttctgtttaaaaatgacattttgagggaaaatgaatgaaatattacagaataatgaactaaacattctttaagaacactaataaacatcttgaagacagataatacataataaatagatgatatttacataaatataatagatataacaccacttacaaagccaatattaggattttacttccagaaaaatagaggaaaaatagctttcaatatttctctcattaaatgcaactcaaaaccttacacrtcatatataaaactaacctaagacaattctgaaagggggagataataagacatactgactatagaccttaccatccatggaaaggtatctg

SEQ ID NO: 185666 - DNA, 452 bp, Homo sapiens
acttcacatgcaaataatggatggcaaatgctgagcagaaaaatcctaagactgatttaagaaatttcttattacataagaatttaaactggtttctaaaagatagacaatgtctttggagcctctttccaacttctttattgtgaaactagattatattttaatatagttctgccaacaaaatgatagttccttagcagacttcaggaacaggttatttaatacttttatgtaacaatcaggtgtraattctgaaacagatgttcccaacctttctcttcatggtgtgtgaccaaccttaagccagaaatagaaaattttaaatgcagcaatacctggaatgggaaataatcctcctgccaaatctccaattattttctgagtagtttgagagccttagaataaaaagagaataagacccaggaaaaatcgatgttgatgaccttatatac

SEQ ID NO: 185667 - DNA, 450 bp, Homo sapiens
ttcacatgcaaataatggatggcaaatgctgagcagaaaaatcctaagactgatttaagaaatttcttattacataagaatttaaactggtttctaaaagatagacaatgtctttggagcctctttccaacttctttattgtgaaactagattatattttaatatagttctgccaacaaaatgatagttccttagcagacttcaggaacaggttatttaatacttttatgtaacaatcaggtgtgaattctgaaacagatgttcccaacctttctcttcatggtgtgtgaccaaccttaagccagaaatagaaaattttaaatgcagcaatacctggaatgggaaataatcctcctgccaaatctccaattattttctgagtagtttgagagccttagaataaaaagagaataagacccrggaaaaatcgatgttgatgaccttatatac

SEQ ID NO: 185668 - DNA, 550 bp, Homo sapiens
aggcttaatgtacttcttgaggagaaaaagaaatcctctgctctcttatgattttcagctgggtataaaaattaaactgacataagaccaattaataagagaaatgcttctgttttattaaatgtttatacatatatgggaccttgaatactcaaagaagtcactagatcagaaagctagttaacctcttagacaaagaaatgttaaatttgtgatcaaatacaagacaaaggtgctggggcaataagtttttttcaytcctagaagtgactaggagacaaataatgggggtggagggtaaaattagttgaaggtaagagttattttggtaagtttgtttgtacagattcatttcagtgttgatacccagtctctggtgataaggatgttctcattcgggtatggggagaatacctttctcatgagatattttatggcctcttcttaggtagaaaagaatagattagagagccttccctgcatctgatgtttcccaaatgctttcagctcaaaatgactaacatgcgaaagtagcacatttgaagtagca

SEQ ID NO: 185669 - DNA, 537 bp, Homo sapiens
ttgacctagtaatttggattcatgaactctattggatcccagcctgtatttaaagaattctgttatataggatattcttgtctgtgatgagaggttgtggtgatcgtggaaggtgagcagaggaccagagtgagagggaaggtgattggccacacatgccatgccatggccttccataacatacaagtgcacagarcatgccaagcctgaggccagtccagggacagctgtgtgaggtgcaggcacatctggcccctcaaccctattcaggcagaagttgctaattgatcccagcaatccttttctccaggcctgagcatgcctctgaatccttctcaacctgtctgtctatgcggttgctccccatgagtaaacctattgccatccatgagtcagccttgcagatgagcgaaattgagattctgtgagttgcatgcatttggagtttggagctctgcctaattttttgcgtttttctttgactcctgccttctcctgttttgcagtgggtggaaacaacaggtgtagcaggagcat

SEQ ID NO: 185670 - DNA, 537 bp, Homo sapiens
ttgacctagtaatttggattcatgaactctattggatcccagcctgtatttaaagaattctgttatataggatattcttgtctgtgatgagaggttgtggtgatcgtggaaggtgagcagaggaccagagtgagagggaaggtgattggccacacatgccatgccatggccttccataacatacaagtgcacagagcatgccaagcctgaggccagtccagggacagctgtgtgaggtgcaggcacatctggcccctcaaccctattcaggcagaagttgctaattgatcccagcaatccttttctccaggcctgagcrtgcctctgaatccttctcaacctgtctgtctatgcggttgctccccatgagtaaacctattgccatccatgagtcagccttgcagatgagcgaaattgagattctgtgagttgcatgcatttggagtttggagctctgcctaattttttgcgtttttctttgactcctgccttctcctgttttgcagtgggtggaaacaacaggtgtagcaggagcat

SEQ ID NO: 185671 - DNA, 427 bp, Homo sapiens
atcgcggctcaccgcaacctccgcctcctgggttcaaacgattcttytgcctcagcctcccgagtagctgggaccacaggcgtgtgccaccacatccggccaatttttgtagtttttagtaaagacgggtttcaccatgttgggccaggctggtcttgaactcctgacctcgtgatcccggccttgtttattcttttcttgctgaatctgatcaccttctggggggggtttctagttctgggacaaacctgaagcacagcagagaggttaaagagggacacagtgatgcagaggccaaaaaactgtgccatgaggcatccatgccactgtgcaatgcgaatgcagcacttccctgcaaatacacatctttttctttctgctgaggcacatgttccaatgctgacactagccagaatggggaagaatt

SEQ ID NO: 185672 - DNA, 427 bp, Homo sapiens
atcgcggctcaccgcaacctccgcctcctgggttcaaacgattcttttgcctcagcctcccgagtagctgggaccacaggcgtgtgccaccacatccggccaatttttgtagtttttagtaaagacgggtttcaccatgttgggccaggctggtcttgaactcctgacctcgtgatcccggccttgtttattcttttcttgctgaatctgatcaccttctggggggggtttctagttctgkgacaaacctgaagcacagcagagaggttaaagagggacacagtgatgcagaggccaaaaaactgtgccatgaggcatccatgccactgtgcaatgcgaatgcagcacttccctgcaaatacacatctttttctttctgctgaggcacatgttccaatgctgacactagccagaatggggaagaatt

SEQ ID NO: 185673 - DNA, 428 bp, Homo sapiens
atcgcggctcaccgcaacctccgcctcctgggttcaaacgattcttttgcctcagcctcccgagtagctgggaccacaggcgtgtgccaccacatccggccaatttttgtagtttttagtaaagacgggtttcaccatgttgggccaggctggtcttgaactcctgacctcgtgatcccggccttgtttattcttttcttgctgaatctgatcaccttctggggggggtttctagttctgggacaaacctgaagcacagcagagaggttaaagagggacacagtgatgcagaggccaaraaactgtgccatgaggcatccatgccactgtgcaatgcgaatgcagcacttccctgcaaatacacatctttttctttctgctgaggcacatgttccaatgctgacactagccagaatggggaagaattc

SEQ ID NO: 185674 - DNA, 528 bp, Homo sapiens
gtatttaactcaaacgtagaagaaatctggggagactttgagcaggtgatagctggctgtattttaaattacgtgtaggagccagctgtgtgaagaaaacattcagaaaaataaaatagcaagtactgcagctctcagatacctcaaggcagatagggtgacagggatcagtcatttaggaagtagytcattattgctaagtagtgtacgagcatagcctttgttccatctacctttactgaccacaattctgtaccctcaacatcccgatctctccaggcaaatgattaatttcactttggcaaacaatccagggtgaggcaaagtctgcaaaacttttaaacaaaatattcatcattttaattcctttgcccttctcagtaaaattaataataatcccatttacttaatttgggaacagaagctacacatgaaagccttaaaaaaaattgatgaaataaaatctgctaattcatgtgattatctcagaacccaaaagacaatgttttgggtcattttatgccactg

SEQ ID NO: 185675 - DNA, 483 bp, Homo sapiens
agagtgaaataaatgtagtcctcmtcatcatcattattattattattattattattattatttgctattagctttggcaaaaagtgaagaaactaaagctactatggatggattttatcttcagactcccctttttctgtgctaacctaaccatctattactttgaataactgagaaacagctaatatattaaagtcttttaaaaactttatctgcaccattacttattagcattttttcaaattaattttaaattaaatccccttttatgtttaacttcattttaaaccaccatatccactaaatcatggccttgatagattagtacacattaaaataaatacatgaatattaaaatttagtataaatatttatctgtacctgtactaaattactgcatatactataatgggacaagtgccatgtttgtaaagctctgttccatggggcaaaggtgaaaggattcaatccatgttctgagaa

SEQ ID NO: 185676 - DNA, 483 bp, Homo sapiens
agagtgaaataaatgtagtcctcctcatcatcattattattattattattattattattatttgctattagctttggcaaaaagtgaagaaactaaagctactatggatggattttatcttcagactcccctttttctgtgctaacctaaccatctattactttgaataactgagaaacagctaatatattaaagtcttttaaaaactttatctgcaccattacttattagcattttttcaaattaattttaaattaaatccccttttatgtttaacttcattttaaaccaccatatccactaaatcatggccttgatagattagtacacattaaaataaatacatgaatattaaaatttagtataaatatttatctgtacctrtactaaattactgcatatactataatgggacaagtgccatgtttgtaaagctctgttccatggggcaaaggtgaaaggattcaatccatgttctgagaa

SEQ ID NO: 185677 - DNA, 378 bp, Homo sapiens
gatgtgtttcagtgatgtgttcccagtttgctcttggtaacccttattttatatctagctccccatcccaacttttgtacctcttaatttcaagatcagtcacagacatagggatacartatttatacatgaactgtttaacaggttattatgattatacaatggctaatgactatcaaaagttatgctttacataatttataggggtctcacttctctcattgagcccaaactctaccatgaagggaccacaaatggttgcaatgtttgccaaagataaaaggaggatgaaatggagagtaaaagacagagaaatcatgtgactggcttcagaaatgagctcttaaatacgaatattttttgtttgtgtgttaatac

SEQ ID NO: 185678 - DNA, 516 bp, Homo sapiens
atttattttctcaagaattagtagtaaaagtaaaagtaccatcatatgggttggttctatgaaatttcttgatatttatatgagtttttcatacctttactaatattgtttctacttgtcaaaacaaccctgtaatatgggtattgctatatatatataatatatatatatatayacatatatttcatacacaagaaaaataagattatgtggttaatgtctcaatagataacaagtgctaaattgtagtggaaatacaaatactacctcttattttttattttctgaattatttttcagttatctataaaataattgaagaacatttcctaaaaaatcaactgatcaatttctgtttccatcaactgtaaaatttttaatgtttgcagaaatgttcaattggttattttcatcagaaagcaaaggcatttgctaattataaaatagaaatttaataaatctttataatactaattaaaattaggcctactcttactcctaaggcaattgttataa

SEQ ID NO: 185679 - DNA, 516 bp, Homo sapiens
atttattttctcaagaattagtagtaaaagtaaaagtaccatcatatgggttggttctatgaaatttcttgatatttatatgagtttttcatacctttactaatattgtttctacttgtcaaaacaaccctgtaatatgggtattgctatatatatataatatatatatatatacacatatatttcatacacaagaaaaataagattatgtggttaatgtctcaatagataacaagtgctaaattgtagtggaaatacaaatactacctcttattttttattttctgaattatttttcagttatctataaaataattgaagaacatttcctaaaaaatcaactgatcaatttctgtttccatcaactgtaaaatttttartgtttgcagaaatgttcaattggttattttcatcagaaagcaaaggcatttgctaattataaaatagaaatttaataaatctttataatactaattaaaattaggcctactcttactcctaaggcaattgttataa

SEQ ID NO: 185680 - DNA, 449 bp, Homo sapiens
aactctaaaaactattcatcagtcatggaaaaatattgccagktggaaggtaagtaacataggaagagatgtagaacaatgacaattgaaatggttcctgtacccaaaattaatgattgatttgtttgtggagaaaacattttttggtctcaaagcttttggaaaggtggaaaacccgtggaaaagtgtgcaagtggaaaatgtgcaaagtggaaaataaataaatgcaatgcaactgtatataaactccaaacatataattaccctctgacacatatataaatttgttaagaggctatggatagaaaaaataacaatatttacttacgtaattttaggttttcaagcaagtgtaacaatatagatatatcccatatttccttcatccagtttcccccaacagtaatgtttcacatatctacaacgcaatatcacaacagtttatttat

SEQ ID NO: 185681 - DNA, 645 bp, Homo sapiens
tgattgaaataactttgttttgtaaaatgaatttcttggtgattttcttaaaataatataagtgaagatcagtttctagtttgtttccttgatttacttttctatccttatgcaagtgaaatattttcttgactactgtagcaattagtaaatcttaagatcaagtagtatccattcttcaacttttcacttgtccaagaaygctttggaaattctaggtttttgatatttccagagaaattttggaagcaacttgtcaatgtctacaacatttcttgtggattttttttgagattaaacatatacattaaaaaaactgggaagatttgtcatcttaatatttaatcttttgatccataaatagggtgtatatctcaattaatttattttatgttcagtgtaccagaattacatagattttgtttaattacaacaaggtattttatgaatgtttttactactgtaagcataatttttaaaatgtcaatttccaattatttcctgtggtattaatatgatgcatgtttatataataataatatatcttaataacatagtaaaatcacttagttcaactggttgctctgcatattacttaggatatactatataaacaataagagtgaatttttgttccatcattcg

SEQ ID NO: 185682 - DNA, 250 bp, Homo sapiens
tgttatcaaaagaagacagaactgattctagaaatcaaacaaaattttatttaagtggacatttttattttcatccacctgaattctattgtttttgtttcttaacagaacccatatttcccacaagagaaactgtattatttattacagtccaggctattgggtggaggaaaaatagataattcatttcctatatccagtaatawaacttatttgggccttgactatcaaagctttgcatgcccccgag

SEQ ID NO: 185683 - DNA, 587 bp, Homo sapiens
caaatttatgaagtatagaacatcatcatcatcatcatcatcatcatcatcatcatacacactttcctgtagcatttattctaccctctcggttatgtccccaagattgcagctatacattttcccacctctcattccctatttgtgattttccacccagaaatgcatctcatactctacttttattatctctagatccctctactcttaaaattctggagctcgatatgcatatgtttgtttacagaattaacattcttaagagtctgctttctattgtccaaaacaataactagtattaaaaacactttttataatctctatgtcaattcccatattggattttttaataaatttgataaaaggtcatctagagaaaaaaagtcaactaaaaaggaaatttattagttatagacttgaagtttgacaactatggaaggctactggartaatatttttgggcaggtggaaggttatattcttatcccttttaaaatgagaactgtaattacctccagaaaaagctatacattaataagaatgacttgtcagcaaatgctttaaacaatgatgacactatattcaga

SEQ ID NO: 185684 - DNA, 570 bp, Homo sapiens
aataaggtaagatatgtttggaaaactcgaaagataaaaaaggacagagatcctggagcatctgagtgaggggaggagtgagctcaactctgacgygtaaatagcttagaaggcattatttctatcctttcaacaatgaaaacacctggacaaactgaaaatcaatgacttttcttggacctataaactagttgagattacaggcaaatcacaacctcaagctctgcaaaggcaagcttgttcagccaagatctgctacagggagcagattggagtcataaactggtaaaattacttatatgccaattttgataaattgttgaaagctaaatgtagatcactaccaaataaccaaatatcaaatatccagggtaaaagactttaatagagccttatcctagctgaagaggggccgtctttccactccagccctttcaagcttttctgcctcactaaatggaggatctaaaaaaaacagttgataaggagtagggcttcaaggaaatagattgggaacaccacagccaaagaagggagtgggaccaatggacaaagaagttatgccatggc
